United States Patent Application Publication US 2013/0332133 A1 - sequence listing, part 13

SEQ ID NO: 146504 - protein, 178 aa, Unknown
  Bacterial polypetide isolated from the Sargasso Sea
MEQFHGTTIVSVRRGDKVALGGDGQVTLGNIVMKGGARKVRRIYNNQVLVGFAGGTADAFSLLDRFEAKLEKHQGNLTRAAVELAKDWRTDRMLRRLEAMLITADATTTLVITGNGDVLDPEGGICAIGSGGAYAQAAARALVENTELSPREIVEKSLGIAGDMCIYTNHNRIIETIE

SEQ ID NO: 146505 - protein, 220 aa, Unknown
  Bacterial polypetide isolated from the Sargasso Sea
IYPGQTLAIVGETGSGKSTLAKLLVGIETPDSGEILLDGNAVTISDYKKYNHVIRYIFQDPARSLNPHHKVGQMLDDVLRYSTKMDQEQRQDKIHQTLEQLGLMEEHADYYPHMFSGGQLQRVALARALIMDPKLLILDEALTALDPSLRAQIVNLLLELQKNTGLSYLLITNHLRLVRHISDSMLVLHQGKALDYGPTNQVFDNPQHDYSRKLIKSAQS

SEQ ID NO: 146506 - protein, 254 aa, Unknown
  Bacterial polypetide isolated from the Sargasso Sea
MQPVLVAKKLSKKYGKVVALDSADLELYPGEVLGVIGDNGAGKSTLIKVLCGAVIPDSGEILLDGNKVTFTSPIEARKLGIETVYQNLALSPALSITDNMFLGREIRQKGFMGSFLKFLDKKAMADEARKRLSDLGLLTIQNINQLVETLSGGQRQGVAVARATSFGTKVVIMDEPTAALGVKESRRVLELIGEVRSRGIPIILISHNMPHVFEVADRIHIHRLGTRLCVIDPKKHEMSDAVAYMTGAKQPPQD

SEQ ID NO: 146507 - protein, 97 aa, Unknown
  Bacterial polypetide isolated from the Sargasso Sea
MTKNSEFVKFDKVDKSYDGKVLVVKDLQLDIAEGEFITMLGPSGSGKTTCLMMLAGFETPTHGEILLDGNIISNIPPHKRGIGMVFQNYAFIPHMTV

SEQ ID NO: 146508 - protein, 193 aa, Unknown
  Bacterial polypetide isolated from the Sargasso Sea
MNYFVHPTAIIDDGAQIGTDSKVWHFVHVSGGAKIGKNVSLGQNVYIGNKVSIGDNCKVQNNVSIYDNITLEDGVFCGPSMVFTNVYNPRSLVERKDEYRDTIVMRGATLGANCTIVCGVKIGQFSFIGAGAVVNKDVKPYALMVGVPSKQIGWMSEYGEQVPLPLSGKGSYKCPHTGKEYHLNDNDLMVKDK

SEQ ID NO: 146509 - protein, 731 aa, Unknown
  Bacterial polypetide isolated from the Sargasso Sea
MVSTFDVALDSKSQLELESDFDKVLNPQNLDNWMKHMSSKPHYVGSPWSKQNAEYVANKFEEWGFESEIETFEVLVPFPKIKKLKMIAPEQVELKLFEPGLKEDASSNITENILPGYNAFSADGNVTAELVFVNYGIPKDYEELKRMGIDVKGKIVIAKYGGSWRGIKPKVAYENGAIGCIMYSDPKNDGYVVGDVYPTGPYRMEYGIQSGSVVDMPMYPGDALTPGYGAKKDVERLSIEDALTIMKIPVMPISYADALPLLKALKGPVVPDSWKGGLPITYHVGPGPTKVNLHLEFDWSLRTAYHPIGRLKGSVYPDEWIMRGNHHDGWAFGASDPISGMVSLMEEARAIGELVKTGWRPKRSLIYAGWDAEEPGLLGSTEWVEYHRDEIKEKMIVYINTDGTGVGYLSMGGSHSLEKFVNEIIREVNDPVHEVSLESRLRSRLRLREYNASDYRDQKESDRDDLRLYPMGSGSDYTAFLHHAGIPSLNMAFGGESGGGSYHSLYDTYDFYKRFNDSDFKYGITLAKVNGRLVLRLSEADILPFRFVNMVDNIGKFIDDNKQLADEIKKHTQLRNKLLDKNDFTIASNPKKMYAPPDRLKEVPDFDFKPLEDAFDRLTNSAWNYEKALSNYKKGSLSAEKKSELNDLLKDVEQAFISERGLPRRDWFKNMIYAPGYYTGYGVKTLPGVREGLEERKWNEVEDYIQEVAKALDRAAAKINSAAKLLTKIQQ

SEQ ID NO: 146510 - protein, 261 aa, Unknown
  Bacterial polypetide isolated from the Sargasso Sea
MIEVRNVWKEYGDQVVLERLNLRVEEGEFCSMVGASGCGKSTFLRLLLGQERATRGEILLDGAPLPAEPDEHRGVVFQRYSVFDHLSVVRNVMLGLELRRAKFTGRLFGAQRRAARDEAVAMLKRVGLGAALDKFPQQLSGGMQQRLAIAQALMMKPRVLLLDEPFGALDPGIRKDMHDLLLGLWRESRLTIFMVTHDLKEGFTLGSRVLVFDKVRVDPQAPGAYGARITYNIPLDHSRDSASSIHMAQAVVEGATRVETV

SEQ ID NO: 146511 - protein, 220 aa, Unknown
  Bacterial polypetide isolated from the Sargasso Sea
MIKVKNLSKSFNNQLVLDNISIEIKKGDFISIVGPSGAGKTTFLNILGTIDEYDKNPKTSILFNNIDITNLDDDKLSSFRNKEIGFIFQFHQLLPELTAQENILLPSMIGKRSEKESLEKLMKLSSILEINHILNKKPEFISGGEKQRVAVARALINSPSILLADEPTGNLDSKNAEKIQKLFKKINKELNVTIVLVTHNKAFSKIADKCLVLSDGKWSK

SEQ ID NO: 146512 - protein, 178 aa, Unknown
  Bacterial polypetide isolated from the Sargasso Sea
MEQFHGTTIVSVRRGDKVALGGDGQVTLGNIVMKGGAKKVRRIYNGKVMVGFAGGTADAFSLLDRFEAKLEKHQGNLTRAAVELAKDWRTDRMLRRLEAMLIAADATTTLVITGNGDVLDPEGGICAIGSGGAYAQAAAKALVDNTELSPREIVEKSLEIAGDMCIYTNHNRVIETIE

SEQ ID NO: 146513 - protein, 337 aa, Unknown
  Bacterial polypetide isolated from the Sargasso Sea
MEIFISFITDYGLFLAKALTILIFLILVINAIAGTKKTKPKGFIQVKSLNNKFDDIERNVKKDLLDKKSFKLFLKQQKSKKQNNSKKLFILDFVGNIKASEVESLREEITAIILASESSNDEVLIRLENAGGTVHEHGLAASQILRLKKNKIKVTISVDKVAASGGYMMACTGNKILAAPFSIIGSIGVIAQIPNLNRLLKEKGVDFEQHTAGKYKRTVTMFGKTTDQDRKKLKDQLENIHTLFKNFISKERPKVDIENVATGEYWFGSDAIKLKLVDEIITSDEYILLKKNDYDLINIKYNFPKTFGEKISSLSSRAFNSIYDNISQKIFEKNIFK

SEQ ID NO: 146514 - protein, 172 aa, Unknown
  Bacterial polypetide isolated from the Sargasso Sea
MTTIVSVRRDNKVVIGGDGQVSLGNTVMKGNARKVRRLYNGKVIAGFAGGTADAFTLFERFESKLEMHQGNLTKAAVEMAKDWRSDRALRKLEALLAVADETASLIITGNGDVVQPENDLIAIGSGGNFAQSAATALLENTDLSAREIVEKSLTIAGDICVFTNNFQTIEEL

SEQ ID NO: 146515 - protein, 68 aa, Unknown
  Bacterial polypetide isolated from the Sargasso Sea
MTSNFLEINNLNKKFGNINALKNVSLNVSKGEVICIIGPSGCGKSTLLRAINWLTPPDSGEVKLENNI

SEQ ID NO: 146516 - protein, 161 aa, Unknown
  Bacterial polypetide isolated from the Sargasso Sea
MSNFIEIKNLKKTFNISSNNELLLFENLNFNISKNSTTSIIGPSGCGKSTLLNIIGLLDSSFYGEYFFDGVLINNINNKKLNEIKNLKIGFVHQFFHLIPELSVMENIILPALIKKDKISDINNDAENLLKVFEIFDKKNMKPNKLSGGEQQRVAIARSLI

SEQ ID NO: 146517 - protein, 573 aa, Unknown
  Bacterial polypetide isolated from the Sargasso Sea
MKRPLFSMLRPFAVPLVAAVVLQALAGVASLVPWLALGWFADAWRATAQLDATARGWLVAAVVAGVCWLGGQTVALHLTHRVDADLADRLRRRLADHLQRLPLGWFARAGSDRIARHVDQDVRALHQLVAHAPADVTQLIVVPCAALACLLYLNPALLAFALVPLVAGAALFRWMRSARFAPAVASRNAALEQLMGDYAQLAQNPALVRQYPGAGIEAAALASTGRFEQAFSVWVGRVGGPGACTQVLLGTPFLLAWVVFGAMWLTSGRLPVGELCAFALLIWAVAAPVRALGHGADALREARAAAERLDALLAQPALPEPANGAAKVPRDASIEILGASVDIDGTPILRDIDAMIAAGTTTAIVGPSGAGKSTLLMLLARFMDPDHGTVRLGGADLRLLASDTLREQVAMVFQQAAALDVSIAANIALYRPDADRDAIRAAARAACLDERIDTLPGGYDCVCGRDARLSGGELQRLAIARALLSPAPLLLLDEPASALDPHTGLALRNALRGDRRTRVIVSHDLDAIRHADQILVMDRGRIVERGTHAALLAARGLYARLWRERGAAGGEAA

SEQ ID NO: 146518 - protein, 207 aa, Unknown
  Bacterial polypetide isolated from the Sargasso Sea
MNKIYRLIFFLQVFLLGCTPRVINENEITKKINSLDLNIFAKTGEKKYSIKSPYSIYDNIKNKFQFKNTTINIFYDGKTKYVINSDESTLSNKNNLVELIGNVRLKTIDQDDDYLYADYFMWNIDEAKYLLTGDVRFENKNVILTSVKAVLGSDNVIEFFDPVKYIIKDDNNENIYETNSENAYYDMNKESLSFKAKDKRVRSRIYF

SEQ ID NO: 146519 - protein, 142 aa, Unknown
  Bacterial polypetide isolated from the Sargasso Sea
MSKNPEFVKFDKVDKSYDGKVLVVKDLQLDIAEGEFITMLGPSGSGKTTCLMMLAGFETPTHGEILLDGNIISNIPPHKRGIGMVFQNYALFPHMTVYENLAFPLRVRKVEKDEIDKKVDKALSMVSLNGFETRMPSPTFRW

SEQ ID NO: 146520 - protein, 107 aa, Unknown
  Bacterial polypetide isolated from the Sargasso Sea
YVLARTIAIEPEIILMDEPCSALDPISTLKIEETMHELKKNYTIIIVTHNMQQALRVSDMTAFFNAVEYEDGDGGKVGYLAEFNSTKKIFNSPKEKTTQEYISGKFG

SEQ ID NO: 146521 - protein, 50 aa, Unknown
  Bacterial polypetide isolated from the Sargasso Sea
MSKIKAENVNVYYGTKQALFDVSIEIAEKEVTALIGPSGCGKSTFLRSLN

SEQ ID NO: 146522 - protein, 280 aa, Unknown
  Bacterial polypetide isolated from the Sargasso Sea
ALLIIGTLGLGLYLLGNDQIGAGIVAASLPLTLRISEMSWWIMWEVSYLFENIGTIDEGRLTISQKPKVIDAPDAKELSIKGGEINFSKVKFNYGKRGGLFEELSLKINKGEKIGLVGKSGAGKSSILNLLLRFYDVDSGKILIDGQDISLVTQESLRSQIGVVTQETALLNRSIYENIAYGEPSAPKQKIYEAAKKAEAFEFIKSLEDKDGRKGFSAYVGERGVRLSGGQRQRIAIARVLLKDAPILILDEATSALDSEIEAAIQNQLNNILQDKTALV

SEQ ID NO: 146523 - protein, 178 aa, Unknown
  Bacterial polypetide isolated from the Sargasso Sea
FPWKTLQENVAYGPIVQKIMPKNEALDKASSLLEEAGIGDMMKKYPGEVSSGMARRAEIVRALINNPKVLLLDEPYRAMDALTKSIMHESLLEVYDKTNVTIFFITHDLEEAIFLGDKVVVMTTRPARTKLILDVDIPRPRNYQVLSSENFRLLVNEAKEAVHEEAIKAFEAGERELA

SEQ ID NO: 146524 - protein, 194 aa, Unknown
  Bacterial polypetide isolated from the Sargasso Sea
MIEFRHVSKTYGQQKAVDDLNLHLGEGSFSVLIGTSGSGKSTTLKMINRLVEHDSGQIRFAGEEIRSLPVLELRRRMGYAIQSIGLFPHWTVAQNIATVPQLQKWSRSRIDDRTDELMALLGLEESLRHRYPHQLSGGQQQRVGVARALAADPQVLLMDEPFGALDPVTRGALQQEMKRIHRLLGRTIVLVTHD

SEQ ID NO: 146525 - protein, 181 aa, Unknown
  Bacterial polypetide isolated from the Sargasso Sea
MTKSVPSSIDSISYKEHESHVEIVNLSKVFPISRPSLFNKKTENYVALEGINLDIKKNTFVSLIGPSGCGKSTLLNLLAGLDDFTSGEIFIEGKPLVGPGPDRGIIFQNYALMPWLTAAGNIEYALETACPELSTSQRREKARYFLNMVGLERSMNKFPKQISSGMKQRVAIARALSINPS

SEQ ID NO: 146526 - protein, 249 aa, Unknown
  Bacterial polypetide isolated from the Sargasso Sea
MYKAFNAFVVGQRYLQASYENFHSLVKISEFVDSQESINYVKRSKARLDYDLVFESVFYKYENAEHFLLSDVSFELKPKTTTKVIGKSGSGKSTLLRLMAGLIEPQSGNIKNNLGVVGYVSQHPYVFDDTIRNNISLWNSDITNEKIIEVLNSVGLESLGELNLDTIIGETSGFQLSGGQIQRLCIARELTKKIDTLILDEPTSSLDLYNTGMVSRTLDDLHSTINIIIITHDDDIDIRFDNLIALDKD

SEQ ID NO: 146527 - protein, 208 aa, Unknown
  Bacterial polypetide isolated from the Sargasso Sea
MLDLKEISYQPQTGEKKIIDNLNLKVYENEIILIYGNSGSGKTTLLEIISGLTNPQKGKITWKNKILSSRQRRWFCGVVFQFPERYFIGTSIGKELKIGHKSLREENIEIVLNKVGLTKLNLTQPPEQLSGGQQRRLAVAVQLLRNPSILLLDEPTAGLDWSMRNDVKNLILDLKNKNTIIIVTHEPALFEGIVSRMLILEKGKIKHF

SEQ ID NO: 146528 - protein, 128 aa, Unknown
  Bacterial polypetide isolated from the Sargasso Sea
MPKNPEFVKFDKVDKSYDGKVLVVKDLQLDIAEGEFITMLGPSGSGKTTCLMMLAGFETPTNGEILLDGNIISNIPPHKRGIGMVFQNYALFPHMTVYENLAFPLRVRKIEKDEIDKKVDKALSMVSL

SEQ ID NO: 146529 - protein, 108 aa, Unknown
  Bacterial polypetide isolated from the Sargasso Sea
MSNNPEFVKFDKVDKSYDGKVLVVKDLQLDIAEGEFITMLGPSGSGKTTCLMMLAGFETPTNGEILLDGNIISNIPPHKRGIGMVFQNYALFPHMTVYENLAFPLRVR

SEQ ID NO: 146530 - protein, 242 aa, Unknown
  Bacterial polypetide isolated from the Sargasso Sea
GGDSEVAALSGIDLTVEAGEFISLIGPSGCGKSTLLRLIGDLLAPTTGVVTVFGKSAHEARLDQDYGMVFQHAGLFDWRRVLANIELPLELRGWSRDERSARSAEMLGLVRLEDFGAHYPRQLSGGMQQRVSIARALSFQPKLLLMDEPFGALDEMTREHMQLELLRIWRETQTTVVFVTHSVPESAFLSNRVVVLSPRPGRIHSVVDVDLGDRSDDTRQDPAFFEKATEIREALRAVEGGG

SEQ ID NO: 146531 - protein, 271 aa, Unknown
  Bacterial polypetide isolated from the Sargasso Sea
MITPMMMLLKPLKSLTDVNNQFQRAITACHSLFGLLDTEPEQDTGTRTLERARGEIEFRNVTFTYPTKDTPALHNVSFKVEAGKSVALVGRSGSGKSTIASLLTRFYDIEQGEILLDGVNIRDYRLSELRKQYALVSQHVHLFNDTVASNIAYAAEEKYSLDEIKQAARIAHADEFVSKMSNGYDTVVGENGASLSGGQRQRIAIARALLRDAPVLLLDEATSALDTESERHIQAAIDELCKARTSLVIAHRLSTIEKADEILVIDEGHIV

SEQ ID NO: 146532 - protein, 210 aa, Unknown
  Bacterial polypetide isolated from the Sargasso Sea
LKGLHKKFGSITALRDVSLNVSKGEVICIIGPSGCGKSTLLRTINWLSPPDKGEVILQGEIVGSSSSSKLTIEQSKLLNNLRARMGMVFQQFNVWPHLNVLENVVRAQVVVAKRNRKEAESKALKILDEVGLTEKVDEWPDNLSGGQKQRLAIARSLAMDPILMLLDEPTSALDPELVAEVLSVLKRLVDKGMTMLVVTHELGFASKLEI

SEQ ID NO: 146533 - protein, 98 aa, Unknown
  Bacterial polypetide isolated from the Sargasso Sea
MSKNPEFVKFDKVDKSYDGKVLVVKDLQLDIAEGEFITMLGPSGSGKTTCLMMLAGFETPTHGEILLDGNIISNIPPHKRGIGMVFQNYALFPHMTVY

SEQ ID NO: 146534 - protein, 157 aa, Unknown
  Bacterial polypetide isolated from the Sargasso Sea
GLPLTIYENVAFAPRRAGLKNRAELDDLVEKCLTQAALWDEVKDRLNSLGTKLSGGQQQRLTIARALSHQPDILCLDEFSIAIDPVTTMRIEAVLQELKSELTVILVTNLVQQARRLANRTAFIFNSKLIEIDDTERIFSGEARQEKTNQYVSGVFG

SEQ ID NO: 146535 - protein, 95 aa, Unknown
  Bacterial polypetide isolated from the Sargasso Sea
MGLEKISTSGIVLKGVRKRFELARGQSVEAVGHVDLDIARGEFIALIGPSGCGKSTLLRMIAGLEKPSHGDIAIAGQTPEECIKQQKLGIAMQEH

SEQ ID NO: 146536 - protein, 223 aa, Unknown
  Bacterial polypetide isolated from the Sargasso Sea
EGISFDVKKGEVICIIGPSGSGKSTLIRCINALNDINSGSIKVHGREVHDPKLDKLELRKKVGMVFQQFNLFPHKTALENVMMAPVLVLKQNKEEVRKRAEDLIRKVRLQGKEDSYPGELSGGQQQRVAIARSLAMNPDVMLFDEVTSALDPETVKEVLVTIKELAQEGMTCILVTHEMGFAKEVADHIYFTDNGVIVEHGPPSTFFNESSDPRTREFLSQIL

SEQ ID NO: 146537 - protein, 57 aa, Unknown
  Bacterial polypetide isolated from the Sargasso Sea
NEYSIVIVTHSMQQAARVSIRTAYFHLGKLIEVGKTKEIFTRPRHNQTEAYISGKIG

SEQ ID NO: 146538 - protein, 179 aa, Unknown
  Bacterial polypetide isolated from the Sargasso Sea
MSEAVIKCESVYKIFGENAKKMLQEANGNVDAKTFQENGCIVGVNNASFEVAKGEILVVMGLSGSGKSTLLRCISRLTDATGGKIFIEGQDLLQLNNKDLIDLRRNKMGMVFQSFALLPHKTVVENIAFPLQIKGINTDDSISKAMDMVKLVGLDGRENYFPKGLSGGQQQRVGIARSL

SEQ ID NO: 146539 - protein, 195 aa, Unknown
  Bacterial polypetide isolated from the Sargasso Sea
MSTATTEHAVHADGIWKIFNEGQPNEVTALQDVHLTVESGEFISLIGPSGCGKSTLLRVIADLTDATKGDMRVAGHTPHEAREQQLYGMAFQQAALFDWRTVQRNVELPLELQGWDKAKRKARALELLDMVQLADFAEHRPWELSGGMQQRVAIARSLAVDPTILLMDEPFGALDEMTRERMQNELLRIRKGTGK

SEQ ID NO: 146540 - protein, 91 aa, Unknown
  Bacterial polypetide isolated from the Sargasso Sea
AISVKPEVILMDEFCSALDPIATAQIEELIDELKKDHTIIIVTHSMAQAARVSQNTGFFHLGELIEHGSTDKIFKNPENKRTQDYITGRFG

SEQ ID NO: 146541 - protein, 84 aa, Unknown
  Bacterial polypetide isolated from the Sargasso Sea
MIKIKAKDVDVFYGKKQALYNISLDIEENQVTALIGPSGCGKSTFLRCLNRMNDVIDICNVKGEILINDFNINDKSCDVVRLRE

SEQ ID NO: 146542 - protein, 127 aa, Unknown
  Bacterial polypetide isolated from the Sargasso Sea
MNDPILSISELERYFYQGDKKINILINAELNLYPGKLTALIGPSGAGKTTLLNIAGLLEKPNSGNVKICNQDTFKLSEKERTLIRRKHIGFVFQSHRLFQEFSAIENIIIPQMVKWIRICEAKKRAS

SEQ ID NO: 146543 - protein, 89 aa, Unknown
  Bacterial polypetide isolated from the Sargasso Sea
MTFTSHIADVPGDQVAISCEDVTISYGSFEAVKGVFLSVPRGQVTAFIGPSGCGKSTVLRALNRMNDLIPSCRLTGRVVYEGQDLYAAN

SEQ ID NO: 146544 - protein, 63 aa, Unknown
  Bacterial polypetide isolated from the Sargasso Sea
MNEIKIKSKNLNVYYGEKQALFDVNLDLNEKEVTALIGPSGCGKSTFIRCINRMNDVIDICKV

SEQ ID NO: 146545 - protein, 226 aa, Unknown
  Bacterial polypetide isolated from the Sargasso Sea
EVLKGISFDVKKGEVICIIGPSGSGKSTLIRCINALNDINSGSIKVHGREVHDPKLDKLELRKKVGMVFQQFNLFPHKTALENLMMAPVLVLKQNKEEVRKRSEDLIRKVRLQGKEDSYPGELSGGQQQRVAIARSLAMNPDVMLFDEVTSALDPETVKEVLVTIKELAQEGMTCILVTHEMGFAKEVADHIYFTDNGVIVEHGPPSTFFTESSDPRTREFLSQIL

SEQ ID NO: 146546 - protein, 203 aa, Unknown
  Bacterial polypetide isolated from the Sargasso Sea
MGRNDSGKTNLLRFLAGLSSPAKGRLKLNEKNITNTGAQNRSVALVVQHFVNYPNWNVKQNIISPMLPKGLSKQEQDKRATNIAEKMGLGELLDRMPNELSGGQQQRLAIARALAKEAQVLLLDEPFANLDYKLRELIAFELQELLAEQGTMVIYATSSPREAFAMGNEILLLANHQKLQAGPILDLYQNPISKEAADLFSEP

SEQ ID NO: 146547 - protein, 90 aa, Unknown
  Bacterial polypetide isolated from the Sargasso Sea
IKNVNMDISKNKITAFIGPSGCGKSTLIRTFNRMNDLILGAKVNGTINYQGVDLYDKMVDPVHVRRRFGMVFPVPHPFPPPIKENITFGL

SEQ ID NO: 146548 - protein, 218 aa, Unknown
  Bacterial polypetide isolated from the Sargasso Sea
RCKKGEVICIIGPSGSGKSTLIRCINALNDINSGSIKVHGREVHDPKVDKLELRKKVGMVFQQFNLFPHKTALENVMMAPVLVLKQNKEEVRKRAEDLIRKVRLQGKEDSYPGELSGGQQQRVAIARSLAMNPDVMLFDEVTSALDPETVKEVLVTIKELAQEGMTCILVTHEMGFAKEVADHIYFTDNGVIVEHGPPSTFFTESSDPRTREFLSQIL

SEQ ID NO: 146549 - protein, 220 aa, Unknown
  Bacterial polypetide isolated from the Sargasso Sea
MIEIKNLNKSYNNQIVLNNLSMKIDKGDFISIVGPSGAGKTTLLNILGTIDNFDKNDKTSLLFEKTDLTKLNDKELSSFRNKKIGFIFQFHQLLPELTAKENILLPSMIGKFDSSKSHDNLNKLSSILDINKILDKKPEFLSGGEKQRVAVARALINNPSLLLADEPTGNLDSDNAKKIQELFKKINKELGITIVLVTHNEKFSKIARKCLVLKDGKWSK

SEQ ID NO: 146550 - protein, 251 aa, Unknown
  Bacterial polypetide isolated from the Sargasso Sea
MGKIEAKNIVKYFQHDGKPLKAIGGVNLTVNDGEFVCIVGPSGCGKSTFLRILAGLEKPDDGEILLDGKKLVNTGPDRIMVFQEGALFPWLTVEDNVEYGLKVAGIPEKERHDISKRYLDMMQLSQFANSYTYQLSTGMKQRVAIARALVMDPDVLLMDEPFAALDSQTRDLLLVEMQIIWQKTKKTIIFVTHNVPEAAVLGSRVAVFSHRPSVVKKSLDIDYKRPRVAEDENLAQFEKQILSALRHQGPK

SEQ ID NO: 146551 - protein, 251 aa, Unknown
  Bacterial polypetide isolated from the Sargasso Sea
MGKIEAKNIIKYFEHDGKPLKAIGGVNLTVNDGEFVCIVGPSGCGKSTFLRILAGLEKPDDGEILLDGKKLVNTGPDRIMVFQEGALFPWLTVEDNVEYGLKVAGIPEKERHDISKRYLDMMQLSQFANSYTYQLSTGMKQRVAIARALVMDPDVLLMDEPFAALDSQTRDLLLVEMQMIWQKTKKTIIFVTHNVPEAAVLGSRVAVFSHRPSVVKKSLDIDYKRPRVAEDENLGQFEKQILAALRHQGPK

SEQ ID NO: 146552 - protein, 93 aa, Unknown
  Bacterial polypetide isolated from the Sargasso Sea
MNNVKIKSKNLNVYYGEKQALFDVNLDLNEKEVTALIGPSGCGKSTFIRCINRMNDVIDICKVSGNIEIDGVEINDKNLDVVSLRERVGMFSK

SEQ ID NO: 146553 - protein, 243 aa, Unknown
  Bacterial polypetide isolated from the Sargasso Sea
MFDNQKKSKSLTPIVVSNLSLLLGKTKILDKIKCKIHNESIVAVLGPNGAGKSMFLKTINGLIEVDSREINFNSIEINDYIRKEIAMVFQKPTLLRRSVFENMQFVLERKNKLSNIEIMKLLQRVSLDTFKDKPARLLSGGEQQRLSLARALLINPSLLLLDEPTANLDPYSLNLIEEIILDENKKGKTIILTTHDMGQAKRLAKEILFFNKGKLLEQTKAINFFKKPNTKEAQSYINGKILL

SEQ ID NO: 146554 - protein, 77 aa, Unknown
  Bacterial polypetide isolated from the Sargasso Sea
MFCLDPIATAKIEELIDELKKTYTIVIVTHSMAQAVRVSQKTGFFHLGKLIEVGKTEKIFKNPDNKMTQDYITGRFG

SEQ ID NO: 146555 - protein, 84 aa, Unknown
  Bacterial polypetide isolated from the Sargasso Sea
MIKISAKNVDVFYGKKQALFNINLDIEENQVTALIGPSGCGKSTFLRCLNRMNDVIDICKVSGEIVINDFNINDKGCDVVRLPR

SEQ ID NO: 146556 - protein, 79 aa, Unknown
  Bacterial polypetide isolated from the Sargasso Sea
MSKIKAENVNVYYGSKQALFDVSIDIAEKEVTALIGPSGCGKSTFLRCLNRMNDVIEICRVEGSIKMDNLELNSRKLDV

SEQ ID NO: 146557 - protein, 80 aa, Unknown
  Bacterial polypetide isolated from the Sargasso Sea
GQQQRVAIARAIINNPAILLADEPTGALDSKTTEDVLDLFDKLHESGITIVLVTHEDEVANRAKKIAKFKDGRIVELKVN

SEQ ID NO: 146558 - protein, 130 aa, Unknown
  Bacterial polypetide isolated from the Sargasso Sea
SVDEFGGRYPSQLSGGQQQRVGVARALAAAPEVILMDEPFGALDPITRADLQEEFKRIQQQLNLTVIMVTHDMTEALLMADRIAVMKDGQILQIGSPKELLNHPEHDYVKRLIEMPRRRASRLEELMRTL

SEQ ID NO: 146559 - protein, 309 aa, Unknown
  Bacterial polypetide isolated from the Sargasso Sea
MLDTLTPGTFSEILASMMFLLKPLKQLTTVNSDFQRGMAAAANVFLVLDEKPEQDTGSIELKQVTGTIEIKDLSFNYPGHEKQVLKQINIKVEPGQTVALVGRSGSGKTTISSLLPRFYEIEQGEILLDGINTKDCTLDSLRSQMAVVSQQVVLFNDTIANNIAYGYRGELSPERLLEVAEKAHVMEFVSQMPMGLDTEIGENGVTLSGGQRQRIAIARALLRQAPVLILDEATSALDTESERKIQGALDELFKGRTSIVIAHRLSTIENADQILVMDQGQIVEQGTHQSLLAQNGYYAQLYKMQFSEV

SEQ ID NO: 146560 - protein, 240 aa, Unknown
  Bacterial polypetide isolated from the Sargasso Sea
MIEIDNLIKSYGQLDVIKGINMNVEKGEVISIIGASGSGKSTLLYCINALENIQGGRIIVDGIDAHAKETDVNALRTKIGMVFQQWNAFPHLTTLENVALAPRIVSKKSKKDAEKLAKEQLDHVGLADKFNVYPRKLSGGQQQRLAIARALAMEPDYMLLDEVTSALDPELVGEVLDTLHLLSKEGMTMLVVTHEISFAREVSDRVAFFKDGLIEEIGPPEQVIQNPQSPHTQQFLSNVR

SEQ ID NO: 146561 - protein, 88 aa, Unknown
  Bacterial polypetide isolated from the Sargasso Sea
MIKNTKKSQKKNILSLEDVSISYGTFEAVKNVFLNFKAGDITSLIGPSGCGKSTVLRALNRMNDLIPNCSLKGTVLFDGTNIYDKRSR

SEQ ID NO: 146562 - protein, 68 aa, Unknown
  Bacterial polypetide isolated from the Sargasso Sea
MSKIKAENVNVYYGSKQALFDVSIDIAEKEVTALIGPSGCGKSTFLRCLNRMNDVIDICRVEGSIKMD

SEQ ID NO: 146563 - protein, 246 aa, Unknown
  Bacterial polypetide isolated from the Sargasso Sea
MNPEQPIVSLKDVHKSFGDLEVLKGISFDVKKGEVICIIGPSGSGKSTLIRCINALNDINSGSIKVHGREVHDPKLDKLELRKKVGMVFQQFNLFPHKTALENVMMAPVLVLKQSKEEVRKRAEDLIHKVRLQGKEDSYPGELSGGQQQRVAIARSLAMNPDVMLFDEVTSALDPETVKEVLVTIKELAQEGMTCILVTHEMGFAKEVADHIYFTDNGVIVEHGPPSTFFTESSDPRTREFLSQIL

SEQ ID NO: 146564 - protein, 315 aa, Unknown
  Bacterial polypetide isolated from the Sargasso Sea
MAPIHRPNSAEAIMQNPQAVPDYLMQSDAVRERFERLKTRDVILDVRHVGKRFATPQGECTALDDISFRTYRREFVCVIGPSGCGKSTLIRILAGLDAQTSGEVLLDGKPVEGPGADRGMVFQGYTLFPWLTVKKNVMFGLRMNGSSSGQAEREALQWLDLVGLTRFADVYPHQLSGGMKQRVAIARALANRPRILLMDEPFGALDAQTRARMQTHLLDIWRNIDVTILFITHDLDEAIFLADRILVLKANPGAVQELIEVPVPRPRDYSQVNTPEFVATKARLEALIHPKEAVAIDDGVRPHMIRMTDVSDNVE

SEQ ID NO: 146565 - protein, 63 aa, Unknown
  Bacterial polypetide isolated from the Sargasso Sea
LIDELKKTYTIVIVTHSMAQAVRVSQKTGFFHLGKLIEVGKTEKIFKNPDNKMTQDYITGRFG

SEQ ID NO: 146566 - protein, 242 aa, Unknown
  Bacterial polypetide isolated from the Sargasso Sea
MAVVRTQQVKKVYEMGDFKLEALKGVDLEVEQGEYLSIMGPSGSGKSTLFNMIGGLDKPSDGKVYIDDVDVAQLDAYELAWLRCRKIGYIFQSFNLIPVMTALENVTLPMVFAGLTSDEARDKGVDLLTKVGLEERISHKPYELSGGQQQRVAVARAFANDPAIILADEPTGNLDLHTGTEIIELLRLMNKESGVTVISATHDHKMLSVSDRVVWVRDGIVDRIINRADLKIEVGTIDGEAE

SEQ ID NO: 146567 - protein, 210 aa, Unknown
  Bacterial polypetide isolated from the Sargasso Sea
RQVQVLKNLNFTIKKGELIALTGPSGSGKSTLLHLIALMEKPTYGKIFFSDKNLNNLSSREINKIRKYNISLIFQNNNLISDLNVIENVMLPLLIRNEDKKKSYEKSKKILSLVNLSNRLDFFPGDLSGGEQQRVAIARSLIAETDLILADEPTGNLDFKTSKEIFNYFLKLKKMNKTILFATHNRELANKADYKLSIFNGNIKRVNGKK

SEQ ID NO: 146568 - protein, 175 aa, Unknown
  Bacterial polypetide isolated from the Sargasso Sea
KTSLIMLIGGLEKASSGKIEFKDFEISSLKEDEISEIRRKDIGIVFQSFYLIPNYTAIENVSLALEINKIKDPINKAKEILDKFGLGKRLNNLPSQLSGGEQQRVAIARSIVMKPELILADEPTGNLDSENSELISNILFDYVKEENASLIMVTHDNKLANLSKRIIKIKDGKIE

SEQ ID NO: 146569 - protein, 123 aa, Unknown
  Bacterial polypetide isolated from the Sargasso Sea
MKNVAIPLLIRGNDHSSSIKKAAKILSRVNLGHRLDHFPSDLSGGEQQRVAIARSLASDTSIILADEPTGNLDEKTSEEVFSYFLKLKQKNKTILIATHNRELARKADYTLRLTDGNIKRVNA

SEQ ID NO: 146570 - protein, 211 aa, Unknown
  Bacterial polypetide isolated from the Sargasso Sea
NYKIDNKSINILKNISFEIDYKETISIVGESGSGKTSLIMLIGGLEQASSGKIFFKDLEVSSMSEDEISEIRRKDIGIVFQSFYLIPNYTALENVSLALEINKLDNPIKKAKEVLDRFGLSNRFNNLPSQLSGGEQQRVAIARSVVMKPELILADEPTGNLDSENTETISQLLFNYVKDENASLIMVTHDNNLANLTKRKISIKDGIINEN

SEQ ID NO: 146571 - protein, 242 aa, Unknown
  Bacterial polypetide isolated from the Sargasso Sea
MSEHNDNPAVRLSNLDFCWGSTKNDFQIKIKDFQLKKNESGILVGPSGSGKSTLLSLLCGILRPQKGTTQILGENIESISNSERDRFRSDHMGIIFQQFNLVPYLSAIDNVLLPLYFSPARRQAAGKIQSKINSEAKQLLDTLGIASKTLGTQKAVTLSIGQQQRVAAARAFIGSPELIIADEPTSSLDEENQNEFLNQLFKQKEQTGASLLMVSHNTHIAKRFDRLIEIEKISDISVEKEK

SEQ ID NO: 146572 - protein, 230 aa, Unknown
  Bacterial polypetide isolated from the Sargasso Sea
MNKILSNYLELFDVSYHYKNKLENVKIFKNLNLTIYPGEMVALLGPSGSGKSTLLNCIGLLDKFVSGKFKILNKDYSSLTESEITNIRLNDIGFVFQNHRLFQEFSALENIIIPSLIKKISFDEAKKKATQILTYLNLEHRINHRPAKLSGGESQRVAIGRALSNNPKFILADEPTGNLDKDNTLLIFNILKKITLDTEKSCIIATHNNFLAEKMDRIFLIENQNIKILK

SEQ ID NO: 146573 - protein, 159 aa, Unknown
  Bacterial polypetide isolated from the Sargasso Sea
MSEQNDKPAIRLSKIDFCWGSVSYDFRIRVKDFQLKKNESGILVGPSGAGKSTLLSLICGILRPQKGITQILGENIESMPDSQKDRFRADHMGIIFQQFNLVPYLSAIDNVLLPLYFSPDRREASGEIQSKTNDEAKRLLDALGIASKTLGMQKAATLS

SEQ ID NO: 146574 - protein, 203 aa, Unknown
  Bacterial polypetide isolated from the Sargasso Sea
MTKNLIELKNISKTFLSGEKRIDLFSNVNLKIKNGDLIALVGPSGSGKSTFLHMMALLEEPNVGKILLSEKDIGKMSESEKDLVRRDKISIIFQNNNLLNDFTALENVLMPLYIKGEINPGTRDKGLKMLTDVKLNKRANHFPSELSGGEQQRVAIARSIISDTDLILADEPTGNLDRKTSKNVFNYFKKLQKKNKAVLFATQ

SEQ ID NO: 146575 - protein, 170 aa, Unknown
  Bacterial polypetide isolated from the Sargasso Sea
EPNKGKIYLSDIDTGDMTESEKDNVRREKISIIFQNNNLLNDFTALENVLMPLYIKGNINQNTREKGLKILTDVKLNNRANHFPSELSGGEQQRVAIARSIISDTNLILADEPTGNLDRKTSKNVFNYFKNLQKKNKAILFATHNRELANMADYKLSISNSKLLRSNGKK

SEQ ID NO: 146576 - protein, 227 aa, Unknown
  Bacterial polypetide isolated from the Sargasso Sea
MNNLIKISKLNKSFEGIKKINVLKSISYNFKKGKIYSLMGPSGSGKSTLLNLLSLIDRPTSGSITFENKKINYNDSNKNDVLRGNKIGIIYQQDNLLPDFTSLENIYLAALAGGNDEKVAVNKAKNLLKKVGLTNRSDHYPSQLSGGEKQRISIARAVVNNPQVILADEPTGSLDLQTAKEIFGLLKNQINKERLIIFATHNRFFANKADCLLEITNGNIKTINARI

SEQ ID NO: 146577 - protein, 167 aa, Unknown
  Bacterial polypetide isolated from the Sargasso Sea
SMANAKRDRFRADHMGIIFQQFNLVSYLSAIDNVLLPLYFSPTRRQASGKIQSKIRAEARRLLDTLGITSKTLGTQKAATLSIGQQQRVAAARAFIGSPEIIIADEPTSSLDEENQSEFLEQLFKQKDATGASLLMVSHNKNISKKFDRLIELEKICDISVRKEKAK

SEQ ID NO: 146578 - protein, 227 aa, Unknown
  Bacterial polypetide isolated from the Sargasso Sea
MNNLIELKNISKHYFTNKKNFVLKKINYKFKKGLIYSLVGPSGSGKSTLLNLISLIDKPSSGEILIDKKAIVYKNKSENDIIRASKIGIVYQQNNLLNDFTALENVCLASLAINNDKQKALLESIKIIQSLGLSKRKNHFPSELSVGEMQRIAISRALVNKPEIILADEPTGSLDHSTATEVFKILYKLKNKNRTIIYATHNRLFANMADCKLEMIDGNIKPSNVRK

SEQ ID NO: 146579 - protein, 227 aa, Unknown
  Bacterial polypetide isolated from the Sargasso Sea
MSNDLIKIKKLSKIFKNNNTNIKVLTNVNLNLPKGKLIALTGPSGSGKSTFLHLIALLDTPTTGQIVISGKKTENLTEIEKNLIVRNNISIIFQNNNLLSDFTAIENVAIPLIIKSNDYKSSLSKAKKILSKVNLSHRLNHLPLDLSGGEQQRVAIARSLAADTDIILADEPTGNLDSKTTDEVFSYFLKMKQKNKTILIATHNRELARKADYTLRVSNGVIKRTNE

SEQ ID NO: 146580 - protein, 207 aa, Unknown
  Bacterial polypetide isolated from the Sargasso Sea
MSLIQLDGVSRRYKTEGFEVTALDNVSLSIDKGEFVAIMGQSGSGKSTLMNILGCLDTPSEGEYRIHGQSVSSLNPDQLSALRLKTFGFVFQRYQLLSSLNATENVALPAIYSGTPSEERTQKAQQLLDKLGLASRKEHKPGELSGGQQQRVSVARALINGAEVILADEPTGALDSASGEQLLALLRELHAEGVTIILITHDSAVAE

SEQ ID NO: 146581 - protein, 101 aa, Unknown
  Bacterial polypetide isolated from the Sargasso Sea
SKKSDKNRIKSLLESLGIEDKANKKTQNLSQGEKQRVSIALAIVNSPKLILADEPTSSLDDLNCDKVINILKNQASKYKAKLIIITHDYRLKKHFKNTLSL

SEQ ID NO: 146582 - protein, 88 aa, Unknown
  Bacterial polypetide isolated from the Sargasso Sea
NHLPSDLSGGEQQRVAIARSLASDTSIILADEPTGNLDEKTSAEVFSYFLKLKKKNKTILIATHNRELAKKADYTLRIRNGNIIRVNG

SEQ ID NO: 146583 - protein, 298 aa, Unknown
  Bacterial polypetide isolated from the Sargasso Sea
MSLIQLNGVSRRYKTEGFEVTALDNVSLSIDKGEFVAIMGQSGSGKSTLMNILGCLDTPSEGVYRIHGQSVSSLNPDQLSALRLKTFGFVFQRYQLLSSLNATENVALPAIYSGTSSEDRTQKAQQLLDKLGLSSRKEHKPGELSGGQQQRVSVARALINGAEVILADEPTGALDSASGEQLLALLRELHAEGVTIILITHDSAVAEHADRQIHLLDGKIVTDTKTAAPSTSESVEKNAASVQHALSQEPKSVPVIKPFPSISLFSALSMAFTALRMNWFRTLLTLLGIIIGVAAVVA

SEQ ID NO: 146584 - protein, 187 aa, Unknown
  Bacterial polypetide isolated from the Sargasso Sea
MNKLLEIKNLSLSYKINNKSLQILKNVNIDLNYKESISVIGESGSGKTSLIMLIAGLEKFNTGELIFDGNNFKNLNEDELSDIRRKNIGIIFQSFFLLPNFTALENVNLTLEINNINNGLNKSKEILDKIGLKHRFNHYPSQLSGGEQQRVAIARSLVMNPKLILADEPTDNLDKVNSSLISGILFD

SEQ ID NO: 146585 - protein, 113 aa, Unknown
  Bacterial polypetide isolated from the Sargasso Sea
GLAEIALQRAESLSGGQQQRVAICRAMMQTPKLILADEPIASLDPLNARLAMEALKRIQVEEKITVICNLHTLDTAKHYCSRIIGMQNGDIVFDGTPKSLTDEKAREIYGAEA

SEQ ID NO: 146586 - protein, 203 aa, Unknown
  Bacterial polypetide isolated from the Sargasso Sea
MILEAKNLWKSFDNGKSTLTVLKGLSLEVQEGELVTIMGQSGTGKSTLLNILGTLDNSDSGELKISRNDINGYNKNQLSRLRNREIGFVFQSHHLLPDFTAIENILMPSWILNKKGARFHFANELLERVGLLERKDNFPSQLSGGEKARVALVRALINKPRLILADEPTGNLDQKNALKLIDLLIEINENYRQSIVLTTHNPE

SEQ ID NO: 146587 - protein, 172 aa, Unknown
  Bacterial polypetide isolated from the Sargasso Sea
MTLLAEKITKSFSSSGERFYVFQNLTISIESKELVTIVGPSGSGKSTLLNILGTLDKCDDGSLYLNGIDISKMDSNQMARARNELIGFVFQFHHLIPELSALENVLLPQLILSGIDNPSRAKELLSFLGLSERINHFPSQLSGGERSRVSIARALINRPKIILADEPSGNLD

SEQ ID NO: 146588 - protein, 164 aa, Unknown
  Bacterial polypetide isolated from the Sargasso Sea
GALVPMLSVFHNIYMGALSRNSTLTNLRNLIAPSRHEREQIGALATDLSLHDKLFTSIDQLSGGQAQRAALGRALYTQRPILLADEPVSSLDEHQGLALLTLSLARHDSAVIALHDRALALACSDRIIGLNHGKVVLDAATHSLSLSDLDALYQDASYQHRSYQ

SEQ ID NO: 146589 - protein, 128 aa, Unknown
  Bacterial polypetide isolated from the Sargasso Sea
SDFTSLENVAIPLIIRGNDYNSSLKKAGKILSSVNLGHRLNHFPSDLSGGEQQRVAIARSLASDTSIILADEPTGNLDEKTSEEVFSYFLKLKKKNKTILIATHNRELAKKADYTLRLSNGNIKRANV

SEQ ID NO: 146590 - protein, 186 aa, Unknown
  Bacterial polypetide isolated from the Sargasso Sea
PSGSGKSTLLHLLALLDKPTAGKITILGEPTQNITENKRNQLIRNYISIIFQNNNLLLDFTAVENVAMPLIIRNKNYNSSIKEAESYLKKVNLGHRLNHFPSDLSGGEQQRVAIARSLISDTKIILADEPTGNLDNKNSSEVLSYFLKLKQKNKIVLIATHNREIAKKADYTLSIRDGIIKTSNAK

SEQ ID NO: 146591 - protein, 214 aa, Unknown
  Bacterial polypetide isolated from the Sargasso Sea
MNNLIQLSNLNKSFEGSKKISVLKKISYNFKKGKIYALMGPSGSGKSTLLNLLSLIDRPNSGTIKFENNLINFSKSNDNDILRANKIGIVYQQDNLLPDFTSLENIYLASLAAGNNKKISLLKAKNLLKKVGLLNRSDHYPSQLSGGEKQRVSIARAVINDPQIILADEPTGSLDLETAKEIFELLKNQINSNRLIIFATHNRFFAIRQIAYWK

SEQ ID NO: 146592 - protein, 135 aa, Unknown
  Bacterial polypetide isolated from the Sargasso Sea
GVVFQEDYLLSEFTAIENIMLPYIIAGNSRKKSYNKAHSLLEKFNLLSIKNTYPNTLSGGEKQRVSILRAIINNPKLILADEPTGSIDEFNKEKIFSLFQDITSEYNSSILIATHDNNVSKISNKILNLSKGKIK

SEQ ID NO: 146593 - protein, 184 aa, Unknown
  Bacterial polypetide isolated from the Sargasso Sea
SGKSTLLHLIALMEKPSTGKIFFTDKNLNNLNIKEINKIRKYNISLIFQNNNLISDLNVIENVMLPLLIRNENKKKSYDKSKKILSLVNLSNRLDFFPSDLSGGEQQRVAIARSLIAETDLILADEPTGNLDFKTSNEIFNYFLKLKKMNKTILFATHNRELANKADYKLSISNGNIKRVNGKK

SEQ ID NO: 146594 - protein, 109 aa, Unknown
  Bacterial polypetide isolated from the Sargasso Sea
HRNSFSKAKKILNAVKLQDRSNHFPNELSGGEQQRVAIARSLIAETNLILADEPTGNLDYKTSLDIFSYFLKLKKLNKAVIFATHNRELANKADYKLSISNGNIKRLSG

SEQ ID NO: 146595 - protein, 133 aa, Unknown
  Bacterial polypetide isolated from the Sargasso Sea
QDYHLLNDRNVFHNVALPLHVMGCSANEIPYRVDEALELVGFEGKRDHYPNELSGGEKQRVTLARAIVKEPDLILADEPTGNLDPVAAFELVQLLDTINNNGTTILMASHNYNLIKGRGRRILELKDGAIRGS

SEQ ID NO: 146596 - protein, 153 aa, Unknown
  Bacterial polypetide isolated from the Sargasso Sea
SELEQNKFRQSKVSIIFQNNNLLSDFTSLENIMLPLLIRGEKSSSSILEAKKILKVVNLSERATHFPSQLSGGEQQRVAIARSLITKSDLILADEPTGNLDHNTSLEIFSYFQKLKKLNKTILFATHNRELANRADYKLSILNGGIKRINVTK

SEQ ID NO: 146597 - protein, 308 aa, Unknown
  Bacterial polypetide isolated from the Sargasso Sea
MDEGNAGPFGIDIGFKPPTGVGLSIDAPPVKGGGFLNYDESTSTYTGGIELQFSKISFSAIGIISTKLPGGEKGYSLLVIISVEFTPLQIGMGFTINGIGGLLGLHRTSNPDALRTGIRYNTLDHILFPKNIVENANTIISNLGQAFPARKDQFMIGPMAKIGWGTPTLLTIDIGIIIELPDPVRLIILGILRAQLPNADNVILQLQVNFLGILDFKEKYLSFDATLYDSKILTFGLFGDMALRLHWGDRPNFLLSVGGFHPSYTPPPLKSASMQRLTLILADEPQLKISVEIYFAVTSNSAQFRSTR

SEQ ID NO: 146598 - protein, 168 aa, Unknown
  Bacterial polypetide isolated from the Sargasso Sea
MSAANARLHDLAPAPSHAEQTELHPDLNRAHVRFINLGKTYDGTVHALQGIDLAIQRGEVFGIIGRSGAGKSSLIRTINRLEQPSSGRVLIDQVDIGSFDEDHLVALRRRIGMIFQHFNLMSAKTVWQNVELPLKVAGVPQAQRARKVHELLELVGLQDKHKAYPAQL

SEQ ID NO: 146599 - protein, 162 aa, Unknown
  Bacterial polypetide isolated from the Sargasso Sea
YGNKQIDFNNYNYNDILRANKIGIIYQQDNLLPDFTALENVYLANLAIEKNKEVSVIKSKQLLRKVGLSNRIYHYPSELSGGEKQRVSIARALINNPQVILADEPTGSLDLVTAKNVFDLLKKQINANRLIIFATHNRFFAKKSDCMLEIVNGNIKSINARV

SEQ ID NO: 146600 - protein, 213 aa, Unknown
  Bacterial polypetide isolated from the Sargasso Sea
MSKYLVEVKNLKKDFEHKNGKIKIFHDVNLGIKPGELVALVGPSGSGKSSFLHLLSLLDKPTAGKIYFLGKDSKNFSENRKDEIRRRNISLIFQDNNLLSDFTTIENVLMPLIIRGESYKSSHNKAKNILRRVNLLERRNHFPSELSGGEQQRVAIARSIIAETDLILADEPTGNLDFKTSQDIFSYFLKLKKLKKAVIFATHNRELAKKADY

SEQ ID NO: 146601 - protein, 163 aa, Unknown
  Bacterial polypetide isolated from the Sargasso Sea
QQQFDLVSHLSVIHNVNAGRLGEWGFFKSLFSLINPIGKSEVVDALESVGIEPKLYQRTSTLSGGEQQRVAVARVLIQDPQIVLADEPVASLDPYRSEELIKLLVDLTIKRDKTFIASLHKLELVREYFTRVIGLREGHVTFDVPVSKLNEKMIAQLYSLDAS

SEQ ID NO: 146602 - protein, 183 aa, Unknown
  Bacterial polypetide isolated from the Sargasso Sea
GSGKSSFLHLLSLLDKPSSGKILFLGEDTKNFGENKKDQIRKRNISIIFQDNNLLSDFTTIENVIMPLIIRGENYKSSLKKAENILKQVNLLERSNHFPSELSGGEQQRVAIARSIIAETDLILADEPTGNLDFKTSRNIFSYFIKLKKLKKAVLFATHNRELANKADYKLSISNGHIKRVNG

SEQ ID NO: 146603 - protein, 100 aa, Unknown
  Bacterial polypetide isolated from the Sargasso Sea
MERRCGVLSDHYAGAELHSASSGKKDENPVIEFKNVSKHFGPTQVLHNIDLNIQQGEVVVIIGPSGSGKSTLLRCINKLEEITSGDLIVDGLKVNDPKVD

SEQ ID NO: 146604 - protein, 139 aa, Unknown
  Bacterial polypetide isolated from the Sargasso Sea
MTEQTTVTHNPRAVPHIQLSGISKAYPNGVQALQNINLTLYQGEIFGIIGRSGAGKSTLLRLFNRLENADSGEITIHGEQTLRYSRSQMRDLRRRVAMIFQHFNLMSTKTVAQNVELPLKMAGVPRAERQRRVDEMLEL

SEQ ID NO: 146605 - protein, 129 aa, Unknown
  Bacterial polypetide isolated from the Sargasso Sea
MAIIKKFRIKSFKKVKPIIEFKNVSLAYGKRKVLDEIDFNINEKTIHGLLGPNGAGKSTLYHLMTGLLVPKNGKVLINGDDVTHLPVYLRTKRYGIGYVPQHGGAFADLSLHDNLKAISEIVIDNKNLR

SEQ ID NO: 146606 - protein, 81 aa, Unknown
  Bacterial polypetide isolated from the Sargasso Sea
KTDILLADEPVASLDPKAADLIMSLLKKINKEFKITVVCNLHQVGLASQYSDRIVGLLDGTIMFDNLPSNINKTIINQIYK

SEQ ID NO: 146607 - protein, 134 aa, Unknown
  Bacterial polypetide isolated from the Sargasso Sea
NNNLLLDFTAVENVAMPLIIRNKNYNSSIKEAESYLKKVNLGHRLNHFPSDLSGGEQQRVAIARSLISDTKIILADEPTGNLDNKNSSEVLSYFLKLKQKNKIVLIATHNREIAKRADYTLSIRDGIIKSSNEK

SEQ ID NO: 146608 - protein, 177 aa, Unknown
  Bacterial polypetide isolated from the Sargasso Sea
MNNLIELLNISKSFDNLNKLKVLKKISYKFKKGKIYSLMGPSGSGKSTLLNLLSLIDRPTSGAIKIENLDINFNEAEKNDILRANKIGIIYQQDNLLSDFTAIENIYLASLASGKEKELSILKAKDLLKKVGLLNRSNHYPSQLSGGERQRVSIARALINDPQIILADEPTGSLDFD

SEQ ID NO: 146609 - protein, 189 aa, Unknown
  Bacterial polypetide isolated from the Sargasso Sea
DSLSISGPSGAGKSTLLNIISGLDDANKGEIYYGNVCFSNLKATDKTKFRLQNISLVFQSFNLLKDFNVMENIMLPLSYKGLSRKDSEKHALSALDNVDLSNLKSSPVATLSGGEAQRVGIARALAMNSKVILADEPTGNLDKETSNIIVNNLVDICNINQISLVVVSHDDSVLSKLNTNRKIIDGRFI

SEQ ID NO: 146610 - protein, 224 aa, Unknown
  Bacterial polypetide isolated from the Sargasso Sea
MSKLLKLSNVNLNYTIDSKSINILKNISFEVDYKETISVVGESGSGKTSLIMLIGGLEKVSSGNIFFRDLEVSKMNEDEISEIRRKNIGIVFQSFYLIPNYTALENVSLSLEINKFDKPTVKAKEILDRFGLSNRFNNFPSQLSGGEQQRVAIARSVAMKPELILADEPTGNLDSENTDKISSLLFNYIKDENASLIMVTHDNNLANLTKRKIIIKDGEITENE

SEQ ID NO: 146611 - protein, 104 aa, Unknown
  Bacterial polypetide isolated from the Sargasso Sea
IKDKVYDIVEKVGLKKRINNYPSELSGGEKQRVSIARALVKEPLVILADEPTGNLDPNVSDEILDLLEIATDSGAAVLMSTHNFPLIQPRKKRFIELNKGRLVV

SEQ ID NO: 146612 - protein, 223 aa, Unknown
  Bacterial polypetide isolated from the Sargasso Sea
MNNLIELSNISKSFNNFKKIKVLKKVSFRFNKGKIYSLMGPSGSGKSTLLNLLSLIDRPSSGTILINRKIINFDESNKNDILRANKIGIIYQQDNLLPDFTALENIYLASLAAGNNKKLSVSMARTLLKKVKLSNRSDHYPSQLSGGEKQRVSIARALINNPQIILADEPTGSLDSETAKEIFEILKNQINPNRLIVFATHNRFFADKSDCLLEMVNGNIKTI

SEQ ID NO: 146613 - protein, 180 aa, Unknown
  Bacterial polypetide isolated from the Sargasso Sea
GDVILADEPTGALDSHSGEEMMRLLQELHREGQTIIIVTHDMHVAQHADRIIEIKDGVIISDEPNPASNIAAAPKTEVIPAKTKARARVAAWDRYAEALKMALLAMSTHRLRTFLTMLGIIIGIASVVSVVALGEGSQREILKSISSMGTNTIDIRPGSGFGDRRSARVRTLTASDANAL

SEQ ID NO: 146614 - protein, 89 aa, Unknown
  Bacterial polypetide isolated from the Sargasso Sea
QINYLGGQQQRVSIARAIAGCPKLILADEPTGALDSKTSIEIMTILNDLNSKGITVVLVTHEDDIAKYGSRIIKMKDGKIIEDKKNVPN

SEQ ID NO: 146615 - protein, 101 aa, Unknown
  Bacterial polypetide isolated from the Sargasso Sea
VDEALELVGFEGKRDHYPNELSGGEKQRVTLARAIVKEPDLILADEPTGNLDPVAAFELVQLLDTINGNGTTILMASHNYNLIKGRGRRILELKDGGIRGS

SEQ ID NO: 146616 - protein, 227 aa, Unknown
  Bacterial polypetide isolated from the Sargasso Sea
MNNFIKLSNISKSFTHQKNLKVLKKLTYNFKLGKIYSLMGPSGSGKSTLLNLLSLIDRPSGGIMKYGNKQIDFENSNHNDILRANKIGIIYQQDNLLSDFTALENVYLANLSIEKNKKISMSKSKQLLRKVGLSNRIYHYPSELSGGEKQRVSIARALINDPQVILADEPTGSLDLKTAKSVFDLLKKQINSNRLIIFATHNRFFAKKSDCMLEIVNGSIKTINARV

SEQ ID NO: 146617 - protein, 224 aa, Unknown
  Bacterial polypetide isolated from the Sargasso Sea
MNKLLKLSNVSLKYTIDNNSINILKNISFEVDYKETISIVGESGSGKTSLIMLIGGLEKISAGNIFFKGSEISNMTEDEISEIRRKNIGIVFQSFYLIPNYTALENVSLSLEINKLDNATQKAKEILDRFGLSNRFNNLPSQLSGGEQQRVAIARSVVMKPELILADEPTGNLDSENTENISSLLFNYIKDENASLIMVTHDNNLANLTKRKITIKDGVISENQ

SEQ ID NO: 146618 - protein, 549 aa, Unknown
  Bacterial polypetide isolated from the Sargasso Sea
MYKNIAPQLKSNLDLDSDTFLKNKEMMLEKIDHLNSLLDEAELGGGQYHLDRLAARGKMPVRQRIKNLLDPDTPFLEISPYAAYGTTYTVGGGCVAGIGLVADKECVIFANDPSVLGGAMTVYVQEKWMRCIQIARENRIPFINFVESAGADLRGATADTSQNLVRQLQYPHFAESGRSFYEMTELSKLKIPVISLVFGSSTAGGAYQPGMSDYNIFIKNQSKVFLGGPPLVQMATGEISDDESLGGAKMHSEVSGFSDYLAEDEMDALRICRNVVNHLNLVKRSDFDLRKYREPKYASEGLLGLFSEDLKEQVDIREVIMRFVDDSRFEEFKPLYGSTMVCGWANVFGYPVGILGNNGPIYPETAEKSASFIQLCNQTNTPLVFLHNVTGFLVGKDYERQAIIKKGSQMVNAVSNSTVPHITFVVGASYGAGTYAMSGRAFNNRFIFTWPTAKIAVMGPKQFAGVMSLVRRAKAKRKGEKFDEKLDKQLVELIEAAAEKESLALSASSMVTDDGIIDPRDTRNVLGFCLSVVDNNEIKGAKGYGVFRL

SEQ ID NO: 146619 - protein, 311 aa, Unknown
  Bacterial polypetide isolated from the Sargasso Sea
MIKSILGSDKLQSTLFNPPDDVLPETLPLIILIFKPASLRLFSKTVDKWCSLGNPYPAIKLSPNKTTFSIALAFMCTRKMIKIFINIVLFMNTLLKLKKINLKYQTGKDSINVLKNIDLNIKKKETVSVVGESGSGKTSLIMLIGGLEKPNSGKIIFQDQEITGLSEDEVSEIRKKNIGIIFQSFYLIPNYTAVENVALTLELNNFKNPEKEAKILLDRFGLKHRFNNLPSQLSGGEQQRVSIARAIAMKPELILADEPTGNLDTENSIMIANILFKYVKEEGSSLIMVTHDTKLADKAKRKIKIKDGKIK

SEQ ID NO: 146620 - protein, 217 aa, Unknown
  Bacterial polypetide isolated from the Sargasso Sea
MIQMENVTYSYDKGYGIKNVNFTIDDSEFTFLIGPTGSGKTTIMKLIYMALIPQSGVVTTGKFRSDKIKKRKIPFLRRKIGMIFQDYHLLRDRSLFENIALPLYVIGTRHNDIPERVEEVIDQVGLTGKEDHSPDELSGGEQQRACIARALVKEPEIILADEPTGNLDPITSFELLKLLESVNHDGTAVLMASHNYNLIKGRGHRIMEVQQGILRNN

SEQ ID NO: 146621 - protein, 220 aa, Unknown
  Bacterial polypetide isolated from the Sargasso Sea
MKIKCKEIFKKYRSYNTKSVINGASFELESGNSLSISGPSGVGKSTLLNVLAGIDEIDKGEIFFDDISFTNLSDSNKTLFRLNNISHIFQSPNLLMDFNVTENIMIPLIYQGNTKHRSKSLAIQCLEEVNLIEHLNSPVSILSGGEAQRVGIARAMAMKSKIILADEPTGNLDSTNSQLVMRNLVEICESRMITLIVVSHDNDVINKMRNKKTMIDGKLI

SEQ ID NO: 146622 - protein, 221 aa, Unknown
  Bacterial polypetide isolated from the Sargasso Sea
MTKLLKLTDVNLNYNTDNNLINVLQDVSFEVDYKETISVVGESGSGKTSLIMLIGGLEKASSGKIEFKDFEISSLKEDEISEIRRKDIGIVFQSFYLIPNYTAIENVSLALEINKIKDPINKAKEILDKFGLGKRLNNLPSQLSGGEQQRVAIARSIVMKPELILADEPTGNLDSENSELISNILFDYVKEENASLIMVTHDNKLANLSKRIIKIKDGKIE

SEQ ID NO: 146623 - protein, 220 aa, Unknown
  Bacterial polypetide isolated from the Sargasso Sea
MKIKCKEIFKKYRSYNAKSVINGASFELESGNSLSISGPSGVGKSTLLNVLAGIDEIDKGEIFFNDISFTNLSGSNKTLFRLNNISHIFQSPNLLMDFNVTENIMIPLIYQGNTKHKSKSLAIQCLEEVNLIEHLNSPVSILSGGEAQRVGIARAMAMKSKIILADEPTGNLDSTNSQLVMRNLVEICESHMITLIVVSHDNDVINKMRNKKTMIDGKII

SEQ ID NO: 146624 - protein, 189 aa, Unknown
  Bacterial polypetide isolated from the Sargasso Sea
MNKLLKLSNVNLNYNIDNKSINILKNISFEVDYKETISIVGESGSGKTSLIMLVGGLEHVSSGKIFFKDSEISSMNEDEISEIRRKNIGIVFQSFYLIPNYSALENVSLALEINKLNNPIKNAKEILDRFGLSNRFNNLPSQLSGGEQQRVAIARSVVMKPELILADEPTGNLDSENTKIISKLLFNYV

SEQ ID NO: 146625 - protein, 227 aa, Unknown
  Bacterial polypetide isolated from the Sargasso Sea
MNNFIKLSNISKSFTHRKNLRVLKKLTYNFKLGKIYSLMGPSGSGKSTLLNLLSLIDRPSSGIMKYGNKQIDYKNSNYNDVLRANKIGIIYQQDNLLPDFTALENVYLANLAIEKNKEISEIKSKKLLKKVGLSNRIYHYPAELSGGEKQRVSIARALINDPQVILADEPTGSLDLETAKSVFDLLKKQINANRLIIFATHNRFFAKKADCMLEIVNGNIKTINARV

SEQ ID NO: 146626 - protein, 221 aa, Unknown
  Bacterial polypetide isolated from the Sargasso Sea
MNNLLKLTDINLNYKTDNNLIKVLQDINLEVKLKETLSIVGESGSGKTSLIMLIGGLEKSSSGKIFFENNEITNMSEDEISNIRRKNIGIVFQSFYLIPNYTALENVSLTLEINKISNAEIKAKEILERFGLSERFYNLPSQLSGGEQQRVAIARSIVMKPKLILADEPTGNLDSENSELISKILFDYVSEEKASLIMVTHDNNLANRTMKKIKIKDGRID

SEQ ID NO: 146627 - protein, 227 aa, Unknown
  Bacterial polypetide isolated from the Sargasso Sea
MSNFIKLSNISKSFTHQKNLRVLKKLSYNFKLGKIYSLMGPSGSGKSTLLNLLSLIDRPSSGLMKYENKQIDFKNSNYNDILRANKIGIIYQQDNLLSDFTALENVYLANLAIEKNKDISVLKSKQLLKKVGLSNRIYHYPAELSGGEKQRVSIARALINDPQVILADEPTGSLDLVTAKNVFDLLKKQINANRMIIFATHNRFFAKKSDCMLEIVNGNIKTINARV

SEQ ID NO: 146628 - protein, 87 aa, Unknown
  Bacterial polypetide isolated from the Sargasso Sea
FPNELSGGEQQRVAIARSLIAETDLILADEPTGNLDYKTSQDVFSYFLKLKKLKKTIIYATHNRELANKADYKLSISSGNIKRVNGK

SEQ ID NO: 146629 - protein, 228 aa, Unknown
  Bacterial polypetide isolated from the Sargasso Sea
MNKNSIKVEKLSKNFVNNKVVVKVLNNLNLNLETGKIIALVGPSGSGKSTLLHLLALLDKPTEGKITILGEPTQNITENKRNHLIRDHISIIFQNNNLLLDFTAVENVAMPLIIRNKNYNSSIKEAESYLKKVNLGHRLNHFPSDLSGGEQQRVAIARSLISDTKIILADEPTGNLDNKNSSEVLSYFLKLKQKNKIVLIATHNREIAKKADYTLSIRDGIIKTSNGK

SEQ ID NO: 146630 - protein, 227 aa, Unknown
  Bacterial polypetide isolated from the Sargasso Sea
MNNFIKLSNISKSFTQQKNLRVLKKLTYNFKLGKIYSLMGPSGSGKSTLLNLLSLIDRPSDGIMKYGNKQIDFENSNYNDILRANKIGIIYQQDNLLPDFTALENVYLANLAIEKNKEVSLIKSKQLLRKVGLSNRIYHYPSELSGGEKQRVSIARALINDPQVILADEPTGSLDLKTATSVFDLLKKQINSNRLIIFATHNRFFAKKSDCMLEIVNGSIKTTNARV

SEQ ID NO: 146631 - protein, 224 aa, Unknown
  Bacterial polypetide isolated from the Sargasso Sea
MSKLLKLSNVNLNYTIDNKSINILKNISFDVDYKETISVVGESGSGKTSLIMLIGGLEKVSSGNIFFRDSELSKMNEDEISEIRRKNIGIVFQSFYLIPNYTALENVCLSLEINKFDNPTAKAKEILDRFSLSNRFNNFPSQLSGGEQQRVAIARSVAMKPEIILADEPTGNLDSENTHKISDLLFNYIEDENASLIMVTHDNNLANLTKRKITIKDGVISENK

SEQ ID NO: 146632 - protein, 65 aa, Unknown
  Bacterial polypetide isolated from the Sargasso Sea
MIEFKNVSVTYPGGVKALNNVSLDIAEGDFVIIVGMSGAGKSTLLRTVNNLVKPTEGNVIVDSRN

SEQ ID NO: 146633 - protein, 219 aa, Unknown
  Bacterial polypetide isolated from the Sargasso Sea
LSNVIKSFLSLKKINVLKKISYKFKSGKIYSLMGPSGSGKSTLLNLLSLIDRPSSGSITIGNKKINPNNSQENDLLRANKIGIIYQQDNLLSDFTAIENLTLASLASGNTKEDALNKSKILLKKVGLTKRVNHYPSQLSGGEKQRVSIARALINDPQIILADEPTGSLDIKTAIGIFDLLKNQIKPDRIIIFATHNRFFANKSDCLLEIVNGNIKTING

SEQ ID NO: 146634 - protein, 163 aa, Unknown
  Bacterial polypetide isolated from the Sargasso Sea
TLKLFTKEERTEALINLDKLGMAETALQRAETLSGGQQQRVAICRALMQNPSMILADEPIASLDPYNARLVMESLQKIHKEKNITVICNLHTLDTAKKYCDRIIGMKTGNIVFDDQPELLKDETARDIYGAEAEEAFEAAITSTSLGDNQERLIGNKKGEGLD

SEQ ID NO: 146635 - protein, 175 aa, Unknown
  Bacterial polypetide isolated from the Sargasso Sea
MNKTILEIKNLSKSFSHKDGKIELFKNINFTIKKGELVALTGPSGSGKSTLLHMIAQLDKPSSGKIILKKKNLKDLNQVEENLLRRNDISIIFQNSNLFSDFTALENVMFPMLIKSENQNASIEKSKKVLKKVKLNNRLNHFPYELSGGEQQRVAIARSLISETDLILADEPTGN

SEQ ID NO: 146636 - protein, 160 aa, Unknown
  Bacterial polypetide isolated from the Sargasso Sea
IFFRDSELSKMNEDEISKIRRKNIGIVFQSFYLIPNYTALENVSLSLEINKFDNPTVKAKEILDRFGLSNRFNNFPSQLSGGEQQRVAIARSVAMKPELILADEPTGNLDSENTDKISNLLFNYIEDENASLIMVTHDNNLANLTKRKIIIKDGVISENK

SEQ ID NO: 146637 - protein, 549 aa, Unknown
  Bacterial polypetide isolated from the Sargasso Sea
MYKNIAPQLKSNLNLDSDSFLKNKEMMLEKIEHLNTLLNEAELGGGQYHLDRLAARGKMPVRQRIKNLLDPDTPFLEISPYAAYGTTYTVGGGCVAGIGLVADKECVIFANDPSVLGGAMTVYVQEKWMRCIEIARENRIPFINFVESAGADLRGATADTSQNLVRQLQYPHFADSGRSFYEMTELSKLKIPVISLVFGSSTAGGAYQPGMSDYNIFIKNQSKVFLGGPPLVQMATGEISDDESLGGAKMHSEVSGFSDYLAEDEMDALRICRNVVNHLNLVKRSDFDLRQYKEPKHDSEALLGLFSEDLKEQVDIREVIMRFVDDSRFEEFKPLYGSTMVCGWANVFGYPIGILGNNGPIYPETAEKSASFIQLCNQTSTPLVFLHNVTGFLVGKEYERQAIIKKGSQMVNAVSNSTVPHITFVVGASYGAGTYAMSGRAFNNRFIFAWPTAKVAVMGPKQFAGVMSLVRRAKAKRKGEKFDEKLDKQLVELIEAAAEKESLALSASSMVTDDGIIDPRDTRNVLGFCLSVVDNNEVKGAKGYGVFRL

SEQ ID NO: 146638 - protein, 228 aa, Unknown
  Bacterial polypetide isolated from the Sargasso Sea
MSKILIETINLKKTYRHFNGSITLFNNLNLKIKKGDLVALVGPSGSGKSSLLHLLALLDEPTMGEIKINDVDTKKFSDEKKDETRRKNISIIFQDNNLLNDFTTIENVMMPLIIKGESVSNAKKEALKILQAVRIFDRSQHFPNELSGGEQQRVAIARALIANTNLILADEPTGNLDFKTSKEIFSYFLKLKKLKKTIIFATHNRELANRADYKLFISNGDIKRVNAR

SEQ ID NO: 146639 - protein, 189 aa, Unknown
  Bacterial polypetide isolated from the Sargasso Sea
MSSLLRFTNIHLQYQNGTLLTKVIKGIDFTIHQNEKLAIVGKSGSGKTSLLMLMAGLEKPTSGNITYKDQDITTYSEDQLTEYRKKNIGIVFQSFYLIPNYTAVENVALPLEINFQKDALSQAKEILVDLGLEDRLQHFPSQLSGGEQQRVAIARAMIKKPELILADEPTGNLDDENTEVITELIFNIA

SEQ ID NO: 146640 - protein, 173 aa, Unknown
  Bacterial polypetide isolated from the Sargasso Sea
MLKLENLTKRYNTGDLALQGIDLSIPSGQVLALIGPSGAGKSTLIRCINRLVEPTNGSAILNELNLTKLSSRALRKSRRKMGMIFQEYALVERLTVMENVLSGRLGYVGFWKSFLRKFPKKDVNEAFRLLDRVGLLEMADKRADELSGGQRQRVGICRALIQDPDLLLVDEPT

SEQ ID NO: 146641 - protein, 225 aa, Unknown
  Bacterial polypetide isolated from the Sargasso Sea
MNSFFELKKIFKTFGTEKTIKVLKNLSQRFDKGKSYSIMGPSGSGKSTLLNLISLIDRPSSGSIHFDKIPVNFNESEKNDVYRSKKIGIIYQQNNLLPDFTALENIYLASLAINDNKELAISNAEKLLKKIGLSNRADHFPSQLSGGEAQRVAIARAIVNDPEIILADEPTGSLDMETAKDVFELLYKQKRSDRLIIFATHNRFFANKADCLLEMIDGSIKSSNV

SEQ ID NO: 146642 - protein, 112 aa, Unknown
  Bacterial polypetide isolated from the Sargasso Sea
KKLYFDAKKLIKKLGLSNRENHLSSELSGGEMQRVAIARALINSPDIILADEPTGSLDMKNAKEVFKILLKLKNKNRLIIFATHNRFFANMADCKIELISGKIKKSTNARIK

SEQ ID NO: 146643 - protein, 88 aa, Unknown
  Bacterial polypetide isolated from the Sargasso Sea
LRVIRGGEIQRVAIARALINKPQIILADEPTGSLDQTTAKDVFNVLHKLKNSNRIIIYATHNRYFANKADCKLEMVDGNIKTINARIK

SEQ ID NO: 146644 - protein, 227 aa, Unknown
  Bacterial polypetide isolated from the Sargasso Sea
MNKKILEINNLSKHFENNGSKISVLNNINLKIETGKVIAIIGPSGSGKSTFLHLISLLDVPSKGKIKILGKSINDLSDNEKNKLIREHISIIFQNNNLLSDFTALENVALPLIIRDKDYKTSKKLAEKFLKKVNLGHRLNHFPSDLSGGEQQRVAIARALIAETKIILADEPTGNLDNKNSKEVFSYFLKLKEKNKIILIATHNRELAKKADYTLSILNGNIKRVNV

SEQ ID NO: 146645 - protein, 111 aa, Unknown
  Bacterial polypetide isolated from the Sargasso Sea
MTKKLALSKAEKLLKKIGLSNRLNHFPSQLSGGEAQRVAIARAIINNPQIILADEPTGSLDMNTAKDIFKLLNNQKRSDRIIIFATHNRFFAKKADYLLEMRDGSIKSSNV

SEQ ID NO: 146646 - protein, 175 aa, Unknown
  Bacterial polypetide isolated from the Sargasso Sea
MIQLQQLQRVFRTADIETTALNNIHLEIKSGDFVAIMGPSGCGKSTLLSILGMLDSPSSGRYLFEGTDIAGFNENQLAALRKTHLGFVFQSFNLIDELSVYQNVELPLQYQGVPKAERRQRVSAILKRMQIEHRADHRPLQLSGGQQQRVAVARALVINPKLILADEPTGNLDST

SEQ ID NO: 146647 - protein, 127 aa, Unknown
  Bacterial polypetide isolated from the Sargasso Sea
TAIENVKMPLIIKNDNNEIISKKAEKILKDVKIFDRSNHFPNQLSGGEQQRVAIARALISETNIILADEPTGNLDYKTSKEIFSLFLKLKKLKKTIIFATHNRELANRADYKLFISNGIIKRVNARF

SEQ ID NO: 146648 - protein, 209 aa, Unknown
  Bacterial polypetide isolated from the Sargasso Sea
MIQTKDLSIKYENKRINFPDLDISPGNHFLILGRSGSGKTSFLNLIGGLLSPSSGQIKINNNNIALLSSNELDKFRGLNIGFIFQTPHFIKSLNINDNLLLSQYFLGNRDQNHINTLLEKVELLNRKEDPLHELSEGEKQRISIVRALINKPKIILADEPTSALDDYSCNIVIDLLKNLSKENNSVLIIVTHDKRLKDKFKQFIDLDAS

SEQ ID NO: 146649 - protein, 123 aa, Unknown
  Bacterial polypetide isolated from the Sargasso Sea
LENIYLASLAINDNKELAISNAEKLLKEIGLSKRADHFPSQLSGGEAQRVAIARAIVNDPEIILADEPTGSLDMETAKDVFELLYKQKRSDRLIIFATHNRFFANKADCLLEMIDGSIKSFNV

SEQ ID NO: 146650 - protein, 141 aa, Unknown
  Bacterial polypetide isolated from the Sargasso Sea
QKSERKILGIIFQSFYLIPNYTAVENVALTLELNNFKNPEKEARILLDRFGLKHRFDNLPSQLSGGEQQRVAIARAIAMKPQLILADEPTGNLDTENSIMIANILFKYVKEEGSSLIIVTHDPKLADKAKRKIRIKDGKIK

SEQ ID NO: 146651 - protein, 201 aa, Unknown
  Bacterial polypetide isolated from the Sargasso Sea
MSILLKLNKVNLKYQTGKDNIKVLKNINLTTKKKETISIVGESGSGKTSLIMLIGGLEKASSGKIFFKNHEITKLSEDDVSEIRRKDIGIIFQSFYLIPNYTAVENVALTLELNKFKNPENKAKQLLDRFGLSHRFNNLPSQLSGGEQQRVAIARAIAMKPELILADEPTGNLDTENSVMISDILFKYVKEEGSSLIMVTH

SEQ ID NO: 146652 - protein, 157 aa, Unknown
  Bacterial polypetide isolated from the Sargasso Sea
LTGLLGHVPRWRGTFGLFLRSERVKALNALDRVGILSQSRQRASTLSGGQQQRAAIARALVQNADIILADEPVASLDPAAADRVMQTLENINQEDGSTVLVSLHQIEYALKYCGRIIALKDGKLIFDGTASDTTPEFFTELYGRSIDGDEDHQVQSR

SEQ ID NO: 146653 - protein, 228 aa, Unknown
  Bacterial polypetide isolated from the Sargasso Sea
MSKILIETINLRKTYQHFSGNITLFNNLNLKIKRGDLVALVGPSGSGKSSLLHLLALLDEPTRGDIKINDIFTKKFTDEKKDETRRKNISIIFQENNLLNDFTAIENVMMPLIINGENLHNAKKNALKILKAVKIFDRSHHFPNELSGGEQQRVAIARALIGETSLILADEPTGNLDYKTSNEIFSYFLKLKKLKKTIIFATHNRELANRADYKLFISNGDIKRVNAG

SEQ ID NO: 146654 - protein, 105 aa, Unknown
  Bacterial polypetide isolated from the Sargasso Sea
KVNKIIQSVKLSGRANHFPNELSGGEQQRVAIARALIAETNLILADEPTGNLDFKTSKEIFSIFLKLKKLKKTIIFATHNRELANRADYKLFISGGTIKRVNARQ

SEQ ID NO: 146655 - protein, 193 aa, Unknown
  Bacterial polypetide isolated from the Sargasso Sea
MIELKNIHKSYISGCDTTNILTNQSLIIDNQSSVVITGPSGSGKSTILRIIAGLEAPNSGSVLYNKKNIYNLTDEKRAKIRSDKMGFIFQSFRLFPSLTVFENVQLSCEISNIPNSESVALKWIEEVNLIKQKNQMPDTLSGGEQQRVAIARALATNPSVILADEPTGNLDQTNSNNIKQLLQHCLDITKATH

SEQ ID NO: 146656 - protein, 229 aa, Unknown
  Bacterial polypetide isolated from the Sargasso Sea
MTNIIELKNIEKNYNTKKRIKVLNKINFSFKAGKIYSLMGPSGSGKSTLLNLLSLIDTPNSGILKILNHTINYKSKSYNDKLRANKIGIIYQDNNLLSDFTTIENIYLSRLSIDENKNKALADAKKLIKKLGLTNRENHLASELSGGEMQRVAIARALINSPEIILADEPTGSLDIKNAKEVFRILLKLKSKNRLIIFATHNRLFANMADCKIELISGKIKKSTNAKIK

SEQ ID NO: 146657 - protein, 241 aa, Unknown
  Bacterial polypetide isolated from the Sargasso Sea
MSENDESILSANALYHVYTSKAEDGNVVALRGLHVDVKKGEAVAVVGPSGSGKSTLLKCLGGLMKASAGNVSLDGKNMTRLTGQELVELRQKTVSFIFQEGNLLPNLNALDNVAQPLRHQNVSPKESKRRAMELLEELGIAHRAKGLPSMLSGGEQQRVAIARALITNPRLILADEPTGALDPITSREVLALFKELHEEKGVAFLIVTHSAEVAAFCDRSLELRDGRFVAQHGTDLESADL

SEQ ID NO: 146658 - protein, 193 aa, Unknown
  Bacterial polypetide isolated from the Sargasso Sea
MQKILSAKNISKSFDSSKVLDSVDLSINQGEIIVITGSSGAGKTTLLNILGTIETPDFKDKSSLKICNADIFTLDDRELSKFRNKNIGFVFQFHELLPEFTCLENVCLPGWIDNSKNISEIEDRAISLFEILGLKDKVKMKPATLSGGEKQRVSIARSLINNPEIILADEPSGNLDSKNTENIYNIFWNYRKR

SEQ ID NO: 146659 - protein, 204 aa, Unknown
  Bacterial polypetide isolated from the Sargasso Sea
LSFSFKSGKIYSLVGPSGSGKSTLLNLISLIDPPTSGNLKISKQVIDFSDKINNDNLRASKIGIIYQDNNLLPDFTAIENIYLARLSIDENKNKALHDAKKLINKLGISNRSNHLSSELSGGEMQRVAIARALINSPQIILADEPTGSLDFKNAKEVFKILLRLKSKNRLIIFATHNRFFANMADCKIELNSGKIKRSTNARIK

SEQ ID NO: 146660 - protein, 143 aa, Unknown
  Bacterial polypetide isolated from the Sargasso Sea
GIIYQDNNLLSDFTAIENVYLSRLAVDENKNKALIDAKKIIRKLGLSNRANHLASELSGGEMQRVAIARALINSPEIILADEPTGSLDLKNAKDVFKILFKLKNKNRLIIFATHNRFFANKADCKIELISGKIRKITNARIKY

SEQ ID NO: 146661 - protein, 180 aa, Unknown
  Bacterial polypetide isolated from the Sargasso Sea
MNIIGCLDVPSSGDYFFKDENISNFNANKLAELRNREIGFIFQNFNLLPRLNALENVVLPLLYSGKNQKERNNLALKALENVGLKDRIHHRPNQLSGGQQQRVSIARAIAGSPKLILADEPTGALDSKTSIEIMKILNDLNAKGITVVLVTHEDDIAKYASRIIKMKDGQIIEDKKNVPN

SEQ ID NO: 146662 - protein, 197 aa, Unknown
  Bacterial polypetide isolated from the Sargasso Sea
KIGRVYSLIGPSGSGKSTLLNLLSLIDKPSSGSIKIKNKIINYDNQNENDLYRSSSIGIIYQNYNLLNDFTALENVSLAELALNNNSKTSEINAKKTLHNLGLSNRVYHYPTELSGGENQRVAIARAIINKPKIILADEPTGNLDLKNAKTVFKNLLNLKNKKRLIIFATHNREFAEMSDCKIEMIDGNIKSINGKL

SEQ ID NO: 146663 - protein, 208 aa, Unknown
  Bacterial polypetide isolated from the Sargasso Sea
MNPDGSILNVSNLFKSFRQGEKVIEVLNGLDIDVKIGERIGIVGLSGSGKSTLLHILGGLEHPDAGKILIHGQNIVQMEETEIDHIRNAHIGFVYQFHHLLPDFSALENVSLPPLIRGASKSDAKMLSREILYKVGLEHREDHLPAELSGGERQRVAIARALVNKPSCILADEPTGNLDEKTARDVNDLMISLSESLGTSLVIVTHNS

SEQ ID NO: 146664 - protein, 232 aa, Unknown
  Bacterial polypetide isolated from the Sargasso Sea
MNDISKVVLKIENLSYFYESEFNKIDIFKNLNFEMKEGEIIGLLGPSGSGKTTLLNCIGLLDSPKGGKIKILNVECSNANDFERTKIRSKQIGFVFQSHRLLPEFSSVENIIIPQLLLGVDKKIAYKNASELLKLLKLNHRSEHRPAKLSGGEAQRVAIARSVANAPKIILADEPTGNLDIESAKLVFDLLYKIAKMSKISCLIATHNIELAKKMDKIYSIKDKKLKLTKNF

SEQ ID NO: 146665 - protein, 228 aa, Unknown
  Bacterial polypetide isolated from the Sargasso Sea
MNNLIELKNIVKNYNAKKKIKVLNKINFSFKAGKIYSLMGPSGSGKSTLLNLLSLIDTPNSGILKISNHVINHKLQTDNDKLRANKIGIIYQDNNLLSDFTTIENIYLSRLSIDENKDKALEDAKKLIRKLGIANRENHLASELSGGEMQRVAIARALINSPEIILADEPTGSLDMKNAKDVFKILLKLKNKNRLIIFATHNRFFANMADCKIELISGKIKRSTNARN

SEQ ID NO: 146666 - protein, 152 aa, Unknown
  Bacterial polypetide isolated from the Sargasso Sea
RSGVGWIFQDFHLVDRLDALDNVAFSLELSGMSSSEAEGRAMDALMRVGLADRVNFIPDQLSGGQQQRVAVARAISGSRPLILADEPTGNLDVKSGQEVIKLFKDLCANDGLSVLMVTHDPMLASMADRMLLLKDGVTAASDIRSAWGIEEE

SEQ ID NO: 146667 - protein, 297 aa, Unknown
  Bacterial polypetide isolated from the Sargasso Sea
MSDVAISVDRLSKTFGRNKALDDVNLSVQNGEMIALIGASGSGKSTLIRHIAGLVASDRDNVSKVSVFGRTVQSGGRITRDARQLRSRIGVIFQQFNLVGRLALLTNVAIGFLGRIPAWRGTVGWFTREEKMAALEALARVGIDPYAGQRASTLSGGQQQRAAIARALVQQAEILLADEPIASLDPESARRVMDALAAINQEDNITVVVSLHQVAYAKKYCARTVALRDGKVVYDGPSSRLDTQFLRELYGADSEELIMDEIIPSPSRHVRADADSRTPHPLPELSPANSGSPFSAY

SEQ ID NO: 146668 - protein, 116 aa, Unknown
  Bacterial polypetide isolated from the Sargasso Sea
NVALTLELNKFKNPEKNAKELLERFDLKHRFDNLPSQLSGGEQQRVAIARAIAMKPELILADEPTGNLDTENSIMISKILYNYVKEEGSSLIMVTHDLKLANKADRKIKIIDGKIK

SEQ ID NO: 146669 - protein, 94 aa, Unknown
  Bacterial polypetide isolated from the Sargasso Sea
RINHRPNQLSGGQQQRVSIARAISGTPNLILADEPTGALDSKTSIEIMKILTSLNQQGITIILVTHENDLAVYANRIITMKDGIIIEDNKNVIN

SEQ ID NO: 146670 - protein, 92 aa, Unknown
  Bacterial polypetide isolated from the Sargasso Sea
SNRLNHFPSQLSGGEAQRVAIARAIINDPQIILADEPTGSLDMNTAKDIFKLLNNQKRSDRIIIFATHNRFFAKKADYLLEMRDGDIKSSYA

SEQ ID NO: 146671 - protein, 105 aa, Unknown
  Bacterial polypetide isolated from the Sargasso Sea
NAKKILSNLGLSKRVNHFPTELSGGENQRVAIARAIINKPKIILADEPTGNLDLKNAKSVFKTLLNLRNKNRLIIFATHNREFAEMSDCKIEMIDGNIRSINGKL

SEQ ID NO: 146672 - protein, 221 aa, Unknown
  Bacterial polypetide isolated from the Sargasso Sea
MNTLLKLKKINLKYQTGKENISVLKNIDLIIKKKETVSVVGESGSGKTSLIMLIGGLEKPTSGRIIFQNHEFNRLNEDEISEIRKKNIGIIFQSFYLIPNYTATENVALTLELNNFKNPEKKAKILLDRFGLKHRFNNLPSQLSGGEQQRVAIARAIAMKPQLILADEPTGNLDTENSLMIANILFNYVKEEGSSLMMVTHDPKLADKAKRKIKIKDGKIK

SEQ ID NO: 146673 - protein, 219 aa, Unknown
  Bacterial polypetide isolated from the Sargasso Sea
MSVLLKLKKVNLKYKTGKANINVLNNINLITKKKETVSIVGESGSGKTSLIMLVGGLERATSGKIFFQDRDITKLNEDQVSKIRKKSIGIIFQSFYLIPNYTAVENVALTLELNKFKNPDRTAKELLDRFGLKHRLDNLPSQLSGGEQQRVAIARAIAMKPELILADEPTGNLDTENSIMISKILFNYVKEEGSSLIIVTHDSKLANKTDRKIKIKDGK

SEQ ID NO: 146674 - protein, 118 aa, Unknown
  Bacterial polypetide isolated from the Sargasso Sea
MASLAINDNKELAISNAQKLLKKIGLFKRADHFPSQLSGGEAQRVAIARAIVNDPEIILADEPTGSLDMETAKDVFELLNRQKRSDRLIIFATHNRFFANKADCLLEMMDGSIKSSNA

SEQ ID NO: 146675 - protein, 167 aa, Unknown
  Bacterial polypetide isolated from the Sargasso Sea
GGLEKPTSGKIIFNDQDITGISEDEVSEIRKKNIGIIFQSFYLIPNYTAVENVTLSLELNNFKNPENEAKILLDRFGLKHRFNNLPSQLSGGEQQRVAIARAIAMKPELILADEPTGNLDTENSIMIANILFKYVKEEGSSLIMVTHDPKLADRAKRKIKIKDGKIK

SEQ ID NO: 146676 - protein, 238 aa, Unknown
  Bacterial polypetide isolated from the Sargasso Sea
MNKILLETNDLTKSYEHLNGTITLFKNFNIKIKKGDLVALVGPSGSGKSSLLHLLALLDEPSKGKIIIDKQETKNLSNNKRDELRRKSISVIFQDNNLLTDFTALENIMMPLIIKGEKSKTISEKASKIMKDLKIQNRSNHFPNELSGGEQQRVAIARALIAETKLILADEPTGNLDFKTSKEIFSLFIKLKKLGKTVIFATHNRELANRADYKLYISDGIIKQSECSLRKKINHIKI

SEQ ID NO: 146677 - protein, 221 aa, Unknown
  Bacterial polypetide isolated from the Sargasso Sea
KIKNVTKNFINNKLIVKVLKNLNLELEMGNIIALIGPSGSGKSTLLHLIALLDKPTTGNISILGKETLNIAEDEKNKIIRDNISIIFQNNNLLSDFTAIENVAMPLIIRNNSYSDSIQKAEKFLKKVNLSHRLSHFPSDLSGGEQQRVAIARSLIADTKIILADEPTGNLDVKNSNEVFSYFLKLKQKNKIILIATHNREIAKKADYTLSISDGNIKRVNG

SEQ ID NO: 146678 - protein, 221 aa, Unknown
  Bacterial polypetide isolated from the Sargasso Sea
MSTLLKLKKINLKYQTGKDSISVLKNIDLNIKKKETVSVVGESGSGKTSLIMLIGGLEKPTSGKIIFQDQEITGLNEDEVSEIRKKNIGIIFQSFYLIPNYTAVENVALTLELNNFKNPEKEAKILLDRFGLKHRFNNLPSQLSGGEQQRVAIARAIAMKPELILADEPTGNLDTENSIMIANILFKYVKEEGSSLIMVTHDPKLADKAKRKIKIKDGKIK

SEQ ID NO: 146679 - protein, 147 aa, Unknown
  Bacterial polypetide isolated from the Sargasso Sea
IFRLKNIGFVFQSYNLIPVLTAKENIEFIMLMQGYSKAKRNERALGLLDAVGLSDESKRRPGQLSGGQQQRVAVARALASKPKFILADEPTANLDSTSTKNLLDIMYDLNRKEKMTFIFSTHDQRVIDRAKRVITLEDGKILSDKTT

SEQ ID NO: 146680 - protein, 158 aa, Unknown
  Bacterial polypetide isolated from the Sargasso Sea
DTKILKDEKKDLIRRERISIIFQDNNLLSDFTAFENVMMPLIIRGEKSISATKKTNKIFKEVKIFNRIDHFPNEMSGGEQQRVAIARALVAETDLILADEPTGNLDYKTSEDIFSYFLKLKKLNKAIIFATHNRELANKADYKLSISRGNIKRINGPS

SEQ ID NO: 146681 - protein, 91 aa, Unknown
  Bacterial polypetide isolated from the Sargasso Sea
SNHFPKELSGGEQQRVAIARALVAETKLILADEPTGNLDFKTSKEIFSLFLKLKKLKKTIIFATHNRELANRADYKLFISEGNIKRANALK

SEQ ID NO: 146682 - protein, 106 aa, Unknown
  Bacterial polypetide isolated from the Sargasso Sea
NNEKKKATSLLSDIGLDHRKDNLPSELSGGEQQRVAIARAISFGPEIILADEPTGNLDTKNTKLVSDLLLKYSKKKKITLILVTHNMELAKKCDRILNIIDGRIKV

SEQ ID NO: 146683 - protein, 148 aa, Unknown
  Bacterial polypetide isolated from the Sargasso Sea
KKKQLIREDISIIFQNNNLLSDFTALENVAMPLIIRDEKYKKSTLIAEKFLKKVNLGHRLNHFPSDLSGGEQQRVAIARALIAETKIILADEPTGNLDNKNAKDIFSYFLKLREKNKIILIATHNRELAKKADYALSISDGDIKRINV

SEQ ID NO: 146684 - protein, 159 aa, Unknown
  Bacterial polypetide isolated from the Sargasso Sea
NKYNVNFNNTEKNDIFRSKKIGIVYQQNNLLPDFTALENIYLASLAVNKNKVSAISNAEKLLKKIGLSKRADHFPSQLSVGEAQRVAIARAIVNDPEIILADEPTGSLDIETAKDVFELLNNQKRSNRLIIFATHNRFFANKADCLLEMIDGSIRSANG

SEQ ID NO: 146685 - protein, 182 aa, Unknown
  Bacterial polypetide isolated from the Sargasso Sea
VGESGSGKTSLIMLIGGLEKPTSGKIIFNDQDITGLSEDEVSEIRKKNIGIIFQSFYLIPNYTAVENVALTLELNNFKNPEKEAKILLDRFGLKHRFNNLPSQLSGGEQQRVAIARAIAMKPELILADEPTGNLDTENSIMIANILFKYVKEEGSSLIMVTHDPKLADKAKRKIKIKDGKIK

SEQ ID NO: 146686 - protein, 212 aa, Unknown
  Bacterial polypetide isolated from the Sargasso Sea
MSKILLEIINLRKTYKHVNGNINLFNNLNLKIKQGDLIALVGPSGSGKSSLLHLLALLDEPTKGDIKINNDFTKKFADQEKDEVRRKNISIIFQDNNLLNDFTAIENVMMPLIIKGEDMENAKNKAKTILKTMKIFDRSQHFPKELSGGEQQRVAIARAVIAETNIILADEPTGNLDFKTSKEIFSYFLKLKKLKKTIIFATHNRELANRAD

SEQ ID NO: 146687 - protein, 148 aa, Unknown
  Bacterial polypetide isolated from the Sargasso Sea
ACRFSNRKNHMPYELSGGEQQRIAIAVALSNNPPLILADEPTGELDDETSQNILDLLNKLNQKLNTTIVIVTHDPKISNDVSRSITIKDGKTSLETQIINNEKNEYLLIDSIGSLQIPKKILDSNNIDKRVKIYNEGGVIKIEADNEK

SEQ ID NO: 146688 - protein, 190 aa, Unknown
  Bacterial polypetide isolated from the Sargasso Sea
MSALIKLKKINLKYQTGKESIRVLKNIDLNIKKKETVSVVGESGSGKTSLIMLIGGLEKPTSGKIIFNDQEITGLSEDEVSEIRKKNIGIIFQSFYLIPNYTAVENVALTLELNNFKNPEKEAKILLDRFGLKHRFNNLPSQLSGGEQQRVAIARAIAMKPELILADEPTGNLDTENSIMIANILFKYVK

SEQ ID NO: 146689 - protein, 186 aa, Unknown
  Bacterial polypetide isolated from the Sargasso Sea
GPSGSGKSTFLHLISLLDIPSKGKIKILGKSITDLSDNEKNKLIREHISIIFQNNNLLSDFTALENVAFPLIIRDKDYKTSTKLAEKFLKKVNLGHRLNHFPSDLSGGEQQRVAIARALIAETKIILADEPTGNLDNKNSKEVFSYFLKLKEKNKIILIATHNRELAKKADYTLSIFDGNIKRVNV

SEQ ID NO: 146690 - protein, 155 aa, Unknown
  Bacterial polypetide isolated from the Sargasso Sea
RNFKDEKKDEIRRNNISIIFQDNNLLTDFTAIENVMMPLLIKGKNKKNAREIAEKILKSVKILQRSNHFPNELSGGEQQRVAIARALIAETNLILADEPTGNLDRKTSIEIFSYFLKLKKLKKTIIFATHNRELANRADYKLFISDGIIKRVNVK

SEQ ID NO: 146691 - protein, 210 aa, Unknown
  Bacterial polypetide isolated from the Sargasso Sea
MEKKINVLRSLSRKFKPGKIYAIMGPSGSGKSTLLNLISLIDKPTSGTVKYNKVEINFDQNEKNDLFRAKKIGIVYQENNLLSDFTALENVYFASLSLNNDKKLAISKAEKLLKKIGLSNRLNHFPSQLSGGEAQRVAIARAIINDPQIILADEPTGSLDMNTAKDIFKLLNNQKRSDRIIIFATHNRFFGKKADYLLEMRDGDIKSSYA

SEQ ID NO: 146692 - protein, 223 aa, Unknown
  Bacterial polypetide isolated from the Sargasso Sea
LETTNLKKSFDHVNGSITLFNNFNIKFKEGELVALVGPSGSGKSSLLHLLGLLDQPTKGNITLNREVTKKLSNTQKDEIRKKNISIIFQDNNLLNDFTAIENVMMPLIIREDNKQAIQKKAEKILNELKILNRSNHFPNELSGGEQQRVAIARALIAETNLILADEPTGNLDFKTSKEIFSLFLKLKKLKKTIIFATHNRELANRADYKLFISEGTIKRVNAR

SEQ ID NO: 146693 - protein, 264 aa, Unknown
  Bacterial polypetide isolated from the Sargasso Sea
MIDDKIDKDAILQAIALYHVYSSTAEDGNVVALRGLNVSVKKGEAVAIVGPSGSGKSTLLKCLGVLMKPSAGGVILNGISTTRRTGIELVKMRQETVSFIFQEGNLLPDLSAIDNVAQALRHKDVRPSEAKSKAKEILVELGLEERINSMPETLSGGEQQRVAIARALVTEPKLILADEPTGALDPITSREVLELFGKLHRDKGVAFLIVTHSDEVAAFCDRSLELRDGRFVAEHGTNLDVDDLEGTRELIVDELGTVSFPPEV

SEQ ID NO: 146694 - protein, 114 aa, Unknown
  Bacterial polypetide isolated from the Sargasso Sea
WVFKSERNERATEVLTQVGLADRMDHKPNQLSGGQRQRVAVGRALVNKPSIILADEPTGNLDSKTSVEIMGLFDEIHANGNTVILVTHEEDIAEHAHRIIRLRDGVIESDKKNK

SEQ ID NO: 146695 - protein, 215 aa, Unknown
  Bacterial polypetide isolated from the Sargasso Sea
MSTLLRLKKINLKYQTGKDNIRVLNNIDLNIEKKETVSVVGESGSGKTSLIMLVGGLEKPTSGKIIFQNQEITSLNEDEVSEIRKKNIGIVFQSFYLIPNYTAVENVALTLELNNFTNPEKEAKILLDRFALKHRFNNLPSQLSGGEQQRVAIARAIAMKPQLILADEPTGNLDTENSMLISNILFKYVKEEGSSLIMATHDPKLADKAKRKIKI

SEQ ID NO: 146696 - protein, 165 aa, Unknown
  Bacterial polypetide isolated from the Sargasso Sea
MGSIHFDKIPVNFNESEKNDVYRSKKIGIVYQQNNLLPDFTALENIYLSSLAINDNKELAISNAEKLLKKIGLSKRADHFPSQLSGGEAQRVAIARAIVNDPEIILADEPTGSLDMETAKDVFELLYKQKKSDRLIIFATHNRFFANKADCLLEMIDGSIKSSNV

SEQ ID NO: 146697 - protein, 196 aa, Unknown
  Bacterial polypetide isolated from the Sargasso Sea
LRTINGLETSSGGEIFFDNKKIDNNSIPEVQKKTGMIFQEFNLVNNLSAINNVLTGLLNTSNKFLSLFYLFKKDQKIEALKSLKTVGLLEKSYNRSDELSGGQRQRVGIARAIIKRPLLLLADEPVASLDPKAANLILSLLKKINKEFGTTILCNLHQVDLAKKYSDRLVGLLDGKIIFDEKSENINKSNLEKIYV

SEQ ID NO: 146698 - protein, 179 aa, Unknown
  Bacterial polypetide isolated from the Sargasso Sea
SGKTTLLNILACLDRPTSGVYNFFGEDVSSKTNDQMSEIRNLRIGFIFQSFNLIPRHTALENVMMPLHYSDRHKSSNFKEMGLNALDLVGLSDRTGHYPNELSGGQQQRVAIARALVTNPEIILADEPTGNLDSKTSDDIMSLLKNLNSNGKTVITITHDNEIASQASEIIKIKDGRVL

SEQ ID NO: 146699 - protein, 199 aa, Unknown
  Bacterial polypetide isolated from the Sargasso Sea
NVSVIFQQFNLVERLSVMTNVLTGYLGQINGLRGTFGFFSRDEKHAAMRALARVGIAETAPQRASTLSGGQQQRAAIARALVQGSEIILADEPIASLDPASSKRVMETLQEINQTDKKTVVVSLHQVDYAMRYCSRAVALREGEIVYDGPSAAFNSAMLRDLYGADCDELLSENAEPAMQNIRPLPTPQLDASIKAVTA

SEQ ID NO: 146700 - protein, 82 aa, Unknown
  Bacterial polypetide isolated from the Sargasso Sea
PSQLSGGEQQRVAIARAIAMKPELILADEPTGNLDTENSIMITNILFKYVKEEGSSLIMVTHDPKLADKAKRKIKIKDGKIK

SEQ ID NO: 146701 - protein, 200 aa, Unknown
  Bacterial polypetide isolated from the Sargasso Sea
MNNIIELKNIVKNYHKKKKIRVLNRVKFSFKAGKIYSLMGPSGSGKSTLLNLLSLIDIPTSGTIKILNNSIDFSLKSQNDKLRAKKIGIIYQDNNLLNDFTVIENVYLARLCLEENKEKAILDAKKLIKKLGLSNRENHLSSELSGGEMQRVAIARALINSPDIILADEPTGSLDMKNAKEVFKILLKLKNKNRLIIFAT

SEQ ID NO: 146702 - protein, 210 aa, Unknown
  Bacterial polypetide isolated from the Sargasso Sea
MNNLITLNKISKSFITSKKINVLKKISFKFNLGKMYSIVGPSGSGKSTLLNILSLIDKPTSGIISINGNNINFLNSSTNDRIRAEKIGIIYQQNNLLPDFTALENIYLAKLSLINNKKKAVQSANDIIKKMGLIDRINHYPSELSGGEIQRVAIARALINKPQIILADEPTGSLDQTTAKDVFNVLHKLKNSNRIIIYATHNRYFANKAD

SEQ ID NO: 146703 - protein, 126 aa, Unknown
  Bacterial polypetide isolated from the Sargasso Sea
FTALENVYFASLSVNNDKELAKSKAIKLLKKIGLSNRLNHFPSQLSGGEAQRVAIARAIINDPQIILADEPTGSLDLNTAKEIFKLLNKQKRSDRIIIFATHNRFFAKKADYLLEMRDGSIKSSNV

SEQ ID NO: 146704 - protein, 207 aa, Unknown
  Bacterial polypetide isolated from the Sargasso Sea
SERREFRREVQPIFQDPYGSYNPFYKVDHVLFTPIKNFKMAESRDEAVDMVEKALELVGLVPAETLGRLPHQLSGGQRQRVMVARALLLKPRVILADEPVSAVDASLRATILDAVSKLNKDLGIALVYVTHDLTTAYQISDEIMILFKGNLVEAGDVETVIKDPKHPYTQLLIDSIPEADPGKKWGKLDMEKTQNKILTSPSVGWRK

SEQ ID NO: 146705 - protein, 221 aa, Unknown
  Bacterial polypetide isolated from the Sargasso Sea
MTTLLKLQNVNLKYQNDKKNLKVLNNINLTVKKKETISIVGESGSGKTSLIMLIGGLEKATSGKIYFNNNDLTNLSEDKISEIRRKNIGIVFQSFYLIPNYSALENVALTLELNKFRNPNSQAKELLYRFGLKNRFNNLPSQLSGGEQQRVAIARAIAMKPELILADEPTGNLDSENSLMISKILFNYVAEEGSSLIMVTHDHKLANKSKRKIKIIDGKIS

SEQ ID NO: 146706 - protein, 166 aa, Unknown
  Bacterial polypetide isolated from the Sargasso Sea
TVFQNVLTGRLGFHSLFRSILPLPKFDQELALDCIDRVSLLDKALVKVKELSGGQQQRVGIARALAQNPSLILADEPIASLDPKTSHQVLSMLKDICKKDNISALTSLHQVDFAKEYGDRIIGLSHGKIVFNGKSDQLSDEILKNIYSSSPITEEANFTSNEVVMV

SEQ ID NO: 146707 - protein, 183 aa, Unknown
  Bacterial polypetide isolated from the Sargasso Sea
EIYFDNQIVNNNTIPEVQKKTGMIFQEFNLVNNLSAINNVLTGLLNSSNKFLSLFYLFKKTQKIEALKSLKTVGLLEKSYNRSDELSGGQRQRVGIARAITKRPLLLLADEPVASLDPKAANLILSLLKKINKEFGTTILCNLHQVDLAKKYSDRLVGLLDGKIIFDEKSENINKSNLEKIYV

SEQ ID NO: 146708 - protein, 227 aa, Unknown
  Bacterial polypetide isolated from the Sargasso Sea
MKKKILIQTTDLSLSFPSASGKLQILNSVNFSLFEEETVALVGPSGSGKSSLLMLLGGLEDSESGSIIVNGSEITKLSEDQLTNLRKNTIGIIFQSFHLIPTITALDNVSIPLELAGYLNVKNRAIEILNEVGLEKRLNHFPSQLSGGEQQRVAIARALAIKPKIILADEPTGNLDQNTGLKIIDLLFSLNKKNKSSLVIVTHSTELAKKCQRQVKLENGKTLESHR

SEQ ID NO: 146709 - protein, 96 aa, Unknown
  Bacterial polypetide isolated from the Sargasso Sea
KISNRANHFPNELSGGEQQRVAIARALVAETDLILADEPTGNLDYKTSEEIFSYFLRLKKLKKTIIFATHNRELANKADYKLSISKGDIKRVNARS

SEQ ID NO: 146710 - protein, 228 aa, Unknown
  Bacterial polypetide isolated from the Sargasso Sea
MNKILIETVNLKKTHKHFNGDITLFNNLNLKIKQGDLVALVGPSGSGKSSLLHLLALLDEPTKGDIKINDILTKKFTDEKKDETRRRNISIIFQDNNLLNDFTAIENVMMPLIIKGENLVNAKKEAQKILKAVKISDRSHHFPNELSGGEQQRVAIARALIAETNLILADEPTGNLDFKTSKEIFSYFLKLKKLKKTIIFATHNRELANRADYKLFISNGDIKRVNAR

SEQ ID NO: 146711 - protein, 207 aa, Unknown
  Bacterial polypetide isolated from the Sargasso Sea
LKKINFSFKAGKVYSLMGPSGSGKSTLLNLLSLIDTPNSGTLKISNHVINHKLQTDNDKLRANKIGIIYQDNNLLSDFTTIENIYLSRLSIDENKNKALEDSKKLIRKLGLTNRENHLASELSGGEMQRVAIARALINSPEIILADEPTGSLDMKNARDVFKILLKLKNKNRLIIFATHNRFFANMADCKIELISGKIKRSTNARIK

SEQ ID NO: 146712 - protein, 120 aa, Unknown
  Bacterial polypetide isolated from the Sargasso Sea
MLIGGLERATSGKIFFQNHEITKLNEDEVSEIRKKNIGIIFQSFYLIPNYTAVENIALTLELNKFKNPEREAKHLLERFGLKDRFNNLPGQLSGGEQQRVAIARAIAMKPELILADEPTG

SEQ ID NO: 146713 - protein, 270 aa, Unknown
  Bacterial polypetide isolated from the Sargasso Sea
MLRIEDLNKKYPTGDEALKDVKLEVPKGQVMALIGPSGAGKSTLIRCVNRLVEPTKGKVFLGELELTQLSRWKLRQARRRMGMIFQEYALVERLTVMENVLSGRLGYVGFWRSWFRRFPGKDVREAYRLLDRVGLIEMADKRADELSGGQRQRVGICRALIQNPDLLLVDEPTASLDPKTSRQIMRLINELCDERSLAAIINIHDVLLAQMFSKRIVGLEQGSIVYDGPPEDLTPEVLTRIYGEENWEATIGKVEEENEEEDSTNSEAAS

SEQ ID NO: 146714 - protein, 221 aa, Unknown
  Bacterial polypetide isolated from the Sargasso Sea
MSVLLKLKKINLKYQTGKDNISVLKNIDLIIKKKETVSVVGESGSGKTSLIMLIGGLERPTSGKIFFQKQEITSLNEDEVSEIRKKNIGIIFQSFYLIPNYSAVENVALTLELNRFKNPEKEAKLLLERFGLKHRFNNLPSQLSGGEQQRVAIARAIAMKPDLILADEPTGNLDTENSLMISDILFKYVKEEGSSLIIVTHDPKLANKAKRKIKIKDGKIK

SEQ ID NO: 146715 - protein, 554 aa, Unknown
  Bacterial polypetide isolated from the Sargasso Sea
MAQYVFTMNRVGKIVPPKRQILKDISLSFFPGAKIGLLGLNGSGKSTLIRIMAGVDKDIEGEATPMPNLNIGYLPQEPQLDPNKTVREAVEEGLGDVFGAQKKLDEIYAAYAEPDADFDALAAEQAKYEAILATTDGSAEQQIEIAADALRLPPWDAKIEHLSGGEKRRVALCKLLLEKPDMLLLDEPTNHLDAESVDWLEQFLTRFPGTVVAVTHDRYFLDNAAEWILELDRGHGIPWKGNYSSWLDQKEERLKQEESSESARQKAIKKELEWVRQNPKGRQAKSKARIARFEELNSQDYQKRNETQEIFIPVGDRLGNEVIEFKNVSKSYGDRLLLDNVSFKVPPGAIVGIIGPNGAGKSTLFRMLTGREQPDSGEIVQGPTVKLAYVDQSRDALDGSKTVFEEISGGADVLTVGKYETPSRAYIGRFNFKGGDQQKTVGNLSGGERGRLHLAKTLIAGGNVLLLDEPSNDLDVETLRALEDALLEFAGSVMVISHDRWFLDRIATHILAFEGDSQITFFDGNYQEYEADKRARLGEEAARPKRLRYKPIAR

SEQ ID NO: 146716 - protein, 236 aa, Unknown
  Bacterial polypetide isolated from the Sargasso Sea
MSGKGIRIEGLRKRYGEGDTAVNALKGVDMQVAPGEVVGLIGPSGSGKSTLLKCLGAVIDPTAGRMTLGDEVIYDDGWKVRDLRALRRDKIGFVFQAPYLIPFLDVTDNVALLPMLAGVANGESRAKALELLTALDVQHRARAMPSQLSGGEQQRVAIARGLVNRPPVILADEPTAPLDSERAMAVIRILNDMARKFETAIIVVTHDEKIIPTFKRIYHIRDGVTHEEAGEGREFE

SEQ ID NO: 146717 - protein, 216 aa, Unknown
  Bacterial polypetide isolated from the Sargasso Sea
MQKSFEKGDLSVDVIKGVDFIIQSGETVAITGPSGSGKTTLLQIIGLLDSPTSGSVSIDGKNETISKESRKASLRNQYFGFVYQFHHLIPEFTAIENVMMPLLVRNQSISKSGKKSEEILKEIGMDHRLNHKPHELSGGECQRVAIARALVTEPQFILADEPTGNLDPKASLNIFNQFMDLRDTIGSALILVTHDQTLAEKMSTVYKIDGGTLIRK

SEQ ID NO: 146718 - protein, 229 aa, Unknown
  Bacterial polypetide isolated from the Sargasso Sea
MQKILSAKNISKSFDRSKVLDSVDLSINQGEIIVITGSSGAGKTTLLNILGTIESPDFKDKSSLKICNTDIFTLDDRELSKFRNKNIGFVFQFHELLPEFTCLENVCLPGWIDNSKNISEIEDRAMSLFEILGLEDKVKMKPATLSGGEKQRVSIARSLINNPEIILADEPSGNLDSKNTETIYNIFWNYRKRFGGTFIIVTHDQSLAKGADKHFIINDGKISLGKNAK

SEQ ID NO: 146719 - protein, 216 aa, Unknown
  Bacterial polypetide isolated from the Sargasso Sea
MHKVFQKGDSTVDVLKGVNFDIDSGETVAITGPSGSGKTTLLQIIGLLDSPSDGSVNINDEDESKSKESRKSKLRNQYFGFIYQFHHLIPEFTALENVMMPLLVRNQSITECRKKSAGILEKIGMHHRLNHKPNELSGGECQRVAIARALVTEPQFILADEPTGNLDPNASTNIFNQFMELRDTAGSGLILVTHDQTLAEKMSMVYKLDGGILVRK

SEQ ID NO: 146720 - protein, 225 aa, Unknown
  Bacterial polypetide isolated from the Sargasso Sea
MIKFDSISKEYLMGDNKLLALNNINVSISDGEFVSIMGSSGSGKSTLMNIIGCLDVPSSGDYFFKDDNISKFNANKLAELRNKEIGFIFQNFNLLPRLNSLENVVLPLLYSGKNQKERNNLALKALEDVGLKDRIHHRPNQLSGGQQQRVSIARAIAGSPKLILADEPTGALDSKTSIEIMTILNKLNAKGITVVLVTHEDDIAKYGSRIIKMKDGQIIEDKKNV

SEQ ID NO: 146721 - protein, 199 aa, Unknown
  Bacterial polypetide isolated from the Sargasso Sea
MKEGEIIGLLGPSGSGKTTLLNCIGLLDSPKSGIIKILNVNCNHANDFERTKIRSKQIGFVFQNHRLFPEFSSIENIIIPQLLLGIDKKIAYKNASELLKLLNLKHRSDHRPARLSGGEAQRVAIARSVANAPKIILADEPTGNLDIESAKLVFDLLYKIVKMSKISCLIATHNVDLAKKMDKIYSIKDKKLKLTKNFN

SEQ ID NO: 146722 - protein, 221 aa, Unknown
  Bacterial polypetide isolated from the Sargasso Sea
MSALLKLKKINLKYQTGKDSISVLKNIDLNIKKKETVSVVGESGSGKTSLIMLIGGLEKPTSGKIIFNDQEITGLSEDEVSEIRKKNIGIIFQSFYLIPNYTAVENVALTLELNNFKNPEKEAKILLDRFGLKHRFNNLPSQLSGGEQQRVAIARAIAMKPELILADEPTGNLDTENSIMIANILFKYVKEEGSSLIMVTHDPKLADKAKRKIKIKDGKIK

SEQ ID NO: 146723 - protein, 217 aa, Unknown
  Bacterial polypetide isolated from the Sargasso Sea
MIEFQNVSYTHSKGKGVTNLTFSIDDGEFVFLIGPTGSGKTTLMRLIYFDLWCDTGKIIVGTHISELMKKKHVPQIRRNIGMVFQDYHLLNDRNVFHNVALPLHVMGYSANEIPYRVDEALELVGFEGKRDHYPNELSGGEKQRVTLARAIVKEPDLILADEPTGNLDPVAAFELVQLLDTINSNGTTILMASHNYNLIKGRGRRILELKDGAIRGS

SEQ ID NO: 146724 - protein, 228 aa, Unknown
  Bacterial polypetide isolated from the Sargasso Sea
MNNIIEINNLEKSYNKKKIKVIDKVNYKFKNGKIYSLIGPSGSGKSTLLNLLSLIDIPNSGTILINNQKINFKEKNKNDQIRSNKIGIIYQDKNLLSDFTVLENVYLPRLAISNNKIDAIKDSKSLLKKFFLLKRQNHFTSELSGGEMQRVAIARALINTPSIILADEPTGNLDFKNAKIVFKTLFKLRSKNRLIIYATHNRYFANLADCKIELFNGKIKTISNVRKK

SEQ ID NO: 146725 - protein, 254 aa, Unknown
  Bacterial polypetide isolated from the Sargasso Sea
MEELLNVKQLSVLFGENNFAVRDINFSLQDGEFVVLLGSSGAGKSTLLRSLNGLVQPCSGSIRSRHHGEISASTNRQLRAHRRDTAMVFQQHQLIDRLSVLDNVLMGRLGYHSFLRSLLPLPQSDRQKALSALERVSLIDKALARVKDLSGGQQQRVGIARALVQEPRLILADEPIASLDPESSAQILSLLKDICQRDRIAVLVSLHQVEFARQFADRIIGMAAGRIICDQHSVTLEESEIHALYRHKLEAAVT

SEQ ID NO: 146726 - protein, 227 aa, Unknown
  Bacterial polypetide isolated from the Sargasso Sea
MININAITKEYIMGDNKLLALNEVDVSIKEGEFVSIMGSSGSGKSTLMNIIGCLDVPTSGDYFFRNKNISNYNSNMLAELRNKDIGFIFQNFNLLPRLNALENVTLPLLYSGKNIKERTKLSMEALENVGLKDRTHHKPNQLSGGQQQRVSIARAIAGNPKLILADEPTGALDSYTSLEIMKILNDLNSNGITIILVTHEKDIAQYGSRIIKMKDGKIIEDKKNVSN

SEQ ID NO: 146727 - protein, 135 aa, Unknown
  Bacterial polypetide isolated from the Sargasso Sea
SFLAPQNSRSRAMDCLRKVNLSHLAMKRVDSLSGGQSQRVAIARALMQRPKLLLADEPVASLDPVAAKTVMELLTELCKKEKITVIFTSHNVEDAVKYSDKVLALKEGEISFLKASKAIDPTELIEQYDSSVRNV

SEQ ID NO: 146728 - protein, 179 aa, Unknown
  Bacterial polypetide isolated from the Sargasso Sea
MREPLLQLSGIRRHFGDGERRVEVLKGIDLTIARGEMVAIVGASGSGKSTLLNILGCLDQPSEGSYRVAGRETGRLTADALATLRREHFGFIFQRYHLLGDLSARDNVALPALYAGLAGDARKARAESLLQRLGLGSRLDYKPSQLSGGQQQRVSIARALINGGQVILADEPTGPSTVR

SEQ ID NO: 146729 - protein, 317 aa, Unknown
  Bacterial polypetide isolated from the Sargasso Sea
MTSKLLPTVKALSCPTTTLRLSRRLNPQEAAMTAALHIHQLNKHFANGKHALRDINLTVQRGEMVALIGASGSGKSTLLRHVAGLVVADASSDSLIEVDGRCVQQAGRIHSDIRKVRSQVGFVFQQFNLVDRLPVLMNVLVGLLHRTPWWRGWLRMFKPHERALALEALHRVGIAECHAQRASTLSGGQQQRAAIARTLVQGAKVVLADEPIASLDPESSRKVMDILARINREDRCTVIVSLHQVDVAIKYCPRVVALHHGQVVYDGPSAALTPALLRGLYGVQADEILSDASSAHPAPAHTPMPAPQWSPAMVQAA

SEQ ID NO: 146730 - protein, 264 aa, Unknown
  Bacterial polypetide isolated from the Sargasso Sea
MLQLAELTKKYNTGELALKGVTLEIPKGQVLALIGPSGAGKSTLIRCVNRLVQPTSGSVVLKGTELTKLSSSALRKARRRMGMIFQEYALVERLTVMENVLSGRLGYVGFWRSYFRKFPSADIQEAYRLLDRVGLKHMADKRADELSGGQRQRVGICRALIQNPDLLLVDEPTASLDPKTSRQIMRLIQELCSERGLTAIINIHDVFLAQMFSQRVVGLELGSVVYDGKPEGLTPEVLTRIYGEEDWSATIKSTDEDDEDEEEF

SEQ ID NO: 146731 - protein, 221 aa, Unknown
  Bacterial polypetide isolated from the Sargasso Sea
MSTLLRLKKINLKYQTGKDNIRVLKNIDLNIKKKETVSVVGESGSGKTSLIMLVGGLEKPTSGKIIFQNQEITSLNEDEVSEIRKKNIGIVFQSFYLIPNYTAVENVALTLELNNFKNPEKEAKILLDRFGLKHRFNNLPSQLSGGEQQRVAIARAIAMKPELILADEPTGNLDTENSTLISNILFKYVKEEGSSLIMVTHDPKLADKAKRKIKIKDGKIK

SEQ ID NO: 146732 - protein, 221 aa, Unknown
  Bacterial polypetide isolated from the Sargasso Sea
MSALLKLKKINLKYQTGKENISVLKDIDLIIKKKEIVSVVGESGSGKTSLIMLIGGLERPTSGKIIFQDQEITNLNEDEVSEIRKKNIGTIFQSFYLIPNYTAIENVALTLELNKFKNPEKEAKLLLERFGLKHRFNNLPSQLSGGEQQRVAIARAIAMKPELILADEPTGNLDTENSIMISEILFKYVKEEGSSLIIVTHDPKLANKAKRKIRIKDGKIK

SEQ ID NO: 146733 - protein, 231 aa, Unknown
  Bacterial polypetide isolated from the Sargasso Sea
MKKILEINNLLFRWDKNDDFYLKINSFSIEKNKKIVLFGKSGVGKSTLLNLISGILEPELGSIKINNTIVNKLSQTKKDNFRANNIGVIFQQFNILDYMSPLKNILLPCYFTGFKKEDTNFFYQRAHSLAEKLNLNKKILTQEKSKELSVGQIQRISIIRSIINKPKLILADEPTSALDNINKKKFLDMLFNICNIEKITILMVSHDTSLRKNFDTTLHLEEILKKNENII

SEQ ID NO: 146734 - protein, 190 aa, Unknown
  Bacterial polypetide isolated from the Sargasso Sea
SGCGKSTLLSILGMLDSPSSGAYLFQGTDIAHYSEKQLAELRKTQLGFVFQSFNLIDELTVFQNVELPLQYQGVAASERRSRVEAILKRMQIDHRADHLPLQLSGGQQQRVAVARALVINPALILADEPTGNLDSKNSEEVMQMLRQLNREGTSVVMVTHSEHESRYASRIVRMLDGQIITERALEAKYA

SEQ ID NO: 146735 - protein, 221 aa, Unknown
  Bacterial polypetide isolated from the Sargasso Sea
MNTLLKLKKINLKYQTGKDNINVLKNIDLTIKKKETVSVVGESGSGKTSLIMLIGGLERPTSGKIIFQDREITNLNEDEVSEIRKQNIGIIFQSFYLIPNYTAVENVALTLELNEFKNPEKEAKSLLDRFGLKHRFNNLPSQLSGGEQQRVAIARAIAMKPDLILADEPTGNLDTENSIMISEILFKYVKEEGSSLIMVTHDPKLADKAKRKIKIKDGKIK

SEQ ID NO: 146736 - protein, 185 aa, Unknown
  Bacterial polypetide isolated from the Sargasso Sea
MNNFLELKKIFKTFKTEKTVKVLKNLSQKFDKGKSYSIMGPSGSGKSTLLNLISLIDRPSSGSIHFDKIPVNFNESEKNDVYRSKKIGIVYQQNNLLPDFTALENIYLASLAINNNKELAIFNAEKLLKKIGLSKRADHFPSQLSGGEAQRVAIARAIVNDPEIILADEPTGSLDMETAKDVFEL

SEQ ID NO: 146737 - protein, 228 aa, Unknown
  Bacterial polypetide isolated from the Sargasso Sea
MINSIVETLNLKKTYKHSNGNITLFDKLNIKIKRGELVALVGPSGSGKSSLLHLLALLDEPSKGSIKINDISTNKLNDEEKDKIRREKISIIFQDNNLLNDFTAIENVMMPLLIKNIKRDEAKKRAQKILMSVKLFERSQHFPNELSGGEQQRVAIARALIAETNLILADEPTGNLDYKTSSEIFSYFLKLKKIKKTIIFATHNRELANRADYKLSISNGGIKRINVR

SEQ ID NO: 146738 - protein, 270 aa, Unknown
  Bacterial polypetide isolated from the Sargasso Sea
MLRIEDLDKKYSTGDEALKGVKLEVPKGQVMALIGPSGAGKSTLIRCVNRLVEPTKGKVFLGELELTQLSRWKLRQARRRMGMIFQEYALVERLTVMENVLSGRLGYVGFWRSWFRRFPGEDVCEAYRLLDRVGLMEMADKRADELSGGQRQRVGICRALIQNPDLLLVDEPTASLDPKTSRQIMRLINELCEERGLAAIINIHDVLLAQMFSKRIVGLEQGSIVYDGTPEDLTPEVLTRIYGEENWEATIGKVEDEEMDEDSTTLEANS

SEQ ID NO: 146739 - protein, 98 aa, Unknown
  Bacterial polypetide isolated from the Sargasso Sea
ALAQKPKVMLADEPVASLDPITSRVVMKYLKEINQELGITTIVNLHFLDLAKEFGERLIGLKDGELVYDGKVNDVSDKDFENIYGRAIKSSDLLGDDD

SEQ ID NO: 146740 - protein, 233 aa, Unknown
  Bacterial polypetide isolated from the Sargasso Sea
MLRVSNLRKGFGSGSRRLEVLKGINMEVKPGELVSLMGPSGCGKSTLLNIIGGLLEADSGEISLGSFNYGTKSPNRVVDVRRSGVGWIFQDFHLVDRLDALDNVAFSLELSGMSSSEAEGRAMDALMRVGLADRMNFIPDQLSGGQQQRVAVARAISGSRPLILADEPTGNLDVKSGQEVIKLFKDLCANDGLSVLMVTHDPMLASMADRMLLLKDGVTAASDIRSAWGIEEE

SEQ ID NO: 146741 - protein, 183 aa, Unknown
  Bacterial polypetide isolated from the Sargasso Sea
GSGKSTLLNLISLIDRPSSGLIHFGNIPINFNESEKNDVYRSKKIGIVYQQNNLLPDFTALENIYLASLAINDNKELAISNAEKLLKKIGLYKRADHFPSQLSGGEAQRVAIARAIVNDPEIILADEPTGSLDMETAKDVFELLYEQKRSDRLIIFATHNRFFANKADCLLEMIDGSIKSSNV

SEQ ID NO: 146742 - protein, 225 aa, Unknown
  Bacterial polypetide isolated from the Sargasso Sea
MNNFLELKNIFKTFKTEKTVKVLKNLSQKFDKGKSYSIMGPSGSGKSTLLNLISLIDRPTSGSINFDKIPINFNESEKKDVYRSKKIGIVYQQNNLLPDFTALENIYLASLAINDNKELAISNAEKLLKKIGLTKRADHFPSQLSGGEAQRVAIARAIVNDPEVILADEPTGSLDMETAKDVFELLYKQKRSDRLIIFATHNRFFANKADCLLEMIDGSIKSSNV

SEQ ID NO: 146743 - protein, 157 aa, Unknown
  Bacterial polypetide isolated from the Sargasso Sea
IFFQNNEITKLSEDEVSEIRRKNIGIIFQSFYLIPNYTAVENVALTLELNKFKNPEKEARELLDRFGLSHRFNNLPSQLSGGEQQRVAIARAIAMKPELILADEPTGNLDTENSVMISDILFKYVKEEGSSLIMVTHDPKLANKAKRKIKIKDGKIK

SEQ ID NO: 146744 - protein, 236 aa, Unknown
  Bacterial polypetide isolated from the Sargasso Sea
MSGKGIHIESLSKRYGDGDTAVFALRDVNMHVAPGEVVGLIGPSGSGKSTLLKCLGAVIEPTAGRMTLGDEVIYADGWKVRDLRALRRDKIGFVFQAPYLIPFLDVTDNVALLPMLAGVANGESRAKALELLTALDVQHRARAMPSQLSGGEQQRVAIARGLVNRPPVILADEPTAPLDSERAMAVIRILNDMARKFETAIIVVTHDEKIIPTFKRIYHIRDGVTHEEAGEGREFE

SEQ ID NO: 146745 - protein, 134 aa, Unknown
  Bacterial polypetide isolated from the Sargasso Sea
YRNCISVIYLIPNYTAVENVALTLELNKFKNPQQQAKELLDRFGLKNRFNNLPSQLSGGEQQRVAIARAIAMKPDLILADEPTGNLDSENSVMISNILFKYVKEEGSSLIIVTHDSKLANKAKRKIKIKDGKIV

SEQ ID NO: 146746 - protein, 221 aa, Unknown
  Bacterial polypetide isolated from the Sargasso Sea
MSTLLKLKKINLKYQTGKDSISVLKNIDLNIKKKETVSVVGESGSGKTSLIMLIGGLEKPTSGKIIFNDRDITGLSEDEVSEIRKKNIGIIFQSFYLIPNYTAVENVALTLELNNFKNPEKEAKILLDRFGLKHRFNNLPSQLSGGEQQRVAIARAIAMKPELILADEPTGNLDTENSIMIANILFKYVKEEGSSLIMVTHDPKLADRAKRKVKIKDGKIK

SEQ ID NO: 146747 - protein, 225 aa, Unknown
  Bacterial polypetide isolated from the Sargasso Sea
MNNFLELINVRKSFTAEKKINVLRGLSRKFKLGKTYAIMGPSGSGKSTLLNLISLIDKPTSGTIKFDNLEINFNQNEKNDLIRAKKLGIVYQENNLLSDFTALENVYFASLSVNNDKKLALSKAEKLLKKIGLSKRLNHFPSELSGGEAQRVAIARAIINDPQIILADEPTGSLDMNTAKDIFKLLNNQKRSDRIIIFATHNRFFAKKADYLLEMRDGSIKSSNV

SEQ ID NO: 146748 - protein, 176 aa, Unknown
  Bacterial polypetide isolated from the Sargasso Sea
MNNFLELKNIQKNFTTEKRIRVLKGLSKKFKLGKIYAIMGPSGSGKSTLLNLISLIDKPTYGSIKFENLEIDFIEKEKNDLFRAKKIGIVYQQNNLLSDFTALENVYLASLAVNIDKRLAISKAEKLLKKIGLANRLNHFPPQLSGGEAQRVAIARAIINDPQIILADEPTGKFGF

SEQ ID NO: 146749 - protein, 267 aa, Unknown
  Bacterial polypetide isolated from the Sargasso Sea
MSLAPKPIITKSIPGSDKLHSALFNPPEDVLPETLPLITVILNPSFFKLFSKINDKWCSFGNPYPAIKLSPNKITFSIACALKCTRKTIKIFINKLLLMSTLLKLKKINLQYKTGKENISVLKDIDLNIQKKETVSVVGESGSGKTSLIMLIGGLERPTSGKIFFQDQEITNLKEDEISKIRKKNIGIIFQSFYLIPNYTAVENVALILELNNFNNPDKEAKYLLDRFGLKHRFNNLPSQLSGGEQQRVAIARAIAMKPELILADEP

SEQ ID NO: 146750 - protein, 195 aa, Unknown
  Bacterial polypetide isolated from the Sargasso Sea
MVLTIKKKETVSVVVKSGSGKTSLIMLVGGLEKPTSGKIIFQDKEITRLNEDEVSEIRKKNIGIIFQSFYLIPNYTAVENVALTLELNNFRNPESEAKSLLDRFGLKHRFNNLPSQLSGGEQQRVAIARAIAMKPELILADEPTGNLDTENSLMISNILFKYVKEEGSSLIMVTHDPKLANKAKRKIKIKDGKIK

SEQ ID NO: 146751 - protein, 139 aa, Unknown
  Bacterial polypetide isolated from the Sargasso Sea
ISIIFQNNNLLSDFTALENVALPLIIRETNYQTSMKKAEKFLKKVNLGHRLNHFPSDLSGGEQQRVAIARALIAETKIILADEPTGNLDNKNSNDVFSYFLKLKEKNKIILIATHNRELAKKADYTLTISDGIVKRTNV

SEQ ID NO: 146752 - protein, 229 aa, Unknown
  Bacterial polypetide isolated from the Sargasso Sea
MNKIILETLNLKKTFEHRNGTIELFKDVNIKIRKGDLIALVGPSGSGKSTLLHLLALLENPSKGKILLFNRDTKDIREDKKDKIRREKISIIFQDNNLLSDFTAFENVIMPLIIKGEKSKTTIEKTYKILKDVKLLKRKSHFPSEMSGGEQQRVAIARALVAETDLILADEPTGNLDYKTSHEIFSYFVKLKKLNKAVIFATHNRELANKADYKLSISKGNIKRVNASS

SEQ ID NO: 146753 - protein, 224 aa, Unknown
  Bacterial polypetide isolated from the Sargasso Sea
MNNFLEIINLSKTYEGVEKINILNNINFKLPDNVLVALTGPSGSGKSTLLHILSLLDSKVDGEYHLNGKRLDISNQNEKNKYRRDNISILFQNFNLINDLNAIENVILPLLNNNNFEYDFCYNKGKELLSKFNLSERTNYFPSQLSGGEQQRVAIARALINEPQLILADEPTGNLDNENSMIVINYLKELKKENRTIIFATHNRDLVNKCDLELTIKNKTVISN

SEQ ID NO: 146754 - protein, 227 aa, Unknown
  Bacterial polypetide isolated from the Sargasso Sea
MIREIIQINNLSKHFENGNSKITVLKNVNLKIETGKVVAIVGPSGSGKSTFLHLMSLLDTPSKGKIIISGKSISELNEDEKNKMVRENISIIFQNNNLLNDFTALENVALPLIIRETDYKTSIKKAEKFLKKVNLGHRLNHFPSDLSGGEQQRVAIARALIAETKIILADEPTGNLDNKNSNDIFSYFLKLREKNKIILIATHNRELAKKADYTLTISDGIVKRANV

SEQ ID NO: 146755 - protein, 328 aa, Unknown
  Bacterial polypetide isolated from the Sargasso Sea
LRENQTIGDFVLVNALLMQLSIPLNFFGFIYREISQGMIDLRSLFSVLKIEPEIKDKKNAIDMSFEKTDIEFKNVSFSYDNKRNVLNKINFKIPSGSSLAIVGPTGAGKSTISRLLFRFYDVSSGSILVNGKDVRDITQISLRKNIGVVPQDTVLFNDTIYYNLSYGKINADEKEIWEVARRAKLSELIKTLPDGMNTVVGERGLKLSGGEKQRVAIARTLLKNPPILILDEATSSLDTLTEKEIKVSLNNLAKKRTSIIIAHRLSTIVDADKILVFEKGKIIEQGTHIQLLKKKGLYADMWNTQQTIEKVEETLQNIKPEYKKLLRK

SEQ ID NO: 146756 - protein, 228 aa, Unknown
  Bacterial polypetide isolated from the Sargasso Sea
MVEPICKTLEEIVDWRVDFLTRYQSAGLARRYRQLVERVRDADSADDLALSKAVARYYFKLLAYKDEYEVARLYSEPEFRQQLEAQFEGDYKLQFHLAPAWLAKRDPVTGEPRKRELGPWVLNLFGVLAKFRFLRGTPLDPFGYGHDRRVERQLITEYEKTVDGLLAQLKPTNYRTAVAIAALPEQIRGYGPVKERSIAKARQQEKLLREQLAKGDEVQSVRLFQPAA

SEQ ID NO: 146757 - protein, 45 aa, Unknown
  Bacterial polypetide isolated from the Sargasso Sea
MSHSDRIQARFQCHFDKFALDVDLNLPGSGITAIFGHSGCGKTTL

SEQ ID NO: 146758 - protein, 91 aa, Unknown
  Bacterial polypetide isolated from the Sargasso Sea
TWGPEILLMDEPLAALDPQTIQMLQTIIIKLQSEYNLTILITDHQARDLLVVCDRAVILSNSKIVAEGTPNQLMQNDDAAKYYFGENFKFK

SEQ ID NO: 146759 - protein, 244 aa, Unknown
  Bacterial polypetide isolated from the Sargasso Sea
KSFISLENISVSFKKNHQILDNVSLNIPKGQILGLLGPNGAGKSTLMNVISGLIKPGYGKVKINNEDISDLPIYIRTKKFKISIIPQFGGLFASLTTEQNIRAVAEILINDKSFIDIKINELIAKFELDSVKEIEAKYLSGGQKRRLVIAMGLISKPDIILMDEPLAALDPQTIQMLQNTIVKLQTDFNLTIIITDHQARDLLAICDKAIILSNSKIVASGTPSDLIKDESANKFYFGNNFQFN

SEQ ID NO: 146760 - protein, 174 aa, Unknown
  Bacterial polypetide isolated from the Sargasso Sea
MLSIRVTRALSDFTLDVDVDCPYMVTAVFGPSGSGKTSLLNLVAGLLRPDRGEIVHDDDVLFSSDKSIDRPPDNRRIGYVFQDNLLFPHFTVAENLRYGHDLLLSAQRRFQVDQVADLLELGSLMERRPESLSGGESQRVAMGRAILASPRLLLMDEPLASLDQGLKNRIIPYL

SEQ ID NO: 146761 - protein, 206 aa, Unknown
  Bacterial polypetide isolated from the Sargasso Sea
IKKPKLLLLDEPLAALDKKLRSKTQIELTTLQKKLKITFVFVTHDQEEAMSLSDRMAIMKNGLILECSSPEEIYENPKSLYTANFIGIANIIEIYKKDENFYSDDLGINFKLNKELKNTKTNILLRPEKIKIQSINNLKTSSFNSFSGEILEKSYLGSFTRYEIKIKNMIISVLDQNFNSNSNYNFPKGEKVICSWESESIKVLED

SEQ ID NO: 146762 - protein, 187 aa, Unknown
  Bacterial polypetide isolated from the Sargasso Sea
MDNNFLVIENISKSFGDNKVLENINLNISKSEFFGLLGSSGSGKTTLLRILGGFEKPDTGRVILDGMDITNLEPFDRPLNYMFQSYALFPHLNVFNNLAFGIKENFTQKEIEINVRNIAELLSIEHLLNRRIKQLSGGEQQRVALGRCLIKKPKLLLLDEPLAALDKKLRSKTQLELTTLQKKLKIT

SEQ ID NO: 146763 - protein, 259 aa, Unknown
  Bacterial polypetide isolated from the Sargasso Sea
MSVIKKFRITKIKNSKPLVSLKKISLSFKKNHLILDNISLDISKGQIIGLLGPNGAGKSSLMNLITGILKPNFGNIIINNEDITEYPIYQRTKKFKISFVPQIGGFFSDLTAENNLNAIGEILIKDPKYRKSKIEELISKFELDAVRKVEAKFLSGGMKRRLVISMSLLGDPEILLMDEPLAALDPQTIQMLQSIIIRLQSEYNLTILITDHQARDLLVVCDKAVILSNSKIVAEGTPNQLMKNENAAKYYFGENFKFN

SEQ ID NO: 146764 - protein, 238 aa, Unknown
  Bacterial polypetide isolated from the Sargasso Sea
KKISLSFKKNHLILDNISIDISKGQVIGLLGPNGAGKSSLMNLITGVIKPNYGNIIINNEDITQYPIYVRTKKFKISSVPQIGGFFADLSCEDNLNAVGEILIKDIKKRKLKIEELISKFELDAVRKVEAKFLSGGMKRRLVISMSLLGEPEILLMDEPLAALDPQTIQMLQTIIIKLQSEYNLTILITDHQARDLLVVCDRAVILSNSKIVAEGTPNQLMQDDNAAKYYFGDNFKFK

SEQ ID NO: 146765 - protein, 237 aa, Unknown
  Bacterial polypetide isolated from the Sargasso Sea
AELLSIEHLLNRRIKQLSGGEQQRVALGRCLIKKPKLLLLDEPLAALDKKLRSKTQLELTTLQKKLKITFVFVTHDQEEAMSLSDRMAIMKNGLILECSSPEEIYENPKSLYTANFIGIANIIEIYKKDENFYSDDLGINFKLNKELKNTQTNILLRPEKIKIQSMNNLKTSSFNSFSGEILEKSYLGSFTRYEIKIKNMIISVLDQNFNSNSNYNFPKGEKVICSWKSESIKVLED

SEQ ID NO: 146766 - protein, 188 aa, Unknown
  Bacterial polypetide isolated from the Sargasso Sea
MDNNFLVIENISKSFGDNKVLENINLNISKSEFFGLLGSSGSGKTTLLRILGGFEKPDTGRVILDGTDITKLEPFDRPLNYMFQSYALFPHLNVFNNLAFGIKENFTQKEIEINVRNIAELLSIEHLLNRRIKQLSGGEQQRVALGRCLIKKPKLLLLDEPLAALDKKLRSKTQLELTTLQKKLKITF

SEQ ID NO: 146767 - protein, 244 aa, Unknown
  Bacterial polypetide isolated from the Sargasso Sea
MSVIKKFRITKFKNTKPLISLKKISLSFKKNHLILDNISLDISKGQIIGLLGPNGAGKSSLMNLITGAIKPNFGDIIINNEKINQYPIYIRTKKFKISLVPQIGGFFSDLTAEDNLNAIGEILIKDVKYRKIKIEELISKFELDAVRKVEAKFLSGGMKRRLVISMSLLGEPEILLMDEPLAALDPQTIQMLQTIIIRLQSEYNLTILITDHQARDLLTVCDKAVILSNSKIVAEGTPNQLMKK

SEQ ID NO: 146768 - protein, 224 aa, Unknown
  Bacterial polypetide isolated from the Sargasso Sea
KQRVAIGRALLCQPDLLLMDEPLASLDQDKKNELIKYIVKINEILNIPAVYVSHSISETFTLANCVHFIKNGTLIYSGNRDNAINFYNKNENFLFTDSYIKGKVIKTNLLEGLTEIKLGDHSLTVFSNTLNLGQNVIVKIKATDIIISTIIPDNLSSLNYLKTRIEEVVFEKGLACLILYYEKNIIKALLTKKSYNKLNIKKGMYCYAIIKALNINDVININIV

SEQ ID NO: 146769 - protein, 366 aa, Unknown
  Bacterial polypetide isolated from the Sargasso Sea
MNTVDDEIYVKLEYSRHESQSRNFRLDVELHLPGKGITAVFGESGSGKTTLLRCIAGLEKSAFGIVKMKSEVWQEENLFLPTNLRHVGFVFQEPSLFPHLTVQGNMQFGVKRRGQIVDDNDFAEIVRLLDLGGLLSAYPSKLSGGEKQRAAIARAILTKPKLLLMDEPLAALDINRKREFLPYLEAIRERLETPIIYVTHSMEEVARLSDSLVIMREGKAVSIGTLSEVLGDVNYPSFFGDEAGVVIEGAVIERDSGWHLIRAKFSGGELWLKDTGEELGKKIRIRILARDVSLALEDYPETSIINRIKTRVAHVQSDSDAAMLIVTLLCGDTKIISRISKRSADSLNIEVGKEVWSQIKGVAILR

SEQ ID NO: 146770 - protein, 200 aa, Unknown
  Bacterial polypetide isolated from the Sargasso Sea
MDNNFLVIENISKSFGDNKVLENINLNISKSEFFGLLGSSGSGKTTLLRILGGFEKPDTGRVILDGTDITNLEPFERPLNYMFQSYALFPHLNVFNNLAFGIKENFTQKEIEINVRNIAELLSIEHLLNRRIKQLSGGEQQRVALGRCLIKKPKLLLLDEPLAALDKKLRSKTQLELTTLQKKLKITFVFVTHDSGRSNV

SEQ ID NO: 146771 - protein, 70 aa, Unknown
  Bacterial polypetide isolated from the Sargasso Sea
MVNITGLEKRFGPEVAVHGVNLSVAQGEFVTLLGPSGCGKTTTLRCIAGLERLDAGEISIGEKIVVSADK

SEQ ID NO: 146772 - protein, 59 aa, Unknown
  Bacterial polypetide isolated from the Sargasso Sea
MVNITGLEKRFGPEVAVQGVNLSVEKGEFVTLLGPSGCGKTTTLRCIAGLERLDAGEIS

SEQ ID NO: 146773 - protein, 218 aa, Unknown
  Bacterial polypetide isolated from the Sargasso Sea
GQRQRVAMGRAIVRDPQVFLFDEPLSNLDANLRVQMRAEIRELQQRLNSTTIYVTHDQIEAMTMADKIVVMQNGYIEQIGSPLEVYDHPANTFVGGFIGSPAMNMIEGVVVKTDTGLHLDINKSLLPIPNLVNLKIDQKIIAGVRPENLIPAATGVPAKIAVIEPTGSETHLLLRGNNQDLTCVLRERRDFRPGQEINLTADPDEIHIFDQKSKTRIN

SEQ ID NO: 146774 - protein, 223 aa, Unknown
  Bacterial polypetide isolated from the Sargasso Sea
MSEVAKLIQVSKSFRDGEQRHTVLQAVDLTLHRGETIALTGPSGSGKSTLLNLIAGFETPDSGQIVLNHQSTQDWQDKHWSEFRRNHLGVVFQQFNLLTPLNVRNNIGFSLNLNGASWNPWCDYLVDKLGLASLLNRQVEALSGGQQQRVAIARALAHNPSLLLADEPTGNLDDESGKQVMSLLCELAKESQTSILMVTHSEECAAFMHKRWHLSHASVSISG

SEQ ID NO: 146775 - protein, 217 aa, Unknown
  Bacterial polypetide isolated from the Sargasso Sea
MFTLRRFNTKRRIMLTIKDLKKSFSQTGAPLINNLNLTVKTGESVSIQGASGCGKSTLLSLIAGFETPDGGDISVNGLSIAGNSKLDNTFKAKDIDSFRKQHLGIVFQSFNLFDCFNAWDNIAFTARLKGNVDNDYQLALMEQLGILPLAQKPLSQLSGGEQQRCAIARALVHRPSLILADEPTGNLDETTSETVSDLLFKTCKEANTSLVVVTHSQ

SEQ ID NO: 146776 - protein, 160 aa, Unknown
  Bacterial polypetide isolated from the Sargasso Sea
MSEVAKLIQVSKSFRDGEQRHTVLQAVDLTLHRGETIALTGPSGSGKSTLLNLIAGFETPDSGQIVLNHQSTQDWQDKHWSEFRRNHLGVVFQQFNLLTPLNVRNNIGFSLNLNGASWNPWCDYLVDKLGLASLLNRQVEALSGGQQQRVAIARALAHNP

SEQ ID NO: 146777 - protein, 223 aa, Unknown
  Bacterial polypetide isolated from the Sargasso Sea
MSEVAKLIQVSKSFRDGEQRHTVLQAVDLTLHRGETIALTGPSGSGKSTLLNLIAGFETPDSGQIVLNHQSTQDWQDKHWSEFRRNHLGVVFQQFNLLTPLNVRNNIGFSLNLNGASWNPWCDYLVDKLGLASLLNRQVEALSGGQQQRVAIARALAHNPSLLLADEPTGNLDDESGKQVMSLLCELAKESQTSILMVTHSEECAAFMHKRWHLSHAAVSISG

SEQ ID NO: 146778 - protein, 147 aa, Unknown
  Bacterial polypetide isolated from the Sargasso Sea
MSDILELKNISKNYGNTKVLEDINIKIKNNEFFTILGSSGSGKSTIIRMIGGFAKPTKGEIVFEDNIINEEPIFKRPFNTVFQDYALFPNMNVFNNVGFGLKIKKINKKLISDKVQEVLSIVGLEDFANRMPQELSGGQQQRVALQE

SEQ ID NO: 146779 - protein, 222 aa, Unknown
  Bacterial polypetide isolated from the Sargasso Sea
MSNILELRNVSKKYGETKVLDNINFKINNNEFFTILGSSGSGKSTIIRMIGGFTKPSAGEIIFENEIINDEPIFKRPFNTVFQDYALFPNMNVFDNVGFGLKIKNINKNEIKKRVLDVLAVVGLENFSNRMPQELSGGQQQRVALARAIICEPKIILLDEPLGALDAELRKQMQLFLKEIQKKIQITFVFITHDQEEAIFLSDRIAVLNNHKFEQVGNTKDL

SEQ ID NO: 146780 - protein, 121 aa, Unknown
  Bacterial polypetide isolated from the Sargasso Sea
MIKALELKDINKKFNETIALKNIQLEINDGEFFSLLGPSGSGKTTCLKVIGGFENPDSGFVSLFNKDVTNIPPFKRDVNTVFQDYALFPHMNVEENVSYSLKIKKIPKNQQTDQVKEILSN

SEQ ID NO: 146781 - protein, 292 aa, Unknown
  Bacterial polypetide isolated from the Sargasso Sea
MSEILELKNISKSYGSTTVLENISFKINNNEFFTILGSSGSGKSTIIRMIGGFTKPSSGEIIFANKNINDEPIFKRPFNTVFQDYALFPNMNVFDNVGFGLKIKNKSKEEIKKNVLNVLTVVGLENLSNRMPQELSGGQQQRVALARAIICEPEIILLDEPLGALDAELRKQMQLFLKEIQKKIQISFIFITHDQEEAIFLSDRIAVLNNHKFEQIGSPKDLYYSPKTTYMANFFGECNLIKCRVTNYDSESIKVSSAFGNFNIPKNKNLNNESEFIYGIRPEEVKLVRQSE

SEQ ID NO: 146782 - protein, 136 aa, Unknown
  Bacterial polypetide isolated from the Sargasso Sea
MIKALELKNINKKFNETVALDNIHLEINDGEFFSLLGPSGSGKTTCLKVIGGFEQPDSGNVSLFNENVTDIPPFKRNVNTVFQDYALFPHMNVEENVCYSLKIKKIPKIEQESQVEEILSTVKLKGYEKRKPSELS

SEQ ID NO: 146783 - protein, 253 aa, Unknown
  Bacterial polypetide isolated from the Sargasso Sea
MKLDVHNISKYFGEGSNRKKAIEGISFSISSGEFKTLVGSSGSGKSTILRIIAGLESPSKGNVKVDGKIVSGPGLDRGMVFQKYSLFPWLTASENIAFGMNLNTYKLKEIKYRTSYLLEVVGLQDSGNKYPKELSGGMQQRIAIARALATNPKILLLDEPFGALDLQIRESMQKFLYELWEKTSLTVLLITHDIEEALALSQQICILAPNPGRIIKEVRVDLQKGDLDKLKLDSDFAKLRYELSDFLRGLQKK

SEQ ID NO: 146784 - protein, 292 aa, Unknown
  Bacterial polypetide isolated from the Sargasso Sea
SSGSLNLNSTLRLKVQNVGGDSSLAKLVNLIESVNARKPRIQRIADEIAGKFAYFVLIFATLTFFFWWKGARNFWPDLLSHNHQFITHSSHTLHSSLGSNAENFLSLAIQLSIAVLVIACPCALGLATPTVITVASGKAAKKGVLFKGGDKIEMASKINQIIFDKTGTLTKGKPFIVDYKNYDDHSFLLKIAASLEKESRHPIADALIQEAKKQNLSLFPIKKIFTHSGRGISGELESINGIINIGNIDWLLSKGIIIDSEAKKVIENEETKTNTIIGVSIKDKLLGFILLG

SEQ ID NO: 146785 - protein, 325 aa, Unknown
  Bacterial polypetide isolated from the Sargasso Sea
GFKSFIKNRPDMDSLVALGVTSAYITSLLSLIFPATGFPCFFNEPVMLLGFILIGRFLEERARYQTGSSIGELLDLQPEMANIYTEDNQIKSIRVNTLRPNQEIQVLAGDRVPADCIVTQGNSYIDVSHITGESKPIEVKEGENLSSGSLNLNSTLRLKVQKVGGDSSLAQLVNLIESVNSRKPRIQRIADKIAGKFTYFVLIFATLTFFFWWKGAKNIWPDLLSHNHQLITHSSHTLHSSLGNNAENFLSLAIQLSIAVLVIACPCALGLATPTVITVASGKAAKKGVLFKGGDKIEMASKINHIIFDKTGTLTKGKPFIVDYK

SEQ ID NO: 146786 - protein, 310 aa, Unknown
  Bacterial polypetide isolated from the Sargasso Sea
TLRIKRIGEESTLAKIIRMVEEAQSSKAPVARMADRVAGLFVPIVLLLALLTALSWWFYGAGTETVLTRMVAVLVIACPCALGLATPIAILVGTGSGARHGILFRNAAALEALQGLDTLMFDKTGTLTLGQPVLESIKTWNGWNEFEVLRLSASAEMGSEHPFGKAIVESAKSQNLKLSQLESFEALSGSGIIALVENRQLAIGRQEFILNQSKIKELPQEWDKGIEAKSSVWVLVDGILAASMSFQDQIRPESREAIESLKSMGLKPVMLTGDQLEAAQLLARQAGLDEVKAGLLPQHKVSVLEKYQAE

SEQ ID NO: 146787 - protein, 317 aa, Unknown
  Bacterial polypetide isolated from the Sargasso Sea
RFRKSCFWFFCKSGSWLQFFLTLPVMFAGRDFYLRGLPSLWRRNPNMDTLVALGTLAAFGYSLWNLLKDGGISGLYFETSALIITLILLGRLMESRSRRRAVESVQALLELRPKQAMLLTDEGETPVVLELLHPGDRIRIRPGETLPADGLVEEGASEIDESMLTGESVPRSCSTGDEVTGGTRCINGMLTLRIKRIGEESTLAKIIRMVEDAQSGKAPVARMADRVAGVFVPVVLLLAVLTALSWWFYGAGTETVLTRMVAVLVIACPCALGLATPIAILVGSGSGARHGILFRNAAALEALSGLDTLMIDKTGTL

SEQ ID NO: 146788 - protein, 201 aa, Unknown
  Bacterial polypetide isolated from the Sargasso Sea
WVLVDGTLAASMSFQDQIRPESREAIESLKSMGLKPVMLTGDQLEAAELLARQAGLDEVKAGLLPQHKVSAIEQYQAEGYRVGMVGDGINDAPALAAADVGIGMGSGTDVALETADVVLMKNNLAHLADAFRLSRATLRNIRQNLFWAFAYNVLGIPVAAGVLVPFGGPALHPVLAAAAMALSSVSVVANALRLRNFRFSK

SEQ ID NO: 146789 - protein, 117 aa, Unknown
  Bacterial polypetide isolated from the Sargasso Sea
VGDGINDAPALAAADVGIGMGSGTDVALETADVVLMKNNLAHLADAFRLSRATLSNIRQNLFWAFAFNVLGIPVAAGVLVPFGGPALHPVLAAAAMALSSVSVVANALLLRNFRFSK

SEQ ID NO: 146790 - protein, 116 aa, Unknown
  Bacterial polypetide isolated from the Sargasso Sea
MVGDGINDAPALMSADVGIAMGSGTEVAIESADMTLLSHQLIVIANLLALSRATIRNIKQNLFGAFIYNSLGIPVAAGVLYPLTGMLLSPVIAGAAMALSSLTVVTNANRLRQQKL

SEQ ID NO: 146791 - protein, 282 aa, Unknown
  Bacterial polypetide isolated from the Sargasso Sea
MGFVLLGRFLEERARYRTGQALKQLAQLQPETARLLLDDGAIREVRVGALRPGERVQLLPGDRVPVDGVVMQGHSAVDVSSLTGEPLPLEAEPGTELASGSLNLEAPLSMEVQRVGSETALARIIQLVEQAQARRAPIQGLADRVAGRFCYFVIGLALAAFLFWWLIGADLWPQVLEASAPGMMAHPMHHAGLGSGAETPIGLALQLAIAVLVVACPCALGLATPTVITVATGLAARRGWLFRGGDVLETAAGLDQVVFDKTGTLTLGRPLVTAIRADDPER

SEQ ID NO: 146792 - protein, 294 aa, Unknown
  Bacterial polypetide isolated from the Sargasso Sea
GAITAVSGSEQHLLQLAAALQQHSEHPLAKAVMSKAKQENIGLSEISNFTVVAGKGVQAQQGDTRLLLGSSHWMQQLGLTLPTALIRVEGASVSWLAKQQDGHSELLGLLCFSDSIKASAQAAVSALQQQGIKVALLTGDSQASAEAVAAVLKPDQLQAEVLPADKASFVKQCQQQGYKVAMVGDGINDAPALAQADLGIAMASGTDVAVSAAAITLMRSEPALVSTALTLANDTYSKIRQNLFWAFIFNVTGIPLAALGYLNPVIAGAAMASSSLVVVSNALLLQRRQYFTGN

SEQ ID NO: 146793 - protein, 295 aa, Unknown
  Bacterial polypetide isolated from the Sargasso Sea
TIGDTITGATLNGTGSLTFRATSVGSDTILSNIIKMVENAQAAKLPIQGLVNQVTMWFVPAVIFLSILTVAVWFVIGPNNVITFALVAGVSVLIIACPCAMGLATPTSIMVGTGRAAEMGVLFRKGEALQSLSNIDIVTLDKTGTITKGKPTLTDLILSDGFNKKEVLQIVASIESYSEHPIGAAIVQEAKSKGLKLSPVQHFKSITGYGIEGNINGHRVLVGSELLMKREGLDLQFFASEEIHLTQGGKTILYASIDNQIAAAIAVADPIKPSSSKAIEILRKKGIGVVMITGE

SEQ ID NO: 146794 - protein, 280 aa, Unknown
  Bacterial polypetide isolated from the Sargasso Sea
DTLVALGTLAAFGYSLWNLLKDGGISGLYFETSALIITLILLGRLMESRSRRRAVESVQALLELRPKQAMLLTEEGETPVALELLHPGDRIRVRPGETLPADGLVEEGVSEVDESMLTGESVPRSCYTGDEITGGTRCINGMLTLRIKRIGEESTLAKIIRMVEEAQSGKAPVARMADRVAGVFVPIVLLLALLTALSWWFYGAGTETVLTRMVALLVIACPCALGLATPISILVGTGSGARHGILFRNAAALEALQGLDTLMFDKTGTLTLGQPVLESI

SEQ ID NO: 146795 - protein, 254 aa, Unknown
  Bacterial polypetide isolated from the Sargasso Sea
TLPADGLVEEGVSEVDESMLTGESVPRSCSTGDEVTGGTCCINGMLTLRIKRIGEESTLAKIIRMVEEAQSGKAPVARMADQVAGVFVPIVLLLALLTALSWWFYDAGTETVLTRMVAVLVIACPCALGLATPIGILVGTGSGARHGILFRNAAALETLQGLDILMFDKTGTLTLGQPVLESIKTWNGWNESEVLRLSASAESGSEHPFGKAIVESAKSQNLEISQPESFEALSGSGIMAVIENRQLAIGRLGV

SEQ ID NO: 146796 - protein, 255 aa, Unknown
  Bacterial polypetide isolated from the Sargasso Sea
HRSLNMFTLISLGVGVAWGYSAVARLMPSLFPSSIRMSDGSVPVYFEAAAVITALVLLGQVLELRARSRTSAAIRMLLGLAPKTARMVREDGREEDIPLDQVRPGDVLRVRPGEKIPVDGVVTEGVSGVDESMVTGESIPVEKRAGERVIGATLNGTGSLLMRAERVGAETLLAQIVRMVADAQRSRAPIQRLVDVVSAYFVPAVIAAAAITLVVWGGWGPEPRLAHAVINAVAVLIIACPCALGLATPMAIMVG

SEQ ID NO: 146797 - protein, 309 aa, Unknown
  Bacterial polypetide isolated from the Sargasso Sea
RGFFAFYRWSPNMDTLITIGTSAAVGFSVGNLFGISQNIEGLYFETAGVIISLILLGKSLESKSRIYASEAINSLLKLRPTEAVLIHDGKESSIPIDLVHSGDILRIRPGSIIPVDGVIVEGSSYVDESMLTGEAVPVKKTIGAEVTGGTSNTNGVMDIRVIRVGAQTVLSSIIRMVENAQLSKSPVSRMADKVAGVFVPIVLIIAAVSGILWWVYGAETNDILRYTIAVLVIACPCALGLATPIAILVGTGIGARNGILFRNAVALEAAHNLDTIFLDKTGTLTEGSPKVTKVLINEGFEKDFLLLYA

SEQ ID NO: 146798 - protein, 297 aa, Unknown
  Bacterial polypetide isolated from the Sargasso Sea
DLVSLVVFAPYLQFLPLFFSSTEHVFFDGAAFIISFILLGNWLEARAKLKATDAVFSLMDLKAKTALVLDSSGSHSEIPVEDIPEGTELLVKVGQTIPLDGLVVKGSASIDTSMMTGESNPVFVKQDDPVMGGTIVLDSSIHIKSTKHHDDTVLANVIHLVDEAQMGKAPIQKLVDRISAVFVPLVVVCAILASLAWMFFSEGYGQYNSTELAIMVLVSTLVIACPCALGLATPTALMVGTGVGAQYGLLIKGIDALQNSYNTDTLVLDKTGTLTVGSPSLVNIKSLNSKDNDVLTI

SEQ ID NO: 146799 - protein, 217 aa, Unknown
  Bacterial polypetide isolated from the Sargasso Sea
HNHQFITHSSHTLHSSLGSNAENFLSLAIQLSIAVLVIACPCALGLATPTVITVASGKAAKKGVLFKGGDKIEMASKINHIIFDKTGTLTKGKPFIVDYKNNDDHSFLLRIAASLEKESRHPIADALVQEAKKQNLSLFPIKKIFTYSGRGISGELESIDGLINIGNIEWLLSKGIIIDSDSEKLIENEETKSNTIIGVSIKDKLLGFIFLGDLLRD

SEQ ID NO: 146800 - protein, 261 aa, Unknown
  Bacterial polypetide isolated from the Sargasso Sea
IELLKIEAFNAITGFGVEASCNNKALLFGNDKLMKLKGIDLTGFVEQAQSLAKEAKTPMYFAVDGELAAIIAVADPIKSDSISAIKRLQANGIRVIMLTGDNKETAAAVAKKAGISEFLAEVLPEDKANKVKELQEGGEIVGMTGDGINDAPALALADVGFAIGTGTDVAIESADITLMRGSLHGLADAIAVSKATLRNIKQNLFGAFVYNVAGIPFAAGVLYPFFGILLSPVIAGAAMAFSSLTVVSNANRLRFFKAKEH

SEQ ID NO: 146801 - protein, 287 aa, Unknown
  Bacterial polypetide isolated from the Sargasso Sea
YLGFLGVGAAFVWSLYALFLGGEGDPGMRMAFHLLPTQGAGSSEIYLEVAAAVTTFILLGRYFEIRAKSRSSQALTALLSLGAKDVTVLSDGRERTIAIGELAAGDHFLVRPGEKVATDGRVINGQSSVDISLLTGEPMPVEAGPGDAVVGAGINTSGRLVVQATRVGVDTHLARIAALVEDAQTKKAPVQRLADRISAVFVPIVIVLAIATVVGWSIAGADLAFAFTAGVAVLIIACPCALGLATPTALLVGTGRGAQMGIVIRGPEILESTRKIDTIVLDKTGTL

SEQ ID NO: 146802 - protein, 157 aa, Unknown
  Bacterial polypetide isolated from the Sargasso Sea
AIQLSIAVLVIACPCALGLATPTVITVASGKAAKKGVLFKGGDKIEMASKINQIIFDKTGTLTKGKPFIVDYKNYDDHSFLLKIAASLEKESRHPIADALIQEAKKQNLSLFPIKKIFTHSGRGISGELESINGIINIGNIDWLLSKGIIIDSEAKK

SEQ ID NO: 146803 - protein, 288 aa, Unknown
  Bacterial polypetide isolated from the Sargasso Sea
MKSSDCRPPRKSVRNILFGKAIVESAKSQNLEISQPESFEALSGSGIIALVEKRQLAIGRQEFILKQSKIKELPQGWDEGIEAKSSVWVLVDDTLAASMSFRDQIRPESLEAIESLKCMGLKPVMLTGDQLEAAEPLARQAGLDEVKAGLLPQHKVSILEQYQAEGHQVGMVGDGINDAPALAVADVGIGMGSGTDVALETADVVLMKNNLAHLADAFRLSRATLSNIRQNLFWAFAYNVLGIPVAAGVLVPFGGPALHPVLAAAAMALSSVSVVANALRLRSFRFLK

SEQ ID NO: 146804 - protein, 55 aa, Unknown
  Bacterial polypetide isolated from the Sargasso Sea
AFIYNTLGVPIAAGVLYPFMGILLSPIIAAGAMSLSSVSVVGNALRLKYVQLSGK

SEQ ID NO: 146805 - protein, 285 aa, Unknown
  Bacterial polypetide isolated from the Sargasso Sea
MGELLELQPEMANIYTEDNQIKSIRVNTLRPDQEIQVLAGDRVPADCIVTRGNSYVDVSHITGESKPIEVKEGQNLSSGSLNLNSTLRLKVQKVGGDSSLAKLVNLIESVNARKPRIQSIADEIAGKFTYFVLIFATLTFFFWWKGARNIWPDLLSHNHELITQSSHTLHSSLGSNAENFLSLAIQLSIAVLVIACPCALGLATPTVITVASGKAAKKGVLFKGGDKIEMASKINHIIFDKTGTLTKGQPFIVDYKNNDDHSFLLKIAASLEKESRHPIADALIN

SEQ ID NO: 146806 - protein, 204 aa, Unknown
  Bacterial polypetide isolated from the Sargasso Sea
FEAAAVITVLVLLGQVLELRAREQTSGAITALLNLAPKTARRLDHDGHETDINAEDVLPGDKLRIRPGESIPVDGIVIEGKTTVDESMVTGESMPVIKTKSDPVIGGTINQTGSLIIRAEKVGDETMLSRIVQMVADAQRSRAPIQRMADSVSGWFVPLVILIAVVAFVIWSVWGPEPRMAHGLIAAVSVLIIACPCALGLATP

SEQ ID NO: 146807 - protein, 252 aa, Unknown
  Bacterial polypetide isolated from the Sargasso Sea
FKKIKNLDFNMDTLISLGSLSSLLISLLPADLVSSVSSASGENKMFLDTGAFIVSFLLIGKAVEDRVIEESVKTSESIKSRMPKTLIVNRNLDRIEIPTKDIQEKDRFNVMVGEIIPVDGEIIEGETSVDESLLTGESVPLLKEKGDQVVGGSINLQGNIQIQVKESYQKSTYNIIEDLIRNAQGTKPDIQKSLDTITQYFVPVVLLISFSTFAFKYLIQNVILIDALKNSIAVLVIACPCALGLATPDSTI

SEQ ID NO: 146808 - protein, 287 aa, Unknown
  Bacterial polypetide isolated from the Sargasso Sea
VAGRFCYGVIALAVTTFLFWWLFGAEHWPEVLQASAPGMPMTHEMSHGMDHGHGMHHGGLGSGASTPMGLALQLSIAVLVVACPCALGLATPTVITVATGLAARRGWLFRGGDVIETAAGLEHVVFDKTGTLTLGRPLVTDVYGDDPDHLLQLAASLEQSSRHPLAYALLQEAQRRELALRECEDVRTVSGQGLEGHVDGASARVRVGKLDWLVGQGVAIAPAAQDWLSAAEGSVVAVAVGSVLVGLVQIEDQLRPEVAPALQRLRSHGLSLSVFSGDRQAAVQRLG

SEQ ID NO: 146809 - protein, 239 aa, Unknown
  Bacterial polypetide isolated from the Sargasso Sea
KVEGKTILLGNAAYLKSLGVQTQTLEPQAENLRGEGATVINIALDGKLVGLFAIADPVKQSTPDALKALAAEGIKVIMLTGDNRTTANAVAKRLGISDVEAEVLPDQKSAVVSKLQKAGRIVAMAGDGVNDAPALATSDVGIAMGTGTDVAMESAGVTLLKGDLMGIVRARRLSEATMSNIRQNLFFAFIYNAAGIPIAAGVLYPTFGLLLSPIIAAAAMALSSVSVVGNALRLKTVNL

SEQ ID NO: 146810 - protein, 37 aa, Unknown
  Bacterial polypetide isolated from the Sargasso Sea
PFTGTLLNPVVAGAEMALSSITVVSNANRVLRFKPKE

SEQ ID NO: 146811 - protein, 286 aa, Unknown
  Bacterial polypetide isolated from the Sargasso Sea
LTDEGETPVALELLHPGDRIRVRPGETLPADGLMEEGVSEVDESMLTGESVPRSCSTGDEVTGGTRCINGMLTLRIKRIGEESTLAKIIRMVEEAQSGKAPLARMADRVAGVFVPIVQLLALLTALSWWFYGAGTETVLTRMVAVLVIACPCALGLATPIAILVGTGSGARHGILFRNAAALEALQGLDTLMFDKTGTLTLGQPVLESIKTWNGWNESEVLRLSASAEIGSEHPFGKAIVESAKSQNLEISQPESFEALSGSGIIAVVENRPLAIGRQEFILKQSK

SEQ ID NO: 146812 - protein, 272 aa, Unknown
  Bacterial polypetide isolated from the Sargasso Sea
LTGEWEPVAKNPGDTVVGGSINTTGVFQVRASRVGSDTTLAQIVRLVEEAQTNKAPVQEFADKVSAVFVPFVVSCAVIVFLSWLGAAEMGWTPAEWTASHGPLFFSLMFGVSVVVIACPCALGLATPTAVMVGTGVGASMGILIKGGRALEVGHHITAVCFDKTGTLTLGKPSCMHISALSTVAGAQQQLLQLLIAAEKGSEHPIAKALVDYAEEQLAGQVSVGGEVLAIDAGDGESVEVSVTLAVEGMMCGNCEAKVRGALEEVAGVRSAS

SEQ ID NO: 146813 - protein, 260 aa, Unknown
  Bacterial polypetide isolated from the Sargasso Sea
VQNNKPPIQRIADQIAGKFTYLVLLIATSSFFFWWKGAKRIWPDLLMNDHHGLITSSNHTLHNSLGSNAENFLSLAIQLSIAVLVIACPCALGLATPTVITVASGKAAKKGVLFKGGDKIEMASKINHIIFDKTGTLTKGEPFIIDYINNNDNLHLLKISASLESQSRHPIASALVKEAKKQNLNLLPIKRIHTETGRGISGDLESIDGVINIGSVEWLTSKGVIIDRESKKTLETEEYKSYSVIGVSINNSLLGFILLG

SEQ ID NO: 146814 - protein, 674 aa, Unknown
  Bacterial polypetide isolated from the Sargasso Sea
MPDTGSGYFCPMCPEVFSASPGSCPQCGMPLETISPQNAIPTEEITLLGLREFLYGIILSAPILLLAMAPMFGLSVEAWIDPHINQFLQLILTSLVIATCGRSIVSRGIRSIATGNLNMFTLITIGVSAAYGFSLLATLLPTFFPDSFRNPKTGLVHTFFDAAAMIIVLVHLGQALESQARSKTGAELRSLVSLAPMTARVVLENGEHDVPLSTVHPGDHLRVRPGETIPVDGTLFDGASHVDESLLTGEPSPVEKKKGDEVIAGTKNGRGSFILLAEKTGSETLLSRIITLVGSAQRSKAPIQRMADSVASIFTPIVLAIALGTFTGWFFLGPQPRLAHAIVSSVSVLVIACPCAIGLATPMSIIVGIGRAASEGVLFKDAESLEALGQSKSLMIDKTGTITEGQPTVTEIVLFDNKSEEEILLLATAVELGSEHPLATAICQAARERNLEVLSNADTFLSTPGSGVQGTVAGKTIALGNEAFLEQQNVPASELNEFRRAADPLRASGKTITGVVVNSHVAGLFAVTDPVKQSAYTAIGQLKQLGLQITMLTGDHSDNAGVIARSVGIEHYEAGLTPQEKYQFVTEKHSKGEQTIMVGDGVNDAPALAAATIGVAMGTGSDVAIETANVTLMRGDLQALPYSIQLSRLVLLNIRQNLFLAFFYNALSIPLAAG

SEQ ID NO: 146815 - protein, 680 aa, Unknown
  Bacterial polypetide isolated from the Sargasso Sea
MSAETKTLVLSVEGMTCAACAARIERVLTKEKSVKDVVVNFPLKKAILEVNPEDNNSDEYIQRIRSIGYSAQEEIAEEKKSNTRKFLTPFLSLILTLSINPLIGADQDLAALGVGSLIIFVFGRKFHVSALKNIKKLNFNMDTLISIGSLSSFAIGILPNNGELMYLETGGFIISFILLGKTIEDISIKSSVSVSDSIIESIPKDVNVYENQITVRKPLNQIEIGDVIIVKKGEIIPLDGVIIRGSSEVDESVISGESEPLTKKEGDEIVSGSINLGDDIEVEVVKKEGETTLNHIEKLILKAQTSKPEVQDLVDKITNIFVPSILILSFANMIFKLFVLENDFSETISSTIAILVVACPCALGLATPIVLFRTASVSNRNGFIFKNFDYLQRFKNLDTIVFDKTGTLTSGIFKIESISDSKGKIVDDEVLRVLASVEQKSNHPIAKSILLESEIKNLSLFPVDNFIETPGIGVSGVVENKKVSVFRSKDDLKGDLELIIDNEEFKVKLVEDKTVNKDIIKDLSKDYEIEILSGDKTEKVQEIGNDLNIKNVLGNQSPEDKLKYIQEKQMDKTVGFIGDGINDSPALKQANVSLSFSQSTQIAQSVSDIIIFKGGLEILNKIFNISKNSNKRIIQNLFFAFIYNIIMIPIAVSGSIVPSMAALAMALSSLSVVLNSSRKL

SEQ ID NO: 146816 - protein, 765 aa, Unknown
  Bacterial polypetide isolated from the Sargasso Sea
MESIQLNISGMKCGGCVSTVEKILNNSDGIENVSVNLLTESAYFEITQKHIEIEAVLKNLKENGFPSKIYINDFSKKINKAELEKKKKWNNQWKKLTFALLLLLFSGLGHLAEGRYINFPILGNIFFHASLATLALLFPGRGIIINGFKSFIKNRPDMDSLVALGVTSAYITSLLSLIFPATGFPCFFNEPVMLLGFILIGRFLEERARYQTGSSIGELLDLQPEMANIYTEDNQIKSIRVNTLRPNQEIQVLAGDRVPADCIVTQGNSYIDVSHITGESKPIEVKEGENLSSGSLNLNSTLRLKVQNVGGDSSLAKLVNLIESVNARKPRIQRIADEIAGKFTYFVLIFATLTFFFWWKGARNIWPDLLSHNYQLITHSSHTLHSSLGSNAENFLSLAIQLSIAVLVIACPCALGLATPTVITVASGKAAKKGVLFKGGDKIEMASKINQIIFDKTGTLTKGKPFIVDYKNCDDHSFLLKIAASLEKESRHPIADALIQEAKKQNLSLFQIKKIFTHSGRGISGELESIDGLINIGNIEWLLSKGIIIDSEAKKIIENEETKTNTIIGVSIKDKLLGFILLGDLLREDSIKTVQNLRENKFKINILSGDRKQTVLALAKKIGCKETEVKWDLLPEMKLKNIENLKINNKVAMIGDGINDVPALASSDLGIAVGSGTQIAKANADVVLMGDQLNGLPYALNLAKKTIRKIKQNLTWAFGYNLLAIPLAAGILFPKYGILLTPSLAALLMAISSITVVINALSLDK

SEQ ID NO: 146817 - protein, 469 aa, Unknown
  Bacterial polypetide isolated from the Sargasso Sea
MAEGKYINFPILGNIFFHASLATLALLFPGREIIFNGFKSFIKNHPDMDSLVAIGVISAYTTSLLSLIFPATGFPCFFNEPVMLLGFILIGRFLEERARYQTGSSIGALLDLQPEMANIYTEDNQIKSVRVSTLRPDQEIQVLAGDRVPADCIVTRGNSYVDVSHITGESKPIEVKEGEYLSSGSLNLNSTLRLKVQKVGRDSSLAKLVNLIESVNSRKPKIQRIADNVAGKFTYLVLIFATLTFFFWWKGAKNIWPNLLSHDNEFMTHASHTLHNSLGSNAENFLSLAIQLSIAVLVIACPCALGLATPTVITVASGKAAKKGVLFKGGDKIEMASKINHIIFDKTGTLTKGKPFIVDYKNNDDHSFLLRIAASLEKESRHPIANALIQEAKKQNLSLFPIKKIFTYSGQGISGELESIDGLINIGNIEWLQKRRIIIDSDAKKVIENEETKTNTIIGVSIKDKLLGF

SEQ ID NO: 146818 - protein, 538 aa, Unknown
  Bacterial polypetide isolated from the Sargasso Sea
LLFSGLGHLAEGRYINFPILGNIFFHALLATVALLLPGRGIIINGFKSFIKNHPDMDSLVALGVTSAYITSLLSLIFPATGFPCFFNEPVMLLGFILIGRFLEERARYQTGSSIGELLDLQPEMANIYTEDNQIKSIRVNTLKPYQEIQVLAGDRVPADCIVTQGNSYVDVSHITGESKPIEVKEGDNLSSGSLNLNSTLRLKVQKVGGDSSLAKLVSLIESVNANKPPIQRIADNIAGKFTYFVLIFATLSFFFWWKGAKQIWPDLLNHNHHQFITNSSHTLHSSLGSNAENFLSLAIQLSIAVLVIACPCALGLATPTVITVASGKAAKKGVLFKGGDKIEMASKINHIIFDKTGTLTKGKPFIVDYKNNNDHKFLLRLAASLEKESRHPIANALIQEAQKQNLILFPIKKIFTESGRGISGELDSIDGLINIGNVEWLQSKGIIIDSNAKKVIENEETQTNTLIGVSIKNKLFGFILLGDLLREDSIKTVQNLRENKFKINILSGDRKQTVLALAKKIGCKETEVKWDLLPHMKL

SEQ ID NO: 146819 - protein, 210 aa, Unknown
  Bacterial polypetide isolated from the Sargasso Sea
MKGKESSIPINLVHSGDILRIRPGSIIPVDGVIVAGSSYVDESMLIGEAVPVKKIIGSEVTGGTTNTNGVMDIRVIRVGQQTILSGIIRMVENSQLAKAPVSRMTDKVSGVFVPFVLIIAAFSGIIWWLSGAETNVVLRYTIAVLVIACPCALGLATPITILVGTGIGARNGILFRSAVALEAAYNLDTIFMDKTGTLTEGSPKSYKGIG

SEQ ID NO: 146820 - protein, 457 aa, Unknown
  Bacterial polypetide isolated from the Sargasso Sea
LLLLSVFGHFSEAGHLSLPLVGSLPFHAGLATVALLGPGRPILRGGFAAARVGAPSMDTLVGLGVGSAYTASLVALIWPQVGWPCFFNEPVMLLGFVLLGRFLEERARFRTGQALHQLAQLQPDTARLVLPDGAIREVRVGALRPGERLQLLAGDRVPVDGVVVEGHSAVDASSLTGEPLPWQAEPGLELSAGSLNLDAPLVLEVTRVGSETALARIIRLVEQAQARRAPIQGLADRVAGRFCYGVIALALATFLFWWLFGADHWPQVLQASAPGMPQGHPMSSSHAMHHGGLGSGATSPVGLALQLSIAVLVVACPCALGLATPTVITVATGLAAQRGWLFRGGDVIETAASLDRVVFDKTGTLTLGRPLVTDVWGEDPSQVLQLSASLEQSSRHPLAHALLQEAQRRELTLLEPAQVTTVSGQGLVGELAGWPEPIRVGRPDWLESFDVAVSDED

SEQ ID NO: 146821 - protein, 680 aa, Unknown
  Bacterial polypetide isolated from the Sargasso Sea
MSADTKTLILSVEGMTCAACAARIERVLNKEESVEDVVVNFPLKKAVIELNTENVNSENYIEKIRSVGYSAQEEIQVADSKNFKRFFIPIISLLSTLALSPLIEANQDFIALGISSIIIFIFGRTFHLSALKSIRNLNFNMDTLISIGSLSSFVIGILPNNGELMYLETGGFIISFLLIGKTIEDISIKSSISVSDSIIESIPKDVNVYDDKKIIRRPLSEISVNQVIIVKKGEIIPLDGEIDYGHSEVDESIISGEAEPILKKQGDTVVSGSVNLGNDIEVKVTKKDGETTINYIEKLILKAQTTKPDVQELVNKITNIFVPSILLLSFINFLTKFYIFGNDFSETISSTIAILVIACPCALGLATPIVLFRTASISNKNGFIFKNFDYLQKFTKLDTLIFDKTGTLTSGIFKIEKITNENSLVVDDEIIRILASVEQKSNHPIAKSILLESEIKNLKLSPVDEFNEIPGKGVTGIVDNKIVEVEKSNKDLDSDLILKIDAKEYLITLVEDKTLNKDVIENLSNEYEIEILSGDKPEKVKKIGEDLQIDVALGNQSPEEKLEYIKNKQKDKTVGFIGDGINDSPALEQANVSLTFAQSTQIAQSVSDIIIFRGGFEKLNSIFKISKNANRRISENLFLAFIYNIIMIPIAVTGNIVPSMAALAMALSSLSVVINSSRKL

SEQ ID NO: 146822 - protein, 351 aa, Unknown
  Bacterial polypetide isolated from the Sargasso Sea
ISVLVATCPCALGLATPSALTCAMAKLNRQGILLKRADALEQITDIDTIALDKTGTLTKGKFTISNAWYADGVDSNSALSIARALESRSEHPIAKAFSEISASSGSADAIDNTVHKVTNFTVTPGGGISGEINDTLFSMGSAAFSVHESQLKLIEAFPSANVFLTVKGRIMAAYEVKDSLREDTQETLDILAASHTLAVLSGDTQQNVNALTAPLPISTAKGGLTPEQKYEAVQAMQQSGAKVMMMGDGINDAPVLASADVAIAVGNATDVAKTAADVILLGDQLLSVPELIRTAHQVKQKIRQNIGWSVGYNVLILPFAVSGLLSPWMAVVGMSLSSIIVVTNSTRLLSK

SEQ ID NO: 146823 - protein, 346 aa, Unknown
  Bacterial polypetide isolated from the Sargasso Sea
VEERAKLQATSDMSSLLNLVPDTARLVSSSTPSTGGSDPFYRTVPTSVIETRDKIVVLPGDRIPIDGKVVSGCSTVDEAAITGEPIPRPKSAGDAVSAGTVNCDGVLTIEVVASGQETQVAGIVRMVESAQQREAPVQRLADQVSGKFVYGVMAASAATFTFWSTVGTKLFPGVLATAATASNAPILIALQMTASVLVVACPCALGLATPTAVLVGTALGARHGLLIRGGDILEKANNLDTVIFDKTGTLTIGKPVLKEARATGGYSETEIIALAGAVERNCRHPLALAIATAADEQGTSTRNVDEGTFKQEPGAGASAIVNRKRVSVGTKFYVQGNENVPAELVN

SEQ ID NO: 146824 - protein, 112 aa, Unknown
  Bacterial polypetide isolated from the Sargasso Sea
GDGINDAPALAAADLGIAIGTGTQIAQDTAGMVLMGDRLNNLPEALTLARRTLAKVRQNLFWAFGYNLIALPLAAGALLPSQGVLLSPPLAALLMAISSITVVLNALLLRVA

SEQ ID NO: 146825 - protein, 227 aa, Unknown
  Bacterial polypetide isolated from the Sargasso Sea
MSIHKNQLSSNAEARVSLPIEGMTCASCVGRVEAALNKVEGVVNASVNLATELADIHLKAPVDRLKLIEAIEKVGYEVPVTSVELSVQGMTCASCVGRVEKALLAVDGVKAATVNLATERATIRGVAGIDDLISAIQKVGYEARVIDTQNQVSNESEVRKDAEKALLKKDLVIATALALPVFVSRMGSHMIPRNAHWVMNTIWDPRKLVRPVCIDICSLSGSRSSIL

SEQ ID NO: 146826 - protein, 261 aa, Unknown
  Bacterial polypetide isolated from the Sargasso Sea
VAAFTASAARAVPGRGVEADVDGRTLALGSTRWLNELGIVLPAPFAERAKQLEAAGNTVSWLMQRAPLAPAALALIAFGDTVKPSAPAAVERLAQMGIKSVLITGDNQGSAASVAQALGIAEFHAEVLPDDKARVIRDLKIRSTGIVAMVGDGINDAPALAAADIGIAMATGTDVAMQAAGITLMRGDPALVADAFDISRRTWRKIQQNLFWAFVYNLIGIPLAAFGLLNPMLAGAAMAFSSVSVVTNALLLRTWRGASAR

SEQ ID NO: 146827 - protein, 123 aa, Unknown
  Bacterial polypetide isolated from the Sargasso Sea
QSEGCIVAMAGDGINDAPALAKANVGIAMGTGTDVAMNSAQITLVKGDLRGISIARDLSNKTVLNMKQNLGFAFIYNALGVPLAAGVLYPFAGLLLSPMFAALAMSLSSASVVFNSLRLRGSV

SEQ ID NO: 146828 - protein, 342 aa, Unknown
  Bacterial polypetide isolated from the Sargasso Sea
IGLSFAHWGLATPAAIMAGTGSAARSGILIKDAIALEHAKAVTLVVFDKTGTLTQGKAVLQQVSNLADEPDALLWAASLQQHSEHPLAKAVVNYATAHQVAALEVTEFQVIAGKGVQGKVQGHNLILGSSHWMQQLGIELPVDQIKTSGASVSWLAEQQANDSYKLVALFCFTDELKPDAVQAVNLLKQQAIAVAMLTGDSKQSAALIAQQLDLTDWKAEVLPADKAAAIQNWQQQGYRVAMVGDGINDAPALAQADLGIAMASGTEVAVSASAMTLMRSKPSLVSAALQIARLSYRKIQQNLFWAFIFNVIGIPLAALGYLNPVIAGAAMACSSLFVISNA

SEQ ID NO: 146829 - protein, 303 aa, Unknown
  Bacterial polypetide isolated from the Sargasso Sea
MDTLIVLGTSTAWAYSMLVVILPNVFPLDTRHVYFEASVMILGLINLGYALELKARGKTSEAVQRLLGLQSTTAIRIGDKGDEQVEISQLKLGDKLRLRPGDRVALDGIVEMGQSLLDEAMLTGEPIPVVKNMGDNLSAGTVNGNGSLVYRVTAGPQDTRLAKIIALVQEAQTSKLPIGRLADKISAVFVPTVVAIALLAAAIWYFVGPAPALSHALVVLTSVLIIACPCALGLATPMSIMVAVGRAAQMGVLVKNGEALQTASKVDCVVLDKTGTVTLGKPQVTDFMLVQALSDTDKGALLG

SEQ ID NO: 146830 - protein, 246 aa, Unknown
  Bacterial polypetide isolated from the Sargasso Sea
APKTARRLDHDGHETDINAEDVLPCDKLRIRPGESIPVDGIVIEGKTTVDESMVTGESMPVTKTKGDPVIGGTINQTGSLIIRAEKVGDETMLSRIVQMVADAQRSRAPIQRMADSVSGWFVPLVILIAVVAFVIWSVWGPEPRMAHGLIAAVSVLIIACPCALGLATPMSIMVGVGKGAQGGVLIRNAEALERLEKVDTLVVDKTGTLTEGSPTVTGIISLNPGGEASLLRVAAAVEKGSQHPLG

SEQ ID NO: 146831 - protein, 264 aa, Unknown
  Bacterial polypetide isolated from the Sargasso Sea
VQLVSRAQRSRAPIQRLADRVAEWFVFLVVAVAVLAFGVWAIWGPPPALGFAVVAAVSVLIIACPCALGLATPMSVMVATGRGAGAGVLVSDAAALEALARVDLLLVDKTGTLTAGRPAVTDIFPADGSDTDAVLGLAAALERGSEHPLAEAILNAADDRGIDVPVAAEFESAAGQGVRGRVDGRAVALGNPALMDHLDVSIAALADQAEAARADGATAVFVSIDGSVAGMLAISDPVKETTPDAHDALRAQGIEIVMMTGDNP

SEQ ID NO: 146832 - protein, 223 aa, Unknown
  Bacterial polypetide isolated from the Sargasso Sea
ARKLDDDGSEYDVSLDQVKVGDRLRVRPGDKVPLDGEVLEGSSNVDESMVTGEPLAVSKKSGDQVIGGSINQQGSFIMRADKVGRDTMLSQIVQMVASAQRSRAPIQGLADKVAGWFVPAVIVIAIVAFIAWSFFGPAPPMAFGLIAAVSVLIIACPCALGLATPMSIMVGVGRGAQSGVLIRDAEALERMEKVDTVVVDKTGTLTEGKPQVTRLVAANGFDD

SEQ ID NO: 146833 - protein, 300 aa, Unknown
  Bacterial polypetide isolated from the Sargasso Sea
HRSPNMWTLIGLGTAAAYLYSVAATLVPQWFPAAFAQDGRIGVYFEAAAVIISLTLLGQMLELKARSQTSAAIKSLLRLAPKTARRIKPDGQEEDIPLTHVHQGDHLRVRPGEKVPVDGTVLEGESAVDESMLTGEPLPVTKRVGDALIGATLNTHGSLVMEAQKVGAETMLSQIVQMVARAQRSKAPMQRMADAVAGYFVVGVILIAILTFFGWGLLGPESGWVFGLINAVAVLIIACPCALGLATPMSVMVATGKAASSGVLFRDASAIENLCKIDTLIVDKTGTLTEGRPVFHSAEG

SEQ ID NO: 146834 - protein, 271 aa, Unknown
  Bacterial polypetide isolated from the Sargasso Sea
EAAAVITVLVLLGQVLELRAREQTSGAITALLNLAPKTARRLDHDGHETDINAEDVLPGDKLRIRPGESIPVDGIVIEGKTTVDESMVTGESMPVTKTKGDPVIGGTINQTGSLIIRAEKVGDETMLSRIVQMVADAQRSRAPIQRMADSVSGWFVPLVILIAVVAFVIWSVWGPEPRMAHGLIAAVSVLIIACPCALGLATPMSIMVGVGKGAQAGVLIRNAEALERLEKVDTLVVDKTGTLTEGSPTVTGIISLNPGGEASLLRVAAAV

SEQ ID NO: 146835 - protein, 297 aa, Unknown
  Bacterial polypetide isolated from the Sargasso Sea
LSLAIQFSIAVLVIACPCALGLATPTVITVASGKAAKKGVLFKGGDKIEMASKINQVIFDKTGTLTKGKPFIVDYKNNKDNQFLLKISASLEKESRHPIANALVREAQKHQIDLLSIKNIYTESGRGISGELSSIDGLIHIGSVDWLISKGVILDNDSRKFLASEETKNNTIIGVSIKKEFLGFILLGDLLRDDSIQTVEKLRKNNLKINILSGDRKETVIEFAKKIGCDETEIRWGLLPQMKLDIIENCKLNNKVAMVGDGINDAPALASSDLGVAVGSGTQIAKANADVVLKGIN

SEQ ID NO: 146836 - protein, 310 aa, Unknown
  Bacterial polypetide isolated from the Sargasso Sea
IFDKTGTLTLGKPEVADIVLVSGTQWDDDQVLALAGSLEKGSEHPLALAIVNEANRRGLKLDVPSDFNALPGFGVEGEINSKKILLGNKTLMIDKRIDITSVEDHMKRLVEKGKTAMIFCVEDEVVGLIATKDTLKSNAKEVTNHLKEMGLDIIMLTGDNSNTAKVVADQLGIGRVISEVLPSGKAAEIERLKNSGCCVAMVGDGINDAPALAAADVGIALGSGTDVAMEASDITLVGSDINAVVDSIKLSKATMSKIRQNLFWAFIYNILGIPIAAGILYPSYGILLQPVFAAAAMSLSSLFVVGNSLL

SEQ ID NO: 146837 - protein, 271 aa, Unknown
  Bacterial polypetide isolated from the Sargasso Sea
EHPLAHAIVEGAENKGLKPQKVDDFNSITGKGITGKVDGLQIAIGNKKLLEEFDLTLDQEHDEDVKQRQLEGQTVMFVVIDKEVAGFISVADPIKESSADAIKHLQDQGLEVIMLTGDNKNTAKAVADKLGLDGYVADLLPENKYEKVKALQEEGKIVAMAGDGINDAPALAQANVGIAMGTGTDVAIESASLTLVKGELDGIVRARKLSTDVMRNIKQNLFFAFVYNMLGVPIAAGVLFPVFGLLLSPMLAAAAMSLSSVSVIGNSLRLR

SEQ ID NO: 146838 - protein, 182 aa, Unknown
  Bacterial polypetide isolated from the Sargasso Sea
MDAPVRAADKMNAAISLPIEGMTCASCVGRVERALRAVPGVANAVVNLATEKASITTNDTVDRIALVKAVEKAGYEVPASFSAPKSALLEVPIEGMTCASCVGRVEKALKAIPGVANAVVNLATEKASITTNGPVGRAVVVKAVEDAGYAVSASFTAPAAASLEVAIEGMTCASCVGRVEKA

SEQ ID NO: 146839 - protein, 249 aa, Unknown
  Bacterial polypetide isolated from the Sargasso Sea
SLIIRAEKVGDETMLSRIVQMVADAQRSRAPIQRMADSVSGWFVPLVILIAVVAFLIWSVWGPEPRMAHGLIAAVSVLIIACPCALGLATPMSIMVGVGKGAQAGVLIKNAEALERLEKVDTLVVDKTGTLTEGSPTVTGIISLSPGGEISLLRVTAAVEKGSQHPLGMAVVRAAHEKGIVIPAVSNFNAPSGKGVSGDVEGQRVVIGNELAMQENSIVIDNQKAVADTLRMEGATVIYVATDGNLAGL

SEQ ID NO: 146840 - protein, 280 aa, Unknown
  Bacterial polypetide isolated from the Sargasso Sea
MLAAVAVLVIACPCALGLATPAAIVTGTGVAARHGILIKDVDTLQKAHAIKALIFDKTGTLTQGRPVLASWSGNDEQLRLAAALQQASEHPLALAMREAVGKEAVLPQPEAVEVRVGAGIVGQVAGHTVAIGNISLLAQLGIDVPQQDEQAADGATRVWVAIDGVVAGIAALADTLRPESPDAIATLRQRGIASWLVSGDAPAPVAHIAAKLGLDGAFDSVLPAGKVEKVEALRAQTSGLVAMVGDGVNDAPALAAADVGIAMGSGSDVAMETASITLMR

SEQ ID NO: 146841 - protein, 247 aa, Unknown
  Bacterial polypetide isolated from the Sargasso Sea
VFGPDPAWTYAVLNAVSVLIIACPCALGLATPMSIMVATGKAAQVGVLFRDAEAIEHMRRIDTLIVDKTGTLTEGRPAFKEVVAFEGFDADRVLHLAASLDQGSEHPLADAIVAEARRRKFEFDRVEGFDSVTGMGVRGTVAGHELALGNTALMEDLGANPGAHVDVAERLRREGASAMFLAVDGRLAGLIAVADPIKASAAAAIDELHAAGLRIIMATGDGLTTARAVATELGLDEVHGEVRPEDK

SEQ ID NO: 146842 - protein, 226 aa, Unknown
  Bacterial polypetide isolated from the Sargasso Sea
IRMVEEAQSGKAPVARMADRVAGVFVPIVLFLALLTALSWWFYGAGMETVLTRMVAVLVISCPCALGLATPIAILVGTGSGAHHGILFRNAGALEALQGLDTLMFDKTGTLTLGQPVLESIKTWNGWNESEVLRLSASAEIGSEHPFGKAIVESAKSQNLEISQPDSFEALSGSGIIAVVENRQLAIGRQEFILKQSKVEELLQEWDEGIEAKSSVWVLVDGTLPA

SEQ ID NO: 146843 - protein, 208 aa, Unknown
  Bacterial polypetide isolated from the Sargasso Sea
ASWEAEGRTLSWLIETGSPPRLLGLLAFGDQLKEGATDAIAELREQGITSHLISGDNQGSVAAVASVLGIDEPHAQVLPADKARLIGELRQHGTVAMVGDGINDAPALAAADVGIAMGGGTDAAMHAAGITLMRGDPRLVPAALEISQRTYAKIRQNLFWAFIYNLIGIPLAAAGLLNPMFAGAAMALSSVSVVSNALLLNRWRPKGS

SEQ ID NO: 146844 - protein, 157 aa, Unknown
  Bacterial polypetide isolated from the Sargasso Sea
GNVTAQSVAKQLGIVEFRGEVKPADKLALVATLQERGLVVAMAGDGINDAPALAKADVGIAMGTGTDVAMNSAQVTLVKGDLRGIARARALSEATIANMKQNLGFAFLYNALGVPLAAGVLYPFTGLLLSPMIAALAMSLSSASVVANALRLRATRL

SEQ ID NO: 146845 - protein, 263 aa, Unknown
  Bacterial polypetide isolated from the Sargasso Sea
VAGYFVVGVILIAILTFFGWGVFGPESGWVFGLINAVAVLIIACPCALGLATPMSVMVATGKAASSGVLFRDASAIENLCKIDTLIVDKTGTLTQGRPAFHSAEGTGPFDSVEVLRLAASLDQGSEHPLAHAIVDHAREQGLALVKPETFESGSGIGVRGQVDGHQLQLGNTALMEEAGVDITPLRNRAEQLRLEGISIIYLAVDGRLAGLLAVSDPIKPTSQQAVAQLQNADVKVIMATGDGLTTARAVAKQLGIEEVHGEV

SEQ ID NO: 146846 - protein, 558 aa, Unknown
  Bacterial polypetide isolated from the Sargasso Sea
ARARRRTGAALEALAQLQPDTALLLLGDGSTRSIRVGGLRPGDHLRVLPGDRLPVDGVVIGGSSSLDESSLTGEPLPRSVASGDELAAGSLNLQAPLDLKVLRPGSESALARVIALVEQAQARKAPVQAMADRWAGRFTWIVLALALATFLFWWILGTDLFPQVLGGMAHGPGHHRSLGSGAETPFALALQLAIAVLVVACPCALGLATPTAISVATGRAAHLGLLFRGGDVLEVAASVRTVLLDKTGTLTRGRPLLEDQLVLADGLDAARLVQLAASLEQTTRHPLAWALLQAAESQGLTLLSCSSSTTKAGDGVQGQLDSLQQLCRLGRMAWLEQQGVQVPAAATTWQQQQEQGGATVLALAHGQSLLGLLAVRDALRPDASEALAQLRSQGLALGLLSGDREGPVRQLGQQLALQPQQLAWGLRPEHKLQRLQKAAGPVAMVGDGLNDAPALAAADLGIAVGTGTQIAQDSADLVVLGERLMAVPQALALARSAQAKIRQNLSWAFGYNLVVLPLAAGVLLPGFGLLLTPPLAALLMALSSITVVANALLLRAPE

SEQ ID NO: 146847 - protein, 439 aa, Unknown
  Bacterial polypetide isolated from the Sargasso Sea
SKKPPIQRIADKIAGKFTYFVLIIATSSFFFWWKGAKQIWPDLLINNHHDLITTSNHTLHNSLGSNAENFLTLAIQLSIAVLVIACPCALGLATPTVITVASGKAAKKGVLFKGGDKIEMASKINHIIFDKTGTLTRGKPFIIDYLNTADKLFLLKISASLESQSRHPIASALVNEAKKQNLGLLKIKNIHTESGRGISGELDSIDGEINIGSVEWLNSKGVIIDRKSKEILETEENKSHSVIGVCINKKLLGFILLGDLLREDSINSVQKLRENNYQIKILSGDRKETVVELAKKLDIPEAEIKWDLLPEMKLKIIENLKKSNKVVMIGDGINDAPALAASNLGIAVGSGTQIAKANADVVLMGDQLSGLPYSLSLAKRTIGKIKQNLFWAFGYNLIAIPIAGGILFPKYGILLTPSIAALLMATSSITVVINALSLE

SEQ ID NO: 146848 - protein, 293 aa, Unknown
  Bacterial polypetide isolated from the Sargasso Sea
ASSAEQGSEHPLGRAVVEEAEKYNFESPEIYGFEAKSGFGVQAKVNGSTVITGNQTLMHAENIVIDIPPEITKQIPIGSTSVFVGIEGKLAGVICLEDQVRPESIQAVGQIREMGIEVVMLTGDEQNSADAVAQKTGITNLNSAVIPEEKSNIIKDYQQKSCRVGMIGDGINDAPALAQAEVGISMGSGTDVALETSDVVLMNNDLRHVVVALLLSRATLRNIRQNLFWAFGYNVIGIPVAAGLLVPLGGPALHPMLAATAMALSSVSVVLNSLRLRNFSVSQGSSSIVGETV

SEQ ID NO: 146849 - protein, 443 aa, Unknown
  Bacterial polypetide isolated from the Sargasso Sea
MGISGMTCASCVGRVERALRKVPGVQEASVNLATESARIAFVTQVGADAAAMEAVLRRAVRNAGYEPRAAGQDEAVEDLSPWAGFLPVGIGLLLSAPLVLPMIGDLFGQHWMLPAWLQFALATPVQFILGARFYKAGWHAAKALSGNMDLLVALGTSAGWGLSMWLWLTAPTDHPGHVPHLYFEASAVVVTLVLLGKWLEARAKRQTTAAIRALHALRPDVVHLLTKQGEVDVPVSEVLVGDQLVVRPGERIPVDGTVHEGHTQVDESMLTGEPLPVARDVGAALTGGSINGDGRIVMAVTAVGAETVLAQIIRLVEDAQAAKAPIQRLVDQVSAIFVPVVLVVALVTLVGWLAMGAGLEAALIHAVAVMVIACPCALGLATPAAIMAGTGVAAKHGILIKDVQALELAHKVDTVAFDKTGTLTVGQPRLTAFEVVPGLHEAA

SEQ ID NO: 146850 - protein, 601 aa, Unknown
  Bacterial polypetide isolated from the Sargasso Sea
MDVLVALGSSAAFGWSAMVTVALTNGTVVFGTHVYFETAALIITLIKLGKLLEVRAKGETGAAIRELLELRPNSANRITESGEESVPVDEICVGDVLLVRPGERVAADGSVIEGATSVDESMLTGESLPVEKLDGAPVTGGTVNLTGAFKMRVERVGADSALAQIVRMVGDAQGSRAPIQRMADRVASVFVPAVIVIAIVTWAVWWFGTEADFTESLMRFVAVLVIACPCALGLATPTAVMAGTGRAAGRGILFRNSEALERARDVSVVLLDKTGTVTRGQPTVQSVISDERASVLGGAYDYVRLAASVEALSEHPIARAVVEEAESRLLDISAVEEFKAIPGQGVSGRVEHRSVAVGTSALMTYLGVEGVLEWTGRAKEVEAAAQTPLWVAVDGRIAGLIGVADAVKETSADAVAALQSRGLSVIMLTGDREAVANVIAEEVGINEVYSEVLPSEKAQVVSQLKARSLGAVAMVGDGINDAPALAVADVGMALGTGTDVAMETADVVLMRGDLRTVSEALALSERTLRTIEQNLFWAFFYNASLIPVAAGALYSFAFLPIMLRSLHPILAALAMAFSSISVVANSLRLRRVNIPELLSVN

SEQ ID NO: 146851 - protein, 271 aa, Unknown
  Bacterial polypetide isolated from the Sargasso Sea
PQKLVKQNENSNKLIQLENIGCKFPINNAFFAKNKKYFTALEDINLYINSGETIGLVGESGSGKTTLGLSIMQLLNYSGNIYLNKLKLSSLSSEQLRESRRDYQIVFQDPYSSLSPRMTIHEILSEGIISFYNNISQTNLLQKCSELLNEVGLDESMLQRYPHQFSGGQRQRIAIARALSMKPKLIIFDEPTSALDVIVQKNILKLIVNLQEKYSLSYCFISHDLKVISSISHRIYVIKDSKIVETNSADELISNPQSDYTKKLIKSSFIT

SEQ ID NO: 146852 - protein, 538 aa, Unknown
  Bacterial polypetide isolated from the Sargasso Sea
HNTFAGRPFMSNAEPHDHTHHGHQHHEGVHGDTPPPMTKLKDPVCGMDVTEQSHHSAEHEGRHYYFCSAKCQTKFVEDPDKYAVTPPGTDKVAREPEATQPGTIYTCPMHPEVQQDHPGNCPKCGMTLEPMLPTLDEGENAELVDFRHRFWWTLPLTVVVTVLAMVGHRLQWFEMATQSWIELVLTVPIVLWAGWPFFVRGAQSIANRSPNMWTLISLGTGAAFVYSVVATVAPGVFPASFQAMGRVAVYFEAAAVIISLTLLGQMLELKARSQTSAAIKSLLGLAPKTARRIDASGQESDVPLSHVHVGDLLRVRPGEKVPVDGVVVEGSSAVDEAMLTGEPVPIVKGPGDAVIGATLNTNGALVIRSERVGSATMLSQIVQMVAQAQRSRAPMQRMADQVAGYFVMAVVGIALLTLFAWGLFGPEPRWVYGLVNAVAVLIIACPCALGLATPMSIMVATGRGATSGVLFRDAAAIENLRKVDTLIVDKTGTLTEGKPSFERVVAMPGLSEDEVLRLATSLDQGSEHPLADAMSKRP

SEQ ID NO: 146853 - protein, 580 aa, Unknown
  Bacterial polypetide isolated from the Sargasso Sea
TRQHSHKEAASRQENANAPQTHNEYTHQRLCDSDDQHAHSPPVPEAVESDKAGVSSTTEFAPTVYTCPMHPEIRQDHPGTCPKCGMTLEPVMPAVEEEENAELADFRRRFWASFPLTAIVFVLAMAGHRLTRLDPAWQDRFELALATPVVLWAGLPFFRRCAQSFVYRSPNMWTLIGLGTGAAYLYSAVAVVAPGVFPSTFAASGRVQVYFEAAAVIISLTLLGQMLELKARSQTSAAIKSLLGLAPKTARRINADDSEEDVPIAHVHVGDLLRVRPGEKVPVDGVVVEGASALDESMITGEPIPVSKRAGDHVIGATLNTSGALVVRSEKVGAQTVLSQIVQMVAQAQRSKAPMQRMADKVAGVFVIGVVAIAVMTLVAWGIWGPQPSWAHGLINAVAVLIIACPCALGLATPMSIMVASGKGAEHGILFRDAAAIENLRKVDTLIVDKTGTLTEGRPSFDRAIGLNGFSDMDVLRLAASLDQGSEHPLAAAIVAQAREQGLALERPEDFESASGIGVRGHVAGRSLALGNTSLMQAHAVAVDAASTEADAMRARSASVMYLAVDGVLAGLLSVSDRVK

SEQ ID NO: 146854 - protein, 481 aa, Unknown
  Bacterial polypetide isolated from the Sargasso Sea
MSQIKLYVATMNCAGCVAKIEKAFAAEPNVSARINLADKQVTVDGKMSSDTALAVMDKAGYPAQLIVDAKAAAEEKRVEDAAEYRLRMRQAIAALAVGIPMMLWGLLGGEMMINSPSMQLGWGIMGLVTLALLVGTGRHFYQGMWRALKAKTTNMDTLIVLGTSTAWLYSMLVVLIPSAFPMDTRHVYFEASVMILGLINLGHALELKARGKTSEAVQRLLGLQSSTAIRIGDNGDEEVEIDQLKLGDKLRLRPGDRVALDGVVESGQSLLDEAMLTGEPIPVPKHVGDNLSAGTVNGNGSLVYRVTAGQQDTRLAKIIALVQEAQTSKMPIGRLADKISAVFVPTVVLIALLAAAIWYLVGPEPALSHALVVLTSVLIIACPCALGLATPMSIMVSVGRAAQMGVLVKNGEALQSASKVDCVVLDKTGTVTQGKPQVTDIHWIEANDQALSDEDKRVLLGAIASLEQHSEHPLASAMVSY

SEQ ID NO: 146855 - protein, 748 aa, Unknown
  Bacterial polypetide isolated from the Sargasso Sea
MTKTGYTTIQLNILGAGCASCVGKIEKAINCVQGVDSAEMNFADRTVLVSGNASAELIIKAVESAGYNATQIQAESAEDAMNEKEQADLQHYKSLLRHTIIALSVGIPLMIYGLFIGEMTVSTLLEQTVWGLVGVVTLAIMLISGRHFYIGAWKSFLNHNANMDTLIALGTGTAWVYSMLIVSFPQLFPEMARHVYFEATAMIIGLINLGLALEVKARGKTSEAIKRLIGLQAKTARVIRDGKDLDIDIAHVLLNDHVKVRPGEKIPVDGVVFEGNSTIDESMLTGEPMPVEKVIGDDVFTGTLNKSGSIIFKATRVGKDTALARIISMVKRAQNSKPPIGRLADVIAAYFVPAIMIIAIFSAMVWFNFGPEPSSVFAIVSATTILIIACPCALGLATPMSVMVGVGKAAESGVLIRNGEALQTASKITAMIIDKTGTITEGKPQVTDIILVNADSEEQVLALSAGIESHSEHPLAQAIVESANDRGIEAIDTEHFNAISGKGVEAEVDGQTLLFGNLKLMLDKHIDIGLHEAKAQVLAENAKTPMYLALAGQLLAIIAVSDPIKPDSIEAIARLKLNGIKVIMLTGDNKATAAAVAKKVGIDDFFAEVMPEDKANKVAELQQQNEVVGMTGDGINDAPALALADVGFAIGTGTDVAIESADVTLMRGSLHGLADAIAISKATLRNIKQNLFGAFIYNVAGIPLAAGVLFPVFGILLNPVIAGAAMAFSSLTVVSNANRLRLFKAKEH

SEQ ID NO: 146856 - protein, 513 aa, Unknown
  Bacterial polypetide isolated from the Sargasso Sea
MGTLAAFVYSLWNLLKDGGISGLYFETSALIITLILLGRLMESRSRKRAVESVQALLELRPKQAMLLTDEGETPIALELLHPGDRIRVSPGETLPADGLVEEGVSEVDESMLTGESVPRSCSTGDDVTGGTRCINGMLTLRIKRIGEESTLAKIIRMVEEAQSGKAPVARMADRVAGVFVPIVLLLAMLTAMSWWFYGAGTETVLTRMVAVLVIACPCALGLATPIAILVGTGSGARQGILFRNAAALEALQGLDTLMFDKTGTLTLGQPVLESIKTWNGWNESEVLRLSASAEIGSEHPFGKAIIKSAKSKNLEISQPESFEALSGSGIVAVVENRQLAIGQQEFILKQSKIKELPQEWDEGIEAKSSIWVLVDGTLAASMSFQDQIRPESRETIESLKSMGLKPVMLTGDQLEAAELLARQAGLDELKAGLLPQHKVSVLEQYQAEGHRVGMVGDGINDAPALAAADVGIGMGSGTDVALETADVVLMKNNLAHLADAFSLSRATLSNIRQ

SEQ ID NO: 146857 - protein, 526 aa, Unknown
  Bacterial polypetide isolated from the Sargasso Sea
MSEQIQLNISGMSCASCVGRIEKALAKVAGVEQVNVNLATETAAISGLALSPEVLMAAVEKAGYQASLPLEKPAVDVVQPAFYQQEWWPVVASIVLTLPLILPMFGMLFGLDWMLPSFWQWLLATPVQFYFGARFYKAGWAALKAGSGNMDLLVAIGTSAAYGLSLYLWWAFTAQHAGHGAPHLYFESSSAVLSLVLLGKYLEHKAKKRTTDALRALENLKPAVATLWQNGLWLEVKAETVQQGDLVLVKPGERIAVDAVVEQGQSHVDEALISGESVPVSKTLADKVTGGSVNLDGVLQIRASAVGAESTLSRIIQLVEQAQGAKAPVQALVDKISAVFVPVVLLIALATLLGWGLLAEDWVTGILNAVAVLVIACPCALGLATPAAIMAGTGSAARSGILIKDAIALEQAKAVNLVVFDKTGTLTQGKPVLQQVSRFTDEADTLQWAASLQQNSEHPLAKALLAYAASHQVATVEATEFRVVAGKGVQGRVQGRSLVLGSSHWMQQLGLDLPLGQIKTGGASVS

SEQ ID NO: 146858 - protein, 535 aa, Unknown
  Bacterial polypetide isolated from the Sargasso Sea
VLLGRFLEERARINTGTALKELAKLQPETANLILDNNEIREIRIGALRPGEKIQLLAGDRIPVDGLVIKGNSAIDISSLTGESLPLEAKPGVELPSGSLNLESTITLEVQKIGSETAIAKIISLVEEAQARKAPIQGLADKVAGMFCYGVTTLALITFLFWWRIGTRIWPEVLEVSNAGFMHSHNLHDHLMNTPQTPIGLSFQLSIAVLVVACPCALGLATPTVITVASGEAAKRGWLFKGGDVIEMASKISQIIFDKTGTLTIGRPLVVDCWKNNESERNFMLKLAASIEQESRHPLAQAIIQEAHKKEIKLEKVSSSTTYPGKGLAGKINNLEGRIRVGTPEWIKSEGIEWNEMIENNFKLSKRKAQSIVAVALDNKLLGFFLIDDQIRKDAFLSINKLRSRGFSLSLFSGDRDSAVLSIGEKLGFSAKQVTWQMLPSDKLNKLNLLKNNGLVAMIGDGINDAPALAAADLGVAVGTGTQIAQDSADLVLLGENLEALPNALNLSKQAMLKIKQNLAWAFGYNLIALPIAAGL

SEQ ID NO: 146859 - protein, 471 aa, Unknown
  Bacterial polypetide isolated from the Sargasso Sea
MTKGFESYEKPSDRLKRSLFGLFGAIAPIPSMRRALFKRAQGCVRTFWALKGVDFEIARGETVGIIGRNGSGKSTLLQIICGTLAPTGGEVQTQGRIAALLELGSGFDVEYTGRENIYMNGQLHGLTREQIDARLDQIIAFADIGQFIDQPVKTYSSGMFVRLAFAVIAHVDADVLVIDEALSVGDAFFTQKCMRFLRRFQQTGTVLFVSHDSSAVRGLCKRVIWLDRGVIRESGEAKDVCTSYFEAFYRQQQGEGTSWANPDDLDGTESKRKAPESVAPGRGTQTADQRQRFAESGGSAASPLVALYVDPHSLATHRDHHLIEAVQLTSEQGSPISWIVGGERVLLRIRARRPESGSAPIIAFFVKDRLGQPLFGDDTSLVKTIDHQAAPLAEKNSIIEAEFLFDMPILPPGEYAFTALVATGAAAAPNVLDCLHDALIIKSESASVATGLIGLPMTSIALFVREAVEEA

SEQ ID NO: 146860 - protein, 203 aa, Unknown
  Bacterial polypetide isolated from the Sargasso Sea
MENRWIWKDLNLKVEAGSRIVLMGPTGSGKTLLLRVLAGLENPDHGQVFFQERDQNQWKMPEYRTQVTLLTQRPAFQEGSVEQNWRMPFVFRERSNQQYESLRFKPWLKMLELPTDFPRKQTAELSGGERQLAALLRMLQFDPHLLLLDEPASALDESKSKKMEELLNDWQMQVPGRTWIWVSHDSRQAERVGDEVLELGAVS

SEQ ID NO: 146861 - protein, 203 aa, Unknown
  Bacterial polypetide isolated from the Sargasso Sea
MENRWIWKDLNLKLEAGSRIVLKGPTGSGKTLLLRVLAGLENPDHGKVFFQERDQNQWKMPEYRTQVALLPQRPAFQEGNVDQNWRMPFDFRERSNQHYESSRFKLWLEMLELPTDFALKQTAELSGGERQLAALLRMLQFDPHLLLLDEPASALDESKSKKMEELLNDWQKQISGRTWIWVSHDSRQTERVGDEVLELGAVS

SEQ ID NO: 146862 - protein, 188 aa, Unknown
  Bacterial polypetide isolated from the Sargasso Sea
MSIAAENVTWKVGKKVIVNNVSLNVAPGKTVGLLGPNGCGKSSLLRILAGLRRPDIGNVTLDGKTLSRIPKKQLARRVAFVEQHGMTDANMRVRDVVKLGRIPHHSPFSNWSTHDDETVNAALQRVDMLEKCEQGWLSLSGGERQRVHIARALAQAPTEILLDEPTNHLDIHHQMQLMHLMVNIQVVG

SEQ ID NO: 146863 - protein, 198 aa, Unknown
  Bacterial polypetide isolated from the Sargasso Sea
MAAEALSCVRQDRVLFENLNFQLSAGQVLYIQGKNGAGKSSLLRLLAGLTLPEDGQILFHGKPLQQQTEFFAEQLLFIGHQSGIHPQLTALQNLAFWSALSEQAIADPYELLGALGLAGLEDIPCFMLSAGQQRRVSLARLWFTNKSLWILDEPFTSLDQQLIAKLETHFLQHLSAGGVIVLTSHQNLSASYPALQAV

SEQ ID NO: 146864 - protein, 179 aa, Unknown
  Bacterial polypetide isolated from the Sargasso Sea
MILQVKNISKSFGKLKVLDNVSFDVSEGEYLALIGKNGAGKTTLLNLLLGLSYPDSGSINFFGKTLENNLTYILNKIGIVFQQHTLDFDLSVIKNLIFYADVHGMKRSISRPKIDELLIKFDLKDFENYKARNLSGGMKRRLEISRALLKDPKILILDEATSGLDPNAREKILFDLKKL

SEQ ID NO: 146865 - protein, 305 aa, Unknown
  Bacterial polypetide isolated from the Sargasso Sea
YGGALLLVTHDREFLQNVVNGIVELDRGNIYQFDGSFDRFLRFREEQLAAEDTANKLFDKKLAEEEVWIRKGIKARRTRNEGRVRALQAMRESRKRRRESLGKAKFKANVSEDSGKVVAELTNVSHSFGNKPIIDNFSTTILRGDRIGIVGGNGAGKTTLLKILLNKLSPDEGKVKLGTKMKIAYFDQLREYLDMEKNLVDNVSDGGDFIEINGKSKHVISYLSEFLFTPDRIRTPAKALSGGEQNRAILAKVFSKPANVLVLDEPTNDLDIETLELLEDILIKFEGTILLVSHDRKFMDNVVTS

SEQ ID NO: 146866 - protein, 219 aa, Unknown
  Bacterial polypetide isolated from the Sargasso Sea
MLELRNVVHSYPGANRAALQGIDLQLQAGECLGLLGSNGAGKTTLLSLLSGVLALQQGELHWQGQPRLGLVPQQLAFYAGLKVGENLDLFADLYRLRGTERRQRLQQCIDICALDDKLTRRSEQLSGGEQRRLNFAIGLLQPADVYLFDEATVGVDAANRQHLLAAVEQLTAEGKAVIYTSHYLEEVERVAQRILLLHEGQVRLDLDKRQLLGDDHGLL

SEQ ID NO: 146867 - protein, 161 aa, Unknown
  Bacterial polypetide isolated from the Sargasso Sea
MAASITLKKVGKLIGKKTILAGLSFGIEKGSLVAIVGLNGAGKTTLLKLLSGFENPNYGQVFIHGLDMNKRRNETRKLVGYVPYENDLDPWLSLRENILFNAELYKVNKDIASKRIEKFSRLLDFRNQLDRTAHKVSGGIHKKTMIVRGLVHNPDILILDE

SEQ ID NO: 146868 - protein, 262 aa, Unknown
  Bacterial polypetide isolated from the Sargasso Sea
MRAVFSLNDLTLGYERHPAVHHITGNFLPGSLTAIVGPNGAGKSTLLKGLMGLIDPLDGHINQNKALYKEIAYLPQQADIDRSFPISVMETVLLGHWKRIGLFRSVTDKMINEAENAIKAVGMTGFEKRVISSLSSGQFQRVLFARMLLQDAPIILLDEPFTAIDAKTTADLLNVVFRWHTEKRTVIAVLHDMDQVRNNFPETLLISREPIAWGPTNEVLINKNITKARLMAESWDEREELCDRKCSFNEFLRILYRSIFKL

SEQ ID NO: 146869 - protein, 183 aa, Unknown
  Bacterial polypetide isolated from the Sargasso Sea
ELVQVTGANGSGKTTLLRVLCGLLAPASGSLTWHGAPVRSGDAAFLNTLCYVGHTNGIDPDLTVTESLRLALQLAGLRDSASEPFGIGLALEALELGKLAATPVRKLSQGQRRRVALARLLLARRELWLLDEPIASLDDHAVSLFTAQLDAHLRAGGMAIMATHHLLSRPQGANRVLRLGGIA

SEQ ID NO: 146870 - protein, 107 aa, Unknown
  Bacterial polypetide isolated from the Sargasso Sea
MLYMKNVSTHYGKIQALHEVNLEVQRGEIVTLIGANGAGKTTLLMTLCGDPRATTGSIRYEGEELTGLTTAQIMRKDIAIVPEGRRVFSGLTVEENLVMGGFFSDKE

SEQ ID NO: 146871 - protein, 87 aa, Unknown
  Bacterial polypetide isolated from the Sargasso Sea
MDNNLFNLDNICLTRQDKEILTNISMKINYGEQLNIFGKNGSGKTSLLRILSGITSPTSGKVNATESFNACNDIFYMGHKYGLNNNL

SEQ ID NO: 146872 - protein, 266 aa, Unknown
  Bacterial polypetide isolated from the Sargasso Sea
MIPRPFPPRRTRRRPRRPARHPPTTEQVWGVNVNNLDWSYPNIDGTPIDGQEPLIKGMDLKLAPGSCCLLLGANGAGKTTLLKILGGKHMVPKDKVLIHGREAFYDTGLTTSGQLSYIGGNWQRDVAFAGYGVTLAGDFPARQMLDSIPNVDPERKARIINVLDIDPEWRMHQVSDGQRRRVQLAYGLMIPYSVLLLDEITVDLDVLGRADLMSFLRRECEERKVTIVYATHIFDGLEQFATHVAFVAGGRLRFCEPLDAIEGLRS

SEQ ID NO: 146873 - protein, 154 aa, Unknown
  Bacterial polypetide isolated from the Sargasso Sea
MLRIERLTYRIGPRILFENSEVAINEGQRVGFVGRNGAGKTTLLNLIKGSLTPDTGTINFPHRWQIGITEQEVPESSLNLIDTVMSADKELTRLEKESKTATDPNRIAEIHSRLYEKEAHRAHSKAARILSGLGFAESEIRRPCKEFSGGWRMR

SEQ ID NO: 146874 - protein, 73 aa, Unknown
  Bacterial polypetide isolated from the Sargasso Sea
MAAIRLQAIEKWFGALQVIKGLDLDIQEGEFIVLVGPSGCGKSTLLRILAGLEDATLGSILIDDEDVTDRLPS

SEQ ID NO: 146875 - protein, 197 aa, Unknown
  Bacterial polypetide isolated from the Sargasso Sea
MNNHILNLKGISVEKNDVCILEDINLEIKQGDFLNIYGSNGAGKTTLLKLLSGLTEPTAGEIKFNNDDFMDKVFILGHKNGIKLNLTVLENLQFISNNQDIKKIKSVIEKYELTSKMNTLAKYLSHGQQKRVALMKAMINDYDVWLLDEPYSGLDQAGEEILDNILLDHIKNSGVVVITNHKEIKKEKVNIKNYKIE

SEQ ID NO: 146876 - protein, 158 aa, Unknown
  Bacterial polypetide isolated from the Sargasso Sea
MLKAQSITCVRGDRLLFQDLNLEVRPGEACQIQGGNGVGKTTLLRTLCGLSLPESGEIFWNDAPIHEDPGKFHSDLVYIGHSNGIKLDLTPKENLTFALTLQSVIPDVSIDEALDWVGLSGSQHLLCRVLSAGQRRRVAIARLYLSRAPLWVLDEPLG

SEQ ID NO: 146877 - protein, 193 aa, Unknown
  Bacterial polypetide isolated from the Sargasso Sea
MKNLTALRNDIELFRSITITLNSGDCLELSGANGSGKSTLLRTLAGLHDQYTGKYVCSDYLYQGHRLGLDETMTPVENLDWFLGVEGSSLEEARLQEILERVELHDLAHKPCFRMSQGQKRRVSVARWILSKRSVWILDEPFSHLDYQGLELVNAVIKEKCLNGGIVICATHVPLQHEEKTEWTLTPFNGLAQ

SEQ ID NO: 146878 - protein, 242 aa, Unknown
  Bacterial polypetide isolated from the Sargasso Sea
MIKGDIVVENMSKEYRLGNIGYRTLREDLQSWWAKINNKPDPNSIIGDENNNPSDRILALNNINLEVKSGDRLGIIGNNGAGKTTLLKILSRIASPTNGIIKIRGNVAGLIAVGTGFHPELTGRENIYLNGCILGLTKKQITSRLEEIIDFSGVEKFIDTPVKRYSTGMCIRLGFSVAAHLKPDILIVDEVLAVGDAEFRKKAMGKMKDASENNNRTVLFVSHNLTAIKSLCEKIIVLDNGK

SEQ ID NO: 146879 - protein, 201 aa, Unknown
  Bacterial polypetide isolated from the Sargasso Sea
GSFVAFLKSPYSNFRELTKLTSFKNHEESKDIIWALRNVSFEVEKGEVLGIIGGNGAGKTTLLKLLSRITRPTSGRAIVAGRVASLLEVGTGFHPELTGRENIFVNGAILGMTKREIEKKFDEIIHFSGVEKFIDTPVKRYSSGMRVRLAFSVAAHLEPEILMIDEVLAVGDIEFQKKCLGKMDSVAKEGRTVLFVSHNMG

SEQ ID NO: 146880 - protein, 139 aa, Unknown
  Bacterial polypetide isolated from the Sargasso Sea
MLLLNNLEFKRLDKIIFNEINISASAGKIILINGNNGAGKTTLLKTIVNILEPTNGEIFWMGKKIKKNLFNFYSNTTFIMDKPTSSKSLTVLENIYFWKNLSISKITFDEINKLLEILELTNYKNKLVGFLSLGEIKKL

SEQ ID NO: 146881 - protein, 203 aa, Unknown
  Bacterial polypetide isolated from the Sargasso Sea
MENSWIWKDLNLKVEAGTRIVLKGPTGSGKTLLLRVLAGLENPDHGKVLFQERDQNQWKMPEYRTQVALLPQRPAFQEGSVEKNWRIPFDFRERSNQHYESSRFKPWLEMLELPTDFVRKQTSELSGGEIQLAALLRMLQFDPNLLLLDEPASALDESKSKKMEELLNDWQMQVPGRSWIWVSHDSRQAERIGDEVLELGAVS

SEQ ID NO: 146882 - protein, 73 aa, Unknown
  Bacterial polypetide isolated from the Sargasso Sea
MSGIFLKKINKSFGNTLVLNNVDLEIYEGEFLTLVGPSGCGKSTLLRILAGLESSDSGKVFIGGADMTKVKPA

SEQ ID NO: 146883 - protein, 203 aa, Unknown
  Bacterial polypetide isolated from the Sargasso Sea
MENRWIWKDLNLKVEAESRIVLKGPTGSGKTLLLRVLAGLENPDHGKVFFLKRDQNQWKMPEYRTQVAFLPQRPAFQEGSVDQNWRMPFDFRERSNQHYDSSRFKPWLEMLELPTDFARKQTSELSGGERQLAALLRMLQFDPHLLLLDEPVSALDESKSKKMEELLNDWQMQVPGRTWIWVSHDSRQAERVGDEVLELGAVS

SEQ ID NO: 146884 - protein, 214 aa, Unknown
  Bacterial polypetide isolated from the Sargasso Sea
MLYLKDLTIQRGNKIVFSNFNAVIKSGYTTLIKGKNGSGKSTLLRAIAGFTPLERGTIIQDKKDIFENNEEWVKNLIFLDTKNGLSKDLTVAENLNAWLTMKGWSSNKEIIKMALKSVGMEKYAELYISQCSEGLKKRAALSRLYISFINKVNFWILDEPTNELDTTSLVLFKKLVFNFLEQKGTIIIASHDQNIIEKNFYTLDLDELKKQRVS

SEQ ID NO: 146885 - protein, 335 aa, Unknown
  Bacterial polypetide isolated from the Sargasso Sea
SLGKAEFKANTSENSGKIVAELTNVSHSFGNKTIIDNFSTTILRGDRIGIVGGNGAGKTTLLKILLNKLSPDEGKVKLGTKMEIAYFDQLRENLDMEKNLVDNVSDGGDFIEINGKSKHVISYLSEFLFTPDRIRTPAKALSGGEQNRAILAQVFSKPANVLVLDEPTNDLDIETLELLEDILIKFEGTILLVSHDRKFMDNVVTSLMVFEANGKINEYVGGYSDWSIKGGKLQKLGDSNVKTDKARGKNLTQENQRKHETTKRKSREHDKEIRRILLLIEKLELEQSQLEKILSGPNFYEDSKENIERTLQKFAENKKGLEITYERWEQLDYED

SEQ ID NO: 146886 - protein, 484 aa, Unknown
  Bacterial polypetide isolated from the Sargasso Sea
MRTLLTVRANKVNTFYLTKAISSASWKFWVRWFFNFCGWMASGVVVNSGLRYTESLITIELRAALTKRAHKMYMENNNFYKTAVLRQGGLDNVDQRIVADIDAFAKETAFLYGHSFKPILEFTLSLAEAAKELGYSRPLALFASQFIITGVLRSIAPRLGPMVAREAALEGGFRHTHSRLIAHAEEIALLDGGKREVEILDEGLDNLVVTQRWHALQRIRKSVADNISKFQGLLVGSIFVHVPFMMKATASEGERISSFRATEELMLRCGGAFTEVLLLGKNLDELAGYTHRLSQLFKTLDESSKQANAERAARASVSEDAAETPIVFDDVTVGAPEPDGSQRVLVKNLTLSISPGKNLLITGPNGCGKTSLLRVLAGLWEPMTGSVTRPTGASSIMWLPQRPYLLQGSLRDQVVYPQDPRTAKVDDARVKECLIMAGLSKFVDGSMNVGLNTRHLEWNDVLSGGERQRIGFARLYYHAPKFAI

SEQ ID NO: 146887 - protein, 259 aa, Unknown
  Bacterial polypetide isolated from the Sargasso Sea
MSFNHVKSKSRTNISNSLFRKRVVSYWKQGNANEPVRVQTMMKSSFILETQELGRRLENRWIWKDLNLKVEAGSRTVLKGPTGSGKTLLLRVLAGLENPDHGKVFFLERDQNQWKMPEYRTQVALLPQRPAFQEGSVEQNWRMPFDFRERSYQNFDSSRFKPWLEMLELPTDFARKQTAELSGGERQLAALLRMLQFDPHLLLLDEPASALDESKSKKMEELLNDWQKQVSGRTWIWVSHDSRQAERVGDEVLELGAVS

SEQ ID NO: 146888 - protein, 189 aa, Unknown
  Bacterial polypetide isolated from the Sargasso Sea
YFRDLNLEVRPGEACQIQGGNGVGKTTLLRTLCGLSLPESGEIFWNDAPIHQDPGKFQSDLVYIGHSNGIKLDLTPTENLTFALTLQSVIPDVSIDEALDRVRLSESQHLLCRVLSAGQRRRVAIARLYLSRVPLWVLDEPLGAIDAAGVQEIEKAIGTHLDQGGMAILTTHQPLHLQHAPIRAVQLDN

SEQ ID NO: 146889 - protein, 111 aa, Unknown
  Bacterial polypetide isolated from the Sargasso Sea
MEISPDKPTEIEICSASVFYGKERILENLSLSIKEQRVGFIGRNGSGKTTLLRILAGLQELNNGKVLIDGTEVAKKRKEAIKKVGIIFQNPDHQIIFPTVGEELRFGLSQL

SEQ ID NO: 146890 - protein, 197 aa, Unknown
  Bacterial polypetide isolated from the Sargasso Sea
MNNHILNLKGISVEKNDVCILEDINLEIKQGDFLNIYGSNGAGKTTLLKLLSGLTEPTAGEIKFNNDDFMDKVFILGHKNGIKLNLTVLENLQFISNDQDIKKIKSVIEKYELTSKMNTLTKYLSHGQQKRVALMKAMINDYVVWLLDEPYSGLDQVGEEILDKILVEHIKKCGVVVITNHKEIKKEKINIKNYKIE

SEQ ID NO: 146891 - protein, 205 aa, Unknown
  Bacterial polypetide isolated from the Sargasso Sea
MINKHIIYAKDLSLERSGRNIFCSLNFSLDSSESIIIKGKNGSGKTSLLRCIAGFYPITSGKLLWYGESILPAYYSEKPLVSWLGHFDAIKGSLTVRENLVFFKEIWSVNKNVFMKAIQTFSFENFLDCPASWLSAGEKRRLSLLRLSFCPAKVWILDEPSTYLDKDNKEILISIINEHVNSGGAIICATHENFNLPNAKEYSLS

SEQ ID NO: 146892 - protein, 415 aa, Unknown
  Bacterial polypetide isolated from the Sargasso Sea
MLTRFEIDNFKSLVGFSLPLSRFNCVIGLNGAGKTTLLQALDFASHVMSGEVKDWLNARGWSAADLASRLGNKSNIELALELDIDGLLLRWEATFNRVRLACTREEVKVKSSILEGARQYEIIVRVDGAIYELKSGKYWHRSESADPSQWNEIPFIYEGSLLSQLKDNQLSPLLRELRERIKAIRSLDLLSPEQLRRKTRLSDLTDDIGSGGQQLGAFIHQLNLTEREQLLQNLQRYYPQVTKIHTSVLRSGAIKLELHERYQTTTDMNGQASLFESDMVTEARHINDGMLRLLAILAQQFSPYEFVLFDEIENGVNPEITEALVDALVGSAKQLLVTTHSPLVLNYLEDDVARQSVLLIYKRPDGVSRAVRLFDVPMAAERLECLSPGESMLDLSLTRVAEAAEQMDAPSHGEG

SEQ ID NO: 146893 - protein, 204 aa, Unknown
  Bacterial polypetide isolated from the Sargasso Sea
MAAEALSCVRQDRVLFENLNFQLSAGQVLYIQGKNGAGKSSLLRLLAGLTLPEDGQILFRGKPLSGQSEEFAEQLLFIGHHSGIHPQLTALQNLAFWSALSEQAVADPYQLLGSLGLAGLEDIPCFMLSAGQQRRVSLARLWFSTKPLWILDEPFTSLDQQLIATLEQHFLQHLAKGGLIVLTSHQSLSADYPALQAIELEYRW

SEQ ID NO: 146894 - protein, 164 aa, Unknown
  Bacterial polypetide isolated from the Sargasso Sea
LLRIIAGFSAPDEGEVLYQERSINKYYEEFAHDLLFIGHKTGVNIQLSAVENVRFWLRINGYSNEPDLYPILAKLGLVGLEDVPVRMLSAGQQRRVALVRLWLSDANLWVLDEPFTALDKSGVAFLQQRFTQHLNNNGAILLTTHQDLTTHFSDLQTITLEYRH

SEQ ID NO: 146895 - protein, 43 aa, Unknown
  Bacterial polypetide isolated from the Sargasso Sea
MLSLQNVTKLYGTVIGVNDVSAELGQGAHGLLGPNGAGKTTLL

SEQ ID NO: 146896 - protein, 236 aa, Unknown
  Bacterial polypetide isolated from the Sargasso Sea
MSQAVLTAQGICLGYGSGPVLQGFDLHLQPGEVVSILGPSGVGKSSLLRVLAGLQAPQAGRVQVLGEPLSGPHPRVVVAFQDPSLLPWLTLEKNVAFGLDFARQPHLSGEERRRRVDHAIAAVGLEPARQQFPAQLSGGMAQRTALARCLARQPQVLLLDEPFGALDEVTRADMQHLLLKVNREQGSAAVLITHDIDEALLLSDRILLLGNRPARTLGEWAIDLPHPREEQVEAIG

SEQ ID NO: 146897 - protein, 201 aa, Unknown
  Bacterial polypetide isolated from the Sargasso Sea
ELGHEINSEYLIQSQNISYRIADKKLLSGISLKISKAEIVTVIGPNGAGKTTLLRLLLGLIPCSSGYIYRKPKLRIGYLPQRAVYNPVLPLSVSRLMNLTGNYSNKQIETSLEETGVQSLKDKPVSQLSGGEYQRVMLARALLRNPELLVLDEPVQAVDYMGESELYNLIGNLQIKLGCGVLMVSHNIHVVMASTDRVLCL

SEQ ID NO: 146898 - protein, 143 aa, Unknown
  Bacterial polypetide isolated from the Sargasso Sea
MTNAPEFLLDTRVVLDRGNLRLDAELQVHHGEVVAIMGPNGAGKTTLLNALLGWLPLRSGWILVDGKAFETPGDDSVTPIHRRDIGMIFQDGLLFPHLKVAGNIRFGAAPDKDLTGLIETLELSNLLERYPSELSAGQTQRVA

SEQ ID NO: 146899 - protein, 258 aa, Unknown
  Bacterial polypetide isolated from the Sargasso Sea
MPVAARRASSWPASQGEGSPRPVAQPPAQRRHGDSAGGARHGLRHGPGRSRGGDGVRPAHRLRPAGRCAEGSGSAGSLSRRSGVMNMPMHNLQHTQNQVANPVLDVSDLCVAYGKVEALSNASLRVGQGQIVTVIGPNGAGKTTLLSAIMGVLGSRGRVAFDGSLEAVPEVEVMVGRGLGLVPEKRELFSSMSVADNLLLGAFQRHRSGQRDHGQTLKEVYELFPRLWERREQLAATLSGGERQMLAVGRALRPSPSC

SEQ ID NO: 146900 - protein, 280 aa, Unknown
  Bacterial polypetide isolated from the Sargasso Sea
KLEDNVAAIFGRNPTQAYGTKTALDNINLTIKEGERVGVIGPNGAGKTTLLSLIIEQLEPSSGKVEISGSVQAMMQTGFGFSDELSGFDNIVNSLLFNGLSTSQREAALLDVIDFVELGEFLYHPVKTYSLGMRARLEFAAATAIYPNILAIDEVMGAGDGYFSSKSAERMRNLISSTTLLLVSHSLQQVIDYCERAIWLDEGQIKADGPVKEVVARYEKYMLEAHAALHQKIEKDSLAINEDSYFDQEPAAGKRIDVLLTTFTSTINYGNLPTISDFSF

SEQ ID NO: 146901 - protein, 292 aa, Unknown
  Bacterial polypetide isolated from the Sargasso Sea
KFKSSAGASYVRALDKITLQLTKGDRVGLVGHNGAGKTTLLRVLAGVYPPSYGEIRCKGRIASLLDISLGFDLEASGYENIFLRGLYLGLSKQQISKCIDKISNFTNLGNYLSMPLRTYSSGMLMRLAFAITTEVEPDIILMDEWISVGDAKFMEQAKERLESFISTSSIMVLASHSENLIRSTCNKAILLGQGEVLAKGSVDEVFHHYNFFGSSAFFDIDEYISIHPDLEASMSVPGMAPWMHFIRYGIFEGRSPGCGISLEAFNNDPVFTNALQAKNGLAAAERIENIAP

SEQ ID NO: 146902 - protein, 210 aa, Unknown
  Bacterial polypetide isolated from the Sargasso Sea
LLGVNGAGKTTLLRLMSGDLVPDTGTIKRAADLRVVTFSQHRGTLVPTQTLQEALCPVGDMVEYRGKSVHVTGWAKRFLFTPDQLATFVGNLSGGEQARVLIANLMLEPADILLLDEPTNDLDIASLEVLEDALLEFPGALVMVTHDRFMLERVATEYIGLDDAGSAKSFQTYEQWIKARRNTTPASARKEPAAPKQARKPKTSASRRKL

SEQ ID NO: 146903 - protein, 168 aa, Unknown
  Bacterial polypetide isolated from the Sargasso Sea
MGQLLLRVKNVSKMFGNLNALDDLSVDIEKGSIIGLVGSNGAGKTTLLRLLCGLYRPSKGDVVFLKDGEEKNIDKFREAVGILPESTGLYHRLTAWENIRYYSRLNGVSDSISWERTLRFSKALSFSNDLMRHTRGFSRGMRQKTAILRALAHGPEIYFLTSLQQVLT

SEQ ID NO: 146904 - protein, 169 aa, Unknown
  Bacterial polypetide isolated from the Sargasso Sea
MSDSVLIEVIDASLTYPKPYGFNLKKLKTKHTDRTVINTLKNFSLNIHSGMRIGVIGANGAGKTTLLRVLAGIYPISNGEIRHNTDSISTIIDGNLGFDPFLSGRDNIILKCNLNGIHDNALINKVCEDVHDFIELGDMFEYPIYTYSTGMFFRLAFAFATSHQSDLVI

SEQ ID NO: 146905 - protein, 176 aa, Unknown
  Bacterial polypetide isolated from the Sargasso Sea
MNLLEINNFRVSYGGIKAVKGVNLRISDGEVVALIGSNGAGKTTLLKAICGLLPFDGDLLYGGERVVNRRCDELVKRGLFMVPEGRGIFGRLTVRENLLMGAFLRKDKTKIIEDLYKVFKMFPRLEERKGQLAGTLSGGEQQMLAIGRALVGEPRLLLLDEPSMGLAPMMVEIFLR

SEQ ID NO: 146906 - protein, 263 aa, Unknown
  Bacterial polypetide isolated from the Sargasso Sea
MFTTDDNTVDELGHGINSGNLIQSQNISFRIADKELLSGISLNISKAEIVTVIGPNGAGKTTLLRLLLGLIPCSSGYIYRKPKLRIGYLPQRAVYNPVLPLSVNRLMNLTGNYSKSQIETSLEDTGVQSLKDKPVSQLSGGEYQRVMLARALLRNPELLVLDEPVQAVDYMGESELYNLIGNLQIKLGCGVLMVSHNIHVVMASTDRVLCLNQHICCEGQPKDVSQHPEYLRLFGLDSGSSLAIYSHKHDHKHHISGRLSQKQ

SEQ ID NO: 146907 - protein, 97 aa, Unknown
  Bacterial polypetide isolated from the Sargasso Sea
MTSDEQNFIEIKGVSKNFGDVVAVDNVDLTIKKGELFSILGASGSGKTTLLRILAGLEIPSQGSILIDGVDMTSVAPYDRPVNIMFQNYALFPHMSV

SEQ ID NO: 146908 - protein, 146 aa, Unknown
  Bacterial polypetide isolated from the Sargasso Sea
MESTTLENRESLILSVENLEVVYNEVILVLRGISLNVSEGEIVALLGANGAGKTTLLRSITGLLDIHRGRITKGSVTFLGQKTNRYDPSKLVRAGLSQVMEGRRIFAELTVEENLRAGAYTVTSRQKISEAHDRVVSLFPSIGFSI

SEQ ID NO: 146909 - protein, 200 aa, Unknown
  Bacterial polypetide isolated from the Sargasso Sea
IGRNGSGKTTLLRILAGLQELKNGKVLIDGTEVAKERKAAIKKVGIIFQNPDHQIIFPTVGEELRFGLTQLGLNSNDADLKVIACLKQYDKIDWFERSISTLSQGQKHLVCLLSVLLMKPRVLLLDEPFTGIDIPTKLKLEQYLSSLKQTIIHVSHVPETFENYQRLIWMDKGIIQADGIPKSVIKKYRDAMENYVEKSI

SEQ ID NO: 146910 - protein, 234 aa, Unknown
  Bacterial polypetide isolated from the Sargasso Sea
KMAATIQSLSGGWRMKLAIARAMLWNADVLLLDEPTNHLDTSAIAWLSNYLKSLTNTTICLVSHDYDFLADVLTDVIHLSEKTLTYYPMGFRDFQSLKPEIVAALPSNDNAISKQANIEDNGPAAAPKEAAQGSGFAIDQIGENQPSHIKPIRFPEPGDLEGVKSRAKVVMYMKDVSFGYPGTSKKILNGATVKITQNSRAALVGLNGAGKTTLLKLLIGELETDEGVGEVWRH

SEQ ID NO: 146911 - protein, 104 aa, Unknown
  Bacterial polypetide isolated from the Sargasso Sea
MTSDEQNFIEIKGVSKHFGDVVAVDNVDLAIKKGELFSILGASGSGKTTLLRILAGLEIPSQGSILIDGVDMTSVAPYDRPVNIMFQNYALFPHMSVFENIAYG

SEQ ID NO: 146912 - protein, 56 aa, Unknown
  Bacterial polypetide isolated from the Sargasso Sea
GPNGAGKTTLLSHLSGEIKPDSGTVLFNGDKYFKYGCTFALFSWTCTFISNYKYFS

SEQ ID NO: 146913 - protein, 259 aa, Unknown
  Bacterial polypetide isolated from the Sargasso Sea
SELDLPMQKRMSQLSGGWRRRTALAKALVQKPDLLLLDEPTNHLDIATITWLETVIRSYPGAVLFVTHDRAFLQRLATRIVEIDRSQLKSWPGNFQKYLRRKEEALHAEARANEQFDKKLAQEEIWIRQGIKARRTRNEGRVRALMKMRELQSARVDREQSARIHIEEAEASGRKVLRAKNISYSYGKEQLIENFSINIMRGDRIGILGNNGAGKTTLLRLLLGELKPDSGTVKHGSNIEFGYFDQLRGTLDANKSVAE

SEQ ID NO: 146914 - protein, 240 aa, Unknown
  Bacterial polypetide isolated from the Sargasso Sea
SRGDRIGLVGPNGAGKTTLLKMLTGQLAPDSGWVRLGVNLEIAVIDQKREELDPDDTLAHYLTDGRGDTLLVNGEQRHVAGYMKDFLFQPEQARTPIRNLSGGERARLMLARILAKPSNLLILDEPTNDLDIETLDLLQEIVAGFAGSVILVSHDRDFLDRTVTSTIAPANPLSPDGEWLEYAGGYSDMMAQRKGAAAEAKAQEKKEKQAAREKAAPEPAKAKGKLSYKQKFALENLPKE

SEQ ID NO: 146915 - protein, 148 aa, Unknown
  Bacterial polypetide isolated from the Sargasso Sea
MSGAHLTVQNLTTGYHGFQVLQDLSLQAAPGITVIVGPNGAGKTTLLKALAGLLPRTGTVALDGSDLPAMNATACVQRGLALVAEGRQLFPQMTVTENLELGGWLVPSRIRADRLAQAFEDFPRLQERATQLAGTMSGGEQQMVAVAR

SEQ ID NO: 146916 - protein, 127 aa, Unknown
  Bacterial polypetide isolated from the Sargasso Sea
MCHRYTNNGDLTHKTLDGVSLSLEAGELVSLIGPNGAGKTTLLKCLAGLLTPDAGQILYDGREDVLSDTYKRAKMIAYLPQFQALHWPVLARELVALGRLPHGESFQARQNDEIKIYEAMQRCGADA

SEQ ID NO: 146917 - protein, 80 aa, Unknown
  Bacterial polypetide isolated from the Sargasso Sea
MLTDVENTVDEIGFEINGETLIQSQNISLHIGEKELLSSISINISKSEIVTVIGPNGAGKTTLLRIILGLMPCSSGRIYR

SEQ ID NO: 146918 - protein, 135 aa, Unknown
  Bacterial polypetide isolated from the Sargasso Sea
MARELIRLDDVHRAFGPLTVLEGVNLRIEEGDRIGVIGHNGAGKTTLLRTISNQDQDLGEISFSPALRLAFLTQVRDIDDDATLGEELNRRGRQFLELEEEISEIEERMEDPSFYEGDWQPTMDRYQELQSLMAR

SEQ ID NO: 146919 - protein, 135 aa, Unknown
  Bacterial polypetide isolated from the Sargasso Sea
MGYKAKDLTVYINNINIIDKISFDFPSGSYVSIIGPNGAGKTTLLKTLAGLLNYKGSLSINNQNVKELFKNSNNFNCAYVPQIIGIPEGMSLIEYIFLGRNSFTNWFLSENKKDYDIVEEALNKLNLGSKKNQLV

SEQ ID NO: 146920 - protein, 292 aa, Unknown
  Bacterial polypetide isolated from the Sargasso Sea
MLVTTNALTKRYGSSMALEACSLHVSQGEIFGLLGHNGAGKTTLLRLLLGYITPSSGMACVDGINCATQSLAVRSRTAYLPGEARLFRRMKGHAVLDFFSGLRKECCRLRAKQIADRLELDCNRQVARMSTGMRQKLALAIVLSTDAPLVILDEPTANLDPTARSEVLKMVMESRAVGRTVIFSSHVLSEVESTCDRVVILRSGNVVHEQSIESMKRSHLITARLTGSMGKVPPHLEKSVSICSANAVDDTSRVTIESSGSLKEMLGWLAELPLEEIHIEPVGLSSVYDQYT

SEQ ID NO: 146921 - protein, 536 aa, Unknown
  Bacterial polypetide isolated from the Sargasso Sea
MRRAARAGRRTAAGTVAQSARGAVRARRVGWRGRLRARRDDRGRRVVARRCVGVRRLARVGRARARSRAPRAGARRIARCVAAVAAHGRRDRGRVGRTRHAAAVARARRTPARDHLLADRRPQRRDRAVVRVGGAAAGRLRRAAGRAATERAAARRRDRARARRARCARARADLSRRVAGRCSRGDDGRHDRLRRSRRAACAAARLRQRPANAVARRDARGRRRRDGGRPARTHRDRARAIAGRRDDRVDRRAGVPVDVVEEVDAMTRAALHATAGDMSCAAVGLTLKAGARTLLDGFTQVFRPAEIWCVVGPNGAGKTTLLATLAGLQPPAGGHVEIDGRRLAAWPPEQLAQRRALMPQQLHDAFSATVFDTVLLNRFPYLGGWGWERDGDRAAAHDALATFDLAALASRDVLSLSGGERQRVALAATLCQDAPLMLLDEPLAHLDLHHQIDCLTALAAWLDAGPRTVLFSCHDLNLARRFATHALLLDGRGHAWAGPVHDVLTPERASDAFGYPLVLIRENGRDALLPAWPERQ

SEQ ID NO: 146922 - protein, 233 aa, Unknown
  Bacterial polypetide isolated from the Sargasso Sea
MLELRNVSTHYGKIQALHDVSVQVKEGEIVTLIGANGAGKTTLLMTLCGEPKPSSGSIWFEGEQIDSLSTARIMRKDIAVVPEGRRIFARLTVEENLLMGAFFVDKAEQRGLLDQIFTLFPRLHERLEQRAGTMSGGEQQMLAIGRALMSKPRLLLLDEPSLGLAPIVIQQIFDTIEQLRRDGMTIFLVEQNANQALKLADRGYVLENGHVVLQDTGAALLANPAVRQAYLGG

SEQ ID NO: 146923 - protein, 530 aa, Unknown
  Bacterial polypetide isolated from the Sargasso Sea
MITTANITMQFGSKPLFENISAKFGNGNRYGLIGANGCGKSTFMKILSGKLTPSSGNVSMAPGTKLGILSQDQFAFEEFSVVDTVIMGDRELWEVKQERDAIYSKAEMSEEDGMRVADLETQFAEMDGYTAEARAGDILNSAGIDESYHFGLMKEVAPGKKVRVLLAQALFAEPDILLLDEPTNNLDIYTISWLAEELNKRKSTMLIISHDRHFLNSVCTHMADIDYGELRVYPGNYDDYIQAAMLVQEQLHAENAKKSAEIEELQSFVARFSANASKAKQATSRARRLEKIELAEVKASSRRKPYIVFNQHKKLHRLAITLEELGHSYPDLPLFDNANLLLEAGQRLAIIGENGAGKTTLLKCLVNDIEPTAGSYKWAENAAIGYIPQDNAKYFAEDITMFEWMSQWRSPKHDDLQIKGMLGRLLFTSDDFNKRVQVCSGGEKNRLLFGKLMLQDINVLVMDEPTNHMDMESIEALNNALYKFDGTVIFVSHDREFVSSLATQIIEIKDKKLNHFDGNYEEFLAHKENA

SEQ ID NO: 146924 - protein, 235 aa, Unknown
  Bacterial polypetide isolated from the Sargasso Sea
MVADIVLQKAGKSFGPIAALHPTELSIPNGQYVLLLGSNGAGKTTLLRLIAGVSQPSTGHVLICGQDLHDDKTGRAKIGLLSHYSMLYEDLTAEENLLFFAQLYGLEETQLKIEQSLELMGLIQFRNKKVNGFSRGMRQRLAIARATIHNPSIILLDEPYTGLDLTARKTLQNLLIQLKALGHTFLMTTHRLEDAAPLADRIIIIESGNLIFDQVWQGSGLQLIKLFESSTERKL

SEQ ID NO: 146925 - protein, 466 aa, Unknown
  Bacterial polypetide isolated from the Sargasso Sea
MSTANITMQFGPKPLFENISVKFGEGNRYGLIGANGCGKSTFMKILGGDLEPSSGNVMLEPNVRLGKLRQDQFAYEDVRVLDVVMMGHTEMWAAMTERDAIYANPDATDDDYMHAAELEAKFAEYDGYTAEARAGELLLGIGIAIEDHNGPMSNVAPGWKLRVLLAQALFSKPDVLLLDEPTNNLDINSIRWLEDVLNQYNSTMIIISHDRHFLNQVCTHMADMDFGTLKVYPGNYDDYMLASTQARERQQNANAKAKERVADLQDFVRRFSANKSKARQATSRLKMIDKIKIEEFKPSSRQNPFIRFEYEKKLHNIAVVADKISKKYERTIFNDFSISVQPGERIAIIGENGAGKTTLLRSLLGKLTLDHGTVKWAENANVGYMPQDTYEEFPDDVTLMEWIDGYRQEGDDEQMVRGTLGRLLFNADDIRKSVKVLSGGEKGRMIWGKLMLGRHQCDADGRADQP

SEQ ID NO: 146926 - protein, 696 aa, Unknown
  Bacterial polypetide isolated from the Sargasso Sea
MAACQPSNAGSNPPPDPFAGLVRPAMPVTPPATGTMGASDSSLRRLPMSLYSISGAQLAFGHVALLDHADFSLEAGERVGLIGRNGAGKSSLLKIVAGLAKPDDGLVTRQQELVTVYVPQEPEFEPGATVFDAVASGLAHTRELLEEYDSIAHRLADIPEGAEHDALLARMNALQSSLDAHDAWSWRTRVSMTLAQIGLADVDAPVDALSGGMQKRVALARALVLQPDVLLLDEPTNHLDFDGIRWLEELLVAQRAGLLFITHDRAFLDRVATRIVDLDRGRLLSYPGNFSAYQTRKAQQLEIERVENEKFDKLLAQEEVWIRKGVEARRTRSVGRIARLVQMRNERAERRNTLGNVKLDVAQGEKSGKIVAELTDVTKRYGGRAVVDRFSTTVMRGDKIGFIGPNGAGKTTLLKLILGELKPDEGTVRIGTNLQVAYFDQMRAQLDQEKSLADTISPGSEWVEIGGVRKHVMSYLGDFLFAPERARSPVKSLSGGERNRLLLARLFARPANVLVLDEPTNDLDIQTLELLEELLADYDGTVLLVSHDRAFLDNVVTSVIAAEGDGKWREYVGGFTDWQIQSARADQLAQQEAAKRAVKEAAPVKEDSAKSAAGRNAQRTVKLSFNEQRELDSLPEKIAALEEEQKTINARLEDGSIFAKDPQEGTRLTERFAAIDDELLEALERWETLEAKRKPA

SEQ ID NO: 146927 - protein, 222 aa, Unknown
  Bacterial polypetide isolated from the Sargasso Sea
MSNTDFVLAVEGLSVSFDGFKAIDSLNLYVDRGELRVVIGPNGAGKTTLLDLICGKTRASEGSIKFRNEEMTRLPEFRRVRKGIGRKFQTPSIYENLSVFQNLEVSFPRGRGVFGALTFRRTGDVLDRVRSVAGEIGLENQLDLEAGLLSHGQKQWLEIGMLLMQDPELLMLDEPIAGMSVREREITAELLKRICQNRSMIVIEHDMAFVAQIAHKVTVMHQ

SEQ ID NO: 146928 - protein, 427 aa, Unknown
  Bacterial polypetide isolated from the Sargasso Sea
LDRVATRIVELDRGRLLSYPGNFSAYQTRKAQQLEIEQVEAAKFDKLLAQEEVWIRKGVEARRTRSVGRIARLVEMRNERAERRNVQGNVKLDVGQGEKSGKIVAELTDVTKRYGSRTVVDNFTATVMRGDKIGFVGPNGAGKTTLLKMILGELPPDEGTVRIGTNLQVAYFDQMRAQLDLEKSLADTISPGSEWVEVNGQKKHVMSYLGDFLFAPERARSPVKSLSGGERNRLLLARLFARPANVLVLDEPTNDLDIPTLELLEELLTEYDGTVLLVSHDRAFLDNVATSVIASEGGGKWREYVGGFTDWQIQRDRSQQMAQDAQKEAAKEAAKETAAPKDAGAASRNTQRAAKLSFKDQRELESLPAKIAALEAEQKTIGAQLEDGSIFAKDAKEGTRLTERYAAIDEELLIALERWDELENKRK

SEQ ID NO: 146929 - protein, 255 aa, Unknown
  Bacterial polypetide isolated from the Sargasso Sea
MEGRAWGQGTTARYRGGVSVVELRAAVALLGRFPALSGVDLTIHAGETILLRGPNGAGKTTLLHLCAGLLRPESGSVQVLDHDLTDRAGRRSVRRRVALLGHTTGLYEDLTVGENLRFWARAAGLSTVDADRRLDDARKRLEVSDRLVDQPVHTLSAGQRRRTSLAALLARRPDLWLLDEPHAGLDQSGRDLVDGLIGDAVAAGGTVVVSSHELDRVAALSPRMVTLAGGAVVDGSGADSPPPVEEPSIGQENRR

SEQ ID NO: 146930 - protein, 226 aa, Unknown
  Bacterial polypetide isolated from the Sargasso Sea
MLKLDQISCRYGQVEVLHQVSLQLEQGEILGLLGRNGAGKTTLLKCLMGLLPLVSGKIVMNDEILSGKPAHEIPKKGIGLVPQGRRLFPYLSVEENLKMGLLVNDEKPGLLDWILELFPVLQDRMQQKAGTLSGGEQQMLATARALCIQPKFLLLDEPSEGLMPKYVERIFETVERLKKENVGILLVEQKIDGVLKISDRVAFLENGNLEHQTTPEALAENDEPRF

SEQ ID NO: 146931 - protein, 171 aa, Unknown
  Bacterial polypetide isolated from the Sargasso Sea
TTELRNQFAYVSQEPIIFANTVFENIRFGRPNASIDEVETAAKNAASHEFIMNLPNGYNTFVGERGVLLSVGQKQRIAIARAFLKNAPILLLDEPTASLDAESESLIQGALEKLSISRTVIVIAHRLSTVKRANKILVLNEGKIVSEGTHEQLINEKGLYSKLAKLQFLTN

SEQ ID NO: 146932 - protein, 171 aa, Unknown
  Bacterial polypetide isolated from the Sargasso Sea
LRFNSLKEIELSSLREKIGLVSQDVFLFEGTVIENIAYGDLNASESEVWNAAQKSEADEFINNLPQKENTIVGERGQKLSGGQRQRISIARAILKNPEILILDEATSSVDNETEAAIQRSLDILKKDRTVIVIAHRLSTVRNADIIYVLENGSVVESGNHDSLLDIEGVYS

SEQ ID NO: 146933 - protein, 156 aa, Unknown
  Bacterial polypetide isolated from the Sargasso Sea
LFPGSVKENILYGNPEASMEEITEAATVAEAMSFIEELPNGWETNIGEDGHRLSGGQRQRIAIARAVLKDAPVLVLDEATSNVDNETEAALQRSIERISVDRTTLIIAHRLSTVRKADKIAVMERGKITEMGSHDELISKDGLYARLWSVQTGEAS

SEQ ID NO: 146934 - protein, 243 aa, Unknown
  Bacterial polypetide isolated from the Sargasso Sea
RFEAVDFAYAGRAALLQGFDLTVPAGSTLGIVGATGSGKSTVVKLLLRLYERDGGRICLDGVPIDTLQLQDLRRCIALVSQDVYLFHGTVAENIAYGVADPDPVAIEQAARLAEASAFIDALPQGYDTLVGERGQRLSGGQRQRIALARAILKDAPVLVLDEATAAVDNDTEAAIQRSLAQITQHRTTVVIAHRLSTVRHADWIVVMDQGRIVEQGSHDSLVANGGIYTNLWQVQAGEGLIAS

SEQ ID NO: 146935 - protein, 171 aa, Unknown
  Bacterial polypetide isolated from the Sargasso Sea
RRCIALVSQDVYLFHGTVAENIAYGVADPDPVAIEQAARLAEAAGFINALPQGYDTLVGERGQRLSGGQRQRIALARAILKDAPVLVLDEATAAVDNDTEAAIQRSLAKITQHRTTVVIAHRLSTVRHADWIVVMDQGRIVEQGSHESLVAQGGIYTNLWQVQAGEGFIAS

SEQ ID NO: 146936 - protein, 141 aa, Unknown
  Bacterial polypetide isolated from the Sargasso Sea
SATDEEVLQAIEAAYLGDVIERLPDGLESIVGERGLKLSGGERQRVSIARAVLKDAPILVFDEATSSLDSHSEQAVMSAFRALAGRHTALVIAHRLSTVVDADRIVVIEHGAVVEEGTHHELLEANGKYVELWRIQREQQG

SEQ ID NO: 146937 - protein, 194 aa, Unknown
  Bacterial polypetide isolated from the Sargasso Sea
MLRFYEFQNGIIEIGGLSIKEVDTTDLRNQFAFVSQEPIIFANSVFENIRFGRPNASIDEVETAAKNAAAHEFIMNLPNDYDTFVGERGVLLSVGQKQRIAIARAFLRNAPILLLDEPTASLDAESENLIQGALEKLSISRTVIVIAHRLSTVKRANKILVLDKGKIVSEGTHEQLINKKGLYAKLAKLQFLTN

SEQ ID NO: 146938 - protein, 315 aa, Unknown
  Bacterial polypetide isolated from the Sargasso Sea
QALSGQLAVGTYSVLVFITQRLLWPLTALGRTLDEYQRSMASTQRVLDLIDTPVTIRSGQTPLDRRLVRGEIHFEQVDFAYPGRASLLQGFDLVVPSGATVGIVGSTGSGKSTVVKLLLRLYERQGGRILLDGRPIEQLQLPDLRGAIALVSQDVYLFHGTVAENIAYGVANPDPLAIEQAARLAEAAGFIEALPDRYDTLVGERGQRLSGGQRQRIALARAILKDAPVLVLDEATAAVDNDTEAAIQRSLDQITRNRTTVVIAHRLSTVRHADRIVVMEQGRIVEQGRHDELLAHGGVYANLWQVQAGERLIAS

SEQ ID NO: 146939 - protein, 423 aa, Unknown
  Bacterial polypetide isolated from the Sargasso Sea
VNLKIALIVGFTLALVYGIIFFFTRSLIFKIGKERLKASESLFISVSEAFGAIKEIKVSGSEKNFINRYSYPAKNLAKSQALLGLISTLPRFALEAIAFGGIILVILYFIAQSGSFNDIIPIIALYVFAGYRLMPAIQGIYRSAAQIRYAKPSLDSLYKDLKNLRSTISANSENRLQLKKNISLKNIFYQYPNSKKLVLNDLNLNISASSKIGIVGATGSGKTTIVDIILGLLEFQKGRFEIDGKLIEKNNMRSWQNSIGYVPQNIFLSDDTVLANIAFGIEKNEINQHSVESAAKIASLHEFVVNELPEKYQTYIGEKGIRLSGGQRQRIGIARALYHKPKLLILDEATSSLDNLTEQDVMDAVHNMGKDLTVIMIAHRLSTVKECDSIVVLEKGEIKHQGTFQELTKINDYFRLATSDFKK

SEQ ID NO: 146940 - protein, 246 aa, Unknown
  Bacterial polypetide isolated from the Sargasso Sea
RGDCFERVDFAYPGRAALLQGFDLTVPSGATVGIVGSTGSGKSTVVKLLLRLYERQGGRILLDGRPIEQLQLQDLRGAIALVSQDVYLFHGTVAENIAYGVADPNPAAIEQAARLAEAAGFIEALPDRYDTLVGERGQRLSGGQRQRIALARAILKDAPVLVLDEATAAVDNDTEAAIQRSLEQITRNRTTVVIAHRLSTVRHADRIVVMEQGRIVEQGRHDDLQAQGGVYANLWRVQAGERLIAS

SEQ ID NO: 146941 - protein, 248 aa, Unknown
  Bacterial polypetide isolated from the Sargasso Sea
GVMPRQFIQLRDVSFSYSGSEESVLSNVDLTIPVGSRIALVGRTGSGKTTLAHLLLGLFRPSSGDLTLDGLPLNEEELPAWQGNCALVPQDIRLLDASIRDNVAFGCDPEEIEDDQVWAALEAAQFDDVVSAMPYGLFTMIGENGIKLSGGQRQRLSLARAFYRDAKVLVLDEATSALDNKTEHDVMQALDLVGRRCTTIVIAHRLSTVRKCDRIYEIEDGRIKASGDFDTLFLLSDSFREMTRFETA

SEQ ID NO: 146942 - protein, 274 aa, Unknown
  Bacterial polypetide isolated from the Sargasso Sea
YRILPALQQIYVSLTHLRIVGPSLDSIHDDLKSLQPQVKVEKDKNSLQLDKSINLNHIHYHYPNSSSTTLKNINLNIPARKTVGLVGATGSGKTTTVDIILSLLEAQQGTLEVDGKVINKDNRRAWQRSIGYVPQQIFLADDTVAANIAFGVDPKNIDMEAVEHAAKIANLHEFVIDELHLKYQTTIGERGVRLSGGQRQRIGIARALYNKPQVLILDEATSALDNLTEQAVMEAVHNLRKNITIILIAHRLSTVKNCDKIFFFNKGQLKAKEL

SEQ ID NO: 146943 - protein, 147 aa, Unknown
  Bacterial polypetide isolated from the Sargasso Sea
AANIAFGVDKKDINQERVKLVAKIANIDEFVINKLPQQYQTTVGERGVRLSGGERQRIGIARALYRDPQVLILDEATSALDNLTEELVMKEIHKISNDKTIIMIAHRLSTVKKCDLIFYLEKGELKAQGTYEELIKSSEGFKKIENK

SEQ ID NO: 146944 - protein, 171 aa, Unknown
  Bacterial polypetide isolated from the Sargasso Sea
LFSASVEENLRYGKSEASGDEIRNAVEKAFATEFIEGLPQKYESFLGEQGVRLSGGQRQRIAIARALLKDPALLLLDEATSALDAESERMVQLALDDLMRNRTSIVIAHRLSTVIDADQIAVLDQGRLVALGTHRELMDSCELYSQLARLQFREPRLLKPTCKRFLPDYQI

SEQ ID NO: 146945 - protein, 173 aa, Unknown
  Bacterial polypetide isolated from the Sargasso Sea
ESWRQKIALVPQHPTLFSGDIFYNIAYGATEPTQAAVEAAAQMAHAHEFIQTLPEGYQSHLGAQGVRLSGGQRQRIALARAILSDPELLLLDEATSALDTESEWHVQQALTEIMRERTTIIIAHRLSTVINADRIVVMDEGQVIDSGPHDELMKRCKLYQRLARLQFQTEKTR

SEQ ID NO: 146946 - protein, 105 aa, Unknown
  Bacterial polypetide isolated from the Sargasso Sea
SGGEKQRVAIARALLKKPKIFFFDEATSSLDTKTEKEIQNNLEHLSKNITTIIIAHRLSTVKNADNIIVLNNGEIAETGNHKKLLEFNGLYSSLWRQQEKNFKDK

SEQ ID NO: 146947 - protein, 231 aa, Unknown
  Bacterial polypetide isolated from the Sargasso Sea
MTRSSSSQGGPDPSSIRGELTLQNVHFKYKTRPDNLVLQGINLNMRPGTTTALVGKSGGGKSTIIHLLLRFYEPTKGKIFLDKKYDLHDIDPRVVRQLVGFVAQDTQLFATTILENLLYGLPDRESISTDSVIKACKLANAHEFICEMEEKYETRVGEKGIMLSGGQKQRLALARCFLREPKFLFLDEATSALDAENEALVQKGIDELLKKTDATVLLIAHRLSTVLNSDQ

SEQ ID NO: 146948 - protein, 223 aa, Unknown
  Bacterial polypetide isolated from the Sargasso Sea
FDINFFYPESKYAALKNVSLQFNSGESIGIIGSSGAGKTSLVDLILGLLQPQSGIIKYNNVELKKVLTHWRSQIAYLPQQVFLIDNTIRKNIALGELESDINNERIIEALKMASLSDLINQLPEGINTVIGEHGAKLSGGQRQRIALARAFYHRRTILILDEATSALDNDTEAFIVSEIQRLKRHKTMIVIAHRLSTVKHCDRIYRLESGKIVEEGTPEKVLK

SEQ ID NO: 146949 - protein, 172 aa, Unknown
  Bacterial polypetide isolated from the Sargasso Sea
DVNLFSLRKNISLVSQDVILFDDTVRSNILYANPNATDDQIYDACKLAAAEEFIIKLPDGYDTKIGENGVKLSGGQKQRISIARAILKNSPIILLDEATSALDTESEKKVQVAIRKLTENRTTLVIAHRLSTVYNADTIFVVNNGNIVSFGTHKELIEKSLEYKSLYQKQLA

SEQ ID NO: 146950 - protein, 95 aa, Unknown
  Bacterial polypetide isolated from the Sargasso Sea
QRQRIGIARALYNKPNVLILDEATSALDNLTEQAVMDALQNLNNNITVVMIAHRLSTVKKCDNIFLLEKGELKGEGTFEKLIKENENFRANVNKM

SEQ ID NO: 146951 - protein, 309 aa, Unknown
  Bacterial polypetide isolated from the Sargasso Sea
MESLGGVAIAIIIFYGGSQVIVGATTPGTFASFIAALLMAYPAMKNLANLNANLQEGLAAAQRVFALIDTSPTIQDKKGARKLENIQGNVKFENVSFSYENNRLALSDITLDIPAGSTVALVGPSGAGKSTILNLIPRFYDCDKGCVLIDDENINNVVVSSLRANIALVSQDITLFDDTIRSNIAYGKPNASDDEIVNAATAAEAHEFITSLPDGYQTHVGGRGLKLSGGQRQRIAIARAMLKNAPILLLDEATSALDTETERQVQSALENLTKGRTTIVIAHRLSTVMSAEYNLCYEFRRNYRKGQSR

SEQ ID NO: 146952 - protein, 247 aa, Unknown
  Bacterial polypetide isolated from the Sargasso Sea
MGIFHSIVLNQVDFKYEGQESKAIDGISLAIPFKSTVGIVGSTGSGKTTIVDIILGLLRPNSGFIMVDDTLINNTNIRTWQKTIGYVPQQIYLSDDTIQANIAFGHDPNNIDFKNIQNAASIANLHDFIIEKLPNGYNTKIGEQGVRLSGGQRQRIGIARALYYDPEVLVFDEATSALDNLTENAVMEAVSSIANKKTIIMIAHRLSTVRDCDNIFVLDEGKLVGEGSYDQLMNTNLEFQKMIKFDN

SEQ ID NO: 146953 - protein, 260 aa, Unknown
  Bacterial polypetide isolated from the Sargasso Sea
DWENELDSGRYVTKRAKGAIDLKNVSFRYPGSNISALKNISLQIVAGETIAIVGPSGSGKTTLVQLLARFYAPSAGEITLDGINIEEYSIKNFRSQISMVSQSVTLFRDTVFNNIAFGELKGSNSEKVFKASDIANSTSFIEALTDGFQTELSDEGESISGGQRQRIAISRAVLKDAPIFILDEATSALDSESESLIQEALDAIISNRTSIIIAHRLSTVEKADRIYVLDEGKVIAVGNHRELLQQQGLYAHLYNKDFKD

SEQ ID NO: 146954 - protein, 230 aa, Unknown
  Bacterial polypetide isolated from the Sargasso Sea
DRPILQDVNFTIPAGHTVAVVGASGAGKSTLARLLFRFYEVDKGAIRIDGQDIRSVTQDSLRSAIGVVPQDTVLFNDTLYRNLAYGRPEATEEEVYRAAKMAHLENFIHSLPEGYETKVGERGLKLSGGEKQRVAIARVILKNPPILILDEATSSLDSLSEQAILGALKEVSHQRTTLVIAHRLSTVRDANSILVMDGGRIVESGSHHELLARDGHYARLWEQQHRTEDN

SEQ ID NO: 146955 - protein, 148 aa, Unknown
  Bacterial polypetide isolated from the Sargasso Sea
IRFGREATDAEVRRAAELANASGFIEALPLGYSARVEERGCNFSGGQLQRLAIARAVLGNPAVMLLDEATSALDAEAEAAVQQGLEQAMAGRTVFVIAHRLSTVQEADRILFLERGRIIEQGSHDELMRSGGRYSALCSRQIIRPALI

SEQ ID NO: 146956 - protein, 123 aa, Unknown
  Bacterial polypetide isolated from the Sargasso Sea
ALDFIENTPHGFETVVGERGVKLSGGQKQRIAIARALLKNPSILILDEATSALDTESEKKVQTAIESLMKDRTALVIAHRLSTVQKADKIIVIENGKVAETGSHETLFEKNGIYRRLYDLQFD

SEQ ID NO: 146957 - protein, 122 aa, Unknown
  Bacterial polypetide isolated from the Sargasso Sea
MGEQGVRLSGGQRQRIAIARALLKDPTLLLLDEATSALDAESERMVQKALDDLMRNRTSIVIAHRLSTVIDADQIAVLDQGRLVALGTHRELMDSCELYSQLARLQFREPQALETHPQAVPA

SEQ ID NO: 146958 - protein, 207 aa, Unknown
  Bacterial polypetide isolated from the Sargasso Sea
MFNDTVAYNIAYGGVKDKEWKALVDDPKRHDELIEKIKPSSQRAQIHDYIMLKSKGYGELVGERGLKLSGGEKQRVAIARALLKKSKIMCFDEATAALDTETERQVQLAIDDVAKDSTTLMIAHRLSTVRNCDKIIALKHGVIQEQGTHDELLAIPGGYYKELWEKQAESKEAERKEKEEITRLLAEQAEVYEQRRLRAASIGKTEN

SEQ ID NO: 146959 - protein, 354 aa, Unknown
  Bacterial polypetide isolated from the Sargasso Sea
EEIEQHRRARYRTMRLLALQHPVVGFIEAAGILAILLIGALRISAGGLSGAGFSSFIAALLILIDPISRLINNFNEFQQGQASLGRLREIEREPMEEPDRPNARPMPALQGALDLRNVSFAYEPGKPVLQQLNLRVEPGQVVALVGPSGAGKTTLFSLLLRFNQAQQGELLLDGVDLRDLRAAELRRSIALVPQQSALFSGTVAEAIRFGRNASDAEVRRAAELANAAGFIESLPQAYDSRVEERGSNFSGGQLQRLAIARAVLGNPAVMLLDEATSALDAEAEASVQQGLEQAMAGRTVFVIAHRLSTVQEADRILFLERGRIVEQGSHDELMRSGGRYSALCSRQIIRPALI

SEQ ID NO: 146960 - protein, 601 aa, Unknown
  Bacterial polypetide isolated from the Sargasso Sea
MIDSGSRPKSRNLRSLMPVLAFLKPYGWRMFFAGLALVFTSAVTLSLGQGVRLLIDEGLVQGSKEKLTLTLMFFTGLVFLMSFGTFTRFYLVSWIGERVSTDLRVAVFGHLIRLHPAFFETNLSGEIQARITADTTVLQTVIGSSLSIALRNGLMLIGGIGWLFWINPKLTATVLAVIPVVVVPIIIFGRRVRRLSRSSQDRVAIVGAFVGEALQNIKIVQGFNHQAEDVRQFNGHAENAFRTGIQRIRQRAVLIAIVILLVLGSIGSMLWVGGMDVLEGRISPGELAAFVFYAVIVGSAVGFISEVYGDLQRAAGATERLLELLDAKALIQDPHRPKLLPGKIQGAVSIQNLGFSYPSRPEQKALDGIQLEVESGMTMALVGPSGAGKSTLLDLLLRFYDSQQGSICFEGIDLRDLSLEDLRRHIALVPQQPVLFSASVEENLRYGKPEASGDEIRNAVEKAFASEFIERLPQKYDSFLGEQGVRLSGGQRQRIAIARALLKDPALLLLDEATSALDAESERMVQQALDDLMRNRTSIVIAHRLSTVIDADQIAVLDQGRLVAIGTHRELMDSCELYSQLARLQFREPQNPEIHPQAVPA

SEQ ID NO: 146961 - protein, 605 aa, Unknown
  Bacterial polypetide isolated from the Sargasso Sea
MPLRSQTWRDLRRLLKELPPSRLRFLVVVLVASFLQGLMDILLVGLLARLVGLMAGVKLADQIPGIHVFGGGMLDQAGWLLGLLVVAFWLTSGLRFGVAFLQSMLSAEIWNDLVNKVYRNLMLQDYEFFTHHRTANLSESFNRILNKVSTTVVSPMITIAGNALSVLVLLCGVVLVLGTPALLMFGLMLGAYALASKLIIPYLRFATKQRVRYSRRIHLLLMESLRSMRDVQLYSAERFFINRFASDGVVAKRYDRLTKLLPDVPRYVIEPAGITILFLVGLGPSVLSGDAVSVREAIPTLAAVLGTLLRISGPLQNTFRNINKLRGGLPEIQDALELLDLRPKRLNASAPGVPTPSGVMPRQFIQLRDVSFSYSGSEESVLSNVDLTIPVGSRIALVGRTGSGKTTLAHLLLGLFRPSSGDLTLDGLPLNEEELPAWQGNCALVPQDIRLLDASIRDNVAFGCDPEEIEDDQVWAALEAAQFDDVVSAMPYGLFTMIGENGIKLSGGQRQRLSLARAFYRDAKVLVLDEATSALDNKTEHDVMQALDLVGRRCTTIVIAHRLSTVRKCDRIYEIEDGRIKASGDFDTLCRLSESFREMTRFETA

SEQ ID NO: 146962 - protein, 898 aa, Unknown
  Bacterial polypetide isolated from the Sargasso Sea
MTHSPNPPSSARLPRSQLTSRIVSELARAVWRYRKQTVLSILLMVAAKLAVVLIPLVLKHIVDGLGHPVAQALFPVFLVLAYALLRFLGDALNEARDVVFSIVTQRTVAAFTERTFAYLHRMSARFHTRRETGAIVRDVQKGADGIGFLLGVALFTIVPTAFEIAAIVAIMVRGYAREFTLAIAATFGCYAVYTFIFTRRRVAFQRAVNLLEAKSDGRLVDSLLNYDTVKYFATEETETRRLSEVLEQWVHARTANQRALTALHVGQSAVIALGIAAIMLLAAQRVVGGTMSVGDLILVNAYLIQICMPLNTLGFVFRETNDAMVNVERMFAILAARGRVGEDIDEPAAQPLVVSVGKIDFEHVDFGYDPARPILRDVDFHAYAGKTLAVVGGSGSGKSTIVKLLFRLYQPDRGAIRIDGQDLSKVTQQSLREAIGIVPQDTVLFNETIAYNIAYGRPSATRADVVRAARAAQLDEFIERLPDHYDTRVGERGVRLSGGERQRIAIARAILKDPRIIVFDEATSALDTRSERAIQTELTRLAQGRTSIVIAHRLSTVVDADWILVMEHGRVVEQGTHRELLSRDGVYAKMWSLQGQQGELEHAQRKLTAQSVSLATLTSGAVDALHDEIAARHVAVQVELSDSDLRVTGDPGVLQPAIAELCRNEIVQARPGERIVLRVERHNNHAWLNVLGSGDKPAELSASAAQRMEATLASAGGAFTLMPLHGRLAYVAILPLRAVADARPHVAPTLREEGAKPLDDLLVMAIDDQEEARDALEAVLSANGARVRLASSGAEALDWLGRMQTSDWPNLLLCDIVLAGEDGYDVLRRIRALESERSGSTHAILPAIALTGYAETEDRVRAEQAGFKAHLPKPVAPEKLIAEIRKLAADRPRAATAP

SEQ ID NO: 146963 - protein, 447 aa, Unknown
  Bacterial polypetide isolated from the Sargasso Sea
CYSKICNRCDKRRSCNFFLLGNMFYQSWTLTIFAFFAFPLAIWPIRKIGKSIRKITCTIQNEIAVFSNVLAESIKGIRQVKAYTKENYEKKRAFETVGYIQKYFTKSAFISNRLSPLMEFIGSLAIALSIYVGGVFVLNETMTTGQFMSFLVSLLLAYQPVKALGNLNISVQEGLAGAERIFNLLDTSRDKMENISKENNIRLDGDIILKNISFAYDKKRVLEEVNIKIPRGKKVAIVGLSGSGKSTIANIILRFFDQFDGEISIGSKNIKNMELTELRNNISMVTQETVLFNDTISNNIKYGKLNANDMEVENVAKLSGIHEFSNSLDKKLNTIIGESGIKLSGGQRQRIAIARALIKNAPILIMDEATSSLDNITEKEILITIKKLMENRTTLIIAHRLSTVEDSDIIYVLDKGRVENFGSHKELLVKSKLYQKLQLKEQLENEF

SEQ ID NO: 146964 - protein, 172 aa, Unknown
  Bacterial polypetide isolated from the Sargasso Sea
ISLKSLRNLMGIVTQETILLNTDIKSNIVYGSDKTNVSMLKSSALAANAIEFIEQFKDGFDTIVGEKGVRLSGGQKQRIAIARAIYRNPPLLILDEATSALDSQSEKKVQIAIENLMQDRTVLVIAHRLSTVKRADQIIVLKDGRIIEKGNHINLYRNKGVYYNLYNSQFDN

SEQ ID NO: 146965 - protein, 233 aa, Unknown
  Bacterial polypetide isolated from the Sargasso Sea
YSYPKASEKALTNINLCIQARSTVGLVGPTGSGKTTAVDIILGLLEPQQGALEVDGKVIDKYNRKTWQRSIGYVPQQIFLSDDSVAANIAFGVDPKDVNQDAVEHASKIANLHDFVINELPSQYQTTVGENGIRLSGGQRQRIGIARAIYHKPQILILDEATSALDNLTERAVMEAVHNLRKNITIIMIAHRLSTVKNCDNILLLEKGEVKDQGKFDKLIKISDQFRATAKNL

SEQ ID NO: 146966 - protein, 323 aa, Unknown
  Bacterial polypetide isolated from the Sargasso Sea
LVAVMLLAAISVQAGELTVGDFVLVNAYMIQITMPLNFLGTVYREIRQALVDMRQMFDLLDEPPEVQDRQNASQLRIAKGRVQFEAVSFSYDSERPILEDVSIDIPAGQTIAIVGPSGSGKSTTGRLLFRFYDVTGGAVVIDGQDVRDVTQDSLHQAIGVVPQDTVLFNDTIYYNIAYGHAHATLDEVMKAARDAQIHDFIMSLPDTYDTRVGERGLKLSGGEKQRVGIARTLLKDPPILLLDEATSALDSETEHEIQEALERAGQGRTVITIAHRLSTVQNADRILVLEKGTVVEDGTHSELLSKNGRYLDLWTLQSSEQAA

SEQ ID NO: 146967 - protein, 255 aa, Unknown
  Bacterial polypetide isolated from the Sargasso Sea
FAYNPKERLILNRVSFTVDPGTKVALVGRSGAGKSTISKLLYRLYDIQGGVIRIAGQDVKHCTQRSIRLHIGIVPQDCVLFNESIEYNIGFGKIGTGEIATKEEVSTAAEHAQFDEFVKRQPLGYDTLVGERGLRLSGGEKQRVAIARALLKNPPIMVYDEATSSLDTHTEKQIMMAINFAAQGRTNLVIAHRLSTVMDSDQILVLKEGEIVERGDHVALHAKEGGLYRDMWDQQLNSRSSREDRVASAATLNAF

SEQ ID NO: 146968 - protein, 610 aa, Unknown
  Bacterial polypetide isolated from the Sargasso Sea
MKKQKVNIKRITEFIKPEWFFMTISIINGLFYVIFNAISIWLTASLVNNVLIDFDKLVQNQKQLLANTSPSINEKIKILVNEFILRDTNIETLRVLCFSIVLIFILKNIFLYLKNLSMSFVQLRIVTQLRNRIYAHLQSLSLSFFYKRRSGDLSSIIIHDVSMLNQSIGTTFQKIIVEPINILAFTTLLFIISWKLMLVALLIIPLSQLVIQYIGKSIRRKARRNTKQIGGILSIITENLTSTRIVKAFAMEAHEIDRFNNESWKYFGLLFRSAKLRLTSSPIIETIGVSMAVLLLWLGGSEVIIGSALSSEDFLRFMFLLFSMLGPIRSLSNVHITLQNGYASAERIFDILDEKTDVTDAGHYDIEHLNEGLKFDNVSFNYGEGSFKLSKISFEIPKGKTVALVGASGSGKSTIADLIPRFFDILDGSIYVDGKNIKEYKLRSLRRMMGIVTQETILLNSSIQDNITYGSDLDEKKLIEAAQGANALEFIHTLEDKYETLVGERGVKLSGGQQQRIAIARAIYKNPSLLLLDEATSALDTKSERLVQSALDNLMENRTVLVIAHRLSTVKNADTIIVLDNGEIVESGTHEDLYNLNGIYYNLYNIQFDS

SEQ ID NO: 146969 - protein, 260 aa, Unknown
  Bacterial polypetide isolated from the Sargasso Sea
VRDLKNAEAFNFRGGKLKFSNVSFNYNENRRILDNVSFELPAGKTLAIVGPSGSGKSTIARLIYRFYDVTSGRIILDDQSIDEVTQDSLRQQIGIVPQDTVLFNDSIYYNIAYGRPDASPSEIEAAANLASIGEFILSLPDGYNTKVGERGLKLSGGEKQRIAIARTILKDPGILIFDEATSALDSRTEKEIQTAFSQVSENKTTIIIAHRLSTVVNADNIIVLNNGKVAESGSHEHLLQAHGLYENMWKRQLEKEEQED

SEQ ID NO: 146970 - protein, 280 aa, Unknown
  Bacterial polypetide isolated from the Sargasso Sea
FPDVIIETINISAYWPGACAEDLDTGVVGYLEPSLLELEGIERIVSRSYEGVSRITIDFVSNWDMEKALDDVKIAIEEAQNLPDELDDIDVKRRVWRDRVTNVVFSGPFTIEQLEKYSDEFLQLLYSEGIAKTSTRGGMEPIVRVVVPEISLLKNNLTLRELSNAVSSGASSRPAGETSDGLARLKAGSDKTQQIDLAEITAKTSLNGESIKLGDISAISIDEFPTVEFFKGKNPAIITRVDRGSDGDAIKIQDKVETLIKKFQLNMPETLTIELSGTRT

SEQ ID NO: 146971 - protein, 94 aa, Unknown
  Bacterial polypetide isolated from the Sargasso Sea
AIAGEDPNWGRIIMAIGKSDAEINLKNLSIKLGDINIIQNGKLSNQYKEDEAAAYMKNSNIEISVNVANGNKNFTAYTMDFTKKYIEINADYRS

SEQ ID NO: 146972 - protein, 110 aa, Unknown
  Bacterial polypetide isolated from the Sargasso Sea
MSIKLGDIAPDFEQDSSTGRIRFHDWLGDSWGVLFSHPADFTPVCTTELGLTAKLAERFAARNVKAIALSVDPVDSHLAWIKDIEETQHTHVGFPIIADADRKGPSCRPD

SEQ ID NO: 146973 - protein, 277 aa, Unknown
  Bacterial polypetide isolated from the Sargasso Sea
NEKEIQAGDSGVDIYNLIKYTRSNQNTCINQRPIVSIGDKISKHDILADGPSIDLGELSLGQNVRIAFMPWHGYNFEDSILISDKLVRDDKFTSIHIQELTCVARDTKLGPEEISADIPNVGDNALSKLDEFGIVHIGAEVKAGDILVGKVTPKGETQLSPEEKLLRAIFGEKASDVKDSSLRVSSGADGTVIDVHVFTRDGIEKDGRAESIEESQLAEIQKDIDDELKILEQAAFSRLETLLIGKKVASGKGLKKGSTITAADLEEIIKMIGSRSD

SEQ ID NO: 146974 - protein, 289 aa, Unknown
  Bacterial polypetide isolated from the Sargasso Sea
AAGRPVQDFMVLVLLGAAIISGLVGEVTDTLVILVIVVLNAVIGFVQAWRADQAMAALRQLAAAHATVLRGGMVQVLPATELVPGDIVLLEAGNQIPADLRLIEIAQLQVDESALTGESVTVAKQTEALAAEDVGALGDRTNMAFKGTTATHGRARGLVVATGMHTELGKVATLLDTGDRSTPLQLRLAAFGKRLAIAVLGICAVIFVVGVLRGEAPLLMALTAISLAVAAIPEALPAVVTVLLALGARRMVAVHALVRRLPSVETLGSVTTICSDKTGTLTQNRMHAE

SEQ ID NO: 146975 - protein, 502 aa, Unknown
  Bacterial polypetide isolated from the Sargasso Sea
MPPERVDFMDVSPQQAFSVGASLIPFLEHDDANRALMGSNMMKQAVPTLQAEKPLVGTGVERLIARDSGSCVTASRGGTIESIDASRIVVRVNEKEIQAGDSGVDIYNLIKYTRSNQNTCINQRPIVSIGDKISKHDILADGPSIDLGELSLGQNVRIAFMPWHGYNFEDSILISDKLVRDDKFTSIHIQELTCVARDTKLGPEEISADIPNVGDNALSKLDEFGIVHIGAEVKAGDILVGKVTPKGETQLSPEEKLLRAIFGEKASDVKDSSLRVSSGADGTVIDVHVFTRDGIEKDGRAESIEESQLAEIQKDIDDELKILEQAAFSRLESLLVGKKVASGKGLKKGSTIQAADLEEINKDDWFKIRLDNESANKQIENISKSLKEYKDDLDVAFGKRKSKVTDGDDLAPGVLKIVKVYLAIKRRIQPGDKLAGRHGNKGVISVIMPEEDMPFDENGQPVDIVLNPLGVPSRMNVGQVLETHLGWAAKELGTQIGEMIDT

SEQ ID NO: 146976 - protein, 260 aa, Unknown
  Bacterial polypetide isolated from the Sargasso Sea
GRFGASVSFSDFTFDFSQCTYYFKIAVALAVAAIPEGLPAVITTCLALGTRKMAKKNAIVRHLQSVETLGCTSVICSDKTGTLTTNQMSATTVVVPGASDGAKLRVFDVEGTSYDPRDGGVIGLRTLDQSLAAVSLIGTMCNEASVAPVDPSDADQGFKCLGEPTEGALKVLAEKLGVDQDAEMSAIADARARDPIAGARAVSDSANARFEKVATLEFDRARKSMSVLARARGASAAEAKLAVRGTKKTAAKAKAADKNT

SEQ ID NO: 146977 - protein, 521 aa, Unknown
  Bacterial polypetide isolated from the Sargasso Sea
MEFTSERKRMSTLCSCNGESTLFVKGAPESVLALCTSVMSSQNGRVDRMTDKIREQLLLQMQNYASDALRVLALAMKSCGRGETCSESDEQGLTFIGLVGMIDPPRPEVRYSLQTCKEAGIRVIMVTGDNQQTAEAIASQIGLGDAYNPLTGGKLDNEFKGRSFTGAEFEFMTEEQREESARSMCVFSRVEPAQKSKLVEILKRQGNIVAMTGDGVNDAPALKCADIGIAMGSGTAVAKSASDMVLADDNFSTIIEAVAEGRAIYNNAKQFIRYMVSSNIGEVVCIFIAAALGFPETLVPVQLLWVNLVTDGLPATALGFNRADGDIMSQRPRSPREQIVDRWLLIRYLIIGVYVGVATVGSFGWWFMSYEGGPQLTWAQLTSASYCIGDACDAYKDRRPSTMAMSTLVLIEMFNALNSLSENRSLLTHPPSTNWWLLSAIIISMWLHMVIMYVPSFAKTFTISALNYDEWKAVFWFSIPVIFIDEVLKYVTRRHRASIVLWLKRAARKDILPRTRSSSRF

SEQ ID NO: 146978 - protein, 478 aa, Unknown
  Bacterial polypetide isolated from the Sargasso Sea
MPIRQDDNRPNRRFGIINLVLIGFGALLLLSSFVPNNAMQQVPKVPYSLFLDQVNDGAVKRAYITQEQIRYELSEPEEGTPPVLATTPIFDMDLPQRLETKGVEFAAAPPKKPNIFTTILSWVVPPLIFILVLQFFARRSMGGGAQGALSFTKSKAKVYVPDEESRVTFADVAGVDEAKQELTEIVDFLKTPERYAEIGARIPKGVLLVGPPGTGKTLLSKAVAGEAGVPFFIISGSEFVELFVGAGAARVRDLFEEAKKKAPCIIFIDELDAIGKSRSGSMGVVGGNDEREQTLNQLLTEMDGFTAQDKPVIVLAATNQPEVLDAALLRPGRFDRQVLVDRPDLSGRKTILEIYAKKVKLADAVDLDSVAQATSGFAGADLANLVNEAALLAARAYRTKVEQQDLGEAIERVVAGLEKKSRVLQDDEKKVVAYHEVGHAIVGHLMPGGSKVAKISIVPRGMSALGYTLQLPTEERFL

SEQ ID NO: 146979 - protein, 305 aa, Unknown
  Bacterial polypetide isolated from the Sargasso Sea
GYGGFGRSKAKLLIEATGKVTFNDVAGVEEAKEEVEEIVEFLRDPKKFSRLGGKIPKGALLIGPPGTGKTLLAKAIAGEANVPFFSISGSDFVEMFVGVGASRVRDMFDQGKKNSPCIIFIDEIDAVGRSRGAGLGGGNDEREQTLNQLLVEMDGFDTNEGIILIAATNRPDVLDPALLRPGRFDRQVVVGNPDIIGREAILKVHIKKINTGPDVKLRTIARGTPGFSGADLANLVNESALLAARKNKRVVTMSDVEEAKDKVMMGAERRSMVMSEDEKKLTAYHEGGHAIVALNEKASDPITKQ

SEQ ID NO: 146980 - protein, 312 aa, Unknown
  Bacterial polypetide isolated from the Sargasso Sea
MPSLFGVLLSWFPMLLLIAVWIFFMRQMQGGRGGAMGFGKSKAKLMNEIKGKVTFNDVAGVEEAKEEVEEVVEFLKDPRKFSRLGGKIPRGCLLVGPPGTGKTLLARAIAGEAGVPFFTISGSDFVEMFVGVGASRVRDMFEQGKKNSPCIIFIDEIDAVGRSRGAGLGGGNDEREQTLNQLLVEMDGFDTNEGVIIIAATNRPDVLDPALLRPGRFDRQVVVSLPDIIGREKILKVHSKKISMAPDVNLRTIARGTPGFSGADLANLVNEAALLAARKNKRIVTYLEFEEAKDKVMMGAERRSMVMTEERK

SEQ ID NO: 146981 - protein, 268 aa, Unknown
  Bacterial polypetide isolated from the Sargasso Sea
MYFALGLLIFIGVQQYNSTVSAPESKSFTVFKNDITSGLVIEATIKEQSNMVEFKIANDETLYQTEYPEGFEGEVFQLLVDQDIVLNTDTEPAGFQDYVFAFLPWLFLAGFMFYMFSQVRSNGNQIMQFGKSKAKELDEEAPKVTFQDVAGVEEAKEELEEIKEFLKSPEKFNKLGAKIPKGVLLVGPPGTGKTLLAKAVAGEAGVPFFSISGSDFVEMFVGVGASRVRDLFKKAKESSPAIIFIDEIDAVGRMRGAGLGGGHDEREQ

SEQ ID NO: 146982 - protein, 316 aa, Unknown
  Bacterial polypetide isolated from the Sargasso Sea
GPPGTGKTLLARAIAGEAGVPFFTISGSDFVEMFVGVGASRVRDMFEQGKKHSPCIIFIDEIDAVGRSRGAGLGGGNDEREQTLNQLLVEMDGFDTNEGVIIIAATNRPDVLDPALLRPGRFDRQVVVSNPDLIGREKILKVHAKKISMAPDVNLRTVARGTPGFSGADLANLVNEAALLAARKNKRIVTYQEFEEAKDKVMMGSERRSMVMSEEEKKLTAYHEAGHAIVTINEKAAYPIHKATIIPRGRALGMVMQLPERDEVSQTREQLHAQMAIAMGGRVAEEIIFGDDKVTTGAASDIEQATKRARAMVMRA

SEQ ID NO: 146983 - protein, 306 aa, Unknown
  Bacterial polypetide isolated from the Sargasso Sea
ILAKNGVDISVSEGEQQGNVASLIGNLLFPLVAFGGLFFLFRRAQGGEGGGMGGMGGGPMDFGKSKSKFQEVPETGVTFADVAGVEGAKLELQEVVDFLKNPDKYTALGAKIPKGCLLVGPPGTGKTLIAKAVAGEAGVPFFSCAASEFVELFVGVGASRVRDLFEKAKSKAPCIIFIDEIDAVGRQRGSGMGGGNDEREQTINQLLTEMDGFEGNTGVIVLAATNRPDVLDSALLRPGRFDRQGTVERPDVAGRIRILKGHARGKTLAKEVDFDKIARRTPGFTGADLENLMNESAILAARRELT

SEQ ID NO: 146984 - protein, 313 aa, Unknown
  Bacterial polypetide isolated from the Sargasso Sea
IRKSKAKLLSEARGKVTFNDVAGIDEAKEEVEEIVEFLKDPRKFRRLGGKIPRGALLIGPPGTGKTLLARAIAGEADVPFFTISGSDFVEMFVGVGASRVRDMMEQGKKNAPCIIFIDEIDAVGRSRGAGLGGGNDEREQTLNQLLVEMDGFDTNEGVIVIAATNRPDVLDPALLRPGRFDRQVVVPNPDIIGREAILKVHIKKITIGPDVKLRTIARGTPGFSGADLANLCNESALLAARKNKRIVTMSDIEEAKDKVMMGAERRSMVMTEDEKRKTAYHEGGHAIVSFNLDHSDPIHKATIIPRGRALGMG

SEQ ID NO: 146985 - protein, 366 aa, Unknown
  Bacterial polypetide isolated from the Sargasso Sea
AIIVFLTIGLYNMFKNPQTNSRAGNKIIFSEFLTSVDNGEVLKVEIQGNNIKGVYSNGNNFSTYAPNDPNLIEKLSEKGVSISAAPIEEKMPSLFGVLLSWFPMLLLIAVWIFFMRQMQGGKGGAMGFGRSKAKMMNELKGKVTFNDVAGVEEAKEEVEEIVEFLKDPKKFSRLGGKIPRGALLVGPPGTGKTLLARAIAGEAGVPFFTISGSDFVEMFVGVGASRVRDMFEQGKKNSPCIIFIDEIDAVGRSRGAGLGGGNDEREQTLNQLLVEMDGFDTNEGVIIIAATNRPDVLDPALLRPGRFDRQVVVSNPDIIGREKILKVHVKKIKMAPDVNLRTIARGTPGFSGADLANLVNESALLA

SEQ ID NO: 146986 - protein, 231 aa, Unknown
  Bacterial polypetide isolated from the Sargasso Sea
AAKFAKLGIRPPKGVLLYGPPGTGKTLIARACAAQTNAAYLKLAGPLLVQMFIGDGAKLVRDAFALAKEKSPAIIFIDEIDAIGTKRFDSDTNGDREVQRTMLELLNQLDGFSSDDRIKIIAATNRADILDPALMRSGRLDRKIEFPHPNEDARAQIMKIHSRKMNVNPEVNFEELARGTEDFNGAQLKAVCVEAGMLALRRDAVEVQHEDFNEGIVQVQAKKKADLFYYA

SEQ ID NO: 146987 - protein, 319 aa, Unknown
  Bacterial polypetide isolated from the Sargasso Sea
SVKKVKVLKVEIQGTNINGVYSNGDNFSTYSPNDPNLIEKLSDMGVSISAAPIEEKMPSLFGVLLSWFPMLLLIAVWIFFMRQMQGGKGGAMGFGRSKAKMMNEMKGKVTFNDVAGVEEAKEEVEEIVEFLKDPKKFSRLGGKIPRGALLVGPPGTGKTLLARAIAGEAGVPFFTISGSDFVEMFVGVGASRVRDMFEQGKKNSPCIIFIDEIDAVGRSRGAGLGGGNDEREQTLNQLLVEMDGFDTNEGVIIIAATNRPDVLDPALLRPGRFDRQVVVSNPDIIGREKILKVHVKKIKMAPDVNLRTIARGTPGFSGA

SEQ ID NO: 146988 - protein, 306 aa, Unknown
  Bacterial polypetide isolated from the Sargasso Sea
VTFADVAGCDEAKEEVKEVVDFLKDPQKFQKLGGRIPRGLLLVGPPGTGKTLLAKSIAGEAKVPFFSISGSDFVEMFVGVGAARVRDMFDNAKKNAPCIIFIDEIDAVGRQRGAGLGGGNDEREQTLNQMLVEMDGFETNLGVIVVAATNRPDILDAALLRPGRFDRQVYVTLPDIRGREQILNVHMRKIPIGQDVAPAIIARGTPGMSGADLANLCNEAALMAARRNARTVEMQDFEKAKDKILMGPERKSMVMPEEERRNTAYHEAGHALIGKLLPKCDPVHKVTIIPRGRALGVTMSLPAQDR

SEQ ID NO: 146989 - protein, 299 aa, Unknown
  Bacterial polypetide isolated from the Sargasso Sea
NLAMWGIIVLLTIGLYNMFKNPQGSIGVKNNIIFSDFLKEVDEGRVVQVEIQGKNIKGIFSNGKTFTTYAPDDPNLIQKLSDKGISISASPIEEKMPSLLGILLSWFPMLLLIAVWIFFMRQMQGGKGGAMGFGRSKAKMMNELKGKVTFNDVAGVEEAKEEVEEVVEFLKDPRKFSRLGGKIPRGCLLVGPPGTGKTLLARAIAGEAGVPFFTISGSDFVEMFVGVGASRVRDMFEQGKKHSPCIIFIDEIDAVGRSRGAGLGGGNDEREQTLNQLLVEMDGYDTNEGVIIIAATNRP

SEQ ID NO: 146990 - protein, 274 aa, Unknown
  Bacterial polypetide isolated from the Sargasso Sea
MSVFQSFSPSESSRSQTDYTTFLREAEQGNIREVRINNDGEIRGTKRSGETFQTFVPYFDDKLVSDLFKNDVRVYGEPPEEQSLLTSIFISWFPMLLLIGVWIFFMRQMQGGGGRGAMSFGKSKARLLGEDQIKTTFADVAGCDEAKEDVSELVDFLRDPSKFQKLGGKIPKGVLMVGPPGTGKTLLAKAIAGEAKVPFFTISGSDFVEMFVGVGASRVRDMFEQAKKAAPCIIFIDEIDAVGRQRGAGLGGGHDEREQTLNQMLVEMDGFEGH

SEQ ID NO: 146991 - protein, 255 aa, Unknown
  Bacterial polypetide isolated from the Sargasso Sea
TPELINILKNEGISFDVHPVKTAPPALGILGNLLFPAILIGGLIFLARRSNGMPGGPGQAMQFGKTKARFAMEAETGVVFDDVAGVNEAKQDLQEVVTFLKKPEKFTSVGARIPKGVLLVGPPGTGKTLLAKAIAGEAGVPFFSLSGSEFVEMFVGVGASRVRDLFKRAKENSPCLIFIDEIDAVGRQRGAGIGGGNDEREQTLNQLLTEMDGFEGNSGIIIIAATNRPDVLDSALMRPGRFDRQVTVDAPDIKG

SEQ ID NO: 146992 - protein, 289 aa, Unknown
  Bacterial polypetide isolated from the Sargasso Sea
NIKGVMSNGEMFNTYAPDDPNLIQKLSDKGVSISASPLEEKMPSLFGVLLSWFPMLLLIAVWIFFMRQMQGGKGGAMGFGKSKAKMMNELKGKVTFNDVAGVEEAKEEVEEVVEFLKDPKKFSRLGGKIPRGCLLVGPPGTGKTLLARAIAGEAGVPFFTISGSDFVEMFVGVGASRVRDMFEQGKKHSPCIIFIDEIDAVGRSRGAGLGGGNDEREQTLNQLLVEMDGFDTNEGVIIIAATNRPDVLDPALLRPGRFDRQVVVSNPDLLGREKILKVHAKKISMAPRC

SEQ ID NO: 146993 - protein, 240 aa, Unknown
  Bacterial polypetide isolated from the Sargasso Sea
IEEKMPSLFGVLLSWFPMLLLIAVWIFFMRQMQGGKGGAMGFGRSKAKMMNELKGKVTFNDVAGVEEAKEEVEEIVEFLKDPKKFSRLGGKIPRGALLVGPPGTGKTLLARAIAGEAGVPFFTISGSDFVEMFVGVGASRVRDMFEQGKKNSPCIIFIDEIDAVGRSRGAGLGGGNDEREQTLNQLLVEMDGFDTNEGVIIIAATNRPDVLDPALLRPGRFDRQVVVSNPDIIGREKILK

SEQ ID NO: 146994 - protein, 260 aa, Unknown
  Bacterial polypetide isolated from the Sargasso Sea
LVGPPGTGKTLLARAIAGEAGVPFFTISGSDFVEMFVGVGASRVRDMFEQGKKNSPCIIFIDEIDAVGRSRGAGLGGGNDEREQTLNQLLVEMDGFDTNEGVIIIAATNRPDVLDPALLRPGRFDRQVVVSNPDIIGREKILKVHVKKIKMAPDVNLRTVARGTPGFSGADLANLVNEAALLAARKNKRIVTLNEFEDAKDKVMMGSERRSMVMTEEEKTLTAYHEAGHAIVTINENAAYPIHKATIIPRGRALGMVMQL

SEQ ID NO: 146995 - protein, 283 aa, Unknown
  Bacterial polypetide isolated from the Sargasso Sea
LLNEAIGKITFDDVAGIDEAKQELEEVVEFLKDPKKFSRLGGKIPTGALLVGPPGTGKTLLARAIAGEANVPFFSISGSDFVEMFVGVGASRVRDMFEQGKKNAPCIIFIDEIDAVGRHRGAGLGGGNDEREQTLNQLLVEMDGFEANAGVIIVAATNRPDVLDPALLRPGRFDRQITVSNPDIIGRDKILKVHIKKIKVSPKFDSKVIARGTPGFSGADLANLVNEAALLAARKNKRMVTLEDFENAKDKVMMGSERRSMVMSEDEKKLTAYHEAGHAVATL

SEQ ID NO: 146996 - protein, 314 aa, Unknown
  Bacterial polypetide isolated from the Sargasso Sea
RYVFWKSRARLMGEDQIKTTFADVAGCDEAKEEVTELVDYLKDPSRFQKLGGKIPKGILMVGPPGTGKTLLAKAIAGEAKVPFFAISGSDFVEMFVGVGASRVRDMFEQAKKAAPCIIFIDEIDAVGRQRGAGLGGGHDEREQTLNQMLVEMDGFDGNEGIIIIAATNRPDVLDAALLRPGRFDRQVVVGLPDVRGREQILKVHMRKVPLGDDVKASVIARGTPGFSGADLANLVNEAALFAARGNSRVVGMEEFEKAKDKIMMGAERRSMVMSEAEKEMTAYHEAGHAIVGCLVPEHDPVHKVTIIPRGRALG

SEQ ID NO: 146997 - protein, 300 aa, Unknown
  Bacterial polypetide isolated from the Sargasso Sea
KGALLIGPPGTGKTLLAKAIAGEANVPFFTISGSDFVEMFVGVGASRVRDMFEQGKKHAPCIIFIDEIDAVGRSRGAGLGGGNDEREQTLNQLLVEMDGFDTNEGIILIAATNRPDVLDPALLRPGRFDRQVVVPNPDILGREAILKVHVKKINTGPDVKLRTIARGTPGFSGADLANLINESALLAARKNKRVVTMADVEEAKDKVMMGAERRSMVMTEEEKKLTAYHEGGHAIVALNEKVSDPIHKATIIPRGRALGMVMRLPERDQLSVTREKMYSDIAVAMGGRIAEEIIFGYEKI

SEQ ID NO: 146998 - protein, 312 aa, Unknown
  Bacterial polypetide isolated from the Sargasso Sea
SSNGVSINATPQEDKMPSLLGILLSWFPMLLLIGVWIFFMRQMQGGKGGAMGFGRSKAKLLNEAQGKVTFNDVAGVEEAKEEVEEIVEFLKDPKKFSRLGGKIPKGALLIGPPGTGKTLLAKAIAGEANVPFFSISGSDFVEMFVGVGASRVRDMFEQGKKHSPCIIFIDEIDAVGRSRGAGLGGGNDEREQTLNQLLVEMDGFDTNEGIILIAATNRPDVLDPALLRPGRFDRQVVVGNPDIIGREAILKVHVKKINIGPDVKLRTIARGTPGFSGADLANLINESALLAARKNKRVVTMSDVEEAKDKVM

SEQ ID NO: 146999 - protein, 294 aa, Unknown
  Bacterial polypetide isolated from the Sargasso Sea
GLFNVFKNSQRDYSSVTYTYSTLIDKAQNGEIKSVEIQGNNIFGQTMDGVDFSTYAPSDPNLIETLNDNQVAINAKPEQSGMHPLLSIFVSWFPMLLLIGVWIFFMRQMQSGKGGGALGFGRSKAKLLNENKQRVTFNDVAGIDEAKQELEEVVSFLKDPHKFQRLGAKIPKGALLVGPPGTGKTLLARAIAGEAGVPFFSISGSDFVEMFVGVGASRVRDMFEQGKKNAPCIIFIDEIDAVGRHRGAGLGGGNDEREQTLNQLLVEMDGFEANEGVIIVAATNRPDVLDPAIT

SEQ ID NO: 147000 - protein, 250 aa, Unknown
  Bacterial polypetide isolated from the Sargasso Sea
FSRLGGKIPRGCLLVGPPGTGKTLLARAIAGEAGVPFFTISGSDFVEMFVGVGASRVRDMFEQGKKHSPCIIFIDEIDAVGRSRGAGLGGGNDEREQTLNQLLVEMDGFDTNEGVIIIAATNRPDVLDPALLRPGRFDRQVVVSNPDLLGREKILKVHAKKISMAPDVNLRTIARGTPGFSGADLANLVNEAALLAARKNKRIVTYIEFEEAKDKVMMGSERRSMVMSEEEKKLTAYHEAGHAIVTINEK

SEQ ID NO: 147001 - protein, 246 aa, Unknown
  Bacterial polypetide isolated from the Sargasso Sea
SNEVIFSEFLESVEQGEVLKVEIQGNNINGVYANGKSFKTYSPNDPNLIEKLSEKGVSISAAPIEEKMPSLFGVLLSWFPMLLLIAVWIFFMRQMQGGKGGAMGFGRSKAKMMNEMKGKVTFNDVAGVEEAKEEVEEIVEFLKDPKKFSRLGGKIPRGALLVGPPGTGKTLLARAIAGEAGVPFFTISGSDFVEMFVGVGASRVRDMFEQGKKNSPCIIFIDEIDAVGRSRGAGLGGGNDEREQTL

SEQ ID NO: 147002 - protein, 249 aa, Unknown
  Bacterial polypetide isolated from the Sargasso Sea
AAPIEEKMPSLFGVLLSWFPMLLLIAVWIFFMRQMQGGKGGAMGFGRSKAKMMNELKGKVTFNDVAGVEEAKEEVEEIVEFLKDPKKFSRLGGKIPRGALLVGPPGTGKTLLARAIAGEAGVPFFTISGSDFVEMFVGVGASRVRDMFEQGKKNSPCIIFIDEIDAVGRSRGAGLGGGNDEREQTLNQLLVEMDGFDTNEGVIIIAATNRPDVLDPALLRPGRFDRQVVVSNPDIIGREKILKVHVKKI

SEQ ID NO: 147003 - protein, 258 aa, Unknown
  Bacterial polypetide isolated from the Sargasso Sea
PKKFSRLGGKIPKGALLIGPPGTGKTLLAKAIAGEANVPFFSISGSDFVEMFVGVGASRVRDMFEQGKKHSPCIIFIDEIDAVGRSRGAGLGGGNDEREQTLNQLLVEMDGFDTNEGIILIAATNRPDVLDPALLRPGRFDRQVVVGNPDIIGREAILKVHVKKINTGPDVKLRTIARGTPGFSGADLANLINESALLAARKNKRVVTMSDIEEAKDKVMMGAERRSMVMSEDEKKLTAYHEGGHAIVALNEKASDPI

SEQ ID NO: 147004 - protein, 299 aa, Unknown
  Bacterial polypetide isolated from the Sargasso Sea
KQKVTFNDVAGIDEAKQELEEVVSFLKDPHKFQRLGAKIPKGALLVGPPGTGKTLLARAIAGEAGVPFFSISGSDFVEMFVGVGASRVRDMFDQGKKNAPCIIFIDEIDAVGRHRGAGLGGGNDEREQTLNQLLVEMDGFEANEGVIIVAATNRPDVLDPALLRPGRFDRQVVVPAPDIIGRDKILKVHTRKIKMDQSVKTIAIARSTPGFSGADLANIVNEAALIAARKNKKIVTMDDFEDAKDKVMLGTQNKSKIISDSEKEVIAYHEAGHALANLHCKHADPIYKSSIIPTGRALG

SEQ ID NO: 147005 - protein, 243 aa, Unknown
  Bacterial polypetide isolated from the Sargasso Sea
VWIFFMRQMQGGKGGAMGFGKSKAKMMNELKGKVTFNDVAGVEEAKEEVEEVVEFLKDPKKFSRLGGKIPRGCLLVGPPGTGKTLLARAIAGEAAVPFFTISGSDFVEMFVGVGASRVRDMFEQGKKNSPCIIFIDEIDAVGRSRGAGLGGGNDEREQTLNQLLVEMDGFDTNEGVIIIAATNRPDVLDPALLRPGRFDRQVVVSNPDIIGREKILKVHAKKISMAPDVNLRTVARGTPGFSG

SEQ ID NO: 147006 - protein, 299 aa, Unknown
  Bacterial polypetide isolated from the Sargasso Sea
MGLLALFFLPNILNNDNATDVPFQDFRTQVASGEVSEAQFNNNTGKISFESTTGEKFKTSGPLELSGDDERLFLENIEDFKFFTPGSNIWTGFIIPVLGPLALILLFFYWLNRRAQGQMGNIMSIGRSKAKAYTTERPESSFDDVAGYRGVKQEIQEVVDFLQDSDKFADIGARIPKGVLLVGPPGTGKTLIARAVAGEAGVPFLSVTGSDFMEMFVGVGASRVRDLFQSARKMGSAIIFIDEIDSIGRKRGAGLGGGHDEREQTLNQMLAEMDGFEATEGIVMMAATNRPDILDPALL

SEQ ID NO: 147007 - protein, 317 aa, Unknown
  Bacterial polypetide isolated from the Sargasso Sea
NQAKFVTIDDVETRFDDVAGVPEAAEELKEVITFLKEPKKFENLGAKVPKGVLLIGPPGTGKTLLAKAIAGESGVPFLSISASEFVELFVGVGASRVRDLFSKAKEKSPCIIFIDEIDSIGRQRGSGIGGGNDEREQTLNQLLTELDGFADNSGIIVLAATNRPDILDAALLRPGRFDRKIEVMLPDLVGRKKILSVHSLSKPLSSEVDLGYWASRTVGFSGADLANLMNESAIHCARDESKLISDLHIENALDKITIGLRSSLITSPNMKKIIAYNEVGRAIVSAARNGIESVDKITILPRSGSLGGYTKICPTKK

SEQ ID NO: 147008 - protein, 289 aa, Unknown
  Bacterial polypetide isolated from the Sargasso Sea
MWGLIVLLSVGLFNLFQNPSKQNSVKNEIAFSKFLEEVDTGRVVEVEIQGNNIKGILSDGSKFTTYSPNYPDLVSKLSEKNVSIVASPVEDKMPSLLGVLLSWFPMLLLIGVWIFFMRQMQGGRGGAMGFGRSKAKLLNEAQGKVTFNDVAGIEEAKEEVEEIVEFLKDPKKFRRLGGKIPKGALLIGPPGTGKTLLAKAIAGEANVPFFTISGSDFVEMFVGVGASRVRDMFEQGKKHAPCIIFIDEIDAVGRSRGAGLGGGNDEREQTLNQLLVEDGSVLIQTKVSF

SEQ ID NO: 147009 - protein, 304 aa, Unknown
  Bacterial polypetide isolated from the Sargasso Sea
GKGGAMGFGRSKAKMMNQVKGKVTFNDVAGVEEAKEEVEEVVEFLRDPRKFSRLGGKIPRGCLLVGPPGTGKTLLARAIAGEAGVPFFTISGSDFVEMFVGVGASRVRDMFEQGKKHSPCIIFIDEIDAVGRSRGAGLGGGNDEREQTLNQLLVEMDGFDTNEGVIIIAATNRPDVLDPALLRPGRFDRQVVVTLPDIIGREKILQVHSKKISMAPDVNLRTIARGTPGFSGADLANLVNESALLAARKNKRIVTTSEFEEAKDKVMMGAERRSMVMTEEEKKLTAYHEAGHAIVTINEKGSLP

SEQ ID NO: 147010 - protein, 267 aa, Unknown
  Bacterial polypetide isolated from the Sargasso Sea
GRFLDYINSGRVTSVDIFEGGRNAVIETIDSDLDNKVQRLRVDLPGLTPELINILKNEGISFDVHPVKTAPPALGILGNLLFPAILIGGLILLARRSNGMPGGPGQAMQFGKTKARFAMEAETGVVFDDVAGVNEAKQDLQEVVTFLKKPEKFTSVGARIPKGVLLVGPPGTGKTLLAKAIAGEAGVPFFSLSGSEFVEMFVGVGASRVRDLFKRAKENSPCLIFIDEIDAVGRQRGAGIGGGNDEREQTLNQLLTEMDGFEGNSGI

SEQ ID NO: 147011 - protein, 317 aa, Unknown
  Bacterial polypetide isolated from the Sargasso Sea
YFFAFLPWLFLAAFMFYMFSQVRSNGNQIMQFGKSKAKELDEESPKVTFKDVAGVEEAKEELEEIKEFLKSPEKFNKLGAKIPKGVLLVGPPGTGKTLLAKAVAGEAGVPFFSISGSDFVEMFVGVGASRVRDLFKKAKEASPAIIFIDEIDAVGRMRGAGLGGGHDEREQTLNQLLVEMDGFEANQGVILMAATNRPDVLDPALLRPGRFDRQVIVGRPDLSGRTQILKVHAKDKPLAKNVNFETLAKQTPGFTGADLANLLNEAALLAARKNKKSIGIADIENSIDRVMAGPEKKSQVMTEEENLLSLIMKQVMR

SEQ ID NO: 147012 - protein, 296 aa, Unknown
  Bacterial polypetide isolated from the Sargasso Sea
AMGFGKSKAKMMNELKGKVTFNDVAGVEEAKEEVEEIVEFLKDPKKFSRLGGKIPRGALLVGPPGTGKTLLARAIAGEAGVPFFTISGSDFVEMFVGVGASRVRDMFEQGKKNSPCIIFIDEIDAVGRSRGAGLGGGNDEREQTLNQLLVEMDGFDTNEGVIIIAATNRPDVLDPALLRPGRFDRQVVVSNPDIIGREKILKVHVKKIKMAPDVNLRTIARGTPGFSGADLANIVNEAALLAARKNKRIVTLLEFEEAKDKVMMGAERRSMVMTEDEKKLTAYHEGGHALVSFNMP

SEQ ID NO: 147013 - protein, 292 aa, Unknown
  Bacterial polypetide isolated from the Sargasso Sea
SISQKNKIIFSEFLTEVDNGRVVKVEIQGKNIKGVLSNGNQFTTYAPEDPNLIQKLSDKGVSISASPLEEKMPSLLGILLSWFPMLLLIAVWIFFMRQMQGGKGGAMGFGRSKAKMMNEVKGKVTFNDVAGVEEAKEEVEEVVEFLKDPRKFSRLGGKIPRGCLLVGPPGTGKTLLARAIAGEAGVPFFTISGSDFVEMFVGVGASRVRDMFEQGKKHSPCIIFIDEIDAVGRSRGAGLGGGNDEREQTLNQLLVEMDGFDTNEGVIIIAATNRPNVLDPALLRPGRFDRQV

SEQ ID NO: 147014 - protein, 226 aa, Unknown
  Bacterial polypetide isolated from the Sargasso Sea
MNIFSNKDSQVNTDEINVTFNDVAGCDEAKYELEEVVDFLKNPKRYADAGATIPKGVLLEGPPGTGKTLLARAVAGEAGVPFFSASGSQFIEMFVGVGASRVRELFNNANEAAPAVIFIDEIDAVGRQRGTGLAGGSDEREQTLNQILTNMDGFTKSTGIIVLAATNRADILDGALTRPGRFDRKIMVGLPDKEGREKIIDVHFKDKKVRDEKYLKNIATLTTVFQ

SEQ ID NO: 147015 - protein, 258 aa, Unknown
  Bacterial polypetide isolated from the Sargasso Sea
PRGALLVGPPGTGKTLLARAIAGEAAVPFFTISGSDFVEMFVGVGASRVRDMFEQGKKNSPCIIFIDEIDAVGRSRGAGLGGGNDEREQTLNQLLVEMDGFDTNEGVIIIAATNRPDVLDPALLRPGRFDRQVVVSNPDIIGREKILKVHVKKIKMAPDVNLRTVARGTPGFSGADLANLVNEAALLAARKNKRIVTLVEFEEAKDKVMMGSERRSMVMTEEEKTLTAYHEAGHAIVTINESAAYPIHKATIIPRGRA

SEQ ID NO: 147016 - protein, 310 aa, Unknown
  Bacterial polypetide isolated from the Sargasso Sea
LVEKLSDKGVSISAVPIEDKMPSLLGVLLSWFPMLLLIAVWIFFMRQMQGGKGGAMGFGRSKAKMMNEVKGKVTFNDVAGVEEAKEEVEEVVEFLRDPKKFSRLGGKIPRGCLLVGPPGTGKTLLARAIAGEAGVPFFTISGSDFVEMFVGVGASRVRDMFEQGKKHSPCIIFIDEIDAVGRSRGAGLGGGNDEREQTLNQLLVEMDGFDTNEGVIIIAATNRPDVLDPALLRPGRFDRQVVVSNPDIIGREKILKVHAKKISMSPDVNLRTVARGTPGFSGADLANLVNEAALLAARKNRRIVTAQEFE

SEQ ID NO: 147017 - protein, 284 aa, Unknown
  Bacterial polypetide isolated from the Sargasso Sea
MNFKNLAMWAVIVFLTIGLYNMFKNPQGSISQKNNIIFSEFLSEVDNGRVVQVEIQGNNIKGVFSNGEKFITYSPNDPNLIEKLSNKGVSISASPLEEKMPSLLGVLLSWFPMLLLIAVWIFFMRQMQGGKGGAMGFGRSKAKMMNELKGKVTFNDVAGIEEAKEEVEEVVEFLKDPRKFSRLGGKIPRGCLLVGPPGTGKTLLARAIAGEAGVPFFTISGSDFVEMFVGVGASRVRDMFEQGKKHSPCIIFIDEIDAVGRSRGAGLGGGNDEREQTLNQLLVE

SEQ ID NO: 147018 - protein, 313 aa, Unknown
  Bacterial polypetide isolated from the Sargasso Sea
MHPILSVLLSWFPMLLLIGVWIFFMRQMQSGGGKAMGFGKSKAKLLNEAIGKVTFDDVAGIDEAKQELEEVVEFLKDPKKFSRLGGKIPTGALLVGPPGTGKTLLARAIAGEANVPFFSISGSDFVEMFVGVGASRVRDMFEQGKKNAPCIIFIDEIDAVGRHRGAGLGGGNDEREQTLNQLLVEMDGFEANAGVIIVAATNRPDVLDPALLRPGRFDRQITVSNPDIIGRDKILKVHIKKIKVSPKFDSKVIARGTPGFSGADLANLVNEAALLAARKNKRMVTLEDFENAKDKVMMGSERRSNGMSEDEKN

SEQ ID NO: 147019 - protein, 261 aa, Unknown
  Bacterial polypetide isolated from the Sargasso Sea
GRSKAKLMNEVKGKVTFNDVAGVEEAKEEVEEVVEFLRDPKKFSRLGGKIPRGCLLVGPPGTGKTLLARAIAGEAGVPFFTISGSDFVEMFVGVGASRVRDMFEQGKKHSPCIIFIDEIDAVGRSRGAGLGGGNDEREQTLNQLLVEMDGFDTNEGVIIIAATNRPDVLDPALLRPGRFDRQVVVSLPDIIGREKILKVHSKKISMAPDVNLRTIARGTPGFSGADLANLVNEAALLAARKNKRIGTYNEFEEAKDKVMMG

SEQ ID NO: 147020 - protein, 276 aa, Unknown
  Bacterial polypetide isolated from the Sargasso Sea
PLEDKMPSLLGILLSWFPMLLLIGVWIFFMRQMQGGKGGAMGFGRSKAKLLNEAQGKVTFNDVAGVEEAKEEVEEIVEFLKDPKKFSRLGGKIPKGALLIGPPGTGKTLLAKAIAGEANVPFFSISGSDFVEMFVGVGASRVRDMFEQGKKHSPCIIFIDEIDAVGRSRGAGLGGGNDEREQTLNQLLVEMDGFDTNEGIILIAATNRPDVLDPALLRPGRFDRQVVVANPDIIGREAILKVHVKKINTGPDVKLRTIARGTPGFSGADLANLINE

SEQ ID NO: 147021 - protein, 272 aa, Unknown
  Bacterial polypetide isolated from the Sargasso Sea
RIIGKPVEREVSWILSTLLSWFPMLLLIGVWIFFMRQMQSGSGKAMGFGKSKAKLLTEKQGKVTFEDVAGIDEAKTELEEIVEFLKDPGKFQRLGGKIPKGCLLVGPPGTGKTLLARAIAGEAGVPFFTISGSDFVEMFVGVGASRVRDMFEQGKKNAPCIIFIDEIDAVGRHRGAGLGGGNDEREQTLNQLLVEMDGFEANEGVILIAATNRPDVLDPALLRPGRFDRQVVVPNPDILGREKILKVHMKKVPLSDDVQPRTIARGTPGFSG

SEQ ID NO: 147022 - protein, 290 aa, Unknown
  Bacterial polypetide isolated from the Sargasso Sea
SGRVTSVDIFEGGRNAVIETIDSDLDNKVQRLRVDLPGLTPELINILKNEGISFDVHPIKTAPPALGILGNLLFPAILIGGLILLARRSNGMPGGPGQAMQFGKTKARFAMEAETGVVFNDVAGVNEAKQDLQEVVTFLKKPEKFTSVGARIPKGVLLVGPPGTGKTLLAKAIAGEAGVPFFSLSGSEFVEMFVGVGASRVRDLFKRAKENSPCLIFIDEIDAVGRQRGAGIGGGNDEREQTLNQLLTEMDGFEGNSGIIIIAATNRPDVLDSALMRPGRFDRQVTVDAP

SEQ ID NO: 147023 - protein, 267 aa, Unknown
  Bacterial polypetide isolated from the Sargasso Sea
TFTTYSANYPNLVEKLSESGVSISAVPTDEKMPSVLGVLLSWFPMLLLIAVWIFFMRQMQGGKGGAMGFGRSKAKMMNEVKGKVTFNDVAGVEEAKEEVEEVVEFLRDPKKFSKLGGKIPRGCLLVGPPGTGKTLLARAIAGEAGVPFFTISGSDFVEMFVGVGASRVRDMFEQGKKHSPCIIFIDEIDAVGRSRGAGLGGGNDEREQTLNQLLVEMDGFDTNEGVIIIAATNRPDVLDPALLRPGRFDRQVVVSNPDIIGREKILK

SEQ ID NO: 147024 - protein, 297 aa, Unknown
  Bacterial polypetide isolated from the Sargasso Sea
MWGLIVLLVVGLFQLFQNPKKSMNSEKIAFSNFIKNVEEGRVVQVDIRGNNIEGILSDGTAFNTYAPNDPNLVEKLTSKGVSITASPQEDKMPSLLGVLLSWFPMLLLIGVWIFFMKQMQGGRGGAMGFGRSKAKLLSEARGKVTFNDVAGIDEAKEEVEEIVEFLKDPRKFRRLGGKIPRGALLIGPPGTGKTLLARAIAGEANVPFFTISGSDFVEMFVGVGASRVRDMMEQGKKNAPCIIFIDEIDAVGRSRGAGLGGGNDEREQTLNQLLVEMDGFDTNEGVIIIAATNRPDV

SEQ ID NO: 147025 - protein, 295 aa, Unknown
  Bacterial polypetide isolated from the Sargasso Sea
MWVIIGLLLIALFNLFQGASSNRSTSEISFSDFISATENGNVSEVNITGNNVSGYFDDGRPFTTYSPDYPNLVDKLNQNGVKITAEPADRSMHPILSVLLSWFPMLLLIGVWIFFMRQMQSGGGKAMGFGKSKAKLLNEAVGKITFDDVAGIDEAKQELEEVVEFLKDPQKFSRLGGKIPTGALLIGPPGTGKTLLARAIAGEANVPFFSISGSDFVEMFVGVGASRVRDMFEQGKKNSPCIIFIDEIDAVGRHRGAGLGGGNDEREQTLNQLLVEMDGFEANAGVIIIAATNRP

SEQ ID NO: 147026 - protein, 264 aa, Unknown
  Bacterial polypetide isolated from the Sargasso Sea
MNFKNLAMWAVIVFLTIGLYNMFKNPQTSLNKNNTIIFSEFLTEVENGRVVQVEIQGNNIKGILSDGTVFSTYSPNDPNLIEKLSSSGVSISASPIDEKMPSLFGVLLSWFPMLLLIAVWIFFMRQMQGGKGGAMGFGRSKAKLMNQLKGKVTFNDVAGIEEAKEEVEEVVEFLKDPKKFSRLGGKIPRGCLLVGPPGTGKTLLARAIAGEADVPFFTISGSDFVEMFVGVGASRVRDMFEQGKKHSPCIIFIDEIDAVGRSRG

SEQ ID NO: 147027 - protein, 285 aa, Unknown
  Bacterial polypetide isolated from the Sargasso Sea
GVLSDGSKFKTYSPNYPELVGKLSDKGVNIVASPLEDKMPSLIGVLLSWFPMLLLIGVWIFFMRQMQGGRGGAMGFGKSKAKLLTEAHGKVTFNDVAGIEEAKEEVEEIVEFLRDPKKFRRLGGKIPKGALLIGPPGTGKTLLAKAIAGEADVPFFTISGSDFVEMFVGVGASRVRDMFEQGKKHAPCIIFIDEIDAVGRSRGAGLGGGNDEREQTLNQLLVEMDGFDTNEGIILIAATNRPDVLDPALLRPGRFDRQVVVPNPDIIGREAILKVHVKKVNTGPD

SEQ ID NO: 147028 - protein, 308 aa, Unknown
  Bacterial polypetide isolated from the Sargasso Sea
PRGALLVGPPGTGKTLLARAIAGEAGVPFFTISGSDFVEMFVGVGASRVRDMFEQGKKNSPCIIFIDEIDAVGRSRGAGLGGGNDEREQTLNQLLVEMDGFDTNEGVIIIAATNRPDVLDPALLRPGRFDRQVVVSNPDIIGREKILKVHVKKIKMAPDVNLRTVARGTPGFSGADLANLVNESALLAARKNKRIVTLNEFEEAKDKVMMGAERRSMVMTEDEKKLTAYHEGGHALVSFNMPSYDPIHKATIIPRGRALGMVMNLPERDKHGHSIKYLKARLAVCFGGRVAEEVIFGKDNISTGAGGG

SEQ ID NO: 147029 - protein, 284 aa, Unknown
  Bacterial polypetide isolated from the Sargasso Sea
MMWAIIVFLTIGLYNMFKNPQGSVSQKNNIIFSEFLSEVENGRVVQVEIQGNNINGVMSNGEKFSTFSPNDPNLIEKLSDKGVSISASPIEEKMPSVLGVLLSWFPMLLLIAVWIFFMRQMQGGKGGAMGFGRSKAKMMNELKGKVTFNDVAGVEEAKEEVEEVVEFLRDPKKFSRLGGKIPRGCLLVGPPGTGKTLLARAIAGEAGVPFFTISGSDFVEMFVGVGASRVRDMFEQGKKHSPCIIFIDEIDAVGRSRGAGLGGGNDEREQTLNQLLVEMDGFDT

SEQ ID NO: 147030 - protein, 300 aa, Unknown
  Bacterial polypetide isolated from the Sargasso Sea
MLLLIGVWIFFMRQMQGGRGGAMGFGKSKAKLLSEARGKVTFNDVAGIDEAKEEVEEIVEFLKDPRKFRRLGGKIPKGALLIGPPGTGKTLLARAIAGEADVPFFTISGSDFVEMFVGVGASRVRDMMDQGKKNAPCIIFIDEIDAVGRSRGAGLGGGNDEREQTLNQLLVEMDGFDTNEGVIIIAATNRPDVLDPALIRPGRFDRQVVIPNPDIIGREAILKIHIKKINVGPDVKLRTVARGTPGFSGADLANLTNEAALLAARKNKRIVTMPDIEEAQRQVMMGAERKIMVMTEDDKK

SEQ ID NO: 147031 - protein, 272 aa, Unknown
  Bacterial polypetide isolated from the Sargasso Sea
MNFKNLAMWAVIVILTIGLYNMFKNPQGSVNQKNNIIFSEFLTQVDNGRVVQVEIQGKNIKGVMSNGEMFNTYAPDDPNLIQKLSDKGVSISASPLEEKMPSLFGVLLSWFPMLLLIAVWIFFMRQMQGGKGGAMGFGKSKAKMMNELKGKVTFNDVAGVEEAKEEVEEVVEFLKDPKKFSRLGGKIPRGCLLVGPPGTGKTLLARAIAGEAGVPFFTISGSDFVEMFVGVGASRVRDMFEQGKKHSPCIIFIDEIDAVGRSRGAGLGGGND

SEQ ID NO: 147032 - protein, 254 aa, Unknown
  Bacterial polypetide isolated from the Sargasso Sea
KIPRGALLVGPPGTGKTLLARAIAGEAGVPFFTISGSDFVEMFVGVGASRVRDMFEQGKKNSPCIIFIDEIDAVGRSRGAGLGGGNDEREQTLNQLLVEMDGFDTNEGVIIIAATNRPDVLDPALLRPGRFDRQVVVSNPDIIGREKILKVHVKKIKMAPDVNLRTVARGTPGFSGADLANLVNESALLAARKNKRIVTLNEFEEAKDKVMMGAERRSMVMTEDEKKLTAYHEGGHALVSFNMPSYDPIHKATI

SEQ ID NO: 147033 - protein, 301 aa, Unknown
  Bacterial polypetide isolated from the Sargasso Sea
NYMNLKNLIMWGIIVLLSVGLFNMFQDPKKINSENNKLPFSSFMSEVDAGRVVEVQIQGNNISGVLADGKSFSTYSPNYPNLVEKLSEQNISIIATPLEDKMPSLLGILLSWFPMLLLIGVWIFFMRQMQGGKGGAMGFGRSKAKLLNEAQGKVTFNDVAGVEEAKEEVEEIVEFLKDPKKFSRLGGKIPKGALLIGPPGTGKTLLAKAIAGEANVPFFSISGSDFVEMFVGVGASRVRDMFEQGKKHSPCIIFIDEIDAVGRSRGAGLGGGNDEREQTLNQLLVEMDGFDTNEGIILIAA

SEQ ID NO: 147034 - protein, 260 aa, Unknown
  Bacterial polypetide isolated from the Sargasso Sea
MNFKNLAMWAIIVFLTIGLYNMFKNPQSNPRGSNQVIFSDFLDSVENGEVVKVEIQGNNINGIYSNGNSFKTYSPNDPNLIEKLSDKGVSISAAPLEEKMPSLFGVLLSWFPMLLLIAVWIFFMRQMQGGKGGAMGFGRSKAKMMNELKGKVTFNDVAGVEEAKEEVEEIVEFLRDPRKFSRLGGKIPRGALLVGPPGTGKTLLARAIAGEAGVPFFTISGSDFVEMFVGVGASRVRDMFEQGKKNSPCIIFIDEIDAVG

SEQ ID NO: 147035 - protein, 297 aa, Unknown
  Bacterial polypetide isolated from the Sargasso Sea
HDVAGVEEAKEEVEEVVEFLKDPRKFSRLGGKIPRGCLLVGPPGTGKTLLARAIAGEAGVPFFTISGSDFVEMFVGVGASRVRDMFEQGKKHSPCIIFIDEIDAVGRSRGAGLGGGNDEREQTLNQLLVEMDGFDTNEGVIIIAATNRPDVLDPALLRPGRFDRQVVVSNPDLIGREKILKVHAKKISMAPDVNLRTVARGTPGFSGADLANLVNEAALLAARKNKRIVTYQEFEEAKDKVMMGSERRSMVMSEEEKKLTAYHEAGHAIVTINEKAAYPIHKATIIPRGRALGMVMQ

SEQ ID NO: 147036 - protein, 315 aa, Unknown
  Bacterial polypetide isolated from the Sargasso Sea
HGIWKSKAKLLNEAQGKVTFNDVAGIEEAKEEVEEIVDFLKDPRKFRKLGGKIPKGALLIGPPGTGKTLLAKAIAGEANVPFFTISGSDFVEMFVGVGASRVRDMFEQGKKHAPCIIFIDEIDAVGRSRGAGLGGGNDEREQTLNQLLVEMDGFDTNEGIILIAATNRPDVLDPALLRPGRFDRQVVVPNPDILGREAILKVHVKKINTGPDVKLRTIARGTPGFSGADLANLINESALLAARKNKRVVTMVDIEEAKDKVMMGAERRSMVMTEEEKKLTAYHEGGHAIVALMKKHLTLYIKQLLYLEEELWEWL

SEQ ID NO: 147037 - protein, 273 aa, Unknown
  Bacterial polypetide isolated from the Sargasso Sea
CLLVGPPGTGKTLLARAIAGEAGVPFFTISGSDFVEMFVGVGASRVRDMFEQGKKHSPCIIFIDEIDAVGRSRGAGLGGGNDEREQTLNQLLVEMDGFDTNEGVIIIAATNRPDVLDPALLRPGRFDRQVVVSLPDIIGREKILKVHAKKISMTPDINLRTIARGTPGFSGADLANLVNEAALLAARKNKRIVTYQEFEEAKDKVMMGAERRSMVMTEEEKRLTAYHEAGHAIVTINEKAAYPIHKATIIPRGRALGMVMQLPEKDEVHKQEN

SEQ ID NO: 147038 - protein, 264 aa, Unknown
  Bacterial polypetide isolated from the Sargasso Sea
MKNFSKNIILWIVIGLLLIALFNLFQNSSTSNKTAEISFSDFLIAADNGNISEVKIVGNDVSGFFEDGRSFNTYSPNYPDLINKLSESGVKIVAEPSERSMHPILSVLISWFPMLLLIGVWIFFMRQMQSGGGKAMGFGKSKAKLLNEAIGKVTFDDVAGIDEAKQELEEVVEFLKDPKKFSRLGGKIPTGALLVGPPGTGKTLLARAIAGEANVPFFSISGSDFVEMFVGVGASRVRDMFEQGKKNAPCIIFIDEIDAVGRHR

SEQ ID NO: 147039 - protein, 271 aa, Unknown
  Bacterial polypetide isolated from the Sargasso Sea
FNMFQDPNKINTDRKTLPFSNFLNEVEAGRVVEVQIQGSNISGILADGKKFKTFSPNYPELVDKLSSKGVSINASPQEDKMPSLLGILLSWFPMLLLIGVWIFFMRQMQGGKGGAMGFGRSKAKLLNEAQGKVTFNDVAGVEEAKEEVEEIVEFLKDPKKFSRLGGKIPKGALLIGPPGTGKTLLAKAIAGEANVPFFSISGSDFVEMFVGVGASRVRDMFEQGKKHSPCIIFIDEIDAVGRSRGAGLGGGNDEREQTLNQLLVEMDGFDT

SEQ ID NO: 147040 - protein, 293 aa, Unknown
  Bacterial polypetide isolated from the Sargasso Sea
MKNFSKNIALWLIIGLLLIALFNLFQGTGNKNSSRLISFTDFLTATESGNVSEVFIRGNNVEGYFDDGRSFKTYSPNYPNLVEKLNENGVRINAEASNKPMHPLLSVLISWFPMILLIGVWIFFMRQMQGGGGKALGFGKSKAKLLNEAIGKITFDDVAGIDEAKQELEEVVEFLKDPNKFSKLGGKIPTGALLIGPPGTGKTLLARAIAGEANVPFFSISGSDFVEMFVGVGASRVRDMFEQGKKNSPCIIFIDEIDAVGRHRGAGLGGGNDEREQTLNQLLVEMDGLKQMQ

SEQ ID NO: 147041 - protein, 302 aa, Unknown
  Bacterial polypetide isolated from the Sargasso Sea
LLFPAILIGGLILLARRSNGMPGGPGQAMQFGKTKARFAMEAETGVVFDDVAGVNEAKQDLQEVVTFLKKPEKFTSVGARIPKGVLLVGPPGTGKTLLAKAIAGEAGVPFFSLSGSEFVEMFVGVGASRVRDLFKRAKENSPCLIFIDEIDAVGRQRGAGIGGGNDEREQTLNQLLTEMDGFEGNSGIIIIAATNRPDVLDSALMRPGRFDRQVTVDAPDIKGRLSILEVHSRNKKLQEDLTLESIARRTPGFTGADLANLLNEAAILTARRRKDSISISEIDDSVDRIVAGMEGSPLTDGR

SEQ ID NO: 147042 - protein, 264 aa, Unknown
  Bacterial polypetide isolated from the Sargasso Sea
MRQMQGGKGGAMGFGRSKAKMMNELKGKVTFNDVAGVEEAKEEVEEVVEFLKDPKKFSRLGGKIPRGCLLVGPPGTGKTLLARAIAGEAGVPFFTISGSDFVEMFVGVGASRVRDMFEQGKKHSPCIIFIDEIDAVGRSRGAGLGGGNDEREQTLNQLLVEMDGFDTNEGVIIIAATNRPDVLDPALLRPGRFDRQVVVSNPDIIGREKILKVHVKKVKMAPDVNLRTIARGTPGFSGADLANLVNEAALLAARKNKRIVTYQE

SEQ ID NO: 147043 - protein, 268 aa, Unknown
  Bacterial polypetide isolated from the Sargasso Sea
FLSEVENGRVVQVEIQGNNVNGVFSNGEKFSTYVPNDPNLIEKLSDKGVSISASPLEEKMPSLLGVLLSWFPMLLLIAVWIFFMRQMQGGKGGAMGFGRSKAKLMNELKGKVTFKDVAGVEEAKEEVEEVVEFLKDPKKFSRLGGKIPRGCLLVGPPGTGKTLLARAIAGEAGVPFFTISGSDFVEMFVGVGASRVRDMFEQGKKHSPCIIFIDEIDAVGRSRGAGLGGGNDEREQTLNQLLVEMDGFDTNEGVIIIAATNRPDVLDP

SEQ ID NO: 147044 - protein, 307 aa, Unknown
  Bacterial polypetide isolated from the Sargasso Sea
LGDKVEVKKAQVKPAQKVVLAPMMDQSGRVQFGPGIEEVILRGLNRRPLTKGDVVIVPGLTLMGGRLPFAVTVVQPKGIIQIQADTVIQVHEDPVKEEELTTTGVVYEDIGGLKEEIKKVREMIELPLKHPELFEALGIDPPKGVLLYGPPGTGKTLLAKAVANESGANFLSIQGPEIMNKYYGESEAHLRQKFEEAETNSPSIIFIDEIDSIASKRDETQGEVERRVVAQLLTLMDGLQARGQVIVIAATNRPDAIDQALRRPGRFDREIEIGIPDREGRREVLQVHTRGMPIKRDKEGHWKELDH

SEQ ID NO: 147045 - protein, 285 aa, Unknown
  Bacterial polypetide isolated from the Sargasso Sea
NINGTLSDGSKFKTYSPNYPDLVNKLSDKNVSINAAPVEDKMPSLLGVLLSWFPMLLLIGVWIFFMRQMQGGRGGAMGFGKSKAKLLNEAQGKVTFNDVAGIEEAKEEVEEIVDFLKDPRKFRKLGGKIPKGALLIGPPGTGKTLLAKAIAGEANVPFFTISGSDFVEMFVGVGASRVRDMFEQGKKHAPCIIFIDEIDAVGRSRGAGLGGGNDEREQTLNQLLVEMDGFDTNEGIILIAATNRPDVLDPALLRPGRFDRQVVVPNPDILGREAILKVHVKKINT

SEQ ID NO: 147046 - protein, 285 aa, Unknown
  Bacterial polypetide isolated from the Sargasso Sea
DQFTTYAPEDPNLIQKLSDKGVSISASPLEEKMPSLLGILLSWFPMLLLIAVWIFFMRQMQGGKGGAMGFGRSKAKMMNEVKGKVTFNDVAGVEEAKEEVEEVVEFLKDPRKFSRLGGKIPRGCLLVGPPGTGKTLLARAIAGEAGVPFFTISGSDFVEMFVGVGASRVRDMFEQGKKHSPCIIFIDEIDAVGRSRGAGLGGGNDEREQTLNQLLVEMDGFDTNEGVIIIAATNRPDVLDPALLRPGRFDRQVVVSNPDLIGREKILKVHAKKISMAPDVNLRTV

SEQ ID NO: 147047 - protein, 307 aa, Unknown
  Bacterial polypetide isolated from the Sargasso Sea
LKKPEKFTSVGARIPKGVLLVGPPGTGKTLLAKAIAGEAGVPFFSLSGSEFVEMFVGVGASRVRDLFKRAKENSPCLIFIDEIDAVGRQRGAGIGGGNDEREQTLNQLLTEMDGFEGNSGIIIIAATNRPDVLDSALMRPGRFDRQVTVDAPDIKGRLSILEVHSRNKKLQEDLTLESIARRTPGFTGADLANLLNEAAILTARRRKDSISISEIDDSVDRIVAGMEGSPLTDGRSKRLIAYHEVGHALIGSLVKAHDPVQKVTVIPRGQAKGLTWFTPDDEQTLVSRAQLKARIMGALGGRAAEDV

SEQ ID NO: 147048 - protein, 281 aa, Unknown
  Bacterial polypetide isolated from the Sargasso Sea
SDKGVSISASPLEEKMPSLLGVLLSWFPMLLLIAVWIFFMRQMQGGKGGAMGFGRSKAKMMNELKGKVTFNDVAGVEEAKEEVEEVVEFLRDPKKFSRLGGKIPRGCLLVGPPGTGKTLLARAIAGEAGVPFFTISGSDFVEMFVGVGASRVRDMFEQGKKHSPCIIFIDEIDAVGRSRGAGLGGGNDEREQTLNQLLVEMDGFDTNEGVIIIAATNRPDVLDPALLRPGRFDRQVVVSNPDILGREKILKVHAKKISMAPDVNLRTVARGTPGFSGADLA

SEQ ID NO: 147049 - protein, 250 aa, Unknown
  Bacterial polypetide isolated from the Sargasso Sea
MLVGPPGTGKTLLARAIAGEAGVPFFTISGSDFVEMFVGVGASRVRDMFEQGKKNSPCIIFIDEIDAVGRSRGAGLGGGNDEREQTLNQLLVEMDGFDTNEGVIIIAATNRPDVLDPALLRPGRFDRQVVVSNPDIIGREKILKVHVKKIKMAPDVNLRTIARGTPGFSGADLANLVNESALLAARKNKRIVTLNEFEEAKDKVMMGAERRSMVMTEDEKKLTAYHEGGHALVSFNMPSYDPIHKATIIP

SEQ ID NO: 147050 - protein, 303 aa, Unknown
  Bacterial polypetide isolated from the Sargasso Sea
HHYFGVLLSWFPMLLLIAVWIFFMRQMQGGKGGAMGFGRSKAKMMNEMKGKVTFNDVAGVEEAKEEVEEIVEFLKDPKKFSRLGGKIPRGALLVGPPGTGKTLLARAIAGEAGVPFFTISGSDFVEMFVGVGASRVRDMFEQGKKNSPCIIFIDEIDAVGRSRGAGLGGGNDEREQTLNQLLVEMDGFDTNEGVIIIAATNRPDVLDPALLRPGRFDRQVVVSNPDIIGREKILKVHVKKIKMAPDVNLRTIARGTPGFSGADLANLVNESALLAARKNKRIVTLNEFEEAKDKVMMGAERRS

SEQ ID NO: 147051 - protein, 305 aa, Unknown
  Bacterial polypetide isolated from the Sargasso Sea
GFGKSKAKMMNELKGKVTFNDVAGVEEAKEEVEEVVEFLKDPKKFSRLGGKIPRGCLLVGPPGTGKTLLARAIAGEAGVPFFTISGSDFVEMFVGVGASRVRDMFEQGKKHSPCIIFIDEIDAVGRSRGAGLGGGNDEREQTLNQLLVEMDGFDTNEGVIIIAATNRPDVLDPALLRPGRFDRQVVVSNPDLLGREKILKVHAKKISMAPDVNLRTIARGTPGFSGADLANLVNEAALLAARKNKRIVTYMEFEEAKDKVMMGSERRSMVMSEEEKKLTAYHEAGHAIVTINEKAAYPIHKATII

SEQ ID NO: 147052 - protein, 114 aa, Unknown
  Bacterial polypetide isolated from the Sargasso Sea
LRDPRKFSRLGGKIPRGCLLVGPPGTGKTLLARAIAGEAGVPFFTISGSDFVEMFVGVGASRVRDMFEQGKKHSPCIIFIDEIDAVGRSRGAGLGGGNDEREQTLNQLLVEMDG

SEQ ID NO: 147053 - protein, 292 aa, Unknown
  Bacterial polypetide isolated from the Sargasso Sea
PDDPNLIQKLSDKGVSISASPLEEKMPSLFGVLLSWFPMLLLIAVWIFFMRQMQGGKGGAMGFGKSKAKMMNELKGKVTFNDVAGVEEAKEEVEEVVEFLKDPKKFSRLGGKIPRGCLLVGPPGTGKTLLARAIAGEAGVPFFTISGSDFVEMFVGVGASRVRDMFEQGKKHSPCIIFIDEIDAVGRSRGAGLGGGNDEREQTLNQLLVEMDGFDTNEGVIIIAATNRPDVLDPALLRPGRFDRQVVVSNPDIIGREKILKVHAKKITMAPDVKLRTIARGTPGFSGADLAN

SEQ ID NO: 147054 - protein, 296 aa, Unknown
  Bacterial polypetide isolated from the Sargasso Sea
RGCLLVGPPGTGKTLLARAIAGEAGVPFFTISGSDFVEMFVGVGASRVRDMFEQGKKHSPCIIFIDEIDAVGRSRGAGLGGGNDEREQTLNQLLVEMDGFDTNEGVIIIAATNRPDVLDPALLRPGRFDRQVVVSNPDLIGREKILKVHAKKISMAPDVNLRTIARGTPGFSGADLANLVNEAALLAARKNKRIVTYMEFEEAKDKVMMGSERRSMVMSEEEKKLTAYHEAGHAIVTINEKAAYPIHKATIIPRGRALGMVMQLPERDEVSQTREQLHAQMAIAMGGRVAEEIIFG

SEQ ID NO: 147055 - protein, 325 aa, Unknown
  Bacterial polypetide isolated from the Sargasso Sea
KAKMMNEVKGKVTFNDVAGVEEAKEEVEEVVEFLRDPKKFSRLGGKIPRGCLLVGPPGTGKTLLARAIAGEAGVPFFTISGSDFVEMFVGVGASRVRDMFEQGKKHSPCIIFIDEIDAVGRSRGAGLGGGNDEREQTLNQLLVEMDGFDTNEGVIIIAATNRPDVLDPALLRPGRFDRQVVVSNPDIIGREKILKVHAKKISMSPDVNLRTVARGTPGFSGADLANLVNEAALLAARKNKRIVTSQEFEEAKDKVMMGAERRSMVMTEDEKKLTAYHEAGHAIVTLNEKAAYPIHKATIIPRGRALGMVMQLPERDEVSQTREQL

SEQ ID NO: 147056 - protein, 288 aa, Unknown
  Bacterial polypetide isolated from the Sargasso Sea
MNLKNLAMWGIIVFLTIGLYNMFKNPQSNIRGGNQIIFSDFLTSVENGEVLKVEIQGNNIKGVYSNGNSFSTYSPNDPNLIEKLSDKGVSISAAPLEEKMPSLFGVLLSWFPMLLLIAVWIFFMRQMQGGKGGAMGFGKSKAKMMNELKGKVTFNDVAGVEEAKEEVEEIVEFLKDPKKFSRLGGKIPRGALLVGPPGTGKTLLARAIAGEAGVPFFTISGSDFVEMFVGVGASRVRDMFEQGKKNSPCIIFIDEIDAVGRSRGAGLGGGNDEREQTLNQLLVEMDGF

SEQ ID NO: 147057 - protein, 265 aa, Unknown
  Bacterial polypetide isolated from the Sargasso Sea
MGFGKSKAKMMNELKGKVTFNDVAGVEEAKEEVEEIVEFLKDPKKFSRLGGKIPRGALLVGPPGTGKTLLARAIAGEAGVPFFTISGSDFVEMFVGVGASRVRDMFEQGKKNSPCIIFIDEIDAVGRSRGAGLGGGNDEREQTLNQLLVEMDGFDTNEGVIIIAATNRPDVLDPALLRPGRFDRQVVVSNPDIIGREKILKVHVKKIKMAPDVNLRTIARGTPGFSGADLANLVNEAALLAARKNKRIVTLLEFEEAKDKVMMGA

SEQ ID NO: 147058 - protein, 230 aa, Unknown
  Bacterial polypetide isolated from the Sargasso Sea
MGFGRSKAKMMNQLKGKVTFNDVAGVEEAKEEVEEVVEFLKDPKKFSRLGGKIPRGCLLVGPPGTGKTLLARAIAGEAGVPFFTISGSDFVEMFVGVGASRVRDMFEQGKKHSPCIIFIDEIDAVGRSRGAGLGGGNDEREQTLNQLLVEMDGFETNEGVIIIAATNRPDVLDPALLRPGRFDRQVVVSLPDIIGREKILKVHAKKISMTPDINLRTVARGTPGFSGADL

SEQ ID NO: 147059 - protein, 301 aa, Unknown
  Bacterial polypetide isolated from the Sargasso Sea
TEVVDFLKNPDRFTAVGAKIPKGCLLVGPPGTGKTLLAKAVAGEAGVPFFSISGSEFVEMFVGVGASRVRDLFEQAKKNAPCIIFIDEIDAVGRQRGAGLGGGNDEREQTLNQLLTEMDGFEGNTGIIIIAATNRPDVLDAALLRPGRFDRQVTVDRPDYAGRLQILGVHARGKTLAKDVDLDKVARRTPGYTGADLANLLNEAAILAARRELTEVSNDEISDAIERIMVGPEKKDAVISERKKRLVAYHEAGHALVGALMPDYDPVQKISIIPRGNAGGLTFFTPSEERMESGLYSRAYL

SEQ ID NO: 147060 - protein, 275 aa, Unknown
  Bacterial polypetide isolated from the Sargasso Sea
KAKLLSEARGKVTFNDVAGIDEAKEEVEEIVEFLKDPRKFRRLGGKIPKGALLIGPPGTGKTLLARAIAGEANVPFFTISGSDFVEMFVGVGASRVRDMMEQGKKNAPCIIFIDEIDAVGRSRGAGLGGGNDEREQTLNQLLVEMDGFDTNEGVIIIAATNRPDVLDPALLRPGRFDRQVVVPNPDIVGREAILKVHIKNITIGPDVKLRTIARGTPGFSGADLANLVNESALLAARKNKRIVTMIDIEEAKDKVMMGAERRSMVMTEDDKKLTA

SEQ ID NO: 147061 - protein, 282 aa, Unknown
  Bacterial polypetide isolated from the Sargasso Sea
MYVALGLLIFIGVQQYNQTINEPEVSTFSEFKELINNREVVEATIKEQSNTVHFKTKNNDKVFQTEYPEGFEGEVFQILVDQNIVLTTDTEPAGFQEYFIAFLPWLFLAGFMFFMFSQVRSNGNQVMQFGKSKAKEVDEQLPKVTFKDVAGAEEAKEELEEIKEFLKSPEKFNKLGAKIPKGVLLVGPPGTGKTLLARAVAGESEVPFYSISGSDFVEMFVGVGASRVRDLFKKAKESSPSIIFIDEIDAVGRMRGAGLGGGHDEREQTLNQLLVEMDGFES

SEQ ID NO: 147062 - protein, 266 aa, Unknown
  Bacterial polypetide isolated from the Sargasso Sea
NTFNTYAPDDPNLIQKLSDKGVSISASPLEEKMPSLLGILLSWFPMLLLIAVWIFFMRQMQGGKGGAMGFGRSKAKMMNELKGKVTFNDVAGVEEAKEEVEEVVEFLKDPRKFSRLGGKIPRGCLLVGPPGTGKTLLARAIAGEAGVPFFTISGSDFVEMFVGVGASRVRDMFEQGKKHSPCIIFIDEIDAVGRSRGAGLGGGNDEREQTLNQLLVEMDGFDTNEGVIIIAATNRPDVLDPALLRPGRFDRQVVVSNPDIIGREKI

SEQ ID NO: 147063 - protein, 310 aa, Unknown
  Bacterial polypetide isolated from the Sargasso Sea
QGGKGGAMGFGRSKAKMMNEVKGKVTFNDVAGVEEAKEEVEEVVEFLKDPKKFSRLGGKIPRGCLLVGPPGTGKTLLARAIAGEAGVPFFTISGSDFVEMFVGVGASRVRDMFEQGKKHSPCIIFIDEIDAVGRSRGAGLGGGNDEREQTLNQLLVEMDGFDTNEGVIIIAATNRPDVLDPALLRPGRFDRQVVVSLPDIIGREKILKVHSKKISMTPDINLRTIARGTPGFSGADLANLVNEAALLAARKNKRIVTYSEFEEAKDKVMMGAERRSMVMTEDEKKLTAYHEAGHAIVTINEKAAYPIHKA

SEQ ID NO: 147064 - protein, 275 aa, Unknown
  Bacterial polypetide isolated from the Sargasso Sea
TTFSPQGANIVSLLENSGVRIIGKPVEREVSWILSTLLSWFPMLLLIGVWIFFMRQMQSGSGKAMGFGKSKAKLLTEKQGKVTFEDVAGIDEAKTELEEIVEFLKDPGKFQRLGGKIPKGCLLVGPPGTGKTLLARAIAGEAGVPFFTISGSDFVEMFVGVGASRVRDMFEQGKKNAPCIIFIDEIDAVGRHRGAGLGGGNDEREQTLNQLLVEMDGFEANEGVILIAATNRPDVLDPALLRPGRFDRQVVVPNPDILGREKILKVHMKKVPLSD

SEQ ID NO: 147065 - protein, 272 aa, Unknown
  Bacterial polypetide isolated from the Sargasso Sea
MVFLIVDFYNANNTQVKTQNISYSSFLDDVKNGNVSSVQIRGNNIFGKYNDGSSFTTYSPNDLGLIDKLEKNNIEIIAQPLEKSSPGLLDVLISWFPMLLLIGVWIFFMRQMQSGTGRAMGFGKSRAKLLNENKDKVTFKDVAGIDEAKAELEEIVEFLKDPTKFQRLGGKIPKGALLVGPPGTGKTLLARAIAGEANVPFFSISGSDFVEMFVGVGASRVRDMFEQGKKNAPCIIFIDEIDAVGRHRGAGLGGGKDEREQTLNQLLVEMDG

SEQ ID NO: 147066 - protein, 251 aa, Unknown
  Bacterial polypetide isolated from the Sargasso Sea
ISAAPLDEKMPSLFGVLLSWFPMLLLIAVWIFFMRQMQGGKGGAMGFGRSKAKMMNELKGKVTFNDVAGVEEAKEEVEEIVEFLKDPKKFSRLGGKIPRGALLVGPPGTGKTLLARAIAGEAGVPFFTISGSDFVEMFVGVGASRVRDMFEQGKKNSPCIIFIDEIDAVGRSRGAGLGGGNDEREQTLNQLLVEMDGFDTNEGVIIIAATNRPDVLDPALLRPGRFDRQVVVSNPDIIGREKILKVHVKKI

SEQ ID NO: 147067 - protein, 306 aa, Unknown
  Bacterial polypetide isolated from the Sargasso Sea
MLLLIAVWIFFMRQMQGGKGGAMGFGRSKAKMMNEVKGKVTFNDVAGVEEAKEEVEEVVEFLKDPRKFSRLGGKIPRGCLLVGPPGTGKTLLARAIAGEAGVPFFTISGSDFVEMFVGVGASRVRDMFEQGKKHSPCIIFIDEIDAVGRSRGAGLGGGNDEREQTLNQLLVEMDGFDTNEGVIIIAATNRPDVLDPALLRPGRFDRQVVVSNPDLIGREKILKVHAKKISMAPDVNLRTVARGTPGFSGADLANLVNEAALLAARKNKRIVTYQEFEEAKDKVMMGSERRSMVMSEEEKKLTAYHE

SEQ ID NO: 147068 - protein, 290 aa, Unknown
  Bacterial polypetide isolated from the Sargasso Sea
SISASPLEEKMPSLLGVLLSWFPMLLLIAVWIFFMRQMQGGKGGAMGFGRSKAKMMNELKGKVTFNDVAGVEEAKEEVEEVVEFLKDPKKFSRLGGKIPRGCLLVGPPGTGKTLLARAIAGEAGVPFFTISGSDFVEMFVGVGASRVRDMFEQGKKHSPCIIFIDEIDAVGRSRGAGLGGGNDEREQTLNQLLVEMDGFDTNEGVIIIAATNRPDVLDPALLRPGRFDRQVVVSNPDILGREKILKVHAKKISMAPDVNLRTVCRGTPGFSSADLANLVNESALLAARKN

SEQ ID NO: 147069 - protein, 277 aa, Unknown
  Bacterial polypetide isolated from the Sargasso Sea
ANSFASISLFLIFILAIVLILRSTSKLASRAFGFSKNQAKFLTIDDVDTRFDDVAGVPEAAEELKEVITFLNEPKKFENLGAKVPKGVLLIGPPGTGKTLLAKAIAGESGVPFLSIAASEFVELFVGVGASRVRDLFAKAKEKSPCIIFIDEIDSIGRQRGSGIGGGNDEREQTLNQLLTELDGFADNSGIIVLAATNRPDILDSALLRPGRFDRKIEVMLPDLDGRKKILSVHSLSKPLSSNVDLGYWASRTIGFSGADLANLMNESAIHCARDES

SEQ ID NO: 147070 - protein, 285 aa, Unknown
  Bacterial polypetide isolated from the Sargasso Sea
LEDKMPSLLGILLSWFPMLLLIGVWIFFMRQMQGGKGGAMGFGRSKAKLLNEAQGKVTFNDVAGVEEAKEEVEEIVEFLKDPKKFSRLGGKIPKGALLIGPPGTGKTLLAKAIAGEANVPFFSISGSDFVEMFVGVGASRVRDMFEQGKKHSPCIIFIDEIDAVGRSRGAGLGGGNDEREQTLNQLLVEMDGFDTNEGIILIAATNRPDVLDPALLRPGRFDRQVVVANPDIIGREAILKVHIKKISIGPDVKLRTIARGTPGFSGADLANLINESALLAARKNK

SEQ ID NO: 147071 - protein, 266 aa, Unknown
  Bacterial polypetide isolated from the Sargasso Sea
MNFKNLVMWAIIVLLSVGLFNMFQDPKRINSEKNKLPFSTFMAEVEAGRVVEVQIQGNNISGVLSDGKNFNTYSPNYPNLVEKLSEQNISIVATPLEDKMPSLLGILLSWFPMLLLIGVWIFFMRQMQGGKGGAMGFGRSKAKLLNEAQGKVTFNDVAGVEEAKEEVEEIVEFLKDPKKFSRLGGKIPKGALLIGPPGTGKTLLAKAIAGEANVPFFSISGSDFVEMFVGVGASRVRDMFEQGKKHSPCIIFIDEIDAVGRSRGAG

SEQ ID NO: 147072 - protein, 281 aa, Unknown
  Bacterial polypetide isolated from the Sargasso Sea
IMNFKNLAMWGIIVVLTIGLYNMFKNPQGSVSQKNNIIFSEFLTQVDNGRVVQVEIQGKNIKGVMSNGELFNTYAPDDPNLIQKLNDKGVSISASPIEEKMPSLFGVLLSWFPMLLLIAVWIFFMRQMQGGKGGAMGFGKSKAKMMNEVKGKVTFNDVAGVEEAKEDVEEVVEFLKDPKKFSRLGGKIPRGCLLVGPPGTGKTLLARAIAGEAGVPFFTISGSDFVEMFVGVGASRVRDMFEQGKKHSPCIIFIDEIDAVGRSRGAGLGGGNDEREQTLNQ

SEQ ID NO: 147073 - protein, 317 aa, Unknown
  Bacterial polypetide isolated from the Sargasso Sea
MLLLIAVWIFFMRQMQGGKGGAMGFGRSKAKMMNELKGKVTFNDVAGVEEAKEEVEEIVEFLKDPKKFSRLGGKIPRGALLVGPPGTGKTLLARAIAGEAGVPFFTISGSDFVEMFVGVGASRVRDMFEQGKKNSPCIIFIDEIDAVGRSRGAGLGGGNDEREQTLNQLLVEMDGFDTNEGVIIIAATNRPDVLDPALLRPGRFDRQVVVSNPDIIGREKILKVHVKKIKMAPDVNLRTIARGTPGFSGADLANLVNEAALLAARKNKRIVTLMEFEEAKDKVMMGAERRSMGMTEDEKKLTAYHEGGHALVSFNMP

SEQ ID NO: 147074 - protein, 267 aa, Unknown
  Bacterial polypetide isolated from the Sargasso Sea
RNAVIEAVDPDLDNRVQRLRVDLPGLAPELINTLKTEGISFDIHPPRTAPPALGVLGNLAFPLLLIGALIFLARRNSNMPGGPGQAMQFGKSKARFMMEAETGVMFDDVAGVTEAKQELQEVVTFLKQPERFTSVGAQIPRGLLLVGPPGTGKTLLAKAIAGEAGVPFFSLSGSEFVEMFVGVGASRVRDLFKKAKENSPCLIFIDEIDAVGRQRGAGIGGGNDEREQTLNQLLTEMDGFEGNSGIIIIAATNRPDVLDSALMRPGR

SEQ ID NO: 147075 - protein, 274 aa, Unknown
  Bacterial polypetide isolated from the Sargasso Sea
GFRNIVIWLSLDLLMMALYNVFQSSNETRGVSEVSYTTLISEVSGGNVRDVEISGDEITGTFNDGSRFHSYSPEDPQFIERLNEQGVIINVKPVRQSALFSIFVSWFPMLLLIAVWIFFLKQMQGGGRGAMGFGKSKAKLLNEKKGKVTFSDVAGIDEAKEDLEEIVEFLKDPRKFQYLGGKIPKGALLVGPPGTGKTLLARAIAGEAGVPFFTISGSDFVEMFVGVGASRVRDMFEQAKRSAPCIIFIDEIDAVGRHRGAGLGGGNDEREQTL

SEQ ID NO: 147076 - protein, 290 aa, Unknown
  Bacterial polypetide isolated from the Sargasso Sea
REEHYWVGPPGTGKTLLARAIAGEAGVPFFTISGSDFVEMFVGVGASRVRDMFEQGKKNSPCIIFIDEIDAVGRSRGAGLGGGNDEREQTLNQLLVEMDGFDTNEGVIIIAATNRPDVLDPALLRPGRFDRQVVVSNPDIIGREKILKVHVKKIKMAPDVNLRTIARGTPGFSGADLANLVNESALLAARKNKRIVTLNEFEEAKDKVMMGAERRSMVMTEDEKKLTAYHEGGHALVSFNMPSYDPIHKATIIPRGRALGMVMNLPERDKHGHSIKYLKARLAVCFGGRV

SEQ ID NO: 147077 - protein, 204 aa, Unknown
  Bacterial polypetide isolated from the Sargasso Sea
MLLLIGVWVFFMRQMQGGKGGAMGFGKSKAKLMTEMKNKITFNDVAGIDEAKEEVEEVVEFLKDPKKFRRLGGKIPKGVLVIGPPGTGKTLLARAIAGEASVPFFTISGSDFVEMFVGVGASRVRDMFETGKKNAPCIIFIDEIDAVGRSRGAGLGGGNDEREQTLNQMLVEMDGFDTNEGVIIIAATNRPDVLDPRFNETRKI

SEQ ID NO: 147078 - protein, 307 aa, Unknown
  Bacterial polypetide isolated from the Sargasso Sea
KRLDFSTLKPGTRVALNQDTLSVVEVLSDSWDPLVSNAEIVETPKIEYSHIGGLDNQIRELREAIELPFENPDAFSNLGIEPPKGVLLTGPPGTGKTMLAKAVANSTNATFLGLVGAELAQKYIGEGGRMVRELFEMARQKAPAIIFIDEIDSIGSKRLDTATSGDREVQRTLMQLLSEIDGFESLDNVKVIAATNRPELLDAALLRPGRFDRIIEIPIPDLEARKTIFSVHTKSMPLAKNVGVKTLASLTDGFSGAEIKSAVVEAGISAISSGRKSVRKSDFISAIKKVEANRKQSKDSNSEGLYS

SEQ ID NO: 147079 - protein, 132 aa, Unknown
  Bacterial polypetide isolated from the Sargasso Sea
MNELKGKVTFNDVAGVEEAKEEVEEVVEFLKDPKKFSRLGGKIPRGCLLVGPPGTGKTLLARAIAGEAGVPFFTISGSDFVEMFVGVGASRVRDMFEQGKKHSPCIIFIDEIDAVGRSRGAGLEEETMKESK

SEQ ID NO: 147080 - protein, 277 aa, Unknown
  Bacterial polypetide isolated from the Sargasso Sea
GLYNMFKNPQNAVGQSNNIIFSEFLSEVDNGRVVQVEIQGNKIRGIMSNGEKFSTYSPNDPNLIEKLSNKGVSISASPIEEKMPSLLGVLLSWFPMLLLIAVWIFFMRQMQGGKGGAMGFGKSKAKMMNELKGKVTFNDVAGVEEAKEEVEEVVEFLKDPKKFSRLGGKIPRGCLLVGPPGTGKTLLARAIAGEAAVPFFTISGSDFVEMFVGVGASRVRDMFEQGKKNSPCIIFIDEIDAVGRSRGAGLGGGNDEREQTLNQLLVEMDGFDTNEGV

SEQ ID NO: 147081 - protein, 322 aa, Unknown
  Bacterial polypetide isolated from the Sargasso Sea
SINASPVEDKMPSLLGVLLSWFPMLLLIGVWIFFMRQMQGGRGGAMGFGKSKAKLLNEAQGKVTFNDVAGIEEAKEEVEEIVDFLKDPRKFRKLGGKIPKGALLIGPPGTGKTLLAKAIAGEANVPFFTISGSDFVEMFVGVGASRVRDMFEQGKKHAPCIIFIDEIDAVGRSRGAGLGGGNDEREQTLNQLLVEMDGFDTNEGIILIAATNRPDVLDPALLRPGRFDRQVVVPNPDILGREAILKVHVKKINTGPDVKLRTIARGTPGFSGADLANLINESALLAARKNKRVVTMTDIEEAKDKVMMGAERRSMVMTEEEK

SEQ ID NO: 147082 - protein, 279 aa, Unknown
  Bacterial polypetide isolated from the Sargasso Sea
MQGGRGGAMGFGRSKAKLLSEARGKITFNDVAGIDEAKEEVEEIVEFLRDPRKFRRLGGKIPKGALLIGPPGTGKTLLARAIAGEADVPFFTISGSDFVEMFVGVGASRVRDMFDQGKKNAPCIIFIDEIDAVGRSRGAGLGGGNDEREQTLNQLLVEMDGFDTNEGVILIAATNRPDVLDPALLRPGRFDRQVVVPNPDIIGREAILKVHIKKIVIGPDVKLRTIARGTPGFSGADLANLVNESALLAARKNKRIVTMSDIEEAKDKVMMGAERRSMV

SEQ ID NO: 147083 - protein, 308 aa, Unknown
  Bacterial polypetide isolated from the Sargasso Sea
MLLLIAVWIFFMRQMQGGKGGAMGFGRSKAKMMNELKGKVTFNDVAGVEEAKEEVEEVVEFLKDPRKFSRLGGKIPRGCLLVGPPGTGKTLLARAIAGEAGVPFFTISGSDFVEMFVGVGASRVRDMFEQGKKHAPCIIFIDEIDAVGRSRGAGLGGGNDEREQTLNQLLVEMDGFDTNEGVIIIAATNRPDVLDPALLRPGRFDRQVVVSNPDIIGREKILKVHAKKISMSSDVNLRTVARGTPGFSGADLANLVNEAALLAARKNKRIVTNDEFEEAKDKVMMGAERRSMVMSEEEKKLTAYHEAG

SEQ ID NO: 147084 - protein, 267 aa, Unknown
  Bacterial polypetide isolated from the Sargasso Sea
NEAHGKVTFNDVAGVEEAKEEVEEIVEFLKDPKKFSRLGGKIPKGALLIGPPGTGKTLLAKAIAGEANVPFFSISGSDFVEMFVGVGASRVRDMFEQGKKHSPCIIFIDEIDAVGRSRGAGLGGGNDEREQTLNQLLVEMDGFDTNEGIILIAATNRPDVLDPALLRPGRFDRQVVVGNPDIVGREAILKVHVKKISTGPDVKLRTIARGTPGFSGADLANLINESALLAARKNKRVVTMSDIEEAKDKVMMGAERRSMVMSEDEKK

SEQ ID NO: 147085 - protein, 265 aa, Unknown
  Bacterial polypetide isolated from the Sargasso Sea
MNLKNLAMWAIIVVLTVGLYNMFKNPQGSIGQNNNNIIFSEFLSEVDNGRVVQVEIQGKNIKGIMSNGEKFITYAPDDPNLIQKLSDKGVSISASPLEEKMPSLLGILLSWFPMLLLIAVWIFFMRQMQGGKGGAMGFGRSKAKMMNEIKGKVTFNDVAGVEEAKEEVEEVVEFLKDPRKFSRLGGKIPRGCLLVGPPGTGKTLLARAIAGEAGVPFFTISGSDFVEMFVGVGASRVRDMFEQGKKHSPCIIFIDEIDAVEEAEE

SEQ ID NO: 147086 - protein, 294 aa, Unknown
  Bacterial polypetide isolated from the Sargasso Sea
VVKVEIQGNNIKGVLSDGSVFTTYSPNDPNLIEKLSNSGVSISALPIDEKMPSLFGVLLSWFPMLLLIAVWIFFMRQMQGGKGGAMGFGRSKAKMMNQLKGKVTFNDVAGIEEAKEEVEEVVEFLRDPKKFSRLGGKIPRGCLLVGPPGTGKTLLARAIAGEADVPFFTISGSDFVEMFVGVGASRVRDMFEQGKKHSPCIIFIDEIDAVGRSRGAGLGGGNDEREQTLNQLLVEMDGFDTNEGVIIIAATNRPDVLDPALLRPGRFDRQVVVSNPDIIGREKILKVHVKKISM

SEQ ID NO: 147087 - protein, 291 aa, Unknown
  Bacterial polypetide isolated from the Sargasso Sea
NDVAGVEEAKEEVEEIVEFLKDPKKFSRLGGKIPRGALLVGPPGTGKTLLARAIAGEAGVPFFTISGSDFVEMFVGVGASRVRDMFEQGKKNSPCIIFIDEIDAVGRSRGAGLGGGNDEREQTLNQLLVEMDGFDTNEGVIIIAATNRPDVLDPALLRPGRFDRQVVVSNPDIIGREKILKVHVKKIKMAPDVNLRTIARGTPGFSGADLANLVNEAALLAARKNKRIVTLLEFEEAKDKVMMGAERRSMVMTEDEKKLTAYHEGGHALVSFNMPSYDPIHKATIIPRGRA

SEQ ID NO: 147088 - protein, 308 aa, Unknown
  Bacterial polypetide isolated from the Sargasso Sea
SAANSFASISLFLIFILSIVLILRSTSKLASRAFGFTKNQAKFVTIDDVETRFDDVAGVPEAAEELKEVITFLKEPKKFENLGAKVPKGVLLIGPPGTGKTLLAKAIAGESGVPFLSISASEFVELFVGVGASRVRDLFSKAKEKSPCIIFIDEIDSIGRQRGSGIGGGNDEREQTLNQLLTELDGFADNSGIIVLAATNRPDILDAALLRPGRFDRKIEVMLPDLDGRKKILSVHSLSKPLSSEVDLGYWASRTVGFSGADLANLMNESAIHCARDESKLISDLHIENALDKITIGLRSSLITSPNM

SEQ ID NO: 147089 - protein, 291 aa, Unknown
  Bacterial polypetide isolated from the Sargasso Sea
PRSTPPVLGILGNLLFPLLLIGSLIFLARRSNNMPGGPGQAMQFGKSKARFSMEAETGVKFDDVAGVEEAKQDLEEVVTFLKQPERFSALGASIPRGVLLVGPPGTGKTLLAKAIAGEADVPFFSLSGSEFVEMFVGVGASRVRDLFKRAKENAPCLIFIDEIDAVGRQRGAGIGGGNDEREQTLNQLLTEMDGFEGNSGIIILAATNRPDVLDSALMRPGRFDRQVTVDAPDIKGRLSILKVHSRNKKLADDVSLEVIARRTPGFTGADLANLLNEAAILTARRRKDATT

SEQ ID NO: 147090 - protein, 255 aa, Unknown
  Bacterial polypetide isolated from the Sargasso Sea
MEEIVEFLKDPQKFQRLGGKIPKGCLLVGPPGTGKTLLARAIAGEANVPFFTISGSDFVEMFVGVGASRVRDMFEQGKKNAPCIIFIDEIDAVGRHRGAGLGGGNDEREQTLNQLLVEMDGFESNEGVILIAATNRPDVLDPALLRPGRFDRQVTVPNPDILGREKILKVHMKKVPLAPDVDARVIARGTPGFSGADLANLVNEAALLAARVGKRVVTMTEFEDAKDKVLMGTERRSMVMSEDEKKLTAYHEAGH

SEQ ID NO: 147091 - protein, 264 aa, Unknown
  Bacterial polypetide isolated from the Sargasso Sea
EKNVNIVATPVEDKMPSLLGVLLSWFPMLLLIGVWIFFMRQMQGGRGGAMGFGRSKAKLLTEAQGKVTFNDVAGIEEAKEEVEEIVEFLKDPKKFRRLGGKIPKGALLIGPPGTGKTLLAKAIAGEANVPFFTISGSDFVEMFVGVGASRVRDMFEQGKKHAPCIIFIDEIDAVGRSRGAGLGGGNDEREQTLNQLLVEMDGFDTNEGIILIAATNRPDVLDPALLRPGRFDRQVVVPNPDIIGREAILKVHVKKISTGPDVKT

SEQ ID NO: 147092 - protein, 297 aa, Unknown
  Bacterial polypetide isolated from the Sargasso Sea
MGFGRSKAKLLSEARGKVTFNDVAGIDEAKEEVEEIVDFLKDPRKFKRLGGEIPRGALLIGPPGTGKTLLARAIAGEADVPFFTISGSDFVEMFVGVGASRVRDMFEQGKKNAPCIIFIDEIDAVGRSRGAGLGGGNDEREQTLNQLLVEMDGFDTNEGVILIAATNRPDVLDPALVRPGRFDRQVVIPNPDIVGREAILKIHIKKVSIGPDVKLRTIARGTPGFSGADLANLTNEAALLAARKNKRIVTMSDIEEAKDKVMMGAERRSMVMTEDDKKLTAYHEGGHAIVAMNEKAS

SEQ ID NO: 147093 - protein, 278 aa, Unknown
  Bacterial polypetide isolated from the Sargasso Sea
FFIYFALGLLIFFGVQQYNSTVNAPESKSFTMFKNEINSGSVVEATIKEQSNMVEFKIANDETLYQTEYPEGFEGEVFQLLVDQDIVLNTDTEPAGIQDYIFAFLPWLFLVAFMFYMFSQVRSNGNQIMQFGKSKAKELDEEAPQVTFQDVAGVEEAKEELEEIKEFLKFPEKFNILGAKIPKGVLLVGPPGTGKTLLAKAVAGEAGVPFFSISGSDFVEMFVGVGASRVRDLFKKAKESSPAIIFIDEIDAVGRMRGAGLGGGHDEREQTLNQLLVE

SEQ ID NO: 147094 - protein, 313 aa, Unknown
  Bacterial polypetide isolated from the Sargasso Sea
MSVFNSFSPSDTTSRQLDYSSFVKEVTQEQIREVRMDGKVINGVKRTGERFTTIIPAPDPQLLNDMLNHNVKVMGEKPEEPSLLTSIFISWFPMLLLIGVWVFFMRQMQGGGGKGAMSFGKSKARLMSEDQIKTTFADVAGCDEAKEEVKELVDYLRDPSKFQKLGGKIPTGVLLVGPPGTGKTLLAKAIAGEAKVPFFTISGSDFVEMFVGVGASRVRDMFEQAKKSSPCIIFIDEIDAVGRQRGAGLGGGHDEREQTLNQMLVEMDGFEGNEGIIVIAATNRPDVLDPALLRPGRFDRQVVVGLPDVRGRE

SEQ ID NO: 147095 - protein, 269 aa, Unknown
  Bacterial polypetide isolated from the Sargasso Sea
NKVTFNDVAGIDEAKEELVEIVEFLKDPRKFQKLGGRIPKGALLIGPPGTGKTLLARAVAGEAGVPFFTISGSDFVEMFVGVGASRVRDMFEQGRRNAPCIIFIDEIDAVGRSRGAGLGGGNDEREQTLNQILVEMDGFDTQEGIILVAATNRPDVLDPALLRPGRFDRQVVVPNPDILGREAILKVHIKKISVAPDVDIRTIARGTPGFSGADLANIVNEAALLAARKNKKIVTMVDFEEAKDKVMMGSERRSLVMSQEEKELTAYHE

SEQ ID NO: 147096 - protein, 266 aa, Unknown
  Bacterial polypetide isolated from the Sargasso Sea
VNQVPFSSFLKNLDDGRIVQVEIKGNVIDGVLSDGSTFSTYAPNDPNLVEKLTSKGVSITATPVEDKMPSLLGILLSWFPMLLLIGVWVFFMRQMQGGKGGAMGFGRSKAKLLSEARGKVTFNDVAGIDEAKEEVEEIVEFLKDPRKFRRLGGKIPKGALLIGPPGTGKTLLARAIAGEANVPFFTISGSDFVEMFVGVGASRVRDMMEQGKKNAPCIIFIDEIDAVGRSRGAGLGGGNDEREQTLNQLLVEMDGFDTNEGVIIIA

SEQ ID NO: 147097 - protein, 286 aa, Unknown
  Bacterial polypetide isolated from the Sargasso Sea
PLEEKMPSLLGILLSWFPMLLLIAVWIFFMRQMQGGKGGAMGFGRSKAKLMNELKGKVTFKDVAGVEEAKEEVEEVVEFLKDPRKFSRLGGKIPRGCLLVGPPGTGKTLLARAIAGEAGVPFFTISGSDFVEMFVGVGASRVRDMFEQGKKHSPCIIFIDEIDAVGRSRGAGLGGGNDEREQTLNQLLVEMDGFDTNEGVIIIAATNRPDVLDPALLRPGRFDRQVVVSNPDIIGREKILKVHAKKINMSPDVNLRTVARGTPGFSGADLANLVNEAALLAARKNK

SEQ ID NO: 147098 - protein, 282 aa, Unknown
  Bacterial polypetide isolated from the Sargasso Sea
ELEEIKEFLKSPEKFNKLGAKIPKGVLLVGPPGTGKTLLAKAVAGESNVPFFSISGSDFVEMFVGVGASRVRDLFKKAKESSPAIIFIDEIDAVGRMRGAGLGGGHDEREQTLNQLLVEMDGFEANQGVILMAATNRPDVLDPALLRPGRFDRQVIVDRPDLKGRKQILKVHSVGKPIAKNVNLETVAKQTPGFTGADLANLLNEAALLAARKSKKTISNLDIENSIDRVLAGPEKKSQILTKEEKLIIAYHETGHALVGWALLNADPIHKVTFIPRGRALG

SEQ ID NO: 147099 - protein, 311 aa, Unknown
  Bacterial polypetide isolated from the Sargasso Sea
INGTLSDGSKFKTYSPNYPDLVNKLSDKNVSINAAPVEDKMPSLLGVLLSWFPMLLLIGVWIFFMRQMQGGRGGAMGFGKSKAKLLNEAQGKVTFNDVAGIEEAKEEVEEIVDFLKDPRKFRKLGGKIPKGALLIGPPGTGKTLLAKAIAGEANVPFFTISGSDFVEMFVGVGASRVRDMFEQGKKHAPCIIFIDEIDAVGRSRGAGLGGGNDEREQTLNQLLVEMDGFDTNEGIILIAATNRPDVLDPALLRPGRFDRQVVVPNPDILGREAILKVHVKKINTGPDVKLRTIARGTPGFSGADLANLINE

SEQ ID NO: 147100 - protein, 226 aa, Unknown
  Bacterial polypetide isolated from the Sargasso Sea
GKIPKGALLVGPPGTGKTLLARAIAGEANVPFFTISGSDFVEMFVGVGASRVRDMFEQAKKNAPCIIFIDEIDAVGRHTGAGLGGGNDEREQTLNQLLVEMDGFETNEGIILIAATNRPDVLHPALLRPGRIDRQVVVPNPDIIGREKILKVHTIKVPMSSDVDIRTVARGTPGFSRADLANIVNEAALLAARRGKRMVTHTEFEDAKDKVMMGPERRSMVMTDDD

SEQ ID NO: 147101 - protein, 274 aa, Unknown
  Bacterial polypetide isolated from the Sargasso Sea
TTFKDVAGVDEAKEELHEIIEFLKEPQKFSKLGGKIPKGVLLIGPPGTGKTLLARAISGEANVPFFSISGSDFVEMFVGVGASRVRDLFEQGKKNSPCIIFIDEIDAVGRHRGAGLGGGHDEREQTLNQLLVEMDGFENNEGVILIAATNRPDVLDPALLRPGRFDRQVTVGRPDVKGREGILKVHTSTVPLLDGVDLKIIARGTPGFTGADLANLVNEAALLAARDDKKAVAMNDFEEAKDKVMMGVERRSMVISEKEKKTTAYHEARHAMVA

SEQ ID NO: 147102 - protein, 281 aa, Unknown
  Bacterial polypetide isolated from the Sargasso Sea
DNGEILKVEIQGNNIKGTYSNGNSFSTYAPNDPNLIEKLSNKGVSISAAPIDEKMPSLFGVLLSWFPMLLLIAVWIFFMRQMQGGKGGAMGFGRSKAKMMNELKGKVTFNDVAGVEEAKEEVEEIVEFLKDPKKFSRLGGKIPRGALLVGPPGTGKTLLARAIAGEAGVPFFTISGSDFVEMFVGVGASRVRDMFEQGKKNSPCIIFIDEIDAVGRSRGAGLGGGNDEREQTLNQLLVEMDGFDTNEGVIIIAATNRPDVLDPALLRPRKDLIDQVVVSNP

SEQ ID NO: 147103 - protein, 281 aa, Unknown
  Bacterial polypetide isolated from the Sargasso Sea
SGRAMGFGKSRAKLLNENKDKVTFLDVAGIDEAKSELEEIVEFLKDPTKFQRLGGKIPKGALLVGPPGTGKTLLARAIAGEANVPFFSISGSDFVEMFVGVGASRVRDMFEQGRKSAPCIIFIDEIDAVGRHRGAGLGGGNDEREQTLNQLLVEMDGFDSTQGVILIAATNRPDVLDPALLRPGRFDRQVVVPNPDIVGRTKILEVHTRKLALAPDVDIKVIARGTPGFSGADLANLSNEAALLAARRNKRLVTMLDFEDAKDKVMMGAERRSMVMTLKEK

SEQ ID NO: 147104 - protein, 308 aa, Unknown
  Bacterial polypetide isolated from the Sargasso Sea
VQRLRVDLPGLTPELITNLKNEGISFDVHPVKTTPPALGIFGNLLFPAILIGGLILLARRSNGMPGGPGQAMQFGKSKARFAMDADTGVVFDDVAGVNEAKEDLEEVVTFLKKPEKFTSVGARIPKGVLLVGPPGTGKTLLAKAIAGEAGVPFFSLAGSEFVEMFVGVGASRVRDLFKKAKENSPCLIFIDEIDAVGRQRGAGIGGGNDEREQTLNQLLTEMDGFEGNSGIIIIAATNRPDVLDSALMRPGRFDRQVTVDAPDIKGRLSILEVHSKNKTLQEDLTLESIARRTPGFTGADLANLLNEA

SEQ ID NO: 147105 - protein, 277 aa, Unknown
  Bacterial polypetide isolated from the Sargasso Sea
LGGKIPRGALLVGPPGTGKTLLAKAVAGEAQVPFFSLSGSDFVEMFVGVGASRVRDLFKKAKYKAPAIIFIDEIDAIGRARGKNQMTGSNDERENTLNQLLTEMDGFGTNDHVIVVAATNRADILDRALVRAGRFDRQIYVDLPELNERKEIFEVHLKPLKIDKELDLNFLAKQTPGFSGADIANMCNEAALIAARNDKKFVEKQDFLDAVDRIIGGLEKKNKIISKNEREVIAFHEAGHATVSWMLEHAAPLVKVTIVPRGKSLGAAWYLPEERQI

SEQ ID NO: 147106 - protein, 286 aa, Unknown
  Bacterial polypetide isolated from the Sargasso Sea
NFLNEVDAGRVVEVKIQGNNISGTLADGKNFTTYSPNYPDLVDKLSSKGVGIIASPQEDKMPSLLGILLSWFPMLLLIGVWIFFMRQMQGGKGGAMGFGRSKAKLLNEAQGKVTFNDVAGVEEAKEEVEEIVEFLKDPKKFSRLGGKIPKGALLIGPPGTGKTLLAKAIAGEANVPFFSISGSDFVEMFVGVGASRVRDMFEQGKKHSPCIIFIDEIDAVGRSRGAGLGGGNDEREQTLNQLLVEMDGFDTNEGIILIAATNRPDVLDPALLRPGRFDRQVVVGNL

SEQ ID NO: 147107 - protein, 274 aa, Unknown
  Bacterial polypetide isolated from the Sargasso Sea
FLSSLKDLHSVGAQIPRGVLLVGPPGTGKTLLAKAIAGEAGVPFFSLSGSEFVEMFVGVGASRVRDLFKRAKENSPCLIFIDEIDAVGRQRGAGIGGGNDEREQTLNQLLTEMDGFEGNSGIIIIAATNRPDVLDSALMRPGRFDRQVTVDAPDISGRLSILKVHSRNKKLEKDLTLESIARRTPGFTGADLANLLNEAAILTARRRKNHIGLSEIDDAVDRIIAGMEGTPLVDGRSKRLIAYHEVGHALIGSLVKDHDPVQKVTVIPRGQAQG

SEQ ID NO: 147108 - protein, 280 aa, Unknown
  Bacterial polypetide isolated from the Sargasso Sea
LMNFLPVILIIGFWLFIMRQMQGGGGGAKGAMSFGKSRAKLQGEDQIKVTFADVAGCDEAKEEVGELVDFLRDPTKFTKLGGKIPRGVLMVGPPGTGKTLLARAIAGEAKVPFFSISGSDFVEMFVGVGASRVRDMFEQAKKQAPCIIFIDEIDAVGRHRGAGLGGGHDEREQTLNQLLVEMDGFEGGEGVIVIAATNRPDVLDPALLRPGRFDRQVVVGLADVKGREQILKVHMRKLPLADDVEPMVIARGTPGFSGADLANLCNEAALFAARGNEKEV

SEQ ID NO: 147109 - protein, 253 aa, Unknown
  Bacterial polypetide isolated from the Sargasso Sea
NKQKVTFNDVAGIDEAKQELEEVVSFLKDPHKFQRLGAKIPKGALLVGPPGTGKTLLARAIAGEAGVPFFSISGSDFVEMFVGVGASRVRDMFEQGKKNAPCIIFIDEIDAVGRHRGAGLGGGNDEREQTLNQLLVEMDGFEANEGVIIVAATNRPDVLDPALLRPGRFDRQVVVPAPDIIGRDKILKVHTRKIKMDKSVKTIAIARSTPGFSGADLANIVNEAALIAARKNKKIVTMDDFEDAKDKVMLEPQ

SEQ ID NO: 147110 - protein, 261 aa, Unknown
  Bacterial polypetide isolated from the Sargasso Sea
MNFKNLVMWAVIVLLSVGLFNMFQDPKKINSEKNKLPFSTFMSEVDAGRVVEVQIQGNNISGVLSDGETFNTYSPNYPNLVEKLSEQNISIVATPLEDKMPSLLGILLSWFPMLLLIGVWIFFMRQMQGGKGGAMGFGRSKAKLLNEAQGKVTFNDVAGVEEAKEEVEEIVEFLKDPKKFSRLGGKIPKGALLIGPPGTGKTLLAKAIAGEANVPFFSISGSDFVEMFVGVGASRVRDMFEQGKKHSPCIIFIDEIDAVGR

SEQ ID NO: 147111 - protein, 290 aa, Unknown
  Bacterial polypetide isolated from the Sargasso Sea
VVEITIQGNNIFGVLSNGSSFNTYSPNYPNLVEKLSEKGVSIVATPTEDKMPSLLGILLSWFPMLLLIGVWIFFMRQMQGGKGGAMGFGRSKAKLLNEAHGKVTFNDVAGVEEAKEEVEEIVEFLKDPKKFSRLGGKIPKGALLIGPPGTGKTLLAKAIAGEANVPFFSISGSDFVEMFVGVGASRVRDMFEQGKKHSPCIIFIDEIDAVGRSRGAGLGGGNDEREQTLNQLLVEMDGFDTNEGIILIAATNRPDVLDPALLRPGRFDRQVVVSNPDIIGREAILKVHVK

SEQ ID NO: 147112 - protein, 292 aa, Unknown
  Bacterial polypetide isolated from the Sargasso Sea
YPDLVNKLSESGIKIIAEPAERSMHPILSVLLSWFPMLLLIGVWIFFMRQMQSGGGKAMGFGKSKAKLLNEAVGKVTFDDVAGIDEAKQELEEVVEFLKDPKKFSRLGGKIPTGALLVGPPGTGKTLLARAIAGEANVPFFSISGSDFVEMFVGVGASRVRDMFEQGKKNAPCIIFIDEIDAVGRHRGAGLGGGNDEREQTLNQLLVEMDGFEANAGVIIVAATNRPDVLDPALLRPGRFDRQVTVSNPDIIGREKILKVHIKKIKVSPKFDAKIIARGTPGFSGADLANLV

SEQ ID NO: 147113 - protein, 312 aa, Unknown
  Bacterial polypetide isolated from the Sargasso Sea
LLSWFPMLLLIGVWIFFMRQMQGGKGGAMGFGRSKAKLLNEAQGKVTFNDVAGVEEAKEEVEEIVEFLKDPKKFSRLGGKIPKGALLIGPPGTGKTLLAKAIAGEANVPFFSISGSDFVEMFVGVGASRVRDMFEQGKKHSPCIIFIDEIDAVGRSRGAGLGGGNDEREQTLNQLLVEMDGFDTNEGIILIAATNRPDVLDPALLRPGRFDRQVVVGNPDIIGREQILKVHVKKINTGPDVKLRTIARGTPGFSGADLANLINESALLAARKNKRVVTMSDIEEAKDKVMMGAERRSMVMSEDEKKLTAYHE

SEQ ID NO: 147114 - protein, 307 aa, Unknown
  Bacterial polypetide isolated from the Sargasso Sea
LFNMFQDPERMKADNTKLPFSNFLNEVDEGRVVEVKIQGNNISGVLSNGEKFSTYSPNYPELVNKLSDKGVSIIASPQEDKMPSLLGILLSWFPMLLLIGVWIFFMRQMQGGKGGAMGFGRSKAKLLNEAQGKVTFNDVAGVEEAKEEVEEIVEFLKDPKKFSRLGGKIPKGALLIGPPGTGKTLLAKAIAGEANVPFFSISGSDFVEMFVGVGASRVRDMFEQGKKHSPCIIFIDEIDAVGRSRGAGLGGGNDEREQTLNQLLVEMDGFDTNEGIILIAATNRPDVLDPALLRPGRFDRQVVVGNP

SEQ ID NO: 147115 - protein, 300 aa, Unknown
  Bacterial polypetide isolated from the Sargasso Sea
EEAKQELEEVVEFLRDPQKFQRLGGKIPKGVLLVGPPGTGKTLLARAIAGEANVPFFTISGSDFVEMFVGVGASRVRDMFEQGKKNAPCIIFIDEIDAVGRHRGAGLGGGNDEREQTLNQLLVEMDGFEANEGVILIAATNRPDVLDPALLRPGRFDRQVVVPNPDVLGREQILKVHMRKVPLAPDVDAKIIARGTPGFSGADLANLVNEAALLAARKNKRLVTMAEFEDAKDKVMMGAERRSMVMTEDEKALTAYHEAGHALVGLSMPQHDPLHKVTIIPRGRALGVTMSLPERDKYGY

SEQ ID NO: 147116 - protein, 295 aa, Unknown
  Bacterial polypetide isolated from the Sargasso Sea
LLSWFPMLLLIAVWIFFMRQMQGGKGGAMGFGKSKAKMMNELKGKVTFNDVAGVEEAKEEVEEMVEFLKDPKKFSRLGGKIPRGALLVGPPGTGKTLLARAIAGEAGVPFFTISGSDFVEMFVGVGASRVRDMFEQGKKNSPCIIFIDEIDAVGRSRGAGLGGGNDEREQTLNQLLVEMDGFDTNEGVIIIAATNRPDVLDPALLRPGRFDRQVVVSNPDIIGREKILKVHVKKIKMAPDVNLRTIARGTPGFSGADLANIVNEAALLAARKNKRIVTLLEFEEAKDKVMMGAER

SEQ ID NO: 147117 - protein, 300 aa, Unknown
  Bacterial polypetide isolated from the Sargasso Sea
QGSIGVKNNIIFSEFLSEVENGRVVQVEIQGKNIKGVFSNGKTFITYAPDDPNLIQKLSDKGVSISASPIEEKMPSLLGILLSWFPMLLLIAVWIFFMRQMQGGKGGAMGFGKSKAKMMNELKGKVTFNDVAGVEEAKEEVEEVVEFLRDPRKFSRLGGKIPRGCLLVGPPGTGKTLLARAIAGEAGVPFFTISGSDFVEMFVGVGASRVRDMFEQGKKHSPCIIFIDEIDAVGRSRGAGLGGGNDEREQTLNQLLVEMDGFDTNEGVIIIAATNRPDVLDPSFVKTQEDLDRPSSCSNP

SEQ ID NO: 147118 - protein, 300 aa, Unknown
  Bacterial polypetide isolated from the Sargasso Sea
  misc_feature (288)..(288): Xaa can be any naturally occurring amino acid
SSIVAAPQEDKMPSLLGILLSWFPMLLLIGVWIFFMRQMQGGKGGAMGFGRSKAKLLNEAQGKVTFNDVAGVEEAKEEVEEIVEFLKDPKKFSRLGGKIPKGALLIGPPGTGKTLLAKAIAGEANVPFFSISGSDFVEMFVGVGASRVRDMFEQGKKHSPCIIFIDEIDAVGRSRGAGLGGGNDEREQTLNQLLVEMDGFDTNEGIILIAATNRPDVLDPALLRPGRFDRQVVVGNPDIIGREAILKVHVKKISTGPDVKLRTIARGTPGFSGADLANLINESALLAXRKNKRVVTMSDI

SEQ ID NO: 147119 - protein, 148 aa, Unknown
  Bacterial polypetide isolated from the Sargasso Sea
VAGCDQSKLELEEVVEFLRSPDKFEAVGAQCPRGVILEGPPGTGKTLLARAVAGEAGVPFISTSGSEFVEMFVGVGASRIRSMFGDAKKNAPCIIFIDEIDAIGRQRASGGGFQGGNDEREQTLNQILTEMDGFKGNSGVVRSRRPVV

SEQ ID NO: 147120 - protein, 285 aa, Unknown
  Bacterial polypetide isolated from the Sargasso Sea
FTNEIGSLSVETNEQTLIYDYIKNKDVEKIEIIQNKNIARIFIKEESLSEHRHEAVRKPIFGEGLNKGPHYFLKIGTSQEFRDRLDEAQENFHFTKNEWAQIFYNNEQSIWDSFWAWMPFIFLIFIWIFFMRRMSGGSTGGGPGSQIFNIGKSQAQLFDKESEVKTTFCDVAGLEGAKEEVQEIVNFLKNPEKYTKLGGKIPRGALLVGPPGTGKTLLAKAVAGEAQVPFFSLSGSDFVEMFVGVGASRVRDLFKKAKDKAPAIIFIDEIDAIGRARGKNQMTGS

SEQ ID NO: 147121 - protein, 320 aa, Unknown
  Bacterial polypetide isolated from the Sargasso Sea
PSLLGILLSWFPMLLLIGVWIFFMRQMQGGKGGAMGFGRSKAKLLNEAQGKVTFNDVAGVEEAKEEVEEIVEFLKDPKKFSRLGGKIPKGALLIGPPGTGKTLLAKAIAGEANVPFFSISGSDFVEMFVGVGASRVRDMFEQGKKHSPCIIFIDEIDAVGRSRGAGLGGGNDEREQTLNQLLVEMDGFDTNEGIILIAATNRPDVLDPALLRPGRFDRQVVVANPDIIGREAILKVHVKKISTGPDVKLRTIARGTPGFSGADLANLINESALLAARKNKRVVTMSDVEEAKDKVMMGAERRSMVMSEDEKKLTAYHEGG

SEQ ID NO: 147122 - protein, 261 aa, Unknown
  Bacterial polypetide isolated from the Sargasso Sea
VAGVEEAKEEVEEVVEFLKDPKKFSRLGGKIPRGCLLVGPPGTGKTLLARAIAGEAGVPFFTISGSDFVEMFVGVGASRVRDMFEQGKKHSPCIIFIDEIDAVGRSRGAGLGGGNDEREQTLNQLLVEMDGFDTNEGVIIIAATNRPDVLDPALLRPGRFDRQVVVSLPDIIGREKILKVHAKKISMTPDINLRTVARGTPGFSGADLANLVNEAALLAARKNKRVVTHTEFEEAKDKVMMGAERRSMVMTEEEKKLTAYH

SEQ ID NO: 147123 - protein, 289 aa, Unknown
  Bacterial polypetide isolated from the Sargasso Sea
IEGILSDGTAFSTYAPNDPNLVEKLTSKGVSITASPVEDKMPSILGVLLSWFPMLLLIGVWIFFMRQMQGGRGGAMGFGKSKAKLLSEARGKITFNDVAGIDEAKEEVEEIIEFLKDPRKFRRLGGKIPKGALLIGPPGTGKTLLARAIAGEANVPFFTISGSDFVEMFVGVGASRVRDMMDQGKKNAPCIIFIDEIDAVGRSRGAGLGGGNDEREQTLNQLLVEMDGFDTNEGVIIIAATNRPDVLDPALLRPGRFDRQVVVPNPDIVGREAILKVHIKKINIGPDGK

SEQ ID NO: 147124 - protein, 310 aa, Unknown
  Bacterial polypetide isolated from the Sargasso Sea
MNLKNLVMWVIIVLLSVGLFNMFQDPKKINAEKNKIPFSSFLSEVEAGRVIEVQIQGNNITGVLADGKTFNTYSPNYPELVEKLSSQNINIVATPLEDKMPSLLGILLSWFPMLLLIGVWIFFMRQMQGGKGGAMGFGRSKAKLLNEAQGKVTFNDVAGVEEAKEEVEEIVEFLKDPKKFSRLGGKIPKGALLIGPPGTGKTLLAKAIAGEANVPFFSISGSDFVEMFVGVGASRVRDMFEQGKKHSPCIIFIDEIDAVGRSRGAGLGGGNDEREQTLNQLLVEMDGFDTNEGIILIAATNRPDVWTQPT

SEQ ID NO: 147125 - protein, 259 aa, Unknown
  Bacterial polypetide isolated from the Sargasso Sea
QSGVKIIAEPSDRSMHPILSVLLSWFPMLLLIGVWIFFMRQMQSGGGKAMGFGKSKAKLLNEAIGKITFDDVAGIDEAKQELEEVVEFLKDPKKFSRLGGKIPTGALLVGPPGTGKTLLARAIAGEANVPFFSISGSDFVEMFVGVGASRVRDMFEQGKKNAPCIIFIDEIDAVGRHRGAGLGGGNDEREQTLNQLLVEMDGFEANAGVIIVAATNRPDVLDPALLRPGRFDRQITVSNPDIIGRDKILKVHIKKIKVS

SEQ ID NO: 147126 - protein, 308 aa, Unknown
  Bacterial polypetide isolated from the Sargasso Sea
PSLLGVLLSWFPMLLLIAVWIFFMRQMQGGKGGAMGFGKSKAKMMNELKGKVTFNDVAGVEEAKEEVEEVVEFLKDPKKFSRLGGKIPRGCLLVGPPGTGKTLLARAIAGEAAVPFFTISGSDFVEMFVGVGASRVRDMFEQGKKNSPCIIFIDEIDAVGRSRGAGLGGGNDEREQTLNQLLVEMDGFDTNEGVIIIAATNRPDVLDPALLRPGRFDRQVVVSNPDIIGREKILKVHAKKISMAPDVNLRTVARGTPGFSGADLANLVNESALLAARKNKRIVTNQEFEEAKDKVMMGAERRIMVMTE

SEQ ID NO: 147127 - protein, 283 aa, Unknown
  Bacterial polypetide isolated from the Sargasso Sea
YNMFKNPQGSIGVKNNIIFSEFLSEVDNGRVVQVEIQGKNIKGVFSNGKSFTTYAPDDPNLIQKLSDKGVSISASPLEEKMPSLLGILLSWFPMLLLIAVWIFFMRQMQGGKGGAMGFGKSKAKMMNELKGKVTFNDVAGVEEAKEEVEEVVEFLKDPRKFSRLGGKIPRGCLLVGPPGTGKTLLARAIAGEAGVPFFTISGSDFVEMFVGVGASRVRDMFEQGKKHAPCIIFIDEIDAVGRSRGAGLGGGNDEREQTLNQLLVEMDGFDTNEGVIIIAATNR

SEQ ID NO: 147128 - protein, 285 aa, Unknown
  Bacterial polypetide isolated from the Sargasso Sea
WIFIMRRMQGGVGGNSLFNFGRSRARLWVEDKPKINFDRVAGCQEAKQELSEIITFLKNPEQYQKLGGRIPKGVLLLGPPGTGKTLLARAVAGEAGVPFFSLSGADFVEMFVGVGASRVRDLFEQGKKNAPSIIFIDEIDAVGRHRGAGLGGGHDEREQTLNALLVEMDGFESTTNIILIAATNRPDVLDSALLRPGRFDRQVVVDIPDLRGRKGIFKVHTQDIPLAKDVNIEILAKGTPGLVGADIENLVNEASLLAARDGKSKVSMEDFEAAKDKVMMGVERK

SEQ ID NO: 147129 - protein, 300 aa, Unknown
  Bacterial polypetide isolated from the Sargasso Sea
LKDPKKFSRLGGKIPKGALLIGPPGTGKTLLAKAIAGEANVPFFSISGSDFVEMFVGVGASRVRDMFEQGKKHSPCIIFIDEIDAVGRSRGAGLGGGNDEREQTLNQLLVEMDGFDTNEGIILIAATNRPDVLDPALLRPGRFDRQVVVSNPDIIGREAILKVHVKKISTGPDVKLRTIARGTPGFSGADLANLINESALLAARKNKRVVTMSDVEEAKDKVMMGAERRSMVMSEDEKRLTAYHEGGHAIVALNEKASDPIHKATIIPRGRALGMVMRLPEKNQLSVSREKMHSEYSSRN

SEQ ID NO: 147130 - protein, 307 aa, Unknown
  Bacterial polypetide isolated from the Sargasso Sea
LKDPKKFSRLGGKIPRGCLLVGPPGTGKTLLARAIAGEAGVPFFTISGSDFVEMFVGVGASRVRDMFEQGKKHSPCIIFIDEIDAVGRSRGAGLGGGNDEREQTLNQLLVEMDGFDTNEGVIIIAATNRPDVLDPALLRPGRFDRQVVVSNPDLLGREKILKVHAKKISMAPDVNLRTIARGTPGFSGADLANLVNEAALLAARKNKRIVTYMEFEEAKDKVMMGSERRSMVMSEEEKKLTAYHEAGHAIVTINEKAAYPIHKATIIPRGRALGMVMQLPERDEVSQTREQLHAQMAIAMGGRVAEE

SEQ ID NO: 147131 - protein, 321 aa, Unknown
  Bacterial polypetide isolated from the Sargasso Sea
MNQKFKTLILWALPILLVIALSYQFLSSSNVDSLKSNGTTVAPRNSAVARVSYGRFLDYINSGRVTSVDIFEGGRNAVIETIDSDLDNKVQRLRVDLPGLTPELINILKNEGISFDVHPIKTAPPALGILGNLLFPAILIGGLILLARRSNGMPGGPGQAMQFGKTKARFAMEAETGVVFDDVAGVNEAKQDLQEVVTFLKKPEKFTSVGARIPKGVLLVGPPGTGKTLLAKAIAGEAGVPFFSLSGSEFVEMFVGVGASRVRDLFKRAKENSPCLIFIDEIDAVGRQRGAGIGGGNDEREQTLNQLLTEMDGFEGNSGII

SEQ ID NO: 147132 - protein, 567 aa, Unknown
  Bacterial polypetide isolated from the Sargasso Sea
LDRKGITMKGQEAEESGFLTQIFISWFPMLLLIGVWIFFMRQMQGGGGKGAMSFGKSKAKLMSEDQIKTTFADVAGCDEAKEEVKELVDYLRDPTKFQKLGGRIPTGVLMVGPPGTGKTLLAKAIAGESKVPFFTISGSDFVEMFVGVGASRVRDMFEQAKKSAPCIIFIDEIDAVGRQRGAGLGGGHDEREQTLNQMLVEMDGFEGNEGIIVIAATNRPDVLDSALLRPGRFDRQVVVGLPDVRGREQILKVHMRKVPLSEDVKASVIARGTPGFSGADLANLVNEAALFAARGNRRVVGMEEFERAKDKIMMGAERRSMVMSEAEKEMTAYHEAGHAIVGCLVPEHDPVHKVTIIPRGRALGVTFFLPEADAISQSRRKLESQISVAYGGRLAEELIYGSDKVSTGASQDIKYATSIARNMVTQWGFSDKLGPLLYAEEEGEVFLGRSMGKAKAMSDETATVIDAEVKAFIDKNYGRAKQILLDNIDILHSMKDALMKYETIDSLQIDDLMNRREVRQPADWQADDNGSNDKGNGKGEPAVKVDEVVKNAPAEAELKDADESPVK

SEQ ID NO: 147133 - protein, 506 aa, Unknown
  Bacterial polypetide isolated from the Sargasso Sea
MNQRWRLLVLWLLPIAVVLLIGWQVVSNGGVNGVGPSGPTVAPRNAAVARMSYGRFLDYVEAGRVTAVDIYDGGRNAVVEAVDPDLDNRVQRLRVDLPGLAPELINTLKSEGISFDIHPPRTAPPALGLLGNLLFPLLLIGSLIFLARRNSGMPGGPGQAMQFGKSKARFMMEAETGVMFDDVAGVNEAKQELEEVVTFLKQPERFTSVGAQIPRGMLLVGPPGTGKTLLAKAIAGEAGVPFFSLSGSEFVEMFVGVGASRVRDLFKKAKENSPCLIFIDEIDAVGRQRGAGIGGGNDEREQTLNQLLTEMDGFEGNSGIIIIAATNRPDVLDSALMRPGRFDRQVTVDAPDIKGRLSILEVHCRNKKLKEELSLESIARRTPGFTGADLANLMNEAAILTARRRKEAIGLSEIDDAVDRIIAGMEGRPLTDGRSKRLIAYHEVGHALIGTLVKDHDPVQKVTLIPRGQAQGLTWFSPDEEQSLVTQSSTQGTHHGSSRGRAAEDV

SEQ ID NO: 147134 - protein, 378 aa, Unknown
  Bacterial polypetide isolated from the Sargasso Sea
MNFRNLAMWAVIVILTIGLYNMFKNPQGSVNQKNNIIFSEFLTQVDNGRVVQVEIQGKNIKGVMSNGEMFNTYAPDDPNLIQKLSDKGVSISASPLEEKMPSLFGVLLSWFPMLLLIAVWIFFMRQMQGGKGGAMGFGKSKAKMMNELKGKVTFNDVAGVEEAKEEVEEVVEFLKDPKKFSRLGGKIPRGCLLVGPPGTGKTLLARAIAGEAGVPFFTISGSDFVEMFVGVGASRVRDMFEQGKKHSPCIIFIDEIDAVGRSRGAGLGGGNDEREQTLNQLLVEMDGFDTNEGVIIIAATNRPDVLDPALLRPGRFDRQVVVSNPDLLGREKILKVHAKKISMAPDVNLRTIARGTPGFSGADLANLVNEAALLAARK

SEQ ID NO: 147135 - protein, 359 aa, Unknown
  Bacterial polypetide isolated from the Sargasso Sea
MNQKFKTLILWALPILLVIALSYQFLSSSNNDSLKSNGTTVAPRNSAVARVSYGRFLDYINSGRVTSVDIFEGGRNAVIETIDSDLDNKVQRLRVDLPGLTPELINILKNEGISFDVHPIKTAPPALGILGNLLFPAILIGGLILLARRSNGMPGGPGQAMQFGKTKARFAMEAETGVVFDDVAGVNEAKQDLQEVVTFLKKPEKFTSVGARIPKGVLLVGPPGTGKTLLAKAIAGEAGVPFFSLSGSEFVEMFVGVGASRVRDLFKRAKENSPCLIFIDEIDAVGRQRGAGIGGGNDEREQTLNQLLTEMDGFEGNSGIIIIAATNRPDVLDSALMRPGRFDRQVNGDAPDIKGRLSI

SEQ ID NO: 147136 - protein, 336 aa, Unknown
  Bacterial polypetide isolated from the Sargasso Sea
MNLKNLVMWAVIVFLTIGLYNMFKNPQGTITQKNNIIFSEFLSEVDNGRVVQVEIQGNNIKGIMSNGEKFTTYSPNDPNLIEKLSDKGVSISASPLEEKMPSLLGVLLSWFPMLLLIAVWIFFMRQMQGGKGGAMGFGRSKAKMMNELKGKVTFNDVAGVEEAKEEVEEVVEFLKDPKKFSRLGGKIPRGCLLVGPPGTGKTLLARAIAGEAAVPFFTISGSDFVEMFVGVGASRVRDMFEQGKKHSPCIIFIDEIDAVGRSRGAGLGGGNDEREQTLNQLLVEMDGFDTNEGVIIIAATNRPDVLDPALLRPGRFDRQVVVSNPDIIGREKILKV

SEQ ID NO: 147137 - protein, 399 aa, Unknown
  Bacterial polypetide isolated from the Sargasso Sea
QGEVLKVEIQGNNINGVYANGKSFKTYSPNDPNLIEKLSEKGVSISAAPIEEKMPSLFGVLLSWFPMLLLIAVWIFFMRQMQGGKGGAMGFGRSKAKMMNEMKGKVTFNDVAGVEEAKEEVEEIVEFLKDPKKFSRLGGKIPRGALLVGPPGTGKTLLARAIAGEAGVPFFTISGSDFVEMFVGVGASRVRDMFEQGKKNSPCIIFIDEIDAVGRSRGAGLGGGNDEREQTLNQLLVEMDGFDTNEGVIIIAATNRPDVLDPALLRPGRFDRQVVVSNPDIIGREKILKVHVKKIKMAPDVNLRTIARGTPGFSGADLANLVNESALLAARKNKRIVTLNEFEEAKDKVMMGAERRSMVMTEDEKKLTAYHEGGHALVSFNMPSYDPIHKATIIPRGRA

SEQ ID NO: 147138 - protein, 419 aa, Unknown
  Bacterial polypetide isolated from the Sargasso Sea
MKNFSKNIFVWIIISLILLGLFNVFKNSQRDYSSVNYTYSTLLDKAQNGEIKSVEIQGNNIFGQTMDGVDFTTYAPRDPNLIETLSDNEVAINAKPEQSGMHPLLSIFVSWFPMLLLIGVWIFFMRQMQSGKGGGALGFGRSKAKLLNENKQKVTFNDVAGIDEAKQELEEVVSFLKDPHKFQRLGAKIPKGALLVGPPGTGKTLLARAIAGEAGVPFFSISGSDFVEMFVGVGASRVRDMFEQGKKNAPCIIFIDEIDAVGRHRGAGLGGGNDEREQTLNQLLVEMDGFEANEGVIIVAATNRPDVLDPALLRPGRFDRQVVVPAPDIIGRDKILKVHTRKIKMDKSVKTIAIARSTPGFSGADLANIVNEAALIAARKNKKIVTMDDFEDAKDKVMLGTQNKSKIISDGEKEVIAYH

SEQ ID NO: 147139 - protein, 440 aa, Unknown
  Bacterial polypetide isolated from the Sargasso Sea
GPPGTGKTLLARAIAGEAGVPFFTISGSDFVEMFVGVGASRVRDMFEQGKKHSPCIIFIDEIDAVGRSRGAGLGGGNDEREQTLNQLLVEMDGFDTNEGVIIIAATNRPDVLDPALLRPGRFDRQVVVSNPDIIGREKILKVHAKKITMSPDVNLRTVARGTPGFSGADLANLVNEAALLAARKNKRIVTYQEFEEAKDKVMMGAERRSMVMTEDEKKLTAYHEGGHALVSFNMPNYDPIHKATIIPRGRALGMVMNLPERDKHGHSIKYLKARLAVCFGGRVAEEIIFGKDNISTGAGGGSGSDINQATQLARAMVTKYGMSEELGPVEYGENQEEVFLGRSVTQTQSVSEAVAQKIDKEIRKLVDEGYNQARKILTEKIDDLHKVAKALLTYETLTGEEIENIINKNIYPTNKEDAKSDDSDQSSALGSIGLKPKIVH

SEQ ID NO: 147140 - protein, 450 aa, Unknown
  Bacterial polypetide isolated from the Sargasso Sea
SRLGGKIPRGCLLVGPPGTGKTLLARAIAGEAGVPFFTISGSDFVEMFVGVGASRVRDMFEQGKKHSPCIIFIDEIDAVGRSRGAGLGGGNDEREQTLNQLLVEMDGFDTNEGVIIIAATNRPDVLDPALLRPGRFDRQVVVSLPDIIGREKILKVHAKKISMAPDVNLRTVARGTPGFSGADLANLVNEAALLAARKNKRIVTFNEFEEAKDKVMMGAERRSMVMTEEEKRLTAYHEAGHAIVTLNEKAAYPIHKATIIPRGRALGMVMQLPERDELSQTREQLHAQMAIAMGGRVAEEIIFGDDKVTTGASSDIEQATKRARAMVMRAGLSKELGPVAYGENEEEVFLGRSVARQQNMSEETARKVDIEIRKFVDKGYERAKKVLNEKIEDLHKLAKALLTYETLTGTEIEDLINKNVYPTNKEELRSKEEDSGSALGSIGLKPKIVH

SEQ ID NO: 147141 - protein, 515 aa, Unknown
  Bacterial polypetide isolated from the Sargasso Sea
SLFGVLLSWFPMLLLIAVWIFFMRQMQGGKGGAMGFGRSKAKMMNEVKGKVTFNDVAGVEEAKEEVEEVVEFLKDPRKFSRLGGKIPRGCLLVGPPGTGKTLLARAIAGEAGVPFFTISGSDFVEMFVGVGASRVRDMFEQGKKHSPCIIFIDEIDAVGRSRGAGLGGGNDEREQTLNQLLVEMDGFDTNEGVIIIAATNRPDVLDPALLRPGRFDRQVVVSNPDIIGREKILKVHAKKITMSPDVNLRTVARGTPGFSGADLANLVNEAALLAARKNKRIVTYQEFEEAKDKVMMGAERRSMVMTEDEKKLTAYHEGGHALVSFNMPNYDPIHKATIIPRGRALGMVMNLPERDKHGHSIKYLKARLAVCFGGRVAEEIIFGKDNISTGAGGGSGSDINQATQLARAMVTKYGMSEELGPVEYGENQEEVFLGRSVTQTQSVSEAVAQKIDKEIRKLVDEGYNQARKILTEKIDDLHKVAKALLTYETLTGEEIENIINKNIYPTNKDDAKSDD

SEQ ID NO: 147142 - protein, 525 aa, Unknown
  Bacterial polypetide isolated from the Sargasso Sea
MLLLIGVWIFFMRQMQGGRGGAMGFGRSKAKLLTENKNKVTFNDVAGIDEAKEELVEIVEFLKDPRKFQKLGGRIPKGALLIGPPGTGKTLLARAVAGEAGVPFFTISGSDFVEMFVGVGASRVRDMFEQGRRNAPCIIFIDEIDAVGRSRGAGLGGGNDEREQTLNQILVEMDGFDTQEGIILVAATNRPDVLDPALLRPGRFDRQVVVPNPDILGREAILKVHIKKISVAPDVDIRTIARGTPGFSGADLANIVNEAALLAARKNKKIVTMVDFEEAKDKVMMGSERRSLVMSQEEKELTAYHEGGHAVVALNQSASDPIHKATIIPRGRALGMVMRLPERDQLSLPREKMLADITVAMGGRVAEEIIFGDKKVTSGASSDIEMATKMARNMVTKFGMSEKLGPLQYGENEEEVFLGRSVQRHQNVSEETAKLIDSEIRQIVDSCYDLAKKILNEKIDDLHALAKGLIEYETLNGDEITTLLKEGKIDRSNPEEEINNAGPSVPKSGKSAPVGPSFKPKPQTS

SEQ ID NO: 147143 - protein, 497 aa, Unknown
  Bacterial polypetide isolated from the Sargasso Sea
MNLKNLVMWVIIVLLSVGLFNMFQDPNKINSEKNSLPFSSFLSEVDAGRVVEVQIQGNNISGVLADGKTFKTFSPNYPELVDKLSSNGVSINATPLEDKMPSLLGILLSWFPMLLLIGVWIFFMRQMQGGKGGAMGFGRSKAKLLNEAQGKVTFNDVAGVEEAKEEVEEIVEFLKDPKKFSRLGGKIPKGALLIGPPGTGKTLLAKAIAGEANVPFFSISGSDFVEMFVGVGASRVRDMFEQGKKHSPCIIFIDEIDAVGRSRGAGLGGGNDEREQTLNQLLVEMDGFDTNEGIILIAATNRPDVLDPALLRPGRFDRQVVVGNPDIIGREAILKVHVKKINIGPDVKLRTIARGTPGFSGADLANLINESALLAARKNKRVVTMSDVEEAKDKVMMGAERRSMVMSEDEKKLTAYHEGGHAIVALNEKASDPIHKATIIPRGRALGMVMRLPERDQLSVTREKMHADISVAMGGRIAEEIIFGHDKVTSGASSDID

SEQ ID NO: 147144 - protein, 311 aa, Unknown
  Bacterial polypetide isolated from the Sargasso Sea
MNLRNLLMWGLIVLLSVGLFNLFQNPNKTNDQANNIAFSKFLKEVDNGRVVQVKIQGNNISGVLSDGSKFITYSPNYPGLVEKLSEKNVNIVATPVEDKMPSLLGVLLSWFPMLLLIGVWIFFMRQMQGGRGGAMGFGRSKAKLLTEAQGKVTFNDVAGIEEAKEEVEEIVEFLKDPKKFRRLGGKIPKGALLIGPPGTGKTLLAKAIAGEANVPFFTISGSDFVEMFVGVGASRVRDMFEQGKKHAPCIIFIDEIDAVGRSRGAGLGGGNDEREQTLNQLLVEMDGFDTNEGIILIAATNRPDVLDPALL

SEQ ID NO: 147145 - protein, 623 aa, Unknown
  Bacterial polypetide isolated from the Sargasso Sea
MWGIIVFLTIGLYNMFKSPQSNPRGGNQIIFSDFLTSVDNGEVVKVEIQGKNIKGVYSNGNSFSTYSPNDPNLIEKLSEKGVSISAAPLEEKMPSLFGVLLSWFPMLLLIAVWIFFMRQMQGGRGGAMGFGKSKAKMMNELKGKVTFNDVAGVEEAKEEVEEIVEFLKDPKKFSRLGGKIPRGALLVGPPGTGKTLLARAIAGEAAVPFFTISGSDFVEMFVGVGASRVRDMFEQGKKNSPCIIFIDEIDAVGRSRGAGLGGGNDEREQTLNQLLVEMDGFDTNEGVIIIAATNRPDVLDPALLRPGRFDRQVVVSNPDIIGREKILKVHVKKIKMAPDVNLRTVARGTPGFSGADLANLVNEAALLAARKNKRIVTLVEFEEAKDKVMMGSERRSMVMTEEEKTLTAYHEAGHAIVTINESAAYPIHKATIIPRGRALGMVMQLPERDELSQTREQLHAQLAIAMGGRVAEEIIFGEDKVTTGASSDIEQATKRARAMVMRAGLSKELGPVAYGENEEEVFLGRSVARQQNMSEETAQKVDSEIRKIVDKGYERARKVLTEKIDDLHKLAKALLTYETLSGEEIENLINKNVYPKDKEDIKVEDNDKGSALSSLGLKPKIVH

SEQ ID NO: 147146 - protein, 532 aa, Unknown
  Bacterial polypetide isolated from the Sargasso Sea
MNLKNLAMWGIIVFLTIGLYNMFKNPQSNVRGGNQIIFSDFLSSVDDGEVLKVEIQGNNIKGTYSNGNSFSTYAPNDPNLIEKLSEKGVSISAAPLDEKMPSLFGVLLSWFPMLLLIAVWIFFMRQMQGGKGGAMGFGKSKAKMMNELKGKVTFNDVAGVEEAKEEVEEMVEFLKDPKKFSRLGGKIPRGALLVGPPGTGKTLLARAIAGEAGVPFFTISGSDFVEMFVGVGASRVRDMFEQGKKNSPCIIFIDEIDAVGRSRGAGLGGGNDEREQTLNQLLVEMDGFDTNEGVIIIAATNRPDVLDPALLRPGRFDRQVVVSNPDIIGREKILKVHVKKIKMAPDVNLRTIARGTPGFSGADLANIVNEAALLAARKNKRIVTLLEFEEAKDKVMMGAERRSMVMTEDEKKLTAYHEGGHALVSFNMPSYDPIHKATIIPRGRALGMVMNLPERDKHGYSIKYLKARLAVCFGGRVAEELIFGKDNISTGAGGGNGSDINQATQLARAMVTKYGMSEEMGPVEYGENQEEG

SEQ ID NO: 147147 - protein, 630 aa, Unknown
  Bacterial polypetide isolated from the Sargasso Sea
MNFKNLAMWAVIVFLTIGLYNMFKGPQNSAKGSDTIIFSQFLTEVDNGRVTQVQIQGNNIKGTLSNGKDFITYAPNDPNLIEKLTSKGVSISASPLDEKMPSLFGVLLSWFPMLLLIAVWIFFMRQMQGGKGGAMGFGKSKAKMMNELKGKVTFNDVAGVEEAKEEVEEVVEFLKDPKKFSRLGGKIPRGCLLVGPPGTGKTLLARAIAGEAGVPFFTISGSDFVEMFVGVGASRVRDMFEQGKKHSPCIIFIDEIDAVGRSRGAGLGGGNDEREQTLNQLLVEMDGFDTNEGVIIIAATNRPDVLDPALLRPGRFDRQVVVSNPDIIGREKILKVHVKKISMAPDVNLRTIARGTPGFSGADLANLVNEAALLAARKNKRIVTYNEFEEAKDKVMMGAERRSMVMTEEEKKLTAYHEAGHAIVTINEKAAHPIHKATIIPRGRALGMVMQLPERDELSQTREQLHAQMAIAMGGRVAEEIIFGDDKVTTGASSDIEQATKRARAMVMKAGLSKELGPVAYGENEEEVFLGRSVARQQNMSEETARKVDSEIRLIVDKGYDRAKKILTEKIDDLHKLAKALLTYETLTGDEIENLVNKNIYPSNKEDLKTDDDKQDSALGSIGLKPKIVH

SEQ ID NO: 147148 - protein, 536 aa, Unknown
  Bacterial polypetide isolated from the Sargasso Sea
MNFKNLAMWGIIVLLTIGLYNMFKNPQRSIGTKNNIIFSEFLSEVENGRVVQVEIQGKNIKGVLSNGNMFNTYAPDDPNLIQKLSDKGVSISASPLEEKMPSLLGILLSWFPMLLLIAVWIFFMRQMQGGKGGAMGFGKSKAKMMNELKGKITFNDVAGVEEAKEEVEEVVEFLKDPRKFSRLGGKIPRGCLLVGPPGTGKTLLARAIAGEAGVPFFTISGSDFVEMFVGVGASRVRDMFEQGKKHSPCIIFIDEIDAVGRSRGAGLGGGNDEREQTLNQLLVEMDGFDTNEGVIIIAATNRPDVLDPALLRPGRFDRQVVVSNPDIIGREKILKVHAKKISMAADVNLRTVARGTPGFSGADLANLVNEAALLAARKNKRIVTNQEFEEAKDKVMMGAERRSMVMTEEEKKLTAYHEAGHAIVTINEKAAYPIHKATIIPRGRALGMVMQLPERDEVSQTREQLHAQMAIAMGGRVAEEIIFGEDKVTTGAASDIEQATKRARAMVMRAGLSKELGPVAYGENEEEVFLGRSVAR

SEQ ID NO: 147149 - protein, 604 aa, Unknown
  Bacterial polypetide isolated from the Sargasso Sea
MYVALGLLIFIGVQQYNQTINEPEASTFSEFKELINNGEVVEATIKEQSNTVHFKTKNDDKVFQTEYPEGFEGEIFQILVDQNIVLTTDTEPAGFQEYFIAFLPWLFIAGFMFFMFSQVRSNGNQVMQFGKSKAKEVDEQLPKVTFKDVAGAEEAKEELEEIKEFLKSPEKFNNLGAKIPKGVLLVGPPGTGKTLLARAVAGESEVPFYSISGSDFVEMFVGVGASRVRDLFKKAKESAPSIIFIDEIDAVGRMRGAGLGGGHDEREQTLNQLLVEMDGFESNQGVILMAATNRPDVLDPALLRPGRFDRQVIVDRPDLNGRTEILKVHAKDKPLAKNINLKTVAKQTPGFTGADLANLLNEAALLTARKNKKKVSIQDIENSIDRVLAGPEKKSRLMSDQEKLIIAYHETGHALVGWALPNADPIHKVTIIPRGRALGYTQALPEGEKYLTSKAELKDRLAMLMGGRVAEEIIFADPTTGASNDIEKATEIARKMVMEFGMSEKLGPMLYGKGSNEVFLGRDYGRQQDYSDEVASSIDDEVKSLLSDAHIIAGKILKKFKKQMEIMVKVLIEKETIDRDEVAKIFKSVNKVKIKGTGPTLKLA

SEQ ID NO: 147150 - protein, 462 aa, Unknown
  Bacterial polypetide isolated from the Sargasso Sea
NIFNGAFEDGRSFKTYAANDPTLVDRLNDRGVNISAAPLDDGYPSLLGVLISWFPMLLLIGVWIFFMRQMQGGRGGAMGFGRSKAKLLTENKNKVTFNDVAGIDEAKEELVEIVEFLKDPRKFQKLGGRIPKGALLIGPPGTGKTLLARAVAGEAGVPFFTISGSDFVEMFVGVGASRVRDMFEQGRRNAPCIIFIDEIDAVGRSRGAGLGGGNDEREQTLNQILVEMDGFDTQEGIILVAATNRPDVLDPALLRPGRFDRQVVVPNPDILGREAILKVHIKKISVAPDVDIRTIARGTPGFSGADLANIVNEAALLAARKNKKIVTMVDFEEAKDKVMMGSERRSLVMSQEEKELTAYHEGGHAVVALNQSASDPIHKATIIPRGRALGMVMRLPERDQLSLPREKMLADITVAMGGRVAEEIIFGDKKVTSGASSDIEMATKMARNMVTKFGMSEKLGPL

SEQ ID NO: 147151 - protein, 480 aa, Unknown
  Bacterial polypetide isolated from the Sargasso Sea
AGVEEAKDDLQEIVEFLKDPSKFQRLGGKIPKGALLVGPPGTGKTLLARAIAGEANVPFFTISGSDFVEMFVGVGASRVRDMFEQAKKNAPCIIFIDEIDAVGRHRGAGLGGGNDEREQTLNQLLVEMDGFETNEGIILIAATNRPDVLDPALLRPGRFDRQVVVPNPDIIGREKILKVHTRKVPMSSDVDIRTVARGTPGFSGADLANIVNEAALLAARRGKRMVTHTEFEDAKDKVMMGPERRSMVMTDDDKKLTAYHEAGHALVSINIESSDPIHKATIIPRGRALGMVMRLPERDQISITREKMYANLAVAMGGRIAEEIIFGHDKVTSGASSDIQQATQLARAMVMQYGMSDKLGFLTYGDNEDEVFLGRSVARQQNMSEEIHKLVDSEVRTIVDESYAKAEKILKDKEKDLHTIAQGLLEYETLTGDEINALLGGVKPSRNDDSDKSDSENLSGSVPKTGKKTDSNSKPGLQGA

SEQ ID NO: 147152 - protein, 367 aa, Unknown
  Bacterial polypetide isolated from the Sargasso Sea
MNFRNITLWFFIALIVFGLFNLFSNTSGERNVIDLTYSQFLDEVEAGSVKDVVIRGSNINGAFDDGRSFKTYAANDPTLVDRLNERGVNISAAPLDDGYPSLLGVLISWFPMLLLIGVWIFFMRQMQGGRGGAMGFGRSKAKLLTENKNKVTFNDVAGIDEAKEELVEIVDFLKDPRKFQKLGGRIPKGALLIGPPGTGKTLLARAVAGEAGVPFFTISGSDFVEMFVGVGASRVRDMFEQGRRNSPCIIFIDEIDAVGRSRGAGLGGGNDEREQTLNQILVEMDGFDTQEGIILVAATNRPDVLDPALLRPGRFDRQVVVPNPDIMGREAILKVHIKKISVAPDVDIRTIARGTPGFSGADLANIV

SEQ ID NO: 147153 - protein, 375 aa, Unknown
  Bacterial polypetide isolated from the Sargasso Sea
MTIGLYNMFKNPQGSVNQKNNIIFSEFLTQVDNGRVVQVEIQGKNIKGVMSNGEMFNTYAPDDPNLIQKLSDKGVSISASPLEEKMPSLFGVLLSWFPMLLLIAVWIFFMRQMQGGKGGAMGFGKSKAKMMNELKGKVTFNDVAGVEEAKEEVEEVVEFLKDPKKFSRLGGKIPRGCLLVGPPGTGKTLLARAIAGEAGVPFFTISGSDFVEMFVGVGASRVRDMFDQGKKHSPCIIFIDEIDAVGRSRGAGLGGGNDEREQTLNQLLVEMDGFDTNEGVIIIAATNRPDVLDPALLRPGRFDRQVVVSNPDLLGREKILKVHAKKISMAPDVNLRTVARGTPGFSGADLANLVNEAALLAARKNKRIVTYMELK

SEQ ID NO: 147154 - protein, 298 aa, Unknown
  Bacterial polypetide isolated from the Sargasso Sea
MNNGNLKNFLVWAILAFSLLGLYNLVQGPMTGPIQSEISFSQLLAEVDNGNVTDVEISGDSISGHFSDGRGFSTFAPSDPTLIQRLYDKGVVINAKPTKEGGPTLLGVLISWFPMLLLIAVWIFFMRQMQGGGGKAMGFGKSKAKLLNEKNGIVTFDDVAGVEEAKDDLQEIVEFLKDPSKFQRLGGKIPKGALLVGPPGTGKTLLARAIAGEANVPFFTISGSDFVEMFVGVGASRVRDMFEQAKKNAPCIIFIDEIDAVGRHRGAGLGGGNDEREQTLNQLLVEMDGFETNEGPLF

SEQ ID NO: 147155 - protein, 294 aa, Unknown
  Bacterial polypetide isolated from the Sargasso Sea
MNEIKGKVTFNDVAGVEEAKEEVEEVVEFLKDPKKFSRLGGKIPRGCLLVGPPGTGKTLLARAIAGEAGVPFFTISGSDFVEMFVGVGASRVRDMFEQGKKHSPCIIFIDEIDAVGRSRGAGLGGGNDEREQTLNQLLVEMDGFDTNEGVIIIAATNRPDVLDPALLRPGRFDRQVVVSNPDLLGREKILKVHAKKISMAPDVNLRTIARGTPGFSGADLANLVNEAALLAARKNKRIVTYMEFEEAKDKVMMGSERRSMVMTEEEKKLTAYHEAGHAIVTINEKAAYPIHKAT

SEQ ID NO: 147156 - protein, 332 aa, Unknown
  Bacterial polypetide isolated from the Sargasso Sea
MDKKWKVIALWVLPITIVILITWQILGSSTNTQVNQTNTSNPSRNAPVAKISYGRFLDYVKAGRVTSVDIYDGGRNAIVESVDPEIDNRIQRLRVDLPGLAPELVSSLKDEGISFDIHPPKTAPAGVGILGNLLFPIILIGGLILLSRRSNSMPGGPGQAMQFGKTKARFAMEAETGVKFDDVAGVNEAKQDLEEVVTFLKQPERFTSVGAQIPRGVLLVGPPGTGKTLLAKAIAGEAGVPFFSLSGSEFVEMFVGVGASRVRDLFKRAKENSPCLIFIDEIDAVGRQRGAGIGGGNDEREQTLNQLLTEMDGFEGNSGIIIIAATNRPDVL

SEQ ID NO: 147157 - protein, 301 aa, Unknown
  Bacterial polypetide isolated from the Sargasso Sea
MAKNLILWVVIAVVLMSVFQGYSPSSSSSQKMDYSTFLDNVRDGQVASVEVKSDQRTIEGSKRTGEKFTTIMPLYDQDLINDLDRKGITMKGQEAEESGFLTQIFISWFPMLLLIGVWIFFMRQMQGGGGKGAMSFGKSKAKLMSEDQIKTTFADVAGCDEAKEEVKELVDYLRDPTKFQKLGGRIPTGVLMVGPPGTGKTLLAKAIAGESKVPFFTISGSDFVEMFVGVGASRVRDMFEQAKKSAPCIIFIDEIDAVGRQRGAGLGGGHDEREQTLNQMLVEMDGFEGNEGIIVIAATNR

SEQ ID NO: 147158 - protein, 632 aa, Unknown
  Bacterial polypetide isolated from the Sargasso Sea
MNFRNLLMWGLIILLSVGLFNLFQNPDRTNTNNNQIAFSKFLQEVDNGRVVEVEIQGNNINGTLSDGSKFKTYSPNYPDLVGKLSEKNVSIIASPVEDKMPSLLGVLLSWFPMLLLIGVWIFFMRQMQGGRGGAMGFGKSKAKLLNEAQGKVTFNDVAGIEEAKEEVEEIVDFLKDPRKFRKLGGKIPKGALLIGPPGTGKTLLAKAIAGEANVPFFTISGSDFVEMFVGVGASRVRDMFEQGKKHAPCIIFIDEIDAVGRSRGAGLGGGNDEREQTLNQLLVEMDGFDTNEGIILIAATNRPDVLDPALLRPGRFDRQVVVPNPDILGREAILKVHVKKINTGPDVKLRTIARGTPGFSGADLANLINESALLAARKNKRVVTMVDIEEAKDKVMMGAERRSMVMTEEEKKLTAYHEGGHAIVALNEKASDPIHKATIIPRGRALGMVMRLPERDQLSVTREKMYSDIAVAMGGRIAEEIILGYEKITSGASSDIDMATKMAKNMVTRYGMSKSLGTIAYGENEDEVFLGRSITRQQNMSEDTAKKVDSEVKKIVDTGYERARTVLTEKIDDLHKIAKALLIYETLTGDEIRDLILKNIQPTKLSKKQEEEADDKASSAIDSIGLKPKPAL

SEQ ID NO: 147159 - protein, 355 aa, Unknown
  Bacterial polypetide isolated from the Sargasso Sea
VDKLSSKGVSIVAAPQEDKMPSLLGILLSWFPMLLLIGVWIFFMRQMQGGKGGAMGFGRSKAKLLNEAQGKVTFNDVAGVEEAKEEVEEIVEFLKDPRKFSRLGGKIPKGALLIGPPGTGKTLLAKAIAGEANVPFFSISGSDFVEMFVGVGASRVRDMFEQGKKHSPCIIFIDEIDAVGRSRGAGLGGGNDEREQTLNQLLVEMDGFDTNEGIILIAATNRPDVLDPALLRPGRFDRQVVVGNPDIIGREAILKVHVRKISTGPDVKLRTIARGTPGFSGADLANLINESALLAARKNKRVVTMSDIEEAKDKVMMGAERRSMVMSEDEKKLTAYHEGGHAIVALNEKASDPHT

SEQ ID NO: 147160 - protein, 385 aa, Unknown
  Bacterial polypetide isolated from the Sargasso Sea
MNNGNFKNFLVWAILAFSLLGLYNLVQGPITGPVQSEISFSQLLAEVDNGNVTDVEISGDSISGHFADGRGFNTFAPSDPTLIQRLYDKGVVINAKPSKEGGPTLLGVLISWFPMLLLIAVWIFFMRQMQGGGGKAMGFGKSKAKLLNEKNGIVTFDDVAGVEEAKDDLQEIVEFLKDPSKFQRLGGKIPKGALLVGPPGTGKTLLARAIAGEASVPFFTISGSDFVEMFVGVGASRVRDMFDQAKKNAPCIIFIDEIDAVGRHRGAGLGGGNDEREQTLNQLLVEMDGFETNEGIILIAATNRPDVLDPALLRPGRFDRQVVVPNPDIIGREKILKVHTRKVPMSSDVDIRTVARGTPGFSGADLANIVNEAALLAARRGKRMV

SEQ ID NO: 147161 - protein, 504 aa, Unknown
  Bacterial polypetide isolated from the Sargasso Sea
GGAMGFGKSKANMMNELKGKVTFNDVAGVEEAKEEVEEIVEFLKDPKKFSRLGGKIPRGALLVGPPGTGKTLLARAIAGEAGVPFFTISGSDFVEMFVGVGASRVRDMFEQGKKNSPCIIFIDEIDAVGRSRGAGLGGGNDEREQTLNQLLVEMDGFDTNEGVIIIAATNRPDVLDPALLRPGRFDRQVVVSNPDIIGREKILKVHVKKIKMAPDVNLRTIARGTPGFSGADLANLVNEAALLAARKNKRIVTLLEFEEAKDKVMMGAERRSMVMTEDEKKLTAYHEGGHALVSFNMPSYDPIHKATIIPRGRALGMVMNLPERDKHGYSIKYLKARLAVCFGGRVAEELIFGKDNISTGAGGGSGSDINQATQLARAMVTKYGMSEEMGPVEYGENQEEVFLGRSVTQTQSVSEEIAQKIDKEIRKLVDEGYNQAKKILTEKIDDLHKIAKALITYETLTGEEIENIINKNLYPKDKILENQDSKDDHDSALGAMGLKPKIVH

SEQ ID NO: 147162 - protein, 631 aa, Unknown
  Bacterial polypetide isolated from the Sargasso Sea
MKNIAMWAIIVFLTIGLYNMFKNPQTNIRGGDKVIFSEFLTSVENGEVLKVEIQGNNIKGVYSNGNSFTTYSPNDPNLIEKLSEKGVSISAAPIEEKMPSLFGVLLSWFPMLLLIAVWIFFMRQMQGGKGGAMGFGRSKAKMMNELKGKVTFNDVAGVEEAKEEVEEIVEFLKDPRKFSRLGGKIPRGALLVGPPGTGKTLLARAIAGEAGVPFFTISGSDFVEMFVGVGASRVRDMFEQGKKNSPCIIFIDEIDAVGRSRGAGLGGGNDEREQTLNQLLVEMDGFDTNEGVIIIAATNRPDVLDPALLRPGRFDRQVVVSNPDIIGREKILKVHVKKIKMAPDVNLRTIARGTPGFSGADLANLVNESALLAARKNKRIVTLNEFEEAKDKVMMGAERRSMVMTEDEKKLTAYHEGGHALVSFNMPSYDPIHKATIIPRGRALGMVMNLPERDKHGHSIKYLKARLAVCFGGRVAEEVIFGKDNISTGAGGGSGSDINQATQLARAMVTKYGMSEAMGPVEYGENQEEVFLGRSVTQTQSVSEEVAQKIDKEIRKLIDEGYNTAKKILTEKVEDLHKIAKALMTYETLTGEEIENIINKNIYPADKQDLKVEDDKGSAMGALGLKPKIVH

SEQ ID NO: 147163 - protein, 364 aa, Unknown
  Bacterial polypetide isolated from the Sargasso Sea
MNTFTKNLFLWITIILVVLLLFNLFQNGNSGRVSTELAYSDFVESVKAGNIREVTISGNSISAATTSGRTITTFSPQGANIVSLLENSGVRIIGKPVEREVSWILSTLLSWFPMLLLIGVWIFFMRQMQSGSGKAMGFGKSKAKLLTEKQGKVTFEDVAGIDEAKTELEEIVEFLKDPGKFQRLGGKIPKGCLLVGPPGTGKTLLARAIAGEAGVPFFTISGSDFVEMFVGVGASRVRDMFEQGKKNAPCIIFIDEIDAVGRHRGAGLGGGNDEREQTLNQLLVEMDGFEANEGVILIAATNRPDVLDPALLRPGRFDRQVVVPNPDILGREKILKVHMKKVPLADDVQPRTIARGTPGFSELI

SEQ ID NO: 147164 - protein, 449 aa, Unknown
  Bacterial polypetide isolated from the Sargasso Sea
MNLKNLAMWVIIVVLTIGLYNMFKNPQNLQNKNNTTIIFSQFLTEVDNGRVVEVQIQGNNIKGVMADGSVFSTYSPNDPNLIEKLTDKGVSISAAPLDEKMPSLFGVLLSWFPMLLLIAVWIFFMRQMQGGKGGAMGFGRSKAKMMNEVKGKVTFNDVAGVEEAKEEVQEVVEFLRDPKKFSRLGGKIPRGCLLVGPPGTGKTLLARAIAGEAGVPFFTISGSDFVEMFVGVGASRVRDMFEQGKKHSPCIIFIDEIDAVGRSRGAGLGGGNDEREQTLNQLLVEMDGFDTNEGVIIIAATNRPDVLDPALLRPGRFDRQVVVSNPDIIGREKILKVHAKKISMSPDVNLRTIARGTPGFSGADLANLVNEAALLAARKNKRIVTSQEFEDAKDKVMMGAERRSMVMTEDEKKLTAYHEGGHAIVSFNLPNYDPIHKATIIPRGRALGM

SEQ ID NO: 147165 - protein, 409 aa, Unknown
  Bacterial polypetide isolated from the Sargasso Sea
EISFSQLLAEVDNGNVTDVEISGDSISGHFSDGRGFSTFAPSDPTLIQRLYDKGVVINAKPTKEGGPTLLGVLISWFPMLLLIAVWIFFMRQMQGGGGKAMGFGKSKAKLLNEKNGIVTFDDVAGVEEAKDDLQEIVEFLKDPSKFQRLGGKIPKGALLVGPPGTGKTLLARAIAGEANVPFFTISGSDFVEMFVGVGASRVRDMFEQAKKNAPCIIFIDEIDAVGRHRGAGLGGGNDEREQTLNQLLVEMDGFETNEGIILIAATNRPDVLDPALLRPGRFDRQVVVPNPDIIGREKILKVHTRKVPMSSDVDIRTVARGTPGFSGADLANIVNEAALLAARRGKRMVTHTEFEDAKDKVMMGPERRSMVMTDDDKKLTAYHEAGHALVSINIESSDPIHKATIIPKR

SEQ ID NO: 147166 - protein, 634 aa, Unknown
  Bacterial polypetide isolated from the Sargasso Sea
MNFKNLAMWAVIVFLTIGLYNMFKNPQGSIAQKNNIIFSEFLSEVDNGRVVQVEIQGNNIRGVLSNGEKFITYSPNDPNLIEKLSNKGVSISASPIEEKMPSLLGVLLSWFPMLLLIAVWIFFMRQMQGGKGGAMGFGRSKAKMMNELKGKVTFNDVAGIEEAKEEVEEVVEFLKDPKKFSRLGGKIPRGCLLVGPPGTGKTLLARAIAGEAGVPFFTISGSDFVEMFVGVGASRVRDMFEQGKKHSPCIIFIDEIDAVGRSRGAGLGGGNDEREQTLNQLLVEMDGFDTNEGVIIIAATNRPDVLDPALLRPGRFDRQVVVSNPDILGREKILKVHAKKISMAPDVNLRTVARGTPGFSGADLANLVNESALLAARKNKRIVTNQEFEEAKDKVMMGAERRSMVMTEDEKKLTAYHEGGHALVSFNMPSYDPIHKATIIPRGRALGMVMNLPERDKHGHSIKYLKARLAVCFGGRVAEELIFGKDNISTGAGGGSGSDINQATQLARAMVTKYGMSEELGPVEYGENQEEVFLGRSVTQTQSVSEAVAQKIDKEIRKLVDEGYNQAKQILSSKIDDLHKIAKALLTYETLTGEEIENIINKNKYPTNKEDLKVEEDTDSSALGSIGLKPKIVH

SEQ ID NO: 147167 - protein, 462 aa, Unknown
  Bacterial polypetide isolated from the Sargasso Sea
MREAEQGNIREVRINNSGEIRGTKRSGETFQTFVPYFDDKLVSDLVKNDVRVYGEPPEEQSLLTSIFISWFPMLLLIGVWIFFMRQMQGGGGRGAMSFGKSKARLLGEDQIKTTFADVAGCDEAKEDVSELVDFLRDPSKFQKLGGKIPKGVLMVGPPGTGKTLLAKAIAGEAKVPFFTISGSDFVEMFVGVGASRVRDMFEQAKKAAPCIIFIDEIDAVGRQRGAGLGGGHDEREQTLNQMLVEMDGFEGHEGIIVIAATNRPDVLDPALLRPGRFDRQVVVGLPDIRGREQILKVHIRKVPVADNVEPSVIARGTPGFSGADLANLVNEAALFAARGNKRLVSMEEFEKAKDKIMMGSERKSMVMSEPEKEMTAYHEAGHAIVGRLVPEHDPVYKVSIIPRGRALGVTMYLPEQDRVSHSKQHLESMISSLFGGRIAEAIYYGDDKVTTGASNDIERATE

SEQ ID NO: 147168 - protein, 422 aa, Unknown
  Bacterial polypetide isolated from the Sargasso Sea
MNLKNLAMWGIIVFLTIGLYNMFKNPQSNIRGGNQIIFSDFLNSVENGEVLKVEIQGNNIKGVYSNGNSFSTYAPNDPNLIEKLSEKGVSISAAPLEEKMPSLFGVLLSWFPMLLLIAVWIFFMRQMQGGKGGAMGFGKSKAKMMNELKGKVTFNDVAGVEEAKEEVEEIVEFLKDPKKFSRLGGKIPRGALLVGPPGTGKTLLARAIAGEAGVPFFTISGSDFVEMFVGVGASRVRDMFEQGKKNSPCIIFIDEIDAVGRSRGAGLGGGNDEREQTLNQLLVEMDGFDTNEGVIIIAATNRPDVLDPALLRPGRFDRQVVVSNPDIIGREKILKVHVKKIKMAPDVNLRTIARGTPGFSGADLANLVNEAALLAARKNKRIVTLLEFEEAKDKVMMGAERRSMVMTEDEKNLQHTMKEVML

SEQ ID NO: 147169 - protein, 429 aa, Unknown
  Bacterial polypetide isolated from the Sargasso Sea
MNNFTKNLLLWTTIVLVVILLFNIFQGGNKQSVSSELAYSDFVASVKSGNIREATISGESILASTTNGRVITTYAPQGANIVNLLEENSVRIIGKPVEREVSWILSTLLSWFPMLLLIGVWIFFMRQMQSGSGKALGFGKSKARLLNEQQGKVTFEDVAGIDEAKTELEEIVEFLKDPAKFQRLGGKIPKGCLLVGPPGTGKTLLARAIAGEADVPFFTISGSDFVEMFVGVGASRVRDMFEQGKKNAPCIIFIDEIDAVGRHRGAGLGGGNDEREQTLNQLLVEMDGFEANEGVILIAATNRPDVLDPALLRPGRFDRQVVVPNPDILGREKILKVHMRKVPLSDDVQPRTIARGTPGFSGADLANLVNEAALLAARKGRRTVSNLEFEESKDKVMMGSERRSMVMTDDEKKLTAYHEAGHAIVALNC

SEQ ID NO: 147170 - protein, 406 aa, Unknown
  Bacterial polypetide isolated from the Sargasso Sea
TTYSPNDPNLIQTLTDKGVSISASPIDEKMPSLFGVLLSWFPMLLLIAVWIFFMRQMQGGRGGAMGFGKSKAKLMNEIKGKVTFNDVAGVEEAKEEVEEVVEFLKDPRKFSRLGGKIPRGCLLVGPPGTGKTLLARAIAGEAGVPFFTISGSDFVEMFVGVGASRVRDMFEQGKKNSPCIIFIDEIDAVGRSRGAGLGGGNDEREQTLNQLLVEMDGFDTNEGVIIIAATNRPDVLDPALLRPGRFDRQVVVSLPDIIGREKILKVHSKKISMAPDVNLRTIARGTPGFSGADLANLVNEAALLAARKNKRIVTYLEFEEAKDKVMMGAERRSMVMTEDEKKLTAYHEAGHAIVTINEKAAYPIHKATIIPRGRALGMVMQLPEKDEVSQTREQLHAQMAIAMGGR

SEQ ID NO: 147171 - protein, 340 aa, Unknown
  Bacterial polypetide isolated from the Sargasso Sea
MNFKNLLMWAIIIFLSIGLFNMFQDPKKISSNNNEMAFSRFLTEVDSGRVVEVQIQGNNISGVLADGNNFTTFSPNYPNLVEKLSDKGVSITASPKEDKMPSLLGILLSWFPMLLLIGVWIFFMRQMQGGKGGAMGFGRSKAKLLNEATGKVTFNDVAGVEEAKEEVEEIVEFLRDPKKFSRLGGKIPKGALLIGPPGTGKTLLAKAIAGEANVPFFSISGSDFVEMFVGVGASRVRDMFEQGKKNSPCIIFIDEIDAVGRSRGAGLGGGNDEREQTLNQLLVEMDGFDTNEGIILIAATNRPDVLDPALLRPGRFDRQVVVGNPDIIGREAILKVHIKK

SEQ ID NO: 147172 - protein, 294 aa, Unknown
  Bacterial polypetide isolated from the Sargasso Sea
MNLRNIILWIFIALIVFGLFNLFNNATENNKSVQLTYSQFLDEVEVGSIKDVVIKGNNITGSYEDGRSFKTYAANDPTLVDRLNERGVNISAAPLDDGYPSILGILISWFPMLLLIGVWIFFMRQMQGGKGGAMGFGRSKAKLLTENKNKVTFNDVAGIDEAKEELVEIVEFLKDPRKFQKLGGRIPKGALLIGPPGTGKTLLARAVAGEAGVPFFTISGSDFVEMFVGVGASRVRDMFEQGRRNAPCIIFIDEIDAVGRSRGAGLGGGNDEREQTLNQILVEMDGFDTQEGII

SEQ ID NO: 147173 - protein, 310 aa, Unknown
  Bacterial polypetide isolated from the Sargasso Sea
MNLKNLAMWAIIVLLTLGLYNMFKNPQGSFNQKNNIIFSEFLSEVENGRVVQVEIQGNNVNGVFSNGQKFSTYVPNDPNLIEKLSDKGVSISASPLEEKMPSLLGVLLSWFPMLLLIAVWIFFMRQMQGGKGGAMGFGRSKAKLMNELKGKVTFNDVAGIEEAKEEVEEVVEFLKDPRKFSRLGGKIPRGCLLVGPPGTGKTLLARAIAGEAGVPFFTISGSDFVEMFVGVGASRVRDMFEQGKKHAPCIIFIDEIDAVGRSRGAGLGGGNDEREQTLNQLLVEMDGFDTNEGVIIIAATNRPDVLDPAL

SEQ ID NO: 147174 - protein, 346 aa, Unknown
  Bacterial polypetide isolated from the Sargasso Sea
MSGIGALLEDRGGMSKAILGGDSVKPQQDAHSKTTFDDVKGVDEAKAELVEIVEYLKAPEKFTKLGGKLPKGLLLVGPPGTGKTMLAKAVAGEARVPFFYSSGSEFEEMFVGVGARRVRDLFKAAKQHAPCIIFIDEIDAVGAARNPKDQQNTRMTLNQLLTEMDGFKASEGVIVLAATNTPGMLDKALIRPGRFDRTVSVPNPDVGGRREILKTHAKDVKMERNVDFDVIARGTPGFSGADLANLINIAALKAALDGVAEVGAKHLDFAKDRILMGAERKSAVMTPENRKLTAYHEGGHALVALRTAGARPVHKATIVPRGQALGMVMQLPEKDELQMTRRQLLA

SEQ ID NO: 147175 - protein, 347 aa, Unknown
  Bacterial polypetide isolated from the Sargasso Sea
MNFKNLVMWAIIVLLSVGLFNMFQDPKKINSEKNKLAFSSFMSEVEAGRVVEVQIQGNNISGVLADGKTFSTYSPNYPNLVEKLSEQNISIVATPLEDKMPSLLGILLSWFPMLLLIGVWIFFMRQMQGGKGGAMGFGRSKAKLLNEAQGKVTFNDVAGVEEAKEEVEEIVEFLKDPKKFSRLGGKIPKGALLIGPPGTGKTLLAKAIAGEANVPFFSISGSDFVEMFVGVGASRVRDMFEQGKKHSPCIIFIDEIDAVGRSRGAGLGGGNDEREQTLNQLLVEMDGFDTNEGIILIAATNRPDVLDPALLRPGRFDRQVVVSNPDIIGREAILKVHVKKINTGPRC

SEQ ID NO: 147176 - protein, 511 aa, Unknown
  Bacterial polypetide isolated from the Sargasso Sea
TGLLVNGLLAVMVLGLLVLLFRRSANVAQKALGFGRSQARVQPEGAVAVRFDDVAGIDEAKTELQEVVTFLKEPERFTALGAKIPRGVLLVGPPGTGKTLLARAIAGEAEVPFFTLSASEFVEMFVGVGASRVRDLFRQAKAKAPCIIFIDEIDAVGRQRGAGIGGGNDEREQTLNQLLTEMDGFEENSGIIMLAATNRADVLDTALLRPGRFDRQILVELPDRRGREAILGVHARSRPLSEEVSMELWARRTPGFSGADLANLINEAAILTARRDRNFIDEQAMHDALERITLGMGARPLQDSAKKRLIAYHEVGHALITTLLPAADALDKLTILPRAGGIGGFARTTPDEEILDSGLISRAYLQARLVVAMGGRAAELVVFGPSEVTQGASSDLQMVTRISREMVTRYGFSVLGPVAFERDGGEVFLGRDWMRTEHEYSASTGQAIDQQVQQLARQALDQAVALLEPRRQLMDELVTNLIEMESLSGDEFRERVESFEAARLNPTAVVS

SEQ ID NO: 147177 - protein, 348 aa, Unknown
  Bacterial polypetide isolated from the Sargasso Sea
MPSLFGVLLSWFPMLLLIAVWIFFMRQMQGGKGGAMGFGKSKAKMMNELKGKITFNDVAGVEEAKEEVEEIVEFLKDPKKFSRLGGKIPRGALLVGPPGTGKTLLARAIAGEADVPFFTISGSDFVEMFVGVGASRVRDMFEQGKKNSPCIIFIDEIDAVGRSRGAGLGGGNDEREQTLNQLLVEMDGFDTNEGVIIIAATNRPDVLDPALLRPGRFDRQVVVSNPDIIGREKILKVHVKKIKMAPDVNLRTIARGTPGFSGADLANLVNESALLAARKNKRIVTLSEFEEAKDKVMMGAERRSMVMTEDEKKLTAYHEGGHALVSFNMPSYDPIHKATIIPRGRALG

SEQ ID NO: 147178 - protein, 463 aa, Unknown
  Bacterial polypetide isolated from the Sargasso Sea
EEVVEFLKDPKKFSRLGGKIPRGCLLVGPPGTGKTLLARAIAGEADVPFFTISGSDFVEMFVGVGASRVRDMFEQGKKHSPCIIFIDEIDAVGRSRGAGLGGGNDEREQTLNQLLVEMDGFDTNEGVIIIAATNRPDVLDPALLRPGRFDRQVVVSLPDIIGREKILKVHSKKISMSPDINLRTIARGTPGFSGADLANLVNESALLAARKNKRIVTNAEFEEAKDKVMMGAERRSMIMTEEEKKLTAYHEAGHAIVTINEKAAYPIHKATIIPRGRALGMVMQLPEKDEVSQTREQLHAQMAIAMGGRVAEEIIFGDEKVTTGATSDIEQATKRARAMVMRAGLSKELGPIAYGENEEEVFLGRSVARTQNMSEETAKKVDAEIKKFVEKGYERAKKVLTEKMDDLHKLAKALLTYETLSGEEIENLINKNIYPDKKEDLKSDEGEQSSALGSIGLKPKVVH

SEQ ID NO: 147179 - protein, 404 aa, Unknown
  Bacterial polypetide isolated from the Sargasso Sea
KMMNQVKGKVTFNDVAGVEEAKEEVEEVVEFLRDPRKFSRLGGKIPRGCLLVGPPGTGKTLLARAIAGEAGVPFFTISGSDFVEMFVGVGASRVRDMFEQGKKHSPCIIFIDEIDAVGRSRGAGLGGGNDEREQTLNQLLVEMDGFDTNEGVIIIAATNRPDVLDPALLRPGRFDRQVVVSLPDIIGREKILKVHAKKISMAPDVNLRTIARGTPGFSGADLANLVNEAALLAARKNKRIVTTSEFEEAKDKVMMGAERRSMVMTEEEKKLTAYHEAGHAIVTINEKAAYPIHKATIIPRGRALGMVMQLPEKDEVSQTREQLHAQMAIAMGGRVAEEIIFGDDKVTTGAASDIEQATKRARAMVMRAGLSKELGPILYGENEEEVFLGRSVARQQNMSEKQQK

SEQ ID NO: 147180 - protein, 635 aa, Unknown
  Bacterial polypetide isolated from the Sargasso Sea
MNLKNLAMWVIIVVLTIGLYNMFKSPQNLQNKNNKTIIFSEFLTEVDNGRVVEVQIQGNNIKGVMADGSVFSTYSPNDPNLIEKLTDKGVSISAAPLDEKMPSLFGVLLSWFPMLLLIAVWIFFMRQMQGGKGGAMGFGRSKAKMMNEIKGKVTFNDVAGVEEAKEEVQEVVEFLRDPKKFSRLGGKIPRGCLLVGPPGTGKTLLARAIAGEAGVPFFTISGSDFVEMFVGVGASRVRDMFEQGKKHSPCIIFIDEIDAVGRSRGAGLGGGNDEREQTLNQLLVEMDGFDTNEGVIIIAATNRPDVLDPALLRPGRFDRQVVVSNPDIIGREKILKVHAKKISMSPDVNLRTIARGTPGFSGADLANLVNEAALLAARKNKRIVTSQEFEDAKDKVMMGAERRSMVMTEDEKKLTAYHEGGHAIVSFNLPNYDPIHKATIIPRGRALGMVMNLPERDKHGHSIKYLKARLAVCFGGRVAEELIFGKDNISTGAGGGNGSDINQATQLARAMVTKYGMSEELGPVEYGENQEEVFLGRSVTQTQSVSEAVAQKIDKEIRKLVDEGYNQAKTILTSKIDDLHKIAKALLTYETLTGEDIAKIINKNEYPPNKEDLKVEDESSDSALGSIGLKPKIVH

SEQ ID NO: 147181 - protein, 319 aa, Unknown
  Bacterial polypetide isolated from the Sargasso Sea
VKQNYAEAYKQYQDALDYFMMAMKYEKNDKLKELIRKKFTEYLDRAEKLKEHIAKSEEKRSKAKVSATGAAGGSTAGGPDVKGDDGDDPEIKKMRQGLQGAILSESPNVKWEDVAGLAQAKESLKEAVILPIKFPQLFTGKRTPWRGILLYGPPGTGKSYLAKAVATEAKSTFFSVSSSDLVSKWMGESERLVKQLFQMAREQKPAIIFIDEIDSLTGARGEGESEASRRIKTEFLVQMNGVGNEETGVLVLGATNIPWQLDPAIKRRFEKRIYIPLPTFRPVVGCSKSMSAPHLTVSHPPTSPPSLSKPRGTLEVILL

SEQ ID NO: 147182 - protein, 340 aa, Unknown
  Bacterial polypetide isolated from the Sargasso Sea
VTFNDVAGVEEAKEEVEEIVEFLKDPKKFSRLGGKIPRGALLVGPPGTGKTLLARAIAGEARVPFFTISGSDFVEMFVGVGASRVRDMFEQGKKNSPCIIFIDEIDAVGRSRGAGLGGGNDEREQTLNQLLVEMDGFDTNEGVIIIAATNRPDVLDPALLRPGRFDRQVVVSNPDIIGREKILKVHVKKIKMAPDVNLRTIARGTPGFSGADLANLVNESALLAARKNKRIVTLSEFEEAKDKVMMGAERRSMVMTEDEKKLTAYHEGGHALVSFNMPSYDPIHKATIIPRGRALGMVMNLPERDKHGHSIKYLKARLAVCFGGRVAEEVIFGKDNISTG

SEQ ID NO: 147183 - protein, 630 aa, Unknown
  Bacterial polypetide isolated from the Sargasso Sea
MNFKNLAMWGIIVILTIGLYNMFKNPQGSISQKNKIIFSEFLTEVDNGRVVKVEIQGKNIKGVLSNGNQFTTYAPEDPNLIQKLSDKGVSISASPLEEKMPSLLGILLSWFPMLLLIAVWIFFMRQMQGGKGGAMGFGRSKAKMMNEVKGKVTFNDVAGVEEAKEEVEEVVEFLKDPRKFSRLGGKIPRGCLLVGPPGTGKTLLARAIAGEAGVPFFTISGSDFVEMFVGVGASRVRDMFEQGKKHSPCIIFIDEIDAVGRSRGAGLGGGNDEREQTLNQLLVEMDGFDTNEGVIIIAATNRPDVLDPALLRPGRFDRQVVVSNPDLIGREKILKVHAKKISMAPDVNLRTVARGTPGFSGADLANLVNEAALLAARKNKRIVTYQEFEEAKDKVMMGSERRSMVMSEEEKKLTAYHEAGHAIVTINERAAYPIHKATIIPRGRALGMVMQLPERDEVSQTREQLHAQMAIAMGGRVAEELIFGEDKVTTGASSDIEQATKRARAMVMRAGLSKEMGPVAYGENEEEVFLGRSVARQQNMSEETARKVDSEIRKFVDMGYERARKVLTEKIDDLHKLAKALLTYETLTGAEIEDLISKNIYPKNKEDLKVEDDDQSSALGSMGLKPKIVH

SEQ ID NO: 147184 - protein, 456 aa, Unknown
  Bacterial polypetide isolated from the Sargasso Sea
GPPGTGKTLLAKAIAGESKVPFFTISGSDFVEMFVGVGASRVRDMFEQAKKSAPCIIFIDEIDAVGRQRGAGLGGGHDEREQTLNQMLVEMDGFEGNEGIIVIAATNRPDVLDSALLRPGRFDRQVVVGLPDVRGREQILKVHMRKVPLSEDVKASVIARGTPGFSGADLANLVNEAALFAARGNRRVVGMEEFERAKDKIMMGAERRSMVMSEAEKEMTAYHEAGHAIVGCLVPEHDPVHKVTIIPRGRALGVTFFLPEADAISQSRRKLESQISVAYGGRLAEELIYGSEKVSTGASQDIKYATSIARNMVTQWGFSDKLGPLLYAEEEGEVFLGRSMGKAKAMSDETATLIDAEVKAFIDKNYGRAKQILLDNIDILHSMKDALMKYETIDSLQIDDLMNRREVRQPADWQADDNGSNDKGNGKGEPAVKVDEVVKSAPVESELKDADESPAK

SEQ ID NO: 147185 - protein, 367 aa, Unknown
  Bacterial polypetide isolated from the Sargasso Sea
WIFFMRQMQGGKGGAMGFGRSKAKMMNELKGKVTFNDVAGVEEAKEEVEEVVEFLRDPKKFSRLGGKIPRGCLLVGPPGTGKTLLARAIAGEAGVPFFTISGSDFVEMFVGVGASRVRDMFEQGKKHSPCIIFIDEIDAVGRSRGAGLGGGNDEREQTLNQLLVEMDGFDTNEGVIIIAATNRPDVLDPALLRPGRFDRQVVVSLPDIIGREKILKVHAKKISMAPDVNLRTVARGTPGFSGADLANLVNEAALLAARKNKRIVTFNEFEEAKDKVMMGAERRSMVMTEEEKRLTAYHEAGHAIVTLNEKAAYPIHKATIIPRGRALGMVMQLPERDELSQTREQLHAQMAIAMGGRVAEEIIFGDD

SEQ ID NO: 147186 - protein, 329 aa, Unknown
  Bacterial polypetide isolated from the Sargasso Sea
MNFKNLAMWGIIVLLTIGLYNMFKNPQGSVGVKNNIIFSEFLSEVDNGRVVQVEIQGKNIKGVFSNGKMFKTYAPDDPNLIQKLSDKGVSISASPLEEKMPSLLGVLLSWFPMLLLIAVWIFFMRQMQGGKGGAMGFGKSKAKMMNELKGKVTFNDVAGVEEAKEEVEEVVEFLKDPRKFSRLGGKIPRGCLLVGPPGTGKTLLARAIAGEAGVPFFTISGSDFVEMFVGVGASRVRDMFEQGKKHAPCIIFIDEIDAVGRSRGAGLGGGNDEREQTLNQLLVEMDGFDTNEGVIIIAATNRPDVLDPALLRPERFDRQVVVSNPDIIG

SEQ ID NO: 147187 - protein, 293 aa, Unknown
  Bacterial polypetide isolated from the Sargasso Sea
MNFKNLAMWGIIVILTIGLYNMFKNPQGSISQKNKIIFSEFLTEVDNGRVVKVEIQGKNIKGVLSNGNQFTTYAPEDPNLIQKLSDKGVSISASPLEEKMPSLLGILLSWFPMLLLIAVWIFFMRQMQGGKGGAMGFGRSKAKMMNEVKGKVTFNDVAGVEEAKEEVEEVVEFLKDPRKFSRLGGKIPRGCLLVGPPGTGKTLLARAIAGEAGVPFFTISGSDFVEMFVGVGASRVRDMFEQGKKHSPCIIFIDEIDAVGRSRGAGLGGGNDEREQTLNQLLVEMDGFDTNEG

SEQ ID NO: 147188 - protein, 522 aa, Unknown
  Bacterial polypetide isolated from the Sargasso Sea
MLLIAVWIFFMRQMQGGKGGAMGFGKSKAKMMNELKGKVTFNDVAGVEEAKEEVEEIVEFLKDPKKFSRLGGKIPRGALLVGPPGTGKTLLARAIAGEAGVPFFTISGSDFVEMFVGVGASRVRDMFEQGKKNSPCIIFIDEIDAVGRSRGAGLGGGNDEREQTLNQLLVEMDGFDTNEGVIIIAATNRPDVLDPALLRPGRFDRQVVVSNPDIIGREKILKVHVKKIKMAPDVNLRTIARGTPGFSGADLANLVNEAALLAARKNKRIVTLTEFEEAKDKVMMGAERRSMVMTEDEKKLTAYHEGGHALVSFNMPSYDPIHKATIIPRGRALGMVMNLPERDKHGYSIKYLKARMAVCFGGRVAEEIIFGKDDISTGAGGGSGSDINQATQLARAMVTKYGMSEVMGPVEYGENQEEIFLGRSVTQTQSVSEETSQKIDKEIRKLIDEGYNQAKKILTEKIDDLHKIAKALMTYETLTGEEIENIISKNLYPKDKIIEKPEENDDQNSALGAMGLKPKIVH

SEQ ID NO: 147189 - protein, 394 aa, Unknown
  Bacterial polypetide isolated from the Sargasso Sea
RLGGKIPRGALLVGPPGTGKTLLARAIAGEAAVPFFTISGSDFVEMFVGVGASRVRDMFEQGKKNSPCIIFIDEIDAVGRSRGAGLGGGNDEREQTLNQLLVEMDGFDTNEGVIIIAATNRPDVLDPALLRPGRFDRQVVVSNPDIIGREKILKVHVKKIKMAPDVNLRTVARGTPGFSGADLANLVNEAALLAARKNKRIVTLVEFEDAKDKVMMGSERRSMVMTEEEKTLTAYHEAGHAIVTINESAAYPIHKATIIPRGRALGMVMQLPERDELSQTREQLHAQLAIAMGGRVAEEIIFGEDKVTTGASSDIEQATKRARAMVMRAGLSKELGPVAYGENEEEVFLGRSVARQQNMSEETAQKVDSEIRKIVEKGYERARKVLTEKIDDCT

SEQ ID NO: 147190 - protein, 609 aa, Unknown
  Bacterial polypetide isolated from the Sargasso Sea
MNLRNLAMWGIIVLLTIGLYNMFKNPQASLNKSDTIIFSQFLKEVENGRVVEVQIQGNNINGLMSDGKQFKTYSPNYPNLVEKLSDTGVSISAAPIDEKMPSLLGVLLSWFPMLLLIAVWIFFMRQMQGGKGGAMGFGRSKAKMMNEVKGKVTFNDVAGVEEAKEEVEEVVEFLRDPRKFSRLGGKIPRGCLLVGPPGTGKTLLARAIAGEAGVPFFTISGSDFVEMFVGVGASRVRDMFEQGKKHSPCIIFIDEIDAVGRSRGAGLGGGNDEREQTLNQLLVEMDGFDTNEGVIIIAATNRPDVLDPALLRPGRFDRQVVVSNPDILGREKILKVHAKKITMASDINLRTIARGTPGFSGADLANLVNESALLAARKNKRVVTNQEFEEAKDKVMMGAERRSMVMTEDEKKLTAYHEGGHALVSFNMPSYDPIHKATIIPRGRALGMVMNLPERDKHGHSIKYLKARLAVCFGGRVAEELIFGKDNISTGAGGGSGSDINQATQLARAMVTKYGMSEELGPVEYGENQEEVFLGRSVTQTQSVSEAVAQKIDKEIRKLVDEGYNQAKEILTTKIDDLHKIAKALITYETLTGDEIKDLINKNIFQQIK

SEQ ID NO: 147191 - protein, 430 aa, Unknown
  Bacterial polypetide isolated from the Sargasso Sea
SVGARIPKGVLLVGPPGTGKTLLAKAIAGEAGVPFFSLSGSEFVEMFVGVGASRVRDLFKRAKENSPCLIFIDEIDAVGRQRGAGIGGGNDEREQTLNQLLTEMDGFEGNSGIIIIAATNRPDVLDSALMRPGRFDRQVTVDAPDIKGRLSILEVHARNKKLQEDLTLESIARRTPGFTGADLANLLNEAAILTARRRKDSISISEIDDSVDRIVAGMEGSPLTDGRSKRLIAYHEVGHALIGSLVKAHDPVQKVTVIPRGQAKGLTWFTPDDEQTLVSRAQLKARIMGALGGRAAEDVVFGEGEITTGAGGDFQQVASMARQMVTRFGMSKLGPIALESGNQEVFVGRDLMTRSEISDSISKQIDESVRIMVKECYKETYDIVSKNREAMDKIVDLLIEKETLDGDEFLSILSKFTKIPEKERTPQLLN

SEQ ID NO: 147192 - protein, 490 aa, Unknown
  Bacterial polypetide isolated from the Sargasso Sea
KAKMMNQLKGQVTFNDVAGVEEAKEEVEEVVEFLKDPKKFSRLGGKIPRGCLLVGPPGTGKTLLARAIAGEAGVPFFTISGSDFVEMFVGVGASRVRDMFEQGKKNAPCIIFIDEIDAVGRSRGAGLGGGNDEREQTLNQLLVEMDGFETNEGVIIIAATNRPDVLDPALLRPGRFDRQVVVSLPDIIGREKILKVHAKKISMAPDINLRTVARGTPGFSGADLANLVNESALLAARKNKRIVTNLEFEEAKDKVMMGAERRSMVMTEDEKRLTAYHEAGHAIVTMNEKAAYPIHKATIIPRGRALGMVMQLPEKDEVSQTREQLHAQMAIAMGGRVAEELIFGDDKVTTGAASDIEQATKRARAMVMRAGLSKELGPVAYGENEEEVFLGRSVARQQNMSEETAKKVDSEIRKFVEKGYDRAKKVLTEKIDDLHKLAKALLTYETLTGREIEDLINKNVYPSNKEDLKSSDKDDNSALGTIGLKPKIVH

SEQ ID NO: 147193 - protein, 245 aa, Unknown
  Bacterial polypetide isolated from the Sargasso Sea
MTGVKAVSSKQIRLTIRSPNVLTMTLVDLPGITRVAVGDQPEDIEQQIRNMILSYIKKETCLILAVTPANSDLANSDALTLSKQVDPEGKRTLGVITKLDIMDRGTNALRYLKGEVVPLQLGYVGVVNRCQADIEDRRTMRHARQSEADFFASKPEYKEVIESCGVAALGKRVSNLLTEHIGNMLPDLQVRIMRARSEAEKELELLGPDAPETESDRAALVLSKLESYAAGLQASVEGRSNNLSI

SEQ ID NO: 147194 - protein, 321 aa, Unknown
  Bacterial polypetide isolated from the Sargasso Sea
MRVCAPIGVLTKLDLMDEGTDARDIIDNKVYALRRGYVPVVNRSQKDITGKKDIKAAVAAERKFFLTHPAYRNIADKCGTPFLQKQLNAQLTNHIRDTLPSLRDKLQKQMLGLEKEVEQFKHWRPDDPSIKTKALLQSVTGLQQDFERAIEGSGEGDVNCAELSGGAKINRIFHERFPYEIVKVEFDEKELRREIAFAIRNVHGIRVGLFTPDMAFEAIAKKQIERMREPGLKCCDLVIQELTNVVRLVTEKIKSYPRLREEIERILTTYIREKERKCKDQVMALIDFELAYMNTNHEDFVGFGNAQAATEKAASTGGNGA

SEQ ID NO: 147195 - protein, 301 aa, Unknown
  Bacterial polypetide isolated from the Sargasso Sea
FGCSLEERKFAEMMDEADPIKTLRADFHYPTMGEIPTSDAALVTSGEDCLYFCGNSLGLQPAAAKRYINEDLDKWAKMGVHGHFEKPRPWALCDECLQEQSAKVVGAKPEEVGIMNGLTVNLHLLMISFYKPTASRHKIFLEAKAFPSDHYAVESQLKLRGYDPATSMVLAEPREGEVLLRTEDILETIEKEGDSIAIVLFPGVQYYTGQLFDMEAITKAAHAKGCIVGFDLAHAVGNVEMHLHDWGVDFACWCSYKYLNAGAGGLAGAFIHEKCAAKTPPALVGWWGHKYKTRFDMTNEI

SEQ ID NO: 147196 - protein, 204 aa, Unknown
  Bacterial polypetide isolated from the Sargasso Sea
VEIDGKKMAFHQTGEGRPVVFLHGNPTSSYLWRNIIPLVSGNARCIAPDLIGMGDSEKLEEIDEDSYRFFQHRHYLDGFLDALELGSKVILVVHDWGSALGFDWAKRNRDRIAGIVYMEAIVRPVSWKEWPDASASIFKGIRSSSGEEMIMKKNLFVEVVLPGSVLRKLTEEEMEEYRRPFILPEHRLPTLKWPREIPIDGYPE

SEQ ID NO: 147197 - protein, 277 aa, Unknown
  Bacterial polypetide isolated from the Sargasso Sea
REYIIIPIADDVTARMHYVDENSESSDVVLLLHGEPTWSYLYRHMIPILAKAGKRVIAPDLIGFGKSDKLSERTDYTYERHVAWTRNIIEQLNLSNITFFGQDWGGLIGLRLIADMPDAFNGMVLSNTGLPIGKGSSEGFESWKNFCQTVEKFNSGRVVFGGCVSKIDEDETAAYNAPFPDDSYTACARYFPTLVPVNPDNVAVQDNIDAWEKLKKFDKPTLTLFGSEDKIFLGGEKILQKLIPGAQNMDHKLINAGHFSQEDQPEELSQGIISINS

SEQ ID NO: 147198 - protein, 201 aa, Unknown
  Bacterial polypetide isolated from the Sargasso Sea
MNNLAATQFSKDFLDINGIKMAFHQSGEGSPVIFLHGNPTSSYLWRNIIPLVSLNARCIAPDLIGMGDSEKLKEIDDDSYRFFQHRHYLNGFIESLKLNNDLFLVVHDWGSALGFDWAKRNQYRIKGIVYMEAIVRPVSWQEWPDDAKKIFKGFRSSAGEEMILKKNLFVETVLPGSILRNLTEEEMEEYRRPFVIPEHRL

SEQ ID NO: 147199 - protein, 276 aa, Unknown
  Bacterial polypetide isolated from the Sargasso Sea
MRYAKKRASVNGLEMAYIDEGEGDPIVFLHGNPVSSYLWRNVMPYLEGKGRLIAPDLIGMGDSERLPISGPGQYRFVHHREYLDALLEQIGVRENVTLVIHDWGSALGFHWAHRHPDAVKGIAYMEAIVRPLPWEDWPDQSRNAFKGLRSEGGEAMVLEKNFFVEKLLPNAILRTLEDGEMEEYRRPFVEPGESRRPTLTWPREIPIDGEPVDVVKIVGDYADWLAKGEVPKLFIDADPGAILVGKQREFCQAWPNQTNVTVKGHHFVQEDSPDEI

SEQ ID NO: 147200 - protein, 162 aa, Unknown
  Bacterial polypetide isolated from the Sargasso Sea
MNVKEHPKFKILVNNKNMSYVEMGSGETMLFLHGNPTSSYLWRNIMPYISNTKRCIAPDLIGMGDSEKLDSNEVGKYNFFEHRKWLNNLLDLLDIGNKVILVLHDWGSALGFDWAYNNINRVAGIVYMEGIVCPLNWDDWDEKSAPLFKAFRSDAGEGMIIE

SEQ ID NO: 147201 - protein, 138 aa, Unknown
  Bacterial polypetide isolated from the Sargasso Sea
MSADISVEEHPKKSVTVKGKKMTYVEMGEGDPIVFLHGNPTSSYLWRNIMPHLKDQGRCIAPDLIGMGDSEKLDNPGPDSYRFVEHRNYLDGILEALGVTENVTLIIHDWGSALGFDWANRHRSAVKGIAYMEGIVRP

SEQ ID NO: 147202 - protein, 291 aa, Unknown
  Bacterial polypetide isolated from the Sargasso Sea
MNVKEHSKSKILVNNKNMSYVEMGSGETMLFLHGNPTSSYLWRNIMPYISDSKRCIAPDLIGMGDSDKLDSNDVGVYNFFEHRKWLNDLLDLLNIGNKVILVLHDWGSALGFDWAYNNINRVSGIVYMEGIVCPLNWEDWDEKSAPLFKAFRSDAGESMIIEKNIFVERVLPGSVLRGLTDPEMEVYRRPFIKKEDRRPTLDWPNQIPIEGSPKDVVEVVDNYSKFFMSDNTPKLFINADPGAILIGKQRDFCRSWPNQSEITVPGSHFIQEDSPDLIGEGILNWLKTKNI

SEQ ID NO: 147203 - protein, 158 aa, Unknown
  Bacterial polypetide isolated from the Sargasso Sea
MDYLRTPDSRFERLLDYPFEPNYVTVDGLRMHYVDEGPADGKPILMLHGEPTWSYLYRHMIPICAAAGHRVIAPDLIGFGKSDKPTAINAYSYQNHMDWVKSLLDQLELTEITLVCQDWGSLIGLRMAAENESRFRAIVVGNGMLPTGDEQAPKAFHI

SEQ ID NO: 147204 - protein, 206 aa, Unknown
  Bacterial polypetide isolated from the Sargasso Sea
MEEKKYLEINNKKMAFIDEGEGDPILFLHGNPTSSYLWRNIIPHMQGMGRIIAPDLIGMGDSEKLDEVDSSSYTFLEHADYLYRLIEQLGLDKVTLVIHDWGSALGFNWARLNPEKIKSVIYMEAIIGPIDSWEDWPENARNIFQAFRSEAGEELVLEKNIFVERILGGDGKLKEEDMNVYLKPFSNPGEDRRPTLTWPRQIPIAG

SEQ ID NO: 147205 - protein, 121 aa, Unknown
  Bacterial polypetide isolated from the Sargasso Sea
MDWDEYIKWGEEVVHWGSNYRKNIRNFPVRSQNNPGDTYNLIPASPPEKPEPIQNIFDDFNNLIMPGITHWQHPRFFAYFPSNAAPASVLAEMLANTIGSQCMLWQTSPAATELEEKLLTG

SEQ ID NO: 147206 - protein, 257 aa, Unknown
  Bacterial polypetide isolated from the Sargasso Sea
FKKIILPGVTHWQHPRFFAYFPANAAPASVFAEILTNTMGLQCMLWQTSPSATELEEKVIEWLRISLDIPKGFGGIIQDTASSATLTAILTMREKALNWQGNKVGLSGQGKLRIYASTENHSSLDKAIWFSGIGEDNLVRVPVYGAYRSMDPVALSDAIHNDRKKGFIPAGIVGVTCGTSTGSYDNLDEIGKIANNENLYFHVDAAWAGSAIICDEYKYLWQGIGKADSIVFNPHKWLGAQFDCSVHFLKDMNVQKN

SEQ ID NO: 147207 - protein, 295 aa, Unknown
  Bacterial polypetide isolated from the Sargasso Sea
MIFLGVGAMTDFGPMLANPKTLLLGAAAQFGIFGTLLGALAITALGIPGMEFTLKEAASIAIIGGADGPTSIFVTSKLAPDLLGPIAVAAYAYMALVPLLQPPIMRALTTKEERAIVMQQLRPVGQTEKIIFPIVLCILIGMLLPDAAPLIGMFALGNLLREAGVVERLADTSRNALINIVTIFLGLTVGSKLSAEAFLQLKTLGILMLGMVAFCAGTAAGVLMAKLMNVFSTHKVNPLIGSAGVSAVPMAARVSNKVGLEANPQNFLLMHAMGPNVAGVIGSAVAAGVLLSFVG

SEQ ID NO: 147208 - protein, 282 aa, Unknown
  Bacterial polypetide isolated from the Sargasso Sea
DKYGFHLHYAVKANFNAPILNLISEKGFGADCVSGREVEVAVENGFSSSDIVFAGVGKSDAEINSALDLNIFCFNCESIMEIEVINELAKAKGKTAQIALRINPNVNANTHKYITTGLSENKFGINMWELDDVLSALQKSENIELIGLHFHIGSQITDLTSFKNLTSKINKIQEWFYSRQIIVKVINAGGGLGIDYHNPDNQIPDFAEYFRIFNEFLELRSGQKVHFELGRSLVGQCGSLISRVLYIKNGLKKNFAILDAGMTELIRPNVVQRRTHEIENLS

SEQ ID NO: 147209 - protein, 284 aa, Unknown
  Bacterial polypetide isolated from the Sargasso Sea
MNLEAIFSNLGIFSLTSGQSIMLVVGLVILYLAISKKFEPLLLLPIGFGAILTNIPEIGLALSPIEKLIYFSNPNELAGALSLIAMGEAESLSSFLKTASHSQLWLLNEYAAELGYKAGILNTFYSVAIGSGVAPLVIFMGVGAMTDFGPMLANPKTLILGAAAQFGIFATVIGALILNKFGVVSFTLKQAAATGIIGGADGPTAIYVSSILAPELLGAIAVAAYSYMALVPLIQPPIMRLLTSRRERVIRMVQLREVSQKEKIIFPNNFGLSCWYDASQVQPL

SEQ ID NO: 147210 - protein, 279 aa, Unknown
  Bacterial polypetide isolated from the Sargasso Sea
FNQTWGRAIMIIIAFCLFYLAIAKNFEPLLLIPIGFGGLLANIPIAEIAGPNGFVGILYTMGVETGLFPILIFMGVGAMTDFGPLIANPKTALLGAAAQFGIFGTLVGAVFLTQNTNIINFSLQDSAAISIIGGADGPTAIFIASRLAPDLLGAIAVAAYSYMALVPIIQPPIMKALTTEKERQIKMVQLRNVKKVEKIIFPLTVLFLCILALPDATPLVGALCFGNFVKESGVVERLSETLQNALINIVTIFLGLAVGSKLAADKFLVPETLGIIFLG

SEQ ID NO: 147211 - protein, 273 aa, Unknown
  Bacterial polypetide isolated from the Sargasso Sea
MDWDEYIKWGKEAVVWGSEYRKNLRNYPVRSQNKPGETFNSIPTNPPENPESIEQIFDDFKKIILPGVTHWQHPRFFAYFPANAAPASVFAEILTNTMGLQCMLWQTSPSATELEEKVIEWLRISLDIPKGFGGIIQDTASSATLTAILTMREKALNWKGNKVGLSGQGKLRIYASTENHSSLDKAIWFSGIGEDNLVRVPVYGAYRSMDPVALSDAIHNDRKKGFIPAGIVGVTCGTSTGSYDNLDEIGTIANNENLYFHVDAAWAGSAIIC

SEQ ID NO: 147212 - protein, 217 aa, Unknown
  Bacterial polypetide isolated from the Sargasso Sea
APDLLGAIAVAAYSYMALVPIIQPPIMRALTTEKERQIKMVQLRKVNKLEKIVFPITVLFLCILALPDATPLVGALCFGNFIKESGVVERLSETLQNSLINIVTIFLGLAVGSKLAADKFLVPETLGIIFLGLAAFSVGTVAGLLMAKVMNKFSKDPINPLIGSAGVSAVPMAARVSNRVGAEANPSNVLLMHAMGPNVAGVIGSAVAAGVLISIFG

SEQ ID NO: 147213 - protein, 759 aa, Unknown
  Bacterial polypetide isolated from the Sargasso Sea
MLTIIIIALIAIIALFAVKSLRMQFITQPVFHFFKKVLPPLSDTEREAMEAGDVWWEGELFRGNPNWNTLHSYGKATLTAEEKDFIDNQVMTALKMIDDFDIVHNRKDLPPELWDYFKKEGFFALIIPKKFGGRAFSAYANSTIVSKLASRSVSAAVTVMVPNSLGPGELLTHYGTKEQKERWLPALAKGDEIPCFALTGPEAGSDAGAIPDVGIVCRGEFNGEEVLGLKLTWDKRYITLAPVATVLGLAFQMRDPDGLLGDKKNLGITCALIPTDHPGVVIGRRHNPLNMAFMNGTTKGEEVFIPLDWIIGGPEFAGRGWRMLVECLSAGRGISLPALATASGHMATKTTTAYSYVRHQFGMAIGNFEGVQEALARIIANTYQLEAARRLTTTGIDLKVKPSVVTAIAKFHMTELGRAVMNDAMDIQSGKGIQLGPKNYLGHPYMSNPISITVEGANILTRSLMIFGQGATRCHPYVLAEMEAAAMENEHDALERFDSLLMGHMGYATRNAFSALFNALTASRFGSAPVSGETKQYYKDMSRISSALALMTDISMLIMGGDLKRKEMLSARMGDVLSQLYLGSATLKLFEDNGRQQDDLPAVRYVMANRLYLAAKALEEVIRNFPNRPFAWLLRALIFPIGNHFNAPSDKMATELVSGMLKPSPARERITFLCPEFEGDVGGIAEVEQAFVAQYACKEIYKKLKKAQRAGELPAKVPNLVLFAKALEQGTVTEDEHQKLLHADKLRLAAINVNDFEAL

SEQ ID NO: 147214 - protein, 759 aa, Unknown
  Bacterial polypetide isolated from the Sargasso Sea
MLTIIIIALIAVIALFAVKSLRMQFITQPVFHFFKKVLPPLSDTEREAMEAGDVWWEGELFRGNPNWNTLHSYGKPTLTAEEKDFIDNQVMTALTMIDDFDIVHNRKDLPPELWDYFKKEGFFALIIPKKFGGKAFSAYANSTIVSKLASRSVSVAVTVMVPNSLGPGELLTHYGTEEQKERWLPALAKGDEIPCFALTGPEAGSDAGAIPDVGIVCRGEFNGEEVLGLKLTWNKRYITLAPVATVLGLAFQMRDPDGLLGDKKNLGITCALIPTDHPGVVIGRRHNPLNMAFMNGTTQGDEVFIPLDWIIGGPEFAGRGWRMLVECLSAGRGISLPALATASGHMATKTTTAYSYVRHQFGMAIGQFEGVQEALARIIANTYQLEAARRLTTTGIDLKVKPSVVTAIAKFHMTELGRAVMNDAMDIQSGKGIQLGPKNYLGHPYMSNPISITVEGANILTRSLMIFGQGATRCHPYVLAEMEAAAMENQHEALARFDSLLMGHMGYATRNAFSALFSALTASRFGSAPVSGETKQYYKDMSRLSSALAFMTDISMLIMGGDLKRKEMLSARMGDVLSQLYLGSATLKLFEDNGRQQDDLPAVRYVMANRLHLAAKALEDVIRNFPNRPVAWLLRALIFPIGNHFNAPSDKMATELVSGMLKPSPARERITFLCPEFEGDVGGIAEVEQAFVAQYACKEIYKKLKKAQRSGELPAKVPNLVLFAKALERGTINSEEHQTLLHADKLRLAAINVNDFEAL

SEQ ID NO: 147215 - protein, 356 aa, Unknown
  Bacterial polypetide isolated from the Sargasso Sea
MEFDLSDLLTSFGIYSITLSQILMIGVGFLLLFLAINNKFEPLLLLPIGFGAILTNIPEIGLSYSGLEKLILVNDQLEVEGLLALLGLSEINLYSISDLTSHQLFMGENFAYDQGYRSGILYKFYQVSIGSGIAPLLIFMGVGAMTDFGPMLANPKTLILGAAAQFGIFATVIGALFLNNFDTFSFTLKQAAATGIIGGADGPTAIYVASILAPELLGAIAVAAYSYMALVPLIQPPIMKALTTQKEKAIVMNQLRNVSQKEKIFFPIILLLLVALFLPSAAPLLGMFCFGNLLKESQVVERLSEVVQNSLINIVTIFLGLSVGSQLLAEKFLTAETLGILVLGVIAFAIGTASGV

SEQ ID NO: 147216 - protein, 759 aa, Unknown
  Bacterial polypetide isolated from the Sargasso Sea
MKFRFPVVIIDEDFRSENISGSGIRALAEAIEKEGVEVLGLTSYGDLTSFAQQSSRASCFILSIDDDELMLGETGQDGDLPELATAIIELRAFVTEVRRRNADIPIFLYGETRTSRHLPNDILRELHGFIHMFEDTPEFVARHIIREAKVYLDSLAPPFFKELVKYADEGSYSWHCPGHSGGVAFLKNPLGQMFHQFFGENMLRADVCNAVDELGQLLDHTGPVAASERNAARIFSADHLFFVTNGTSTSNKIVWHATVAPGDIVLVDRNCHKSILHAITMTGAIPVFLTPTRNHFGIIGPIPRDEFKPENIRKKIEANPFAREAMRENPDMKPRILTITQSTYDGVVYNVEMIKDLLGDLLDTLHFDEAWLPHATFHDFYRDMHAIGDGRPRTGALVFATHSTHKLLAGISQASQIVVQDSENRTFDKHRFNEAYLMHTSTSPQYAIIASCDVAAAMMEPPGGTALVEESIAEAIDFRRAMRKVDAEYGDDWFFSVWGPDNLSEEGIGSREDWMLKPNDHWHGFGPLAEGFNMLDPIKATIITPGLDVDGEFGETGIPAAIVTKYLAEHGIIVEKTGLYSFFIMFTIGITKGRWNSMVTELQQFKDDYDNNQPLWRVLPEFVAQHPRYERVGLRDLCTQIHDVYRANDIARLTTEMYLSDMEPAMKPSDAFAKLAHRKIDRVPLDELEGRVTSILLTPYPPGIPLLIPGERFNKTIVNYLRFARDFNERFPGFHTDIHGLVAEEVNGRVEYFVDCVRD

SEQ ID NO: 147217 - protein, 337 aa, Unknown
  Bacterial polypetide isolated from the Sargasso Sea
MVEILINEEEKHPVANRIDSKKLYETIDLSLQPHGIIDEEFKSILKDVIKSTPKTATNLFFNQLFGGRQSKAVLGDLLAVILNNSMYTYKVAGPQVGIEQEIIKKSCEIIGYGKESNGTFPTGGSMSNYMALVMARDSKDPNSRYDGMSKPMVIYTSEASHYSIDKNASFCGIGRNNIRYIKADSKGRMISQELEKRIKADITEGYIPTFINATAGTTVLGAFDPINEIADISHKYNIWLHVDGAYSGGVIFSNNYKHLVSGVERSDSFSYNAHKMLGTPLTCSIILVNNKKQLHDSFSNEADYLYQTDNDDFNLGKHHFSVEEEMMPSSSGLYGNP

SEQ ID NO: 147218 - protein, 233 aa, Unknown
  Bacterial polypetide isolated from the Sargasso Sea
IGGADGPTAIYVSSILAPELLGAIAVAAYSYMALVPLIQPPIMRLLTTNSERTIRMVQLREVSQKEKIVFPIILVFLVGMMLPSAAPLIGMFCLGNLMRESLVVERLSEVVQNSLINIVTIFLGLAVGSKLAADQFLTPETLGILSLGIIAFSIGTASGILMAKLMNALSKNKINPLIGAAGVSAVPMAARVVNKVGLENDSQNFLLMHAMGPNVAGVIGSAVAAGVMIQLLA

SEQ ID NO: 147219 - protein, 281 aa, Unknown
  Bacterial polypetide isolated from the Sargasso Sea
MYKDLKFPVLIVHRDIKADTVAGDRVRAIAQELTQDGFSILPTASAGEGRIVASTHHGLACILVAAEGAGENSRLLQDMVELIRVARVRAPQLPIFALGEQVTIENAPAEAMADLNHLRGILYLYEDTVSFLARQVARAAHNYLDGLLPPFFKALVQHTAQSNYSWHTPGHGGGVAYRKSPVGQAFHQFFGENTLRSDLSVSVPELGSLLDHTGPLAEAEARAARNFGADHTFFVINGTSTANKIVWHSMVGRDDLVLVDRNCHKSILHSIIMTGAIPLYL

SEQ ID NO: 147220 - protein, 290 aa, Unknown
  Bacterial polypetide isolated from the Sargasso Sea
LGYTSGILYKFYSVSIGSGIAPLLIFMGVGAMTDFGPMLANPKTLILGAAAQFGIFATVIGALYLNNFEAFDFTLQQAAATGIIGGADGPTAIYVASILAPELLGAIAVAAYSYMALVPLIQPPIMRMLTSKEERVIEMVQMRSVSQREKIFFPLILLLLVGLLLPSAAPLLGMFCFGNLLKESLVVERLSEVVQNSLINIVTIVLGLSVGSKLVAEKFLTAETLGILVLGIIAFGIGTAAGVIMAKIMNLFVKDKINPLIGAAGVSAVPMAARVANKVGLQYNSQNFLL

SEQ ID NO: 147221 - protein, 305 aa, Unknown
  Bacterial polypetide isolated from the Sargasso Sea
KNGYKAIDWIVDYLQSVDNYPVLSEVSPGQIRNTLPKKAPLEGETFDAMLKDINELIMPGITHWQSPNFFAYFPANSSPSSILGELISAGLGVQGMSWITSPSCTELETHVMDWLVDILGLPMKFSSADKGGGVIQHSASDSTLCALLAARERVGDVSINERGSNRQLTAYASTQAHSSIEKSCMISGIGRDQLRLINVDENFSMDAGVLEAKIVEDKEKGLTPFFICANVGTTSTLAIDPVGAIADIAQRHNLWLHVDAAYAGTAAICEEFRYVNDGAEKADSYTFNPHKWMFTNFDCNAFFVS

SEQ ID NO: 147222 - protein, 475 aa, Unknown
  Bacterial polypetide isolated from the Sargasso Sea
MSIKKFKENGYKVIDWIADYYENIESYPVLSKIKPGELRKGLPKNPPKEGENFINILSDMNDKIIPGVTHWQSPNFFAYFPCNSTGPAILGDLLSSGLGIQGMLWASSPSCTELESHVLDWLVDMLHLPKKFKSDTLGGSVIQDTASSATLCALIAAREKISNGKINENGFDNSIRVYTSTEAHSSIEKAVKIAGIGSNNIRLIEVDQDFSMDPVKLRKAINMDIKNGKTPAFVCATIGTTSSTAIDPLEEIGKICDEFGIWLHVDAAMAGSVSICPEYRFIHDGIEYADSYCFNPHKFLLTNFDCSCLFVSDREALIKSLTINPEYLKTEVSDSDTVFDYRDWQVPLGRRFRALKLWSVIRYYGINGIQSHIRGHITSAKLLSDLIAEDNRFEIMAPTILNLVCFRYKASDQFNILLLNELNKSGFLYLVHTKLNNKYTIRFSIGQTNTTEEHVLNAWKFILKKTEELEKTGVK

SEQ ID NO: 147223 - protein, 376 aa, Unknown
  Bacterial polypetide isolated from the Sargasso Sea
MNQLWTFWQSTGLYLLTLDQLIMILIGLLLLYLAIIKQFEPLLLIPIGFGGILSNIPGVDIAVGNGVLAQFSAMGLDTGIFPLLVFMGIGAMTDFGPLLANPKTMLLGAAAQFGIFSTLLGAIAMNEIGMFDFSLAQAAAIGIIGGADGPTAIYVSSVLAPELLGAIAVAAYSYMALVPLIQPPIMRALTSRRERKIRMQSIREVSQTEKVLFPLVLLLLVALIVPGAAPLLGMFCFGNLMKECRVVARLSDTAQNALINTATIFLGLSVGSKLVAEEFLVGETLGILGLGIVAFGIGTMTGVLMAKLMNLFSKNKINPLIGAAGVSAVPMAARVANKVGIESDPDNFLIMHAMGPNVAGVIGSTIAAGVLIQFAA

SEQ ID NO: 147224 - protein, 381 aa, Unknown
  Bacterial polypetide isolated from the Sargasso Sea
MSIKQFKENGYKVIDWIADYYENIESYPVLSNIKPGELRKGLPKNPPKEGENFNNILSDMNDKIIPGVTHWQSPNFFAYFPCNSTGPAILGDLLSSGLGIQGMLWASSPSCTELESHVLDWLVDMLHLPKKFKSNTLGGSVIQDTASSATLCAIIAAREKISNGQINKNGFDNSIRVYTSIEAHSSIEKAVKIAGIGSNNIRLIEVDQDFAMDPVKLRKAINMDIENGKTPAFVCATIGTTSSTAIDPLEEIGKICDEFGIWLHVDAAMAGSVSICPEYRFIHDGIEYADSYCFNPHKFLLTNFDCSCLFVSDREALIKSLTINPEYLKTEVSDSDTVFDYRDWQVPLGRRFRALKLWSVIRYYGINGIQSHIRGHITSAK

SEQ ID NO: 147225 - protein, 376 aa, Unknown
  Bacterial polypetide isolated from the Sargasso Sea
MDGLLAFWAETGIAHFTAGQALMMAVGALLLYLAIVRGFEPLLLLPIGFGAVLANIPNAGFTDEGGMLYYAYHVGIETGVFPLLIFMGVGALTDFSALIANPKTLLLGAAAQFGIFATLIGAIALNLVPGFEFTMQDAAAIAIIGGADGPTAIFLASKLAPELLGAIAVAAYSYMALVPIIQPPIMRLLTTQAEREIKMEQLREVSKKEKIIFPLMVLGLTILFLPAATPLVGMFCLGNLMRESGVVDRLSKTAQNELINIVTIFLGLAVGSKLSAEQFLRVETLGILVLGALAFGIGTAAGVLMAKLMCKLTGGKVNPLIGAAGVSAVPMAARVVNKVGLEANHHNFLLMHAMGPNVAGVLGSAVAAGILLAVLG

SEQ ID NO: 147226 - protein, 376 aa, Unknown
  Bacterial polypetide isolated from the Sargasso Sea
MDGLLAFWAETGIAHFTAGQVLMMAVGMLLLYLAIVRGFEPLLLLPIGFGAVLANIPNAGFTEEGGILYYAYHVGIETGVFPLLIFMGVGALTDFSALIANPKTLLLGAAAQFGIFATLIGAIALNLVPGFEFTMQDAAAIAIIGGADGPTAIFLASKLAPELLGAIAVAAYSYMALVPIIQPPIMRLLTTQAEREIKMEQLREVSKKERIIFPLMVLGLTILFLPAATPLVGMFCLGNLMRESGVVDRLSKTAQNELINIVTIFLGLAVGSKLSAEQFLRVETLGILVLGALAFGIGTAAGVLMAKLMCKLSGGKVNPLIGAAGVSAVPMAARVVNKVGLEANQHNFLLMHAMGPNVAGVLGSAVAAGILLAVLG

SEQ ID NO: 147227 - protein, 126 aa, Unknown
  Bacterial polypetide isolated from the Sargasso Sea
MNQFFLKSKIHGAIVTHSEKDYDGSCAIDVEILNQASIKEYEKIDIYNITNGERLSTYTILAKPGSRIISVNGAAAHKAKPGDKLVICSYASLEKSEISSHKPEMVYLDENNNVIKKTGSISMQAI

SEQ ID NO: 147228 - protein, 72 aa, Unknown
  Bacterial polypetide isolated from the Sargasso Sea
MTICLLKSKIHRAAVTGASVDYEGSLAVDRDLAERVGLRAYEKILVGNLENGERFETYCIYGAAGSGVIELN

SEQ ID NO: 147229 - protein, 122 aa, Unknown
  Bacterial polypetide isolated from the Sargasso Sea
MRWVIRSKIHKATVTQADVDYVGSITIDEDLLQAAGLWPGEKVLVVSNTSGARLETYTIATEGGTGEICMNGAAAHLISKGEEIIIMGFELTETPVSPKVILIKDKLNQTFEPLQEEPMSKL

SEQ ID NO: 147230 - protein, 108 aa, Unknown
  Bacterial polypetide isolated from the Sargasso Sea
MKITVLKSKIHRAIVTDTQLEYDGSCAIDSNYLKEANISPFEQIHIYNLTNGERLITYAIEAEAGSKIISMMGAAAHKASKGDSIIIVAYGSIEETEAKSFEPKIVRL

SEQ ID NO: 147231 - protein, 108 aa, Unknown
  Bacterial polypetide isolated from the Sargasso Sea
MKITVLKSKIHRATVTDTQLEYDGSCAIDSNYLKEANISPFEQIHIYNITNGERLITYAIEAEAGSKIISMMGAAAHKASKGDSIIIVAYGSIEETESKSFEPKIVRL

SEQ ID NO: 147232 - protein, 116 aa, Unknown
  Bacterial polypetide isolated from the Sargasso Sea
MKIELLKSKIHRATVTDANLDYIGSLTLDPVLMEGANLNEYEKIHVLNITNGNRLITYIIKGERGSGEVCINGAAAHLVSKGDLVIIASYCVLSENDAKAFKPTIVHVDNQNNIIS

SEQ ID NO: 147233 - protein, 49 aa, Unknown
  Bacterial polypetide isolated from the Sargasso Sea
MLIKLLKSKIHRAVVTDANVDYEGSIAIDSDLMKSAKIQNYEKVHVLDI

SEQ ID NO: 147234 - protein, 129 aa, Unknown
  Bacterial polypetide isolated from the Sargasso Sea
MNLTLLKSKIHRATVTEANLYYEGSITIDKDLMDAADLLPYEQVHIFNLTNGERFITYVIEGDRGSGVICTNGAAAHCARKGDCLIIVAFLSIENEKVNTYKPKLVYVDQDNKRVDAELIDKKLVKILG

SEQ ID NO: 147235 - protein, 296 aa, Unknown
  Bacterial polypetide isolated from the Sargasso Sea
FGENVFRADMCNADVKLGDLLIHEGSAKHAQKFAAKVFNADKTYFVLNGTSAANKVVSNALLTRGDLVLFDRNNHKSNHHGALIQAGATPVYLEASRNPFGFIGGIDDHCFDEHYLCNLIREVAPEKADAPRPFRLAVIQLGTYDGTVYNARQVVDKIGGLCDYILFDSAWVGYEQFIPMMADCSPLLLELNENDPGIFVTQSVHKQQAGFSQTSQIHKKDNHLRGQARFCPHKRLNNAFMLHASTSPFYPLFAALDVNAKIHEGESGRRLWAECVVQGIEARKAIIARCKMIQPF

SEQ ID NO: 147236 - protein, 723 aa, Unknown
  Bacterial polypetide isolated from the Sargasso Sea
MKIAVEPALIGAFVTTHEQVDVFQTDFTNIAAIVVGIESAQQVLETVERTGFAIPFFVAVEPGQEVPPSILPSANGVIQLRHGGRHYYGRQISAAADIYSENLLPPFFKVMREYVQRGYVEFDCPGHQGGQFFSNHPLGRMFFDFFGETIFRADLCNADVRLGDLLIHEGPALEAQRNAARIYNADKTYFVLNGTSTSNKVVTSALLAPDDLVLFDRNNHKSVHLGALVLSGARPVYLETARNAWGLIGGVDSAALDETRIRDAIRDVAPERAGLPRPFRLAVIQLGTYDGTIYNAREIVDRIGHLCDYILFDSAWVGYEQFIPMMQDCSPLMLTLGPDDPGIFVTQSVHKQQAGFSQTSQIHKKDSHIEGQKRFCDHRRFNNAYMIHASTSPFYPMFAALDVNAQMHAGPAGKRLWRDCVAHGVDARKLLLKTCRQIRPFVPQSIDGRPWADYPTEQIVDDLRFFRFHPADTWHGFEGYADDQYFVDPCKLLLTTPGIDRDTHEYAAFGAPAPILARYLREHGVVPEKADLYTILFLLTPSESFGKLQHLVAHLAQFERHLDQDTPLREAIPSLCEAYPELYGNMRLRQLCQRMHDFYRSHDMKHLQKQMFRRAQFPKQAMLPQAANTELIRNNVELVTLDRIEGRIATEGALPYPPGIFCVVPGEAWGGPALDYFRALEAGINALPGFEPEIQGVYLQARPDGTKQASAYVVAAGADASSA

SEQ ID NO: 147237 - protein, 297 aa, Unknown
  Bacterial polypetide isolated from the Sargasso Sea
DLSVSVPELGSLLDHTGPLAEAEARAARNFGADHTFFVINGTSTANKIVWHSMVGRDDLVLVDRNCHKSILHSIIMTGAIPLYLCPERNELGIIGPIPLSEFSRESIQAKIDASPLARGRAPKVKLAVVTNSTYDGLCYNAEMVKQALGDSVEVLHFDEAWYAYAAFHDFYAGRFGMGTQCDEHSPLVFTTHSTHKLLAAFSQASMIHVQDGGQRQLDRDRFNEAFMMHISTSPQYGIIASLDVASAMMEGPAGRSLIQETFDEALSFRRALANVRRNLSADDWWFSIWQPGAVDGA

SEQ ID NO: 147238 - protein, 91 aa, Unknown
  Bacterial polypetide isolated from the Sargasso Sea
QKELHGQTEEVYLEEMVGRVNANMILPYPPGVPLVMPGEMITEESRPVLEFLQMLCEIGAHYPGFETDIHGAYRQADGRYTVKVLKEENNK

SEQ ID NO: 147239 - protein, 271 aa, Unknown
  Bacterial polypetide isolated from the Sargasso Sea
FGADHTFFVTNGTSTANKIVWHGTVGRGDVVFVDRNCHKSLLHSLIMTGGIPVYFTPSRNAHGIIGPISLDQFTPEALQQSIAANPLASKAYKAGSKPRIAVVTNSTYDGLCYNAEKIAEEIGSAVDFLHFDEAWYAYAAFHPFYENHYGMAKGKPREQDAIIFTTHSTHKLLAAFSQASMIHVRNAASRELDAERFNEAFMMHTTTSPHYGVIAACDVASKMMEGAAGESLVQEMHDEAIAFRRAMLHVREDLGRDDWWFSVWQPDKLER

SEQ ID NO: 147240 - protein, 765 aa, Unknown
  Bacterial polypetide isolated from the Sargasso Sea
MKALLVQHDIDERTATGRAATALAEELRTRLVDVVIATSADDACAVVAADPAIQCLLLNWELGNDAGHAPAQAVLDAMRARNATVPVFLLASRASASAIPVDAMRKADDFIWLLEDTTAFIGGRIVAAIERYRETVLPPMFRALAKFSRVYEYSWHTPGHTGGTAFLKSPVGRAYFEFFGESLFRSDLSISVGELGSLLDHSGPIGESERYAARVFGAHRTYHVTNGSSMSNRVILMASVTRNQVALCDRNCHKSAEHAMTMSGAIPTYLIPSRNHYGIIGPIMPERLTAAAVRLAIDANPLVRGRDGIDPTPVHALITNSTYDGLCYNVARVEALLGQSVDRLHFDEAWYGYARFNPIYRDRYAMHGDPSQHDASKPTVFATQSTHKLLAALSQASFIHVRDGRNPIEHARFNEAYMMHASTSPNYAIIASNDVSAAMMDGPGGEALTTDAIREAVAFRQMLARLHTECAENNDWFFNGWQPDSVVDRKTGRRVRFHEADETLLATDPSCWVLHPGDTWHGFGDIEDDYCMLDPIKVSIVTPGVASHGGLMPVGIPASVVTAYLDRHGIVVEKTTDFTILFLFSLGVTKGKWGTLVNTLLDFKRDYDANAPLEQALPELVARYPERYGKLGLRDLCDLMFSAMSDLKTTEMMSRGFSTLPKPDYSPAEAFEHLVHNDIEMLELAEMEGRTVATGVVPYPPGIPLLMPGENAGPADGPLLGYLKALEQYDLRFPGFTHDTHGVEVEDGVYRIACIRQKARDTDTR

SEQ ID NO: 147241 - protein, 754 aa, Unknown
  Bacterial polypetide isolated from the Sargasso Sea
MRALLVDDEITQETATGRAVRTLSAELVQRDIDVLTATSADDAIMLIRSDPSIQCVLLDWDLGVDGHGPSEAVVDAIRHRNANVPIFLLADRSVASSVPSKVMGQVDDFVWLLEDTADFIGGRIHAAIERYRATVLPPMFGALAKFSRVYEYSWHTPGHTGGTGFLKSPVGRAFFEYFGEALFRSDLSISVGELGSLLDHSGPIGESERYAARVFGAHRTYHVTNGSSTSNRIILMASVSRDQIALCDRNCHKSAEHAMTMSGAIPTYLVPTRNRYGIIGPIASERLTQTAIREAIASNPLTAGLADRQPKHAIVTNSTYDGLCYNVARVEELLGASVDRLHFDEAWYGYARFNPIYRDRHAMHGDPRDHHADRPTVFATQSTHKLLTALSQASYIHVRDGRNPIPHGQFNETFMMHASTSPNYAIIASNDVAAAMMDGPGGAALTHESIEEAVAFRQMIARMNSEFGAKGDWFFECWQPDTVLETRTGRTLPFHDVSPELLASDPSCWVLRPGAQWHGFGNIEDGYCMLDPIKVSIVTPGVAPAGGLMPVGIPASVVTAYLDARGIVVEKTTDFTILFLFSIGITKGKWGSLVSALCDFKRDYDANLPLDMAIPSLAKEHGSRYAGMGLKDLADTMFAAMEQLGTTRLMSEAFSILPKPEMSPVRAYEHLVQGRVEQVTLEELAGRTVATGVVPYPPGIPLLMPGESAGPAGGPVLGYLKALEAYDRRFPGFAHDTHGVEVEDGTYRVYCLTA

SEQ ID NO: 147242 - protein, 283 aa, Unknown
  Bacterial polypetide isolated from the Sargasso Sea
NSEKERVLISLSPEYDVPEEGYVLVIGEGQTIDLRASSASGLFYGFQSFRQLCDPGLEAGSKPENTTIPICTIEDSPVFGYRGMHLDVSRHFFNVEFVKTYIDMIALHKMNVFHWHLTDDNGWRIEIDKYPLLTEKSAWRVDRRHEPWKEQSPPLDNETATYGGYYTKDQIREVVEYASKRNIVVIPEIEMPGHTSEVFAAYPELSCKGDYIPVNPGSYWPNTDIFCAGNDKVFTFLENVLEEVIDLFPGRYIHIGGDEADKMNWEKCPKCQARIESENLKNE

SEQ ID NO: 147243 - protein, 253 aa, Unknown
  Bacterial polypetide isolated from the Sargasso Sea
SKKLKILPLLGLRIKLTNTISGKWSQSSGDRSAFGLPVEKITEVISILKKNQLLECLILQHSHLGSQVPDIIEIRKFTQEACRFFCEITKEGAPLKYLDLGGGLGIDYTGQNKSISHSINYSLEEYCFNIVETVKLQLDKEKIDHPVIITESGRACVAASSILIFNILDTTIFDSKKCPEITQKDHIYLSYMKQILNYLEKERLQECFNDLNYYRDELRILFRNNQINLKDMAKIEKTYLFILNKMKITFTRN

SEQ ID NO: 147244 - protein, 147 aa, Unknown
  Bacterial polypetide isolated from the Sargasso Sea
QRVAILSDITCDSDGKIYKFVLGDGVSDTLPVHDLKADEDYFLGVFFIGAYQETLGDLHNLFGDTNVVTIGLDDAGGFEILKEQDGDTIYEVLSYVEYEPKRLLSSFKAIVETAVKKGKVSPADRRQMIKAYTDSLNGYTYFEHSDH

SEQ ID NO: 147245 - protein, 292 aa, Unknown
  Bacterial polypetide isolated from the Sargasso Sea
NGNIGLKNPFYPSNPSIDLIKIIESLNERGISCPVLLRVTDYLAFRIKQINESFFKAIKEVGYKGYYKGVFPVKVNQQAQVIDRIVDFGKEFDFGLEVGSKPELLIALAHDLSSESAIICNGIKDREFINLAILSLKIGFKTILVLESPRELDLIIEVSQELNVRPILGIRVKLTNKVSGNWSQSSGDRSAFGMSVEQVMKVIKKLKSYNYLDCLVLQHSHLGSQIPDIIEIRKATQEACRFYSEMCKQGAPLEYLDLGGGLGVDYTGEQKSSLNSINYSLDEYCINIVKLL

SEQ ID NO: 147246 - protein, 248 aa, Unknown
  Bacterial polypetide isolated from the Sargasso Sea
NLSQIIELWNDAKKFKEDCLVAFRLGFLSLAERAYAEELTWACAKEISNNLNNDEINHPDLSEITETLASTYYANLSIFKSIPDTWAINQIFPIVPIHRHLEEPFCKGNFADLTCDSDGKLNNFIDDGKIKSLLNLHKPEEDKDYLIGIFMTGAYQEALGNLHNLFGSTNVVHIDINQNDSYKIKNIIKEDSKSEILQLLDYSSASLVESIRINTESAIDQKKLTIEEARKLMDQIEISLRKSSYLSE

SEQ ID NO: 147247 - protein, 262 aa, Unknown
  Bacterial polypetide isolated from the Sargasso Sea
PFYPYNPPTDLIKIIESLNERGISCPVLLRVTDYLAFRIKQINETFFNAIKEVGYKGYYKGVFPVKVNQQAQVIDRIVDFGKEFDFGLEVGSKPELLIALAHDLSSESTIICNGIKDKEFISLAILSLKIGFKTILVLESPRELDLIIEISNELNVRPLLGIRIKLTNKISGKWSQSSGDRSAFGMSVEQVMKVITKLKVNNYLDCLVLQHSHLGSQIPDIIEIRKATQEACRFFSEMCKQGAPLQYLDLGGGLGVDYTGEQ

SEQ ID NO: 147248 - protein, 49 aa, Unknown
  Bacterial polypetide isolated from the Sargasso Sea
NDILKDRINALHDSFLKAIKTYNYKNFYQGVFPVKCNQQKNVLEKIIEF

SEQ ID NO: 147249 - protein, 257 aa, Unknown
  Bacterial polypetide isolated from the Sargasso Sea
VSDNKEQSLIITNLIETLNQLKSLRDKKEDLSEIIELWNDAKKFKEDCLVAFRLGFVCLEERAYAEELAWACAKEIANQLESDEINHPDLSEITDTLASTYYANLSVFKSIPDTWAINQVFPIIPIHRHLEEPCCKGNFADLTCDSDGKLNSFIDNGKIKSLLNLHPPEKSNDYLIGIFLAGAYQEALGNFHNLFGNTNVIHIDINEDNSYKIKNIIKENSKSEILELLDYSSDNLVETIRVNTESAINNKTLTIKE

SEQ ID NO: 147250 - protein, 128 aa, Unknown
  Bacterial polypetide isolated from the Sargasso Sea
MDKTYDALLLVSFGGPESLKEIRPFLERITEGKNIPSDRLEEIVQRYETVGGISPLNANIRDIRERLEIEIKSRDIDIPIFIGHRNVEPLIVNTVNEMKVSGVAKSLAWLASPYSSYSSCRQYTENIE

SEQ ID NO: 147251 - protein, 307 aa, Unknown
  Bacterial polypetide isolated from the Sargasso Sea
MSLTPPANDAQTGVPSDRLWLRSELMGTQVITRDTGRRLGVVGEVIVDIDRREVVAVGLRDNPLTRFLPGLPRWMPLDRIRQVGDVILVDSADSLSDGFNPERYSRVINCQVITESGRQLGRVLGFAFDIETGELTTLVMGALGVPLLGEGVLSTWEMPVEEIVSSGPDRIIVYEGAEDKLKQLNSGVLEKLGVGGPSWEEQERERYRVNLVPVENQLSSGQPVEEEQRRLTASETARFEPEEDMEYVELEERRRDEMPQRRYLDQEPEDPYPLPRRSMPVSRRAMPPEREPMDVEPMDVEPMDREP

SEQ ID NO: 147252 - protein, 335 aa, Unknown
  Bacterial polypetide isolated from the Sargasso Sea
MSLTPPANDAQTGVPSDRLWLRSELMGTQVITRDTGRRLGVVGEVIVDIDRREVVAVGLRDNPLTRFLPGLPRWMPLDRIRQVGDVILVDSADSLSDGFNPERYSRVINCQVITESGRQLGRVLGFAFDIETGELTTLVMGALGVPLLGEGVLSTWEMPVEEIVSSGPDRIIVYEGAEDKLKQLNSGVLEKLGVGGPSWEEQERERYRVNLVPVENQLSSGQPVEEEQRRLTAADSARFEPEEDMEYVELEERRRDAIPQRRYLDEEPEDPYPLPRRSMPVSRRAMPPQREPMDVEPMDVEPMDVEPMDVEPMEREQPPRRSRPAAAEDDLDDPW

SEQ ID NO: 147253 - protein, 210 aa, Unknown
  Bacterial polypetide isolated from the Sargasso Sea
MKNAVCLTLVLLILASGLNCVSNASINKNPITNMKSINIIPKPSSIAAQEGFVSISNIKRIIVDNNLSDEKYIAELFRSFLTPIKEIEISLTENNEKERVFVSLSPDYDIPEEGYVLVIGESQTIDLKASSASGLFYGFQSFRQLCDPGLEAGSKPENTTIPICTIEDSPVFGYRGMHLDVSRHFFNVEFVKTYIDMIALHKMNGSIGTD

SEQ ID NO: 147254 - protein, 276 aa, Unknown
  Bacterial polypetide isolated from the Sargasso Sea
MTNFEPKKLKNIWTIEDSISTYNIDKWGDKYFSINSKGNISVTKDIKSENKIDLFKLVEELKSREINPPLIIRFNDILKDRINALHDSFLKAIKTYNYKNFYQGVFPVKCNQQKNVLEKIIEFGSQWNFGLEVGSKSELLIGLSLLENQNSLLICNGYKDKKYIEIATLARKLGKNPIIVIEQRDEVKRIIQAVQELNATPLIGIRAKLSSKSSGRWGKSIGDNSKFGLSIPEIMSTIRELKEANLINEMKLLHFHIGSQISDIAVIKDALQEASQ

SEQ ID NO: 147255 - protein, 279 aa, Unknown
  Bacterial polypetide isolated from the Sargasso Sea
MTNFEPKKFKNIWTIEDSISTYNIDKWGDKYFSINSKGNISVTKDIKSENKIDLFNLVKELKSREINPPLIIRFNDILKDRINALHDSFSKAIKTYKYKNIYQGVFPVKCNQQKNVLEKIIEFGSQWNFGLEVGSKSELLIGLALLENQNSLLICNGYKDKKYIEIATLARKLGKNPIIVIEQRDEVKRIIQAVQELNATPLIGIRAKLSSKSSGRWGKSIGDNSKFGLSIPEIMLTIKELKEANLINEMKLLHFHIGSQISDIVVIKDALQEASQIYV

SEQ ID NO: 147256 - protein, 323 aa, Unknown
  Bacterial polypetide isolated from the Sargasso Sea
MQYIDVGGGLGIFFDGTKTSSNTSTNYSLQNYANDVIATIKDSCELNNIKHPTIISESGRAIISHCSVLIFNVLGTSHVSSKLQIFDKKNQQLIISNLLDTFYALKKLKNKKINLSQIIELWNDAKKFKEDCLVAFRLGFLSLAERAYAEELTWACAKEISNNLNNDEINHPDLTEITETLASTYYANLSIFKSIPDSWAINQIFPIVPIHRHLEEPFCKGNFADLTCDSDGKLNNFIDNGKIKSLLNLHKPEEDKDYLIGIFMTGAYQEALGNLHNLFGSTNVVHIDINQDNSYKVRNIIKEDSKSEILQLLDYSSASLVNL

SEQ ID NO: 147257 - protein, 308 aa, Unknown
  Bacterial polypetide isolated from the Sargasso Sea
WTIEDSISTYNIDKWGDKYFSINSKGNISVTKDVKSENKIDLFKLVEELKSREINPPLIIRFNDILKDRINALHDSFLKAIKTYNYKNFYQGVFPVKCNQQKNVLEKIIEFGSQWNFGLEVGSKSELLIGLSLLENQNSLLICNGYKDKKYIEIATLARKLGKNPIIVIEQRDEVKRIIQAVQELNATPLIGIRAKLSSKSSGRWGKSIGDNSKFGLSIPEIMSTIRELKEANLINEMKLLHFHIGSQISDIAVIKDALQEASQIYVELCKLGAPMQYIDVGGGLGIDFDGTKTSSNTSTNYSLQNYA

SEQ ID NO: 147258 - protein, 295 aa, Unknown
  Bacterial polypetide isolated from the Sargasso Sea
GPDSSRNYSTEIYASDIVYGIQQVCDLAGVKHPHIVTESGRAMTAHHSFVLVEVVDKIGPMTTDFKEGPYDNLEKPHILVTNIKEILTGVHETPFQEVFNDALAVKTDAENAFRLGILSLGEKAIIENHFWEICRVLRGKIKHLDFISEDFESFADNLALQYLCNFSVFQSLPDSWAIDQLFPVVPITRLKELPTEHCILVDITCDSDGKIDKFINLGKYKNTLQLHTLKEDEPYYLGFFLTGAYQDVMGDTHNLFGRLNEVHIFSDVDDDHGFYVEEVIRGASAKKVLNTMQYN

SEQ ID NO: 147259 - protein, 295 aa, Unknown
  Bacterial polypetide isolated from the Sargasso Sea
ICNGYKDKKYIEIATLARKLGKNPIIVIEQRDEVKRIIQAVQELNATPLIGIRAKLSSKSSGRWGKSIGDNSKFGLSIPEIMLTMKELKEANLINEMKLLHFHIGSQISDIAVIKDALQEASQIYVELCKLGAPMQYIDVGGGLGIDFDGTKTSSNTSTNYSLQNYANDVIATIKDSCELNNIKHPTIISESGRAIISHCSVLIFNVLGTSHVSSKLQIFDKKNQQLIISNLLDTFYELKKLKNKKINLSQIIELWNDAKKFKEDCLVAFRLGFLSLAERAYAEELTWACAKEIS

SEQ ID NO: 147260 - protein, 250 aa, Unknown
  Bacterial polypetide isolated from the Sargasso Sea
KSREINPPLIIRFNDILKDRINALHDSFFKAIKTYKYKNIYQGVFPVKCNQQKNVLEKIIEFGSPWNFGLEVGSKSELLIGLALLENHNSLLICNGYKDKKYIEIATLARKLGKNPIIVIEQRDEVKRIIQAVQDLNATPLIGIRAKLSSKSSGRWGKSIGDNSKFGLSIPEIMLTIKELKEANLINEMKLLHFHIGSQISDIAVIKDALQEASQIYVELCKLGAPMQYIDVWGGLGIDFDGTKTLLQHL

SEQ ID NO: 147261 - protein, 256 aa, Unknown
  Bacterial polypetide isolated from the Sargasso Sea
MALHFIENQKSLLICNGYKDKKYIEVATLARKLGKNPIIVIEQRDEVKRIIQAVHELNATPLIGIRAKLSSKSSGRWGKSIGDNSKFGLSIPEIMLTIKELKEANLINEMKLLHFHIGSQISDIAVIKDALQEASQIYVELCKLGAPMQYIDVGGGLGIDFDGTKTSSNTSTNYSLQNYANDVIATIKDSCELNNIKHPRIISESGRAIISHCSVLIFNVLGTSHVSSKLQIFDKKNQQLIISNLLETFYELKKLK

SEQ ID NO: 147262 - protein, 309 aa, Unknown
  Bacterial polypetide isolated from the Sargasso Sea
TIKELKEANLINEMKLLHFHIGSQISDIAVIKDALQEASQIYVELCKLGAPMQYIDVGGGLGIDFDGTKTSSNTSTNYSIQNYANDVIATIKDSCELNNIKHPTIISESGRAIISHCSVLIFNVLGTSHVSSTLQIFDKKNQQLIISNLLETFYELKKLKNKKINLSQIIELWNDAKKFKEDCLAAFRLGFLSLAERAYAEELTWACAKEISNNLNNDEINHPDLSEITETLASTYYANLSIFKSIPDSWAINQIFPIVPIHRHLEEPFCKGNFADLTCDSDGKLNNFIDDGKIKSLLNLHKPEEDKII

SEQ ID NO: 147263 - protein, 344 aa, Unknown
  Bacterial polypetide isolated from the Sargasso Sea
QKNVLEKIIEFGSQWNFGLEVRSKSELLIGLALLENHNSLLICNGYKDKKYIEIATLARKLGKKPIIVIEQRDEVKRIIQAVEELNATPLIGIRAKLSSKSSGRWGKSIGDNSKFGLSIPEIMLTIKELKEANLINEMKLLHFHIGSQISDIAVIKDALQEASQIYVELCKLGAPMQYIDVGGGLGIDFDGTKTSSSTSTNYSLQNYANDVIATIKDSCELNNIKHPTIISESGRAIISHCSVLIFNVLGTSHVSSKLQIFDKKNQQLIISNLLETFYELKKLKNKKINLSQIIELWNDAKKFKEDCLVAFRLGFLSLAERAYAEELTWACAKEISNNLNNDEI

SEQ ID NO: 147264 - protein, 278 aa, Unknown
  Bacterial polypetide isolated from the Sargasso Sea
MNFKGFHYKNNNLFCEHVSLEDISFEFGTPLYVYSGASIEDAYSQLSSSISDTNTEINFALKANSTLGILSLLSKLGAGADIVSGGELVKALHVKINPQKIVFSGVGKTTEEIKLASKNRIKQINAESYSEIENIISIANELNTKVPVAIRVNPNISVKTHEKIATGSNDTKFGMPIEETANIYKRLSSEKNIKTMGLAIHIGSQIFDMNEFKLAYLNILSVANSLRQEGFKVPNLDLGGGLGVDYKIAKINFFDYGKTISDVFKGHDYNLFIEPGRS

SEQ ID NO: 147265 - protein, 259 aa, Unknown
  Bacterial polypetide isolated from the Sargasso Sea
EDSISTYNIDKWGDKYFSINSKGNISVTKDIKSENKIDLLKLVKELKSREINPPLIIRFNDILKDRINALHNSFLKAIKTYKYKNIYQGVFPVKCNQQKNVLEKIIEFGSQWNFGLEVGSKSELLIGLALLENHNSLLICNGYKDKKYIEIATLARKLGKKPIIVIEQRDEVKRIIQAVEELNATPLIGIRAKLSSKSSGRWGKSIGDNSKFGLSIPEIMLTIKELKEANLINEMKLLHFHIGSQISDIAVIKDALQEA

SEQ ID NO: 147266 - protein, 185 aa, Unknown
  Bacterial polypetide isolated from the Sargasso Sea
MSSFQKHISITKHKVTNFEPKKLKNIWTIKDSISTYNIDKWGDKYFSINSKGNISVTKDIKSENKIDLFKLVKELKSREINPPLIIRFNDILKDRINALHDAFSKAIKTYKYENIYQGVFPVKCNQQKNLLEKIIEFGSKWNFGLEVGSKSELLIGLALLENQNSLLICNGYKDKKYIEIATWQE

SEQ ID NO: 147267 - protein, 273 aa, Unknown
  Bacterial polypetide isolated from the Sargasso Sea
LLAVVALADNETPIICNGFKDAEFIEMVMLAQKIGRNIIPVVERFSELPQLLDCAERIGVRPNIGMRMKLATRGSGRWHASAGFRSKFGLSVSELMKGVDLLAGRDMSDCFQLLHFHQGSQITNIRHIKAALNESARVYVELVKRGAGLKFLDVGGGLGVDYDGSQTNFESSVNYSLQEYANDVVSHVQNVCDDAGVEHPTIMSESGRAVVAYHSMLVFSVLGVSEQASHQNIDQPSPNVEQPVQDLLETFEGLSVRNLLESYHDAQQSLDTA

SEQ ID NO: 147268 - protein, 292 aa, Unknown
  Bacterial polypetide isolated from the Sargasso Sea
RAIASHFSVLVFDVLGCGRTPDDEPSNQDNEPLPVRNLRETLTHIRSVEKQTDPEMRLLQEAWNDAIKFRDDALAAFRLGYIRLNERAMAEQLTWSCARAINERLPTNAPIHDDLKGLQRALACTYYVNLSVFRSAPDTWAIDQLFPLMPIHRLEQQPTELGDFADLTCDSDGKLARFIHSGQSKSLLELHPLVDGEPYWIGMFLGGAYQEVMGNLHNLFGSTSAVHVRLNHRGSGYLLDHVVKGDTNADVLEEMQHNPELMLERLRQASEAAIQRGTLQIEDARLLMSHLK

SEQ ID NO: 147269 - protein, 279 aa, Unknown
  Bacterial polypetide isolated from the Sargasso Sea
IIRLAKESKTRPMIGIRSKLSFKGSGKWENSAGDKAKFGLSTTEIIQAVNKLKKEHFIDCLKLFHFHIGSQIPVIGTIQDAISEGARFYAQLVKMGAPIEFFDVGGGLGVDYDGSQSTNESSINYSLEEYAKDVVQSLMQICDQEEVNHPTIVSESGRAITAHHSCVVTKVIGEISPRSSNYEYDLSDDEHLFVQNMRQLVSDVCEDNFIATYNNASKIKEDSVNAFKLGVLSLEDRAKVEDLYWKTLELVLALAKNIEAESEIVWELRETLSSQYLCI

SEQ ID NO: 147270 - protein, 289 aa, Unknown
  Bacterial polypetide isolated from the Sargasso Sea
LDNPKALLVCNGYKDEAFIRLALMSQKLGKKVFIVVEKLDELNLIEKVAKELCVQPNIGLRIKLLSTGQGRWSSSAGEHSKFGLNSIELMEALKISKEKNILDSIKLIHFHLGSQITNIRRIKNSLQEVGRFYSELMRFGCGIEYIDVGGGLGVDYDGSRSTFASSTNYTVQEYANDVVYHLLEICNKEKLPHPNIISESGRAMTAHHSILVVNVLGVTSFPEWSDKVKIDEDAPEVVKEIFNILDSTSNKNLNESWHDAVHLKDEAQNQFLMGMISLESRAISEKIFW

SEQ ID NO: 147271 - protein, 308 aa, Unknown
  Bacterial polypetide isolated from the Sargasso Sea
YFSINSDGNISISPNRKSKKKVDLFKLVKEFKSREINTPLIIRFNDILKDRITELNNAFCQAIETYNYKNIYQGVFPIKCNQQKNVLEKIIEYGDPWNFGLEVGSKSELLIGLSILENQKSLLICNGYKDKKYIESAILARKLGKQPIIVIEQRDEVKRIIEAVKNLKATPILGIRSKLSCKSSGRWGKSVGDNSKFGLSIPEIMLTIKELKEANLINEMKLLHFHVGSQISDISVIKDALQEASQIFVELSKLGAPMKYIDVGGGLGIDFDGTKTSSNTSTNYSLQNYANDVICTVKDSCEVNNIQH

SEQ ID NO: 147272 - protein, 271 aa, Unknown
  Bacterial polypetide isolated from the Sargasso Sea
KKLKNIWTIEDSISTYNIDKWGDKYFSINSKGNISVTKDLKSENKIDLFKLVKELKSREINPPLIIRFNDILKDRINALHDSFLKAIKTYKYKNIYQGVFPVKCNQQKNVLEKIIEFGSQWNFGLEVGSKSELLIGLALLENQNSLLICNGYKDKKYIEIATLARKLGKNPIIVIEQRDEVKRIIQAVQELNATPLIGIRAKLSSKSSGRWGKSIGDNSKFGLSIPEIMLTIRELKEANLINEMKLLHFHIGSQISDIAVIKDALQEASQI

SEQ ID NO: 147273 - protein, 320 aa, Unknown
  Bacterial polypetide isolated from the Sargasso Sea
RQSNQVILAVIKDALQEASQIYVELCKLGAPMQYIDVGGGLGIDFDGTKTSSNTSTNYSLQNYANDVIATIKDSCELNNIKHPTIISESGRAIISHCSVLIFNVLGTSHVSSKLQIFDKKNQQLIISNLLETFYELKKLKNKKINLSQIIELWNDAKKFKEDCLVAFRLGFLSLEERAYAEELTWACAKEISNNLNNDEINHPDLSEITETLASTYYANLSIFKSIPDSWAINQIFPIVPIHRHLEEPFCKGNFADLTCDSDGKLNNFFDNGKIKSLLNLHKPEKNKDYLIGIFMTGALSEALGNLHNLFGSTNVVHIDI

SEQ ID NO: 147274 - protein, 163 aa, Unknown
  Bacterial polypetide isolated from the Sargasso Sea
PDAWGIGQVFPVMPLAGLERPLTRRGILMDITCDSDGQVEHYVDGLGVESTLPMPVYGENEECHVGFFLVGAYQEILGDLHNLFGDTHCAEVWLDDEGKMDIRNVVRGDTVDQLLRYVNIDPSVIRENYQRIVSHPALDDATRKALLDELELGLQGYAYLEDE

SEQ ID NO: 147275 - protein, 395 aa, Unknown
  Bacterial polypetide isolated from the Sargasso Sea
MSDWSIEEAERVYGVSQWGGGYFQIGENGNVHITPVPEDPSIRIDFNSVIEDIRKEGVQFPVVVRFHDILRSQVAGLNKAFRSSIEEAEYQGQYQGVYPVKVNQMREVVEEIVDAGKPFNYGLEAGSKAELLTVLAMNTNEESLTILNGYKDDEVMRLALLGRKLGRRVVVVVEKYTELLLLVKIAKELDIDPIIGVRSKMTVKGRGKWESSGGERAKFGLTITEIINAARYLEEQGMAHCLKLLHFHIGSQLTDIRAVKEAVTEGARIYADLHKMGFELDYVDVGGGLGIDYDGSNSTNESSRNYSMQEYVADVVYGMKEMCDLEGVPHPHLVSESGRAITAHHSCVITEIVGEIKSNASQMDTSAKAGEHFFLKNMRELADTFDETTNMHEIY

SEQ ID NO: 147276 - protein, 140 aa, Unknown
  Bacterial polypetide isolated from the Sargasso Sea
MAVSTVPQGGTDHPWSVARSADLYGLNRWGDPYFSINARGHVVVQPRGDHGGSIDLMELLSGLEARDLSTPLLIRFDDILDDRLERLHAAFERAIAHYDYNGSYQGVFPIKCNQQRHVVEHLVDSGRRWDFGLEAGSKAE

SEQ ID NO: 147277 - protein, 307 aa, Unknown
  Bacterial polypetide isolated from the Sargasso Sea
PIYASKANSSIFMSSLVSSEGLGLDAVSEGELLTAIKGGVPNEKIVFHGNNKSDKELEFAVRNNIKVIVDNDYDLERLDEISNSFNHDLDIMIRFTPGIECHTHEYIRTGSFDSKFGFGIEYLNILFKRISDTKRLKLKGLHAHIGSQIFELDPHKDLGEIMVKVILDAKKFGHNIEELNVGGGLGISYTQSDDPPSIDEWVKTISSSVVEACKKNNLDFPTLMCEPGRSIVSTAGITIYKIGAFKEIPGIRTYLSVDGGMSDNPRPITYQSNYSACLVSNPFNINSTNKYTIAGKHCESGDVLLKK

SEQ ID NO: 147278 - protein, 223 aa, Unknown
  Bacterial polypetide isolated from the Sargasso Sea
MSSFIYKDNILFCENVAVTDIVKEVGTPAYVYSKKTLLDNFHSYSNAFKKNDGLVCFSVKSLSNISVLKLLKDEGSGFDIVSGGELERVLAAGVDPKKIIFTGIAKSNEEIIQGIRKNILSFNIESEAEMLRIEKLATDENKIVDVAIRFNPEIDSGGHEYIKTGRKKDKFGVLLEGVINLSKYILNSSSLNLIGLSCHIGSQIFELNDFEESAKYIKKLAKE

SEQ ID NO: 147279 - protein, 113 aa, Unknown
  Bacterial polypetide isolated from the Sargasso Sea
MRPSMYGSYHAMSVLRRDGSTAAEQPTVVAGPLCESGDVFTQGDGGVVLPRDLPAAQVGDLLVIHDTGAYGASMSSNYNTRPLIAEVLVDGGQARLIRRRQTVDELLALELGL

SEQ ID NO: 147280 - protein, 235 aa, Unknown
  Bacterial polypetide isolated from the Sargasso Sea
VNSKTFYELVNYCKNSKNINLQCLSVHIGSQILDYKPYERMLKAVSNIIIKTKHKFKFVDLGGGMGISYSDKIKKLNYKKYNLAIKNFLKKHDTKIIFEPGRSIIGNTGTLVSKIIYIKDGGVKKFIILDAAMNDLMRPALYGAVHKILPVNKSNSVSTNAYEFVGPICESTDKFVTLKKFQKLKEKDLVAICDVGAYGMSLSSNYNLRPKAVELLIKGRKIKIIKNRQKHTDLI

SEQ ID NO: 147281 - protein, 292 aa, Unknown
  Bacterial polypetide isolated from the Sargasso Sea
KYYPGESLPIYASKANSSIFMSNLVSSEGLGLDAVSEGELLTALKGGVPNEKIVFHGNNKSDKEIDFAIRNNIKIIVDNDYDLKRLEVISDSLNRDLEIMIRFTPGIECHTHEYIRTGSFDSKFGFGIEYLNNLFASISDTKHLKLNGLHAHIGSQIFELDPHKDLGEIMVKVIMDAKKFGHNIQALNVGGGLGIKYTQNDDPPSIEEWVKTISNSVVKACKKQNLDLPKLMCEPGRSIVSTAGITIYKIGSFKEIPGIRTYLSVDGGMSDNPRPITYQSNYSACLVKNPFN

SEQ ID NO: 147282 - protein, 296 aa, Unknown
  Bacterial polypetide isolated from the Sargasso Sea
GTPFYCYSYSKLKENINKFKKNFRSFSPLICFAVKSNTNVNLIREIKKFGLGADVVSLGELMIAIKAGIKPNKIVFSGVGKTSSELNFAINKKILLINAESLSEIIEINRLAKLRNKKVRVGVRLNPNTDAKTLNQISTGKKENKFGVNKDTFHKIVDFCKNSKNIDLKCLSVHIGSQILDYKPYRKMLEAVSHILDKTNHQFEFIDLGGGMGINYSNKDKTLNYKKYNTAINNFLKKHNVKIIFEPGRSIIGNTGMLISRVIYIKDSGRKKFIILDAAMNDLMRPALYGAFHRTL

SEQ ID NO: 147283 - protein, 274 aa, Unknown
  Bacterial polypetide isolated from the Sargasso Sea
MFQWEELKRALRAKVSPSKIICEGVGKSEKDIEFAITKNIRQINVESIEELILIEEISKKLNNITSIGIRINPDIDARSLDKISTGRRTDKFGIGFRELSNVCDIIKNSEKIKFEGLSCHIGSQIFELSTFEKFFLKMKDAINIFKEHNLNIKHLDLGGGFGVSYSSDNRELDFSKLALLVEKIFPDPGFEISFEPGRYLVATSGFLLTKILINKKNSDNNFLITDAGMQTFLRTAIYNSFHKIISLKKEPGEIKYNIAGPICESSDILGKDVL

SEQ ID NO: 147284 - protein, 264 aa, Unknown
  Bacterial polypetide isolated from the Sargasso Sea
MDFFNYNNNQLFAEDIAVKELAEQYGTPCYIYSRKTFERHYRAFADAAKSHKSLVCYAVKANSNIAVLNILARLGSGFDIVSKGELARVIEAGGDASKVVFSGVAKTADEITYALKLGIKCFNVESVAELERISEVATSLNLVAPISIRVNPDIDAKTHPYISTGLKENKFGIDIQTAVTVYQHAASLPGLKITGVDCHIGSQLTEIKPFLAALEKVLTLIEELKAVGITLSHLDIGGGMGVPLYGETPPHPSEYVDKITARLA

SEQ ID NO: 147285 - protein, 260 aa, Unknown
  Bacterial polypetide isolated from the Sargasso Sea
DTNKKISPGRKSDKFGISFEKIEEVINIIKKSDYLRLKGISCHIGSQINKTEIYEKVFIKMKKAEKIISKHNIIIDCLDLGGGFGITYNNEKKLDIKKLSNLIKNNFKNENYSISIEPGRYLVANAGILITKVLYTKKNGNINFLITDAGMQSFMRPAMYNSFHKVISLSKNNLNEKYTIAGPICESTDILAKDIELPTQKQGNFLSICDTGAYGFVMASNYNTHTKPSEILIYENQYAVIRKKEEISDLINKDIIAKWL

SEQ ID NO: 147286 - protein, 290 aa, Unknown
  Bacterial polypetide isolated from the Sargasso Sea
VFHGNNKSDKELELAVRNNIKVIVDNDYDLERLDEISNSFNHDLEIMIRFTPGIECHTHEYIRTGSFDSKFGFGIEYLNILFNRISNTKHLKLKGLHAHIGSQIFELDPHKDLGEIMVKVILDAKKFGHNIEELNVGGGLGIRYTESDDPPSIDEWVKTISSSVVEACKKYNLDFPTLMCEPGRSIVSTAGITIYKIGAFKEIPGIRTYLSVDGGMSDNPRPITYQSNYSACLVSNPLNINSKNKYTIAGKHCESGDVLFKEIELAKCKTGDLICVFGTGAYNNSMSSNY

SEQ ID NO: 147287 - protein, 242 aa, Unknown
  Bacterial polypetide isolated from the Sargasso Sea
FKLKGLHAHIGSQIFELDPHKDLGEIMVKVIVEAKKFGHNIEELNVGGGLGIKYTENDDPPSIDEWVKTISSSVVKACDKNNLDLPTLMCEPGRSIVSTAGITVYKIGAFKDIPGIRTYLSVDGGMSDNPRPITYQSNYSACLVSNPFNLNSKKKFTIAGKHCESGDVLFKEIELADCKTGDLICVFGTGAYNHSMSSNYNRIPRPAALVVFDGEAEIIQKRETPFDLLKHDVLPDRFIRQN

SEQ ID NO: 147288 - protein, 273 aa, Unknown
  Bacterial polypetide isolated from the Sargasso Sea
SEIKEINRIAKSKNKRIKIGVRLNPNTDAKTLSQISTGKKENKFGVNKNTFYEIINYCKNSKNIDLKCLSVHIGSQILDHRPYEKMLKAVSEVLNKTNHKFEFIDLGGGMGITYTDKNKKLNYKKYNTAILKFLRKHKVKIIFEPGRSIIGDTGTLVSKIIYIKDSGSKKFIILDAAMNDLIRPALYGAFHKTLPVTKSNKTSKKTYEFVGPICESTDKFVTLKKFQMLSERDLIAICDVGAYGMSLSSNYNLRPKPIELLIKGSKIKVIRKR

SEQ ID NO: 147289 - protein, 259 aa, Unknown
  Bacterial polypetide isolated from the Sargasso Sea
CRAYKKALEKYFPGESLPIYASKANSSIFMSNLISSEGLGLDAVSEGELLTALKGGVPNEKIVFHGNNKSDKELEFAVRNNIKVIVDNDYDLERLDEISNSLNRELDIMIRFTPGIECHTHEYIRTGSFDSKFGFGKEYLNILFNKIRVTKHLKLKGIHAHIGSQIFELDPHKDLGEIMVKVIIDAKKFGHYIDELNVGGGLGIKYTESDDPPAIEEWVKTICSSVVKACKKNNLDFPTLMCEPGRSIVSTAGITIYKI

SEQ ID NO: 147290 - protein, 274 aa, Unknown
  Bacterial polypetide isolated from the Sargasso Sea
LDAVSEGEMLTALKGGVPNEKIVFHGNNKSDKEIEFAVRNNIKVIVDNDYDLERLEKISNLFKRDLEIMIRFTPGIECHTHEYIRTGSFDSKFGFGIEYLNILFDRISKTKYLKLNGLHAHIGSQIFELDPHNDLGEIMVNVILDARKSGHDIKKLNVGGGLGIKYTENDDPPSIDEWIKTISTSIIKACKKHNLDLPILMCEPGRSIVSTAGITIYKIGAFKEIPGIRTYLSVDGGMSDNPRPITYQSNYSACLVSNPFNTNSKNKYTIAGKH

SEQ ID NO: 147291 - protein, 167 aa, Unknown
  Bacterial polypetide isolated from the Sargasso Sea
QYNGEETKTPDELLTVYAKIFKDRDEEIYIEPGRAIAANAGMLVTEVEYCKNNFLIVDAAMNDLIRPALYQAKHKVREVVNNKVNKKTFDIVGPICETGDYLAKGVELSCKTGDLVAIGTAGAYGFSMSSNYNTRPRSAEILVDGDKFTLIRKRETLSELIANEVES

SEQ ID NO: 147292 - protein, 290 aa, Unknown
  Bacterial polypetide isolated from the Sargasso Sea
NKFYAIDKKIFLINAESKSEIIEINRIAKLKRKKIQIGIRLNPNTDAKTLNQISTGKKENKFGVNKKTFFELINNFKNYKNIELKCLSVHIGSQILDHKPYEKMLNVVSKILNQTNHKFEFIDLGGGMGISYDDNYKKLNYKKYNIAIKKFLKNYKSKIIFEPGRSIVGNIGILISKIIYIKESEKKNFIILDAAMNDLMRPALYGTNHKILPSIKTNRNSNKTYEFVGPICESTDKFTTLKNFQKLKEKDFIIICDVGAYGMSLSSNYNLRPKAIELLIKKSKIKVIKK

SEQ ID NO: 147293 - protein, 290 aa, Unknown
  Bacterial polypetide isolated from the Sargasso Sea
IKEIKKFGLGADVVSIGELMTAIKAGINPKKIVFSGVGKTSNEIIYAIEKKILLINAESKSEIKEINRIAKLKKKKIKIGIRLNPNTDAKTLSQISTGKKENKFGVDEKTFIDLVKYCKNSRNILLSCLSVHIGSQILNHKPYERMLKVIDKIINKTNYKFEFIDLGGGMGISYNGKNKKLNYKKYNFAINRFLKKHKSKIIFEPGRSIIGNTGTLISKIIYIKETKNKNFIILDAAMNDLMRPALYGATHKILPSKKKGKQTKKIYEFVGPICESTDKFITLKKFQKLK

SEQ ID NO: 147294 - protein, 292 aa, Unknown
  Bacterial polypetide isolated from the Sargasso Sea
LVLLIPLLCFSVKSNSNLQILKEVKKMGMGADVVSKGEMMQALKAGISPKKIVFSGVGKKTDELKFAIEKKILLINAETESEIFEIERLAKLKKTVVHIGIRLNPNIDAKTLRKISTGKREDKFGLTEKPFLDILNNFKFSRFVKVKCLSVHIGSQITDYKPYSKMINVLDKIIKKSQHVFDYIDLGGGMGVQYQKKTKSFNYQKYSAIIKKFLKRHDVKIIFEPGRSIIANCAVLFAQIIYIKNTEKKRFIILDAAMNDLMRPALYGSYHNIIPLIKRSKKNKTIHDFVGP

SEQ ID NO: 147295 - protein, 243 aa, Unknown
  Bacterial polypetide isolated from the Sargasso Sea
MKFIKNTPYIEDTSLDDICKVCETPFYVYSQEVIQNKVKMIKKILGKNIFFSVKSNSNQAILKLMKNLEIGADVVSIGELKRALSAGFSKDKIIFEGVGKSKDDLLYAIQKNIRLINTESLEEIKLLEKLGNEKNIKINIGVRLNPDIDGNTINKISTGKKTDKFGIEIDDIEKIINLIKNSNYLNLIGISCHIGSQISKIDIYKKTFKEMKNAADQFVSAGIKIKHVDLGGGFHVRYKDDDP

SEQ ID NO: 147296 - protein, 281 aa, Unknown
  Bacterial polypetide isolated from the Sargasso Sea
RSLSAGFHPSKIIFEGVGKSKEDLIYAIQKNIRLINTESIEEIKLLQKLALEKNKIIDIGVRLNPNIDGGTINKISTGKKTDKFGIEIHEIENIVNLISNCNNLNLIGISCHIGSQISNIEAYSNTFSEMRKAADKFISLGINIKHVDLGGGFHVRYNNEDPEFKIENVRKELDKYFSKTSYELSFEPGRYLIAEAGILVTSVINTKQNGGINYLIVDAGMNTLVRPAMYNAYHEIESIRKNENNTLHYTIAGPICESSDIFIKNILLSKQSMGDILIIKN

SEQ ID NO: 147297 - protein, 275 aa, Unknown
  Bacterial polypetide isolated from the Sargasso Sea
KNDIEFALHQKIKQINVESVEELKLINNIAGSLKVIANIGIRLNPDIDALTLDKISTGRKKDKFGISFDKINTICSLIPNYQNLNIKGISCHIGSQINDSSIYEKVFLKMKKASEIMEAQGLNINHIDLGGGFGVTYEQEKELDLKIISNLIKKIFNQKYEISFEPGRYLVANAGTLITKILIAKEDGLVNYLITDAGMQTFLRPALYSVNHNIVPFKKNKKNKKYTVAGPICESTDNFVKDFDLPEQSIGNFLAICDTGAYGFVMASNYNTRNL

SEQ ID NO: 147298 - protein, 132 aa, Unknown
  Bacterial polypetide isolated from the Sargasso Sea
GNAGVLLTKVEYIKDDFLIVDAAMNDLLRPSLYKARHDVWNVSQAQKEEKNWTIVGPVCESSDVIIKDHKIHASENDFLAIKTAGAYGFVMSSNYNSRMRCAEVLVNGNKHYEIRKRESFGDLIKNEIINND

SEQ ID NO: 147299 - protein, 215 aa, Unknown
  Bacterial polypetide isolated from the Sargasso Sea
HKIAKLKNRKIQVGVRLNPNTDAKTLSQISTGKKENKFGVNKNTFFKIIEFCKNSDYVDLKCLSVHIGSQILDYRPYEKMLKAVSQILNKTSHKFEFIDLGGGMGIKYSLKSKKLDYKKYNLAIIKFLKSHKVKIIFEPGRSIIGDTGILVSKVIYVKDSGRKIFIILDAAMNDLMRPALYGAIHRTLPVAKSNKTSKKPYEFVGPICESTDKFI

SEQ ID NO: 147300 - protein, 284 aa, Unknown
  Bacterial polypetide isolated from the Sargasso Sea
MSSFIYKDNILFCENVAVTDIVKEVGTPAYVYSKKTLLDNFHSYSNAFKRNDGLVCFSVKSLSNISVLKLLKDEGSGFDIVSGGELERVLAAGVDPKKIIFTGIAKSNEEIIQGIRKNILSFNIESEAEMLRIEKLATDENKIVDVAIRFNPEIDSGGHEYIKTGRKKDKFGVLLEGVINLSKYILNSSSLNLIGLSCHIGSQIFELNDFEESAKYIKKLAKEINKLGIELKFLDVGGGLGISYADSNFPSPSDLIKNLENILSDRNEKIILEPGRSVSGDAGI

SEQ ID NO: 147301 - protein, 285 aa, Unknown
  Bacterial polypetide isolated from the Sargasso Sea
LLKEIGRMGLGADVVSIGELSLALKAGIKPNKIVFSGVGKSSSEIIFAIKKKILLINTESRSEILKIEKIAKKRNKKVNIGIRFNPNTDAKTLSQISTGKKENKFGVTEKVFLDLVEYSKNSKNLKLKCLSVHIGSQILDNKPYEKMLNVLERVLKKAKFHFEYIDLGGGMGIDYSQNSKKLNLKRYSSKIEKFNKKHQSKIIFEPGRSIVGNSGVLISKIIYIKEGHKKDFIILDAAMNDLIRPALYGANHRIIPVSKNNKKSNKVYEFVGPVCESTDKFSTIK

SEQ ID NO: 147302 - protein, 291 aa, Unknown
  Bacterial polypetide isolated from the Sargasso Sea
FGTPSYCYSLNKLKSNIKNFKKLFKSINPIICFSVKSNSNLQILREIKKMGMGAHVISKGEMIMALKAGISPKKIVFSGVGKTYEELKFAIDKKILLINSESESEINEIEKISKIKKKKIDIGIRLNPNIDSGTLKKISTGKKENKFGLTKYSFLKIIKKYKNSKNLNLKCLSVHIGSQITNHIPYIKMLKVIESIIKKSNYNFDFIDLGGGMGIKYNEKTKKLDYKKYYIAIKKFLKKYKTKIIFEPGRSIIADCAMLLTKILYIKKANNINFIILDAAMNDLIRPALYG

SEQ ID NO: 147303 - protein, 299 aa, Unknown
  Bacterial polypetide isolated from the Sargasso Sea
ADVVSMGELMMAIKAGISPKKIVFSGVGKTFEELLYAINKNIFLINAESENEIKQIEKIAKSKKKKIEIGIRLNPNTDAKTLSQISTGKKENKFGVNSKTFVRLVHNYRNSRNIKLKCLSVHIGSQIIDHKPYEKMLKSITKILKKINYEFEFIDLGGGMGISYNDYEKKLDYRKYCIAIKKFLNKNKSKIIFEPGRSIVGNTGTLISKVIYIKKSERKNFIILDAAMNDLMRPALYGATHRLIPALKKNKILRENHEFVGPICESTDSFLTLKKFQKLRENEIIVMCDVGAYGMSLSS

SEQ ID NO: 147304 - protein, 309 aa, Unknown
  Bacterial polypetide isolated from the Sargasso Sea
MLCCKASSNQAILKTLAKFGAGMDVVSGGEYKRARDAGVDGSRIVFSGVGKTGAEMKLALHEGVRQFNVESEEELLVLSGVAHDMNRVAPISIRVNPDVDAKTHEKIATGKAENKFGIPISRAREVYATAASLPGIQIVGIDLHIGSQLTQLLPFEKAYKKIADLTDVLRSDGHEIKRLDLGGGLGIPYGLEDGSPPTPKEYGEMVKRVLGHLNCEIEIEPGRLLVGNAGLLVSEVIYVKKGHDRDFLILDAAMNDLLRPALYEAYHDIVPVKKSSSNQESAIYDVVGPVCETGDTFAKSRTIKKCSSG

SEQ ID NO: 147305 - protein, 235 aa, Unknown
  Bacterial polypetide isolated from the Sargasso Sea
MITNCNNINLIGISCHIGSQISNIDAYKNTFTEMKRAANKFSSAGINIKHVDLGGGFHVKYNKDDPEFKIENVKKELDECFSKSNYELSFEPGRYLIAEAGILVTSIINTKQNGGINYLIVDAGMNTLVRPAMYNAYHDIETINKKNDNLIKYTVAGPICESSDIFIRNILLSGQSMGDILIIKNTGAYGKVMSSTYNTRSLPSEILVNAENFAIIYSPDKIEKNIDEDIIPSWL

SEQ ID NO: 147306 - protein, 266 aa, Unknown
  Bacterial polypetide isolated from the Sargasso Sea
EIKKLGLGADVVSKGELYASLKAGINKNKIVFSGVGKTKDEIEYAIKQEILLINSESLSEVLAIEKAAKKLNKVVSIGLRLNPDTDAGTLKQISTGKSENKFGVDKKTFIKIINLMKDSEFLNIKCLSVHIGSQILNHKPYEKMLNVLDKLLRNLDYKFDFIDLGGGMGINYDDKTKKLNYLKYKKSIIKFKNKYNCKIIFEPGRSIIGNVGILATKVIYLKRNKTKTFVILDAAMNDLIRPALYNAKHRIIPSLRNKSRSNKILE

SEQ ID NO: 147307 - protein, 211 aa, Unknown
  Bacterial polypetide isolated from the Sargasso Sea
MSSFIYKDNILFCENVAVTDIVKEVGTPAYVYSKKTLLDNFHSYSNAFKKNDGLVCFSVKSLSNISVLKLLKDEGSGFDIVSGGELERVLAADVDPKKIIFTGIAKSNEEIIQGIRKNILSFNIESEAEMLRIEKLATDENKIVDVAIRFNPEIDSGGHEYIKTGRKKDKFGVLLEGVINLSKYILNSSSLNLIGLSCHIGSQIFELNDFE

SEQ ID NO: 147308 - protein, 278 aa, Unknown
  Bacterial polypetide isolated from the Sargasso Sea
FAIEKKILLINTESESEIFEIERLAKLKKKIVNIGIRLNPNIDAKTLKKISTGKHEDKFGLTEKAFLNILNKFENSKYVKVKCLSVHIGSQITDYKPYLKMLNVLDLIIKKSKYFFEYVDLGGGMGIQYDKKTKVFNYKKYNKIIKKFLKRHNVKIIFEPGRSLIANTAVLFTQIIYIKNTNKKKFIILDAAMNDLMRPALYGSYHSIIPLLKTNKKNKRIHDFVGPVCETTDKFLSVKSFQDLKEKEFVAISDVGAYGMSLSSNYNLRPKPLEIMIN

SEQ ID NO: 147309 - protein, 214 aa, Unknown
  Bacterial polypetide isolated from the Sargasso Sea
MDYFNYKKGKLFAEEVSIEEIANKFGTPSYIYSKATLERHAKAYIDSFQSMKGLICFSVKALSNISILKILKKTGCGFDIVSGGELHRVILAGADPKKIIFSGVGKSRAEMAAGINHNILSFNIESEPELDRLNSVAKEMNKIAPIAIRFNPNVDAGAHEFTKTGRKTDKFGVSIETTKNLVKKCNDSDNLNLVGLTCHIGSQIMELGGFEDAA

SEQ ID NO: 147310 - protein, 238 aa, Unknown
  Bacterial polypetide isolated from the Sargasso Sea
LDFGICFFNVESFDELVAINRVSKDVGVNAKISIRVNPDIDPKTHPYISTGLKTSKFGIAIEDSYDAYIEASKMKNIDVVGIDAHIGSQIFDLQPFEDSLLRLEDLYHKLNDLGINIRFIDIGGGLGIKYKDDDIPPTKKEFAEKIIKTMKKINCSLILEPGRSLVGNAGYLISKVLYKKKSNQKNFLIIDAGMNDILRPSLYNAYHKVSKSIQASDNSEIFDIVGPICETGDVISYD

SEQ ID NO: 147311 - protein, 305 aa, Unknown
  Bacterial polypetide isolated from the Sargasso Sea
RGNEFLFDGVKVKKLAKKFSTPIYCYSLKRIKKNVEDFKNAFKKFNPIICYSVKANPNKILLREIGKLGLGADVVSLGELMKALKSGIKPSKIVFSGVGKTANEISFAINKKILLINAESKSEILVIEKIAKNKRKKVDIGIRLNPNTDAKTLKQISTGKKDDKFGVSEKSFLELVKYVRNSKNLNLKCLSVHIGSQILDNKPYEKMLKTIINVIKKTNFSFEYIDLGGGMGIDYENKNRLLNFKRYSSDIKRLINLVDSKIIFEPGRSIIGNVGILISKIIYIKKGFKKDFIILDAAMNDLMRP

SEQ ID NO: 147312 - protein, 288 aa, Unknown
  Bacterial polypetide isolated from the Sargasso Sea
LIINAESESEIKEMERIAKLNKKKVEIGIRLNPNTDAKTLSQISTGKKGNKFGVDSKTFLSLTKYCKKSKNINLRCLSVHIGSQILDHKPYEKMLKVLLNIIKKSNYKFDFIDLGGGMGIPYDNIEEKLNFKKYNLAIKKFLKINNSTIIFEPGRSIIGNTGILVSKVIYIKKNPKKDFIILDAAMNDLIRPALYGAFHRILPAKKRNKKIKKKYEFVGPICESTDKFSSIKYSQELNEKDLVIIHDVGAYGMSLGSNYNLRLKPVELLIKNSKITIIRKRQTYKDII

SEQ ID NO: 147313 - protein, 302 aa, Unknown
  Bacterial polypetide isolated from the Sargasso Sea
MEEKKSFLKQNIDFESPNKNIVPITTSIGSNGKLSIGGCSIEELVEKYDSPLYILDEITLRNSCRAYKRALEKYYPGDSLPIYASKANSSIFMSNLVSSEGFGLDAVSEGELLTALKGGVPNEKIVFHGNNKSDKEIEFAVRNNIKVIVDNDYDLERLERLSNSFNHDLEIMIRFTPGIECHTHEYIRTGSFDSKFGFGKEYLNVLFGRIRNTKHLKLKGLHAHIGSQIFELDPHKDLGEIMVKVILEAKKFGHNIEELNVGGGLGIKYTESDDPPSIDEWVKTISSSVIKACEKNNLGFLR

SEQ ID NO: 147314 - protein, 293 aa, Unknown
  Bacterial polypetide isolated from the Sargasso Sea
SLEEIKLLQKFALEKNKIVDIGVRLNPNIDGGTISKISTGKKTDKFGIEINEIENIVSLVSNCSNLNLIGISCHIGSQISNIDAYKNTFIEMKKAADKFLASGINIKHVDLGGGFHVQYNKNDPKFKIEDLKNELDSCFSSSIYELSFEPGRYLIADAGILVTSIINTKKNGGINYLIVDAGMNTLVRPAMYNAHHDIEAISKKIENTTTYTVAGPICESTDIFIKNILLSKQTIGDILIIKNTGAYGKVMSSTYNTRSLPAEVLVNKENFAMIYTPEKIEKNIEEDIIPNWL

SEQ ID NO: 147315 - protein, 257 aa, Unknown
  Bacterial polypetide isolated from the Sargasso Sea
RLNPDIDPLTNSKISTGRKEDKFGISKKQFVKIVKKIKSSKNLNLKCLSVHIGSQITNYKPYSKMLNVIENLIKKTKHNFNYVDLGGGMGIKYEKNSKELNYQKYSSLIGRFLKKNKTKIIFEPGRSIIGDAGVLISKIIYIKDAIKIKFVIMDAAMNDLIRPALYGAKHEIKAVKKNNIKINKLHEFVGPVCETSDKFSSLKKYQKLNENDFLAIYDVGAYGMALSSNYNLRTKPAEILVDRSKVKVITKRQLIKN

SEQ ID NO: 147316 - protein, 233 aa, Unknown
  Bacterial polypetide isolated from the Sargasso Sea
MKTIDGQLFVENIPVIELAKEYGSPLFIYSSKEIENNFLNYKNEIRDQDLVCYAVKANSNIHILKLLSDLGSGFDVVSGNELQRCLLAGADRKKIVFSGVAKSHEEIKLAIESDILSINIESVGEFERIAAIAKELNKTVNCALRINPDIKIGSHKYIETGSKTSKFGLDKESVSKISELSKSNEHINIKAVACHIGSQISNENLILKSLIYIKEIADQLKGEGHELNFLDIG

SEQ ID NO: 147317 - protein, 279 aa, Unknown
  Bacterial polypetide isolated from the Sargasso Sea
NNLEILKLIKKNNIGADVVSIGELLIALKAGISPNKIVFSGVGKTKEEISIAINKKILLINAESESEIDSIENIARKKKKVVNIGIRLNPNIDAKTNNKISTGRNVDKFGVDRISFSKIVNKYKSSRYIKIKCLSVHIGSQITNFRPYTKMVKVIDKFISKLNYKFDYIDFGGGMGIQYDLKSKKLDYKKYLHSIKIFLKKNKVKIIFEPGRSIIGDTAVLLTKIIYIKKTNKKNFVILDAAMNDLMRPALYGSFHKIIPVERSKKIIKKTHTFVGPIL

SEQ ID NO: 147318 - protein, 304 aa, Unknown
  Bacterial polypetide isolated from the Sargasso Sea
LYCYSYKKLKQNIDDFKLNFKSFSPLICFATKANSNLKILKEIKKNGLGADVVSKGELMKALKAGISSKKIVFSGVGKTSSELSYAIDKKILLINSESKSEVLEIERIAKSKNKIVDVGIRLNPNTDANTLKQISTGKKENKFGVNEKTFIEIYKIIKKSRSINLKCLSVHIGSQILDHKPYEKMLKVIDKLIEKIKFKFEFIDLGGGMGISYQNENKKLNYKKYNLAIKKFLKKHKSKIIFEPGRSIVGNAGILLSKIIYIKENPKKNFIILDAAMNDLMRPALYGAKHRIIPIIKRNIISNK

SEQ ID NO: 147319 - protein, 278 aa, Unknown
  Bacterial polypetide isolated from the Sargasso Sea
LSSPNRNLAPLSTDMDPEGRLRVGECVLSELAQRFGTPLYVIDERSLRQACSAYREALERHYPGPSLAVYASKANSSLAITAVVASEGLGLDAVSAGELLTALEGGMPPERIVLHGNNKSSEELALAVQNGVTVVVDNWHDITLLQELAQGRTEPVALMLRFTPGIECHTHEYIRTGHLDSKFGFDPDQLEQVLTHLAGCRWARVQGLHAHIGSQIFEVEPHRDLAAVLADALVLARHLGHDPSDLNVGGGLGIRYVASDDPPSIDGWVQVVAEAMVA

SEQ ID NO: 147320 - protein, 168 aa, Unknown
  Bacterial polypetide isolated from the Sargasso Sea
EVPPTPHEYVNAITDITRECDLEIIIEPGRSIIGNAGVLLTKVEYLNKTPLKNFAVVDAAMNDLIRPSLYDGWHEIKRVTEESSEGVKAYDVVGPICETGDFLGRNRKLSLNEGDLLAIQSAGAYGFSMSSNYNSRPRASEVLVDGTKVHEIRRRETFEDLINGEYLV

SEQ ID NO: 147321 - protein, 296 aa, Unknown
  Bacterial polypetide isolated from the Sargasso Sea
KFAIEKKILLINAESKSEIQEINKIAKQKRKIVKIGIRLNPNTDAKTLKQISTGKSENKFGVNSKTFYELVNYCKNSKNISLECLSVHIGSQILDYKPYERMLKVISNIINKTKYKFKFVDLGGGMGISYSDKIKKLNYKKYNLAIKFFLKKHDTKIIFEPGRSIIGNTGTLISKIIYIKDGGEKKFIILDAAMNDLMRPALYGAIHKILPINKSNRISRCIYEFVGPICESTDKFVTLKKFQKLKEKDYVAICDVGAYGMSLSSNYNLRPKAVELLVKGRKIKIIKNRQKHKDLI

SEQ ID NO: 147322 - protein, 222 aa, Unknown
  Bacterial polypetide isolated from the Sargasso Sea
MLSREENQLFFDKISMKELAEKYGTPSFVYSEGRIIENFLTIKRAFSSTTTDICFAVKANSNIGILQVLARQGAGFDIVSGGELARVLKAGGDPEKIVFSGVGKQDWEIIEGLKNKIRCFNVESAAELEKIAQIASSYGQIAPVSLRVNPNIDAKTHPYISTGLAESKFGIKIESAEHLFQRADEDPHLNLVGIDCHIGSQITEIEPFLAALNILINLVQRL

SEQ ID NO: 147323 - protein, 295 aa, Unknown
  Bacterial polypetide isolated from the Sargasso Sea
MEEKQSFLKQELDLESPNKNIAPITTSIGEDGKLSVGGCSIEELVKKYDSPLYILDELTLRKSCRAYKKALEKYYPGESLPIYASKANSSIFMSNLVASEGLGLDAVSEGELITALKGGVPNEKIVFHGNNKSDKEIDFAIRNNIKIIVDNDYDLKRLEEISNSLNHDLEIMIRFTPGIECHTHEYIRTGSFDSKFGFGIEYLNNLFATISDTKHLKLKGLHAHIGSQIFELDPHKDLGEIMVKVILDSKKFGHNIEELNVGGGLGIKYTKNDDPPSIDEWVKTISNSVVKACRK

SEQ ID NO: 147324 - protein, 288 aa, Unknown
  Bacterial polypetide isolated from the Sargasso Sea
IAAEMNVLAPVALRVNVDVTPGTHAKISTGQRDTKFGIPADQRETKTLYEQIVNDPFMAPAGLAVHIGSQIHDLAPFERAYSSLLKLATDFRDSGLPVPNLDLGGGFGVDYNTADTADFSKYGTLVTRIFEGQGFELGFEPGRSIVANNGALLTRVIYIKHGGNKRFVIVDAAMNDLLRPTLYDAHHAILTLAEPQSPTGKADIVGPICETGDYLGLNRDMPNLEADDGLAVLSAGAYGATMASNYNSRSPAAEVMVVDGVTHLLRAARPIDDFIKEENIPDFTKLPD

SEQ ID NO: 147325 - protein, 266 aa, Unknown
  Bacterial polypetide isolated from the Sargasso Sea
IKKFGLGADVVSLGELMMALKAGIKPNKIVFSGVGKTSSELNFAINKQILLINAESLSEIMEINRLAKLRNKKVRVGVRLNPNTDAKTLNQISTGKKENKFGVNKNTFHKIVNFCKNSKNIDLKCLSVHIGSQILDHKPYGKMLKAVSHILDKTNHQFEFIDLGGGMGINYSDKNKTLNYKQYNTAINNFLKKHKVKIIFEPGRSIIGNTGMLISKVIYIKDSGRKKFIILDAAMNDLMRPALYGAFHRTLPVIKSNKISNKPYEF

SEQ ID NO: 147326 - protein, 246 aa, Unknown
  Bacterial polypetide isolated from the Sargasso Sea
FYWVKVKINFGVNSKTFYELVNYCKNSKNISLQCLSVHIGSQILDHKPYEKMLKAVSNIINKTNHKFKFVDLGGGMGISYSNKIKKLNYKKYNLAIKNFLKKHDTKIIFEPGRSIIGNAGTLISKIIYIKDGGAKKFIILDAAMNDLMRPALYGAVHKILPVDKSNSVSTNAYEFVGPICESTDKFVTLKKFQKLKEKDLVAICDVGAYGMSLSSNYNLRPKAVELLIKGRKIKIIKNRQKHTDLI

SEQ ID NO: 147327 - protein, 220 aa, Unknown
  Bacterial polypetide isolated from the Sargasso Sea
MGKKDNKFGVDDKTLMKIIGYCKNSKYLSLKCLSVHIGSQILNYKPYIKMLKVLTKTLNQIDYKFDFIDLGGGMGITYNKNNKKLNYKKYNYAIKKFLKNYKSKIIFEPGRSIIGNTGTLISKVIYIKKNGKKKFIIIDAAMNDLMRPALYGADHKILPLSKINMFSNMVTEFVGPICESTDKFSTLKGFQKLEEKDLIAICDVGAYGMSLSSNYNMRPK

SEQ ID NO: 147328 - protein, 310 aa, Unknown
  Bacterial polypetide isolated from the Sargasso Sea
MQYKNQIFHVDKVSTDKLAKKYGTPLYCYSYLQLKNNIINFKKNFEKTNPLVCFSLKSNSNIKILNEIKRLNCGADVVSKGEMMRAIKSGINNKKIVFSGVGKTYSELEYAINKNILLINVESESEILTIEKIAKIKKKKVNIGIRLNPNIDAKTLKQISTGREQDKFGLIEKDFIKLANYSKKSNFLRLMCISVHIGSQILSHKPYEKMLKTIDRIIKKVDHKFDYIDLGGGMGITYEKKNKRLNYQAYNYLLQKFLKNKTCRIIFEPGRSIIGNAGIFISKIIYIKKNKNKNFIILDAAMNDLMRPAL

SEQ ID NO: 147329 - protein, 285 aa, Unknown
  Bacterial polypetide isolated from the Sargasso Sea
NANLAVLNVLARLGSGFDIVSGGELARVIEAGGSPAKVVFSGVGKTVVEMEQALNLGIYCFNVESSAELEQLNLVAGRLGKVAPVSLRINPDVDAGTHPYISTGLKENKFGIAMDEAEIVFARAHALPHLKVKGVDCHIGSQLTEIQPFLDAMDRMLALIDRLAEQGIVIEHFDVGGGLGVTYDDETPPHPDVYAAALLKRLGNRKLKLIFEPGRAIAANAGIFVTQVLYLKENSDKRFAIVDGAMNDLIRPALYSAWQNIIPVAPRDSEAYEFDIVGPVCETGD

SEQ ID NO: 147330 - protein, 209 aa, Unknown
  Bacterial polypetide isolated from the Sargasso Sea
HIGSQILDHKPYGKMLKAVSHILDKTNHQFEFIDLGGGMGINYSDKNKTLNYKQYNTAINNFLKKHKVKIIFEPGRSIIGNIGILISKVIYIKDSGRKKFIILDAAMNDLMRPALYGAFHRTLPVIKSNKISNKPYEFVGPICESTDKFITLKKFQKLKEKDLIAICDVGAYGMSLSSNYNLRPKPIELLIKGSKINVIRKRQKYTEII

SEQ ID NO: 147331 - protein, 279 aa, Unknown
  Bacterial polypetide isolated from the Sargasso Sea
GDGKLSVGGCSIEELVKKYDSPLYILDEITLRNSCRAYKKALEKYYPGKSLPIYASKANSSIFMSSLVSSEGLGLDAVSEGELLTAIKGGVPNEKIVFHGNNKSDKELEFAVRNNIKVIVDNDYDLERLDEISNSFNHDLEIMIRFTPGIECHTHEYIRTGSFDSKFGFGIEYLNTLFNKISNTKHLKLKGLHAHIGSQIFELEPHKDLGEIMVKVILNAKKFGHNIEEINVGGGLGIRYTESDDPPSINEWVKTISSSVVEACKKNNLDFPTLMCEPG

SEQ ID NO: 147332 - protein, 267 aa, Unknown
  Bacterial polypetide isolated from the Sargasso Sea
NPDVDPNTHPYIATGLRENKFGVPAADAPALYRKANAMAGIEVVGIGCHIGSQLTEIAPFCDAVERVLDVVDTLAQDDIELSHLDLGGGVGIRYSDETPPDPKDYVQAILAILKRRNCDLAVTLEPGRAIAGNAGVLLSSVEYIKSGPEKDFVIVDAAMNDLLRPALYQAWHEVVRADRGPDREMHTCDVVGPVCETGDFIARDRQLAVAPGDLVAVRSVGAYGFVMASNYNTRPRPAEVMVDGDQLYVVREREQTADLFSAETLLP

SEQ ID NO: 147333 - protein, 303 aa, Unknown
  Bacterial polypetide isolated from the Sargasso Sea
GKTFSELQYAINKNILLINVETKSELLIIEKIAKQKKKKVDIGIRLNPNIDAKTLKQISTGKEGDKFGLTEKEFIKITKYAQISKFLSLKCISVHIGSQILSHKPYEKMLKTIDHLIKKTNHKFDFIDLGGGMGIDYEKNNKMLNYKIYSSLITKFLKKRKSKIILEPGRAIIGNAGILISKILYIKKNKNKNFVILDAAMNDLMRPALYGTKHQIIPSVKNNKITNKIFEFVGPICESTDKFLTTKKYQNLKEGDFIIICDVGAYGMSLSSNYNVRPNPAEILIKNSKIQIIKKRQKLNDIN

SEQ ID NO: 147334 - protein, 274 aa, Unknown
  Bacterial polypetide isolated from the Sargasso Sea
GLSARIGVRVNPNVLASTPHEYTATGHSDTKFGVPWEEARALYRWALERDSLDPIGIDVHIGSQIVEIEPYVLALERVLGVVKDLVAEGVPLKYLDIGGGFGISYGQGSGLDIGALAKEIVPRVLDSGLRLILEPGRSLVAEAGVFVTEVQYVKNCGQKTFVIVDGGMSELIRPSHYGGYHQIEPVGPIDGRAEAVVDVVGPICETGDFLALDRSMPLPMEGELLAVRTAGAYGFTMASNYNGRPRPAEVLVDGIDVRLVRRRETYEDLISGEV

SEQ ID NO: 147335 - protein, 266 aa, Unknown
  Bacterial polypetide isolated from the Sargasso Sea
MDYFLYKNSELFCEDINLQEIAKEFGTPAYVYSKKTIERHIDVYKNAFQKKDNLICFSVKSLSNISILNILKEKDCGFDIVSGGELQRALHIKTNPKKIIFSGVGKSNEEILEGINNEILSFNIESESELFRIEKIASENNKVVDVAIRFNPEVDSGGHEYIKTGRKGDKFGISPNNLVLKLGKYIYGSKHLRLIGLACHIGSQIGDLESYKSTAISIRQLAEEIDKTGNELKFLDLGGGLGIPYNNDKTPSPDDLVSTIEEELKE

SEQ ID NO: 147336 - protein, 324 aa, Unknown
  Bacterial polypetide isolated from the Sargasso Sea
MKLALKSNIKPNKIVFSGVGKTVEELRYAISKKIFLINCESFSEVKLINSLSKKMKLKTKIGLRLNPNINAKTHSKISTGNDKDKFGLSKLEFKKVIMNFKNSDFIEISALTVHIGSQIKEVFPFNNCLNFLNKTIADLKKVNIKIKYVDLGGGMSIPYDFKETKFPLKKYASNVYNFKKKNNVKIIFEPGRFLSGNVGIIISKIIYIKEGAKKKFIVTDAAMNDLIRTALYDANHTILPINRRKEIKSRIEFVGPICESSDKFGEYKTFSKLEESDYICITNTGAYGRSLSSNYNMRPLIAELLIKNNKILIIRKRQNINQIP

SEQ ID NO: 147337 - protein, 404 aa, Unknown
  Bacterial polypetide isolated from the Sargasso Sea
MKYINKILTIEKINLQKIANKFGTPFYSYSYSKLKENINNFKKNFRSFSPLICFAVKSNTNINIIREIKKFGLGADVVSVGELMMALKAGINPSKIVFSGVGKTTSEISFAIDKKILLINAESLSEIKEINRIAKSKNKRIKIGVRLNPNTDAKTLSQISTGKKENKFGVNKNTFYKIINYCKNSKNIDLKCLSVHIGSQILDHRPYEKMLKAVSQILNKTNHKFEFIDLGGGMGITYTDKNKKLNYKKYNTAILKFLRKHKVKIIFEPGRSIIGDTGTLVSKIIYIKDSGSKKFIILDAAMNDLMRPALYGAFHKTLPVSKSNKTSKKAYEFVGPICESTDKFVTLKKFQVLKEKDLIAICDVGAYGMSLSSNYNLRPKPVELLIKGSKIKVIRKRQKHKDII

SEQ ID NO: 147338 - protein, 409 aa, Unknown
  Bacterial polypetide isolated from the Sargasso Sea
MIKKLIDDNKIHDFAQKVTTPFYIYSSDKIIENYNSYARPLTEIDSLICYSVKANSNLSILKMLSNNNSGFDVVSKGEIERVLLAGGDAEKIVFSGVGKTMDEIEFGIAKNILCFNVESLDELKSISEVASSLNKRANISIRVNPSIDPKTHPYITTGLSENKFGIHENEIFDAYKMAKDLDNLNIVGIDYHIGSQITDLQPFVDSATKVLEIVHALKEMKINLSHIDVGGGLGITYKDEKSIKRESFLDKLIEIISPTDLKLIVEPGRSIVGDAGLLVTKILNIKNSGDKNFAIVDAAMNDLLRPPLYNAHHRIKNISKPSNSKEAIYDVVGPVCETADYLGKDRKLSIQKGDYLIVEDVGAYGFSLSSNYNSRPRIAEYILLEDEIKLIRSREDFSNLILDESDLMI

SEQ ID NO: 147339 - protein, 404 aa, Unknown
  Bacterial polypetide isolated from the Sargasso Sea
MRYINNKFFIEGKKVESLTKQFNTPLYCYSYKNLRENVENFKKAFEEIRPLICFSVKSNSNISLLKEIKKLGLGADVVSKGELYASLKAGIDKNKIVFSGVGKTRDEIEYAIKQKILLINSESLSEVLTIEAVAKKLNKVVDIGLRLNPDTDAETLKQISTGKSENKFGVDKKTFVKIINLMKQSKFINIKCLSVHIGSQILNHKPYEKMLNVLDKLLKNLDYKFEIIDLGGGMGINYDNKTKKLNYTKYKKSIIKFKNKYNCKIIFEPGRSIIGNVGILASKVIYLKHNKTKTFVILDAAMNDLIRPALYNAKHRIIPSLRNMSRSKKILEFVGPVCETTDKFLTERKFQNIKENDIMIICDTGAYGYSLSSNYNLRLRPAEILIKGNKVKIIRKRQKITDII

SEQ ID NO: 147340 - protein, 404 aa, Unknown
  Bacterial polypetide isolated from the Sargasso Sea
MRYVNKRLTVEKVNFLRIAKKFGTPFYCYSYSKLKENINKFKESFKSFAPLICFAVKSNTNVNLIREIKKFGLGADVVSLGELMIALKAGIKPNKIVFSGVGKTSSELNFAINKKILLINAESLSEIMEINRIAKLKNKKVRVGVRLNPNTDAKTLNQISTGKKENKFGVNKNTFHEIVEFCNSSKNIDLKCLSVHIGSQILDHKPYGKMLKAVSHILEKTNHQFEFIDLGGGMGIKYSQTNKKLNYKKYNTAINNFLKKHKVKIIFEPGRSIIGNTGILISKVIYIKDSGRKEFIILDAAMNDLMRPALYGATHRTLPVIKSNKILNKTYEFVGPICESTDKFITLKKFQKLEEKDLIAICDVGAYGMSLSSNYNLRPKPIELLIKGSKISVIRKRQKYAEII

SEQ ID NO: 147341 - protein, 154 aa, Unknown
  Bacterial polypetide isolated from the Sargasso Sea
MAAYPQLSLIFEPGRAIMANAGVLLTKVEYLKPGQEKHFAIVDAAMNDLIRPALYSAWQSIIAVQQKPEIPAVTYDVVGPVCETGDFLGKDRALALEPGDLLVVRSAGAYGFTMSSNYNSRPRAAEVLVDGDRSYLVRQREQWQDLWHGEQLVP

SEQ ID NO: 147342 - protein, 246 aa, Unknown
  Bacterial polypetide isolated from the Sargasso Sea
ISTGKKENKFGVNEKTFYEIIEYCKGSQNIDLNCLSVHIGSQILDHKPYEKMLKVVDNILKKTSHEFEYIDLGGGMGISYSEKNKKLNYKKYNLAIKKFLKNKKCKIIFEPGRSIIGNAGILITKVIYIKDSESKKFIILDAAMNDLMRPALYGAIHKTLPVIKSGKISKKTYEFVGPICESTDKFVTIKNFQELQEKDYIAICDVGAYGMSLSSNYNLRTKPLEILIKNNKIKIIRKRQKHKDLI

SEQ ID NO: 147343 - protein, 386 aa, Unknown
  Bacterial polypetide isolated from the Sargasso Sea
KKKNSFLKQKIDLESPNRNIVPITTTIGGDGKLSVGGCSIEELVKKYDSPLYILDEITLRNSCRAYKKALEKYYPGNSMPIYASKANSSIFMSSLVSSEGLGVDAVSEGELLTAIKGGVPNEKIVFHGNNKSDKELEFAVRNNIKVIVDNDYDLERLDEISNSLNRDLEIMIRFTPGIECHTHEYIRTGSFDSKFGFGIEYLNILFNRISNTKHLKLRGLHAHIGSQIFELDPHKDLGEIMVKVILDAKEFGHNIKELNVGGGLGIKYTENDDPPSIDEWVETISSSVVKACEKNNLDFPTLMCEPGRSIVSTAGITIYKIGAFKEIPGIRTYLSVDGGMSDNPRPITYQSNYSACLVNNPFNLNSKNKYTIADKHCESGDVLFKE

SEQ ID NO: 147344 - protein, 362 aa, Unknown
  Bacterial polypetide isolated from the Sargasso Sea
MPRSLYATDTDLTAENLLRLPAEFGCPVWVYDAQIIRRQIAQLSQFDVVRFAQKACSNIHILRLMREQGVKVDSVSLGEIERALAAGYDPQQHPEDIVFTADLIDEATLERVKALQIPVNAGSVDMLSQLGEVSPGHRVWLRVNPGFGHGHSQKTNTGGENSKHGIWYSHLPAALEVMRRYQLQLVGIHMHIGSGVDYGHLEQVCGAMVRQVVEFGQDLQAISAGGGLSIPYREGEEAIDTDHYYGLWNAAREQIARHLGHPVKLEIEPGRFLVAESGVLVSQVRSVKEMGSRHFVLIDAGFNDLMRPSMYGSYHHITALAADGRNLSAAPLIDTVVAGPLCESGDVFTQQEGGKGGDAFAA

SEQ ID NO: 147345 - protein, 273 aa, Unknown
  Bacterial polypetide isolated from the Sargasso Sea
MEEKQSFLKQKIDFESPNKNIVPITTSIKGDGKLSVGGCSIEELVKKYDSPLYILDEITLRKSCRAYKKALEKYYPGESLPIYASKANSSIFMSNLVSSEGLGLDAVSEGELLTALKGGVPNKNIVFHGNNKSDKEIDFAIRNNIKIIVDNDYDLRRLEEISNSLNHDLEIMIRFTPGIECHTHEYIRTGSFDSKFGFGIEYLNNLFASISETKHLKLKGIHAHIGSQIFELDPHKDLGEIMVKVILDAKKFGHNIKELNVGGGLGIKYTIND

SEQ ID NO: 147346 - protein, 329 aa, Unknown
  Bacterial polypetide isolated from the Sargasso Sea
TSPVATSQLPWAAGGVDLSSPNRNLAPLTTDIGPEGRLRVGECVLSELAQRFGTPLYVIDERSLRQACSAYRKALQRHYPGPSLAVYASKANSSLAITAVVASEGLGLDAVSAGELLTALEGGMPPERIVLHGNNKSSEELALAVQNGVTVVVDNWHDITLLQELAQGRTEPVALMLRFTPGIECHTHEYIRTGHLDSKFGFDPDQLEQVLTHLAECRWARVQGLHAHIGSQIFEVEPHRDLAAVLADALVLARRLGHDPTDLNVGGGLGIRYVASDDPPSIDGWIQVVAEAMVSACRERNLELPRLLCEPGAIPSGSCKRDVVHSWQP

SEQ ID NO: 147347 - protein, 283 aa, Unknown
  Bacterial polypetide isolated from the Sargasso Sea
MLTYKNNDPYIEGTSLYDLVKVCQTPFYVYSQEKIINQVNKTKEILGNNIFYSIKSNSNQAILKLMNSLDIGADVVSVGELKRALEAGFNPNKIIFEGVGKSEQDLLYAMHKNIRLINTESLEEIKLLDNLANEKNKIVDIGVRLNPDVDGETLSKISTGKKTDKFGIEFENLDKIIKLVKSCKNLNLIGISCHIGSQISKIEAYKNTFSQMKMAANKFIESGINIKHVDLGGGFHVKYEDSDPNFNIEMVKEELDNCFTQTKYELSFEPGRYLIAEAGVTVT

SEQ ID NO: 147348 - protein, 246 aa, Unknown
  Bacterial polypetide isolated from the Sargasso Sea
MNNKTFDGSDIFPNNSFVNEKNNISINDVDLKDLAEEFGTPLYVYDEETIINTIKDFQNSFNSEIENSVISYSTKAFSNPYILNLLNENAMSIDVVTGGELAVAKYVDFSAERINFHGNNKSVEELSEAVDYGINHITIDSFNEIENLKRICESKSIDQDIMIRVSPSIDPHTHLLTTTGILDSKFGFSIETGDAERAIEKIMKIKALNLQGLHFHLGSPIFELEPYSEAIDYVYKFASEMKKKYG

SEQ ID NO: 147349 - protein, 414 aa, Unknown
  Bacterial polypetide isolated from the Sargasso Sea
YFAYSQGQLHAEQVAVSDMQPQHGTPVYIYSRATLERHWHAFNDAIGEHPHLVCYAVKANSNIGVLSVLAKLGSGFDIVSAGELARVIEAGGDASKVVFSGVGKKHDEIRYALEQGIMCFNVESEPELHRINQVAGEMGVKAPISLRINPDVDAKTHPYISTGLKANKFGIARERALATYELAASLPHLNVVGMDCHIGSQLTEIGPFVDALERLLLLIDELAERNIIIEHLDVGGGLGVTYNNEQPPHPKAYAQAMAEKMVGRENLKLILEPGRAIAANAGILVTEVEFIKEGEEKSFAIVDAAMNDLLRPALYSAWQKIIPVKEETTATPRIYDVVGPVCETGDFIGKDRELAIEPTDLLAVRSAGAYGFVMASNYNSRCRPAEIMVDGDEAIVVREREKQKDLWQGEYKLP

SEQ ID NO: 147350 - protein, 412 aa, Unknown
  Bacterial polypetide isolated from the Sargasso Sea
MSLDSRQLATLAQQYGTPLWVYDADVIRDRIAQLRQFDLIRYAQKANSNVHILKLMREEGACVDAVSLGEIERSLAAGFSPAGEPEGVVFTADLIDRPTLAAVLKHGVTVNAGSLDMLARIGEHAPGHRVWLRVNPGFGHGHSNKTNTGGPQSKHGIWIDDVPRAIEIVRQYGLKLVGIHMHIGSGVDYGHLSQVCDAMVDLVTSLGHDIDAISAGGGLSIPYRDGEPRVDVGHYFSQWDAARKRIERHLGHPVRIEIEPGRFLVAEAGTLVTEVQAVNRRPKHDFVLIDAGFNDLMRPSMYGSYHAVSVHTHDGALPAGRPLVDLAIAGPLCESGDVFTQDAGGVVTHRKLAQPQIGDLLFLHDAGAYGASMSSNYNSRPLAPEVLVDRGAPRLIRRRQTIDELLALETFE

SEQ ID NO: 147351 - protein, 415 aa, Unknown
  Bacterial polypetide isolated from the Sargasso Sea
MKDTTPERTSHIDGIPVKEIAESFGTPSIVYSYNKIYENFNAIKQSFESEKRKIFYSVKANSNLSILKIFNDLGAGFDIVSLGELKRVLSVNVDPKNIVYSGVGKSSNEILECMKINIRSFNVESIAELERIIKLSNEHKCLTRVSIRVNPNIDADTHEYISTGVEDSKFGISLSDIKDAVNLTQNNSFVELIGIDYHIGSQILDIKPFLKAIESVAQLYNELCDLGLNINLINMGGGLGINYTDESPPSLEEFGKEITSKIKECNLESLEFIIELGRSLIGNTGILITKVEYVKKGDQKNFLIVDAGMDNLIRPCLYNSKHKILNSSSSKDNGLKYDIVGPVCECSDFLGKDVEISAKQDDLICIYGCGAYVSSMSSNYNSRLKAAEIIIINDKCKEIRKRDTYEQLTENEILI

SEQ ID NO: 147352 - protein, 404 aa, Unknown
  Bacterial polypetide isolated from the Sargasso Sea
MKYKNKQLITENINFQSLAKKFGTPAYCYSYSKLEENINNFKENFKSFSPLICFSVKSNNNLNIIKEIMKFGLGADVVSKGELMLALKAGVNPSKIVFSGVGKTSEEISFAIEKKILLINAESKGEIEEINKIAKRKKKIVQVGIRLNPNTDAKTLKQISTGKSENKFGVNSKSFYELVNYCKNSRNVNLQCLSVHIGSQILDYKPYERMLKAVSNIINKTNHKFKFVDLGGGMGISYSDKIKKLDYKKYNSAIKNFLRKHDTKIIFEPGRSIIGNTGTLISKIIYIKDGGTKKFIILDAAMNDLMRPALYGAVHKILPVNKSNSISRYIYEFVGPICESTDKFVTLKKFQKLKEEDFVAICDVGAYGMSLSSNYNLRPKAVELLVKGRKIKIIKNRQKHSDLI

SEQ ID NO: 147353 - protein, 403 aa, Unknown
  Bacterial polypetide isolated from the Sargasso Sea
MRFLNSKLKIENTILQNIAKKYGTPAYCYSYKQLRENINDFKKNFKSISPLICFAIKSNTNLNLIKEIKKFGLGADVVSMGELMLALKAGISPKKIVFSGVGKTSKEINFAIDKNILLINSESKSEIIEIDKIAKIKKKQVNIGIRLNPNTDAKTLSQISTGKKDNKFGVNDKTFFELVRYCKNSKNINLKCLSVHIGSQILDHKPYEKMLRILDKIIKKTQYKFDFIDLGGGMGIPYNNDKKLNYKKYHSAIKKFLKNKKSQIIFEPGRSIVGNTGVLISKVIYIKESYKKNFVILDAAMNDLMRPALYGAVHRILPLLKRSKKSKKIYEFVGPICESTDKFTSIKNFQELKEKDFIAICDVGAYGISLSSNYNLRPKPIEILINGSKIRVVKKRQKHHEII

SEQ ID NO: 147354 - protein, 276 aa, Unknown
  Bacterial polypetide isolated from the Sargasso Sea
MLNYKNNDPYIEGTSLHDLVKVCETPFYVYSQEKIINQVNKTKEILGNNIFYSIKSNSNQAILKLMNSLDLGADVVSVGELKRALEAGFNPNKIIFEGVGKSEQDLLYAMHKNIRLINTESLEEIKLLDSLATEKNRVVDIGVRLNPDIDGETLSKISTGKKTDKFGIEIDKIDKIVELVKTCKSLNLVGISCHIGSQISKIEAFKNTFNQMKMAANKFIESGINIKHVDLGGGFHVKYKDSDPDFNIGMVKEELDSCFTKTNYKLSFEPGRYLIA

SEQ ID NO: 147355 - protein, 220 aa, Unknown
  Bacterial polypetide isolated from the Sargasso Sea
SKNLNLKCLSVHIGSQILSHKPYKDMLKVVNKVIKKCNYNFEYIDLGGGMGIDYNHNNSKLDFKKYSEEIEKFLKINNCKIIFEPGRSIIGNSGILITKIIYIKKGFKKDFIILDAAMNDLMRPALYGATHKIMPLKKIKSKSKKVYEFVGPICESTDTFLTVKNYQQLNEKDYLIICDVGAYGMSLASNYNLRPKPLEILIKNSKIQILNKRQKISELM

SEQ ID NO: 147356 - protein, 416 aa, Unknown
  Bacterial polypetide isolated from the Sargasso Sea
MDHFNYDADGQLQAEHTSLQQLAEQYGTPLYVYSRATLERHWHAFDKAAGDIPHLICYAVKANSNLALLNLLARLGSGFDIVSGGELSRVLAAGGDPAKVVFSGVAKSEAEMRLALDKEILCFNLESEAELERLNRVAGGMGKKARVSVRVNPDIDAGTHPYISTGLKQNKFGIPIEQAPAIYRKAAAMANIEIVGVDCHIGSQLTELNPFMEAADKLLRLIDGLAAEGIHIHHLDVGGGLGVNYGAEQPPHPSEYAEALKQKLAGRDLTLLFEPGRAIVANAGVLLTRVEYLKPGETRNFALIDAGMNDLLRPSLYGAWMNIIEVDSRTAHEPALYDVVGPVCETGDFLGKERTLAIAEGSLLAVRSAGAYGFTMSSNYNTRPRAAEVLVDGAQSFLIREREQLADLWRGEHLLP

SEQ ID NO: 147357 - protein, 443 aa, Unknown
  Bacterial polypetide isolated from the Sargasso Sea
MTKYSEFSGNEIFPNKSLINSKGNISIDSVDLEDLANEYGTPLYVYDESTIISTIKDFQNSFGAELDNAVISYSTKAFSNPYLLKILKENGMSIDVVTGGELAVAKHIDFPPKRMNFHGNNKSPDELEDAINYGIGHITIDSFNEIENLKNITSKLGVNQDVMIRVSPSVDPDTHLLTTTGILDSKFGFSIETGDAEEAIKRLVQIKSLSLIGLHFHLGSPIFELEPYSEAIEYVYEFASDMRNKYGIDVKEFSPGGGFAIGYLSKKQPPPISDYAKTIGDAVKKACDVNGFDIPKVILEPGRALVGRSGVSIYKIGSIKEIPGVRNYISVDGGMGDNIRPALYGSEYSVFSVNKITENNNLMKATISGKFCESGDYLAKDIDLPNPTIGDLLVLPASGAYNLAMASNYNMQIRPAVVMIKNGSHFLIRRRESYEDLLSTSVL

SEQ ID NO: 147358 - protein, 405 aa, Unknown
  Bacterial polypetide isolated from the Sargasso Sea
MKYSKNKHLTIENINFINLAQKYGTPAYCYSYSKLKENINNFKQNFKSFSPLICFSVKSNTNVNIIKEIKKFGLGADVVSKGELMLALKAGVSPSKIVFSGVGKTNEEINFAIEKKILLINAESKSEIQEINKIAKQKRKIVQVGIRLNPNTDAKTLKQISTGKSENKFGVNSKTFYELVNYCKNSKNISLQCLSVHIGSQILDHKPYEKMLKAVSNIINKTNHKFKFVDLGGGMGISYSNKIKKLNYKKYNLAIKNFLKKHDTKIIFEPGRSIIGNTGTLISKIIYIKDGGAKKFIILDAAMNDLMRPALYGAVHKILPVDKSNSVSTNAYEFVGPICESTDKFVTLKKFQKLKEKDLVAICDVGAYGMSLSSNYNLRPKAVELLIKGRKIKIIKNRQKHTDLI

SEQ ID NO: 147359 - protein, 209 aa, Unknown
  Bacterial polypetide isolated from the Sargasso Sea
MLTYKNNDPYIESTSLYDLVKVCETPFYVYSQEKIINQVNKTKKILSNNIFYSIKSNSNQAILKLMNSLDIGADVVSVGELKRALEAGFDPNKIIFEGVGKSDQDLLYAIHKNIRLINTESLEEIKLLDNLANEKNKIVDIGVRLNPDVDGETLSKISTGKKTDKFGIEFDNIDKIIKLVKSCKSLNLIGISCHIGSQISKNEAYKNTF

SEQ ID NO: 147360 - protein, 264 aa, Unknown
  Bacterial polypetide isolated from the Sargasso Sea
VNIGLRLNPDTNAQTLSKISTGKKEDKFGVSQKIFKRIIKNFKNSKYLKIKCLSVHIGSQITSNRPYEKMLRVIKNTIRNNNYNFEYVDLGGGMGIKYNLNQKKLDLNSYSSQIKSFLKKTNLKVIFEPGRFIIGDAGILLSKIIYIKQTKQKNFIILDAAMNDLIRPALYDAKHRISPSEKKNSFINKLHEFVGPICETSDKFLLTKKYQKIEQGDILIIHDVGAYGMVLSSNYNLRPKPAEVLIRGSKNIIIKKRQRINDIV

SEQ ID NO: 147361 - protein, 289 aa, Unknown
  Bacterial polypetide isolated from the Sargasso Sea
MARLGAGFDIVSRGELERVLAAGGQADKIVFSGVGKSREDMRRALEVGVHCFNVESTDELERLQMVAAEMGVRAPISLRVNPDVDAGTHPYISTGLKENKFGIAIADAEDVYIRAAQLPNLEVLGVDCHIGSQLTTLPPFLDALDRLLALIDRLGECGIYLHHIDLGGGVGVRYRDEEPPLIADYIQAVRERIEGRDLTLMFEPGRYIVANAGVLLTQVEYLKHTEHKDFAIVDAAMNDLIRPALYQAWMDVTAVTPRTSDARAYDIVGPICETGDFLAKDRELALEEG

SEQ ID NO: 147362 - protein, 286 aa, Unknown
  Bacterial polypetide isolated from the Sargasso Sea
VESQDELENINLLAAKINKVANISLRVNPDIDPKTHPYISTGLKSSKFGIAVDQALEIYKVSKNLKNVNPIGIDAHIGSQILDFQPFSDSLDRLEELFNKLTELNINIEYIDIGGGLGIKYSDDDIIPSKKDFAKKIVTKINKLKCGLVLEPGRSLVGNSGVLLTSVVYEKNNYGKNFLIVDAGMNDILRPSLYNAYHKIEKVSDSTENEKTFDIVGPICETGDVLGRDVQINNAKKGDILVINSAGAYGHVMSSNYNSKPKAPEVLIHDGKAKVIKKRETIVQIL

SEQ ID NO: 147363 - protein, 305 aa, Unknown
  Bacterial polypetide isolated from the Sargasso Sea
KRALEAGFDPNKIIFEGVGKSKQDLLYAMHKNIRLINTESLEEIKLLDSLANDKNKIVDIGVRLNPDIDGETLSKISTGKKTDKFGIEINNLDKIIELVKSCKSLNLIGISCHIGSQISKIEAYKNTFNQMKKAADKFMQSGIKIKHIDLGGGFHVKYKDSDPEFNIEMIKEELDNCFAQTNYELSFEPGRYLIAEAGVIVTSIITIKNNGGVNYLIVDAGMNTLIRPAMYGAHHEILAINLKSEESLEYAIAGPICESSDIFSKNVKLAKQEIGNLLVIKNTGAYGKVMSSNYNSRPLPSEILV

SEQ ID NO: 147364 - protein, 295 aa, Unknown
  Bacterial polypetide isolated from the Sargasso Sea
YPGESLPVYASKANSSLLMSSIAAAEGLGLDAVSAGELLTALQGGMPGRRMVLHGNNKSDEELLLAYDNDVTIVVDNQHDLERLEQLVPAGGEPSRLMLRFTPGIECHTHEYIRTGHLDSKFGFDPDLLESVLKQLVGQPWARLTGLHAHIGSQIFELEPHRDLAAVMADALGLARRLGHPVTDLNVGGGLGIRYVETDDPPSIDHWVEVVAEGVTAACRERDLELPRLMCEPGRSLVATAGITLYSVGSRKTIPGVRTYVAIDGGMSDNPRPITYQSLYTCCLADRPLAEATET

SEQ ID NO: 147365 - protein, 273 aa, Unknown
  Bacterial polypetide isolated from the Sargasso Sea
SGAALLAGIRCFNIESEGEMTSLASIALDLGRVAPISIRVNPNVDTETHPYITTGTKQNKFGVPLEHAERLYKLATESRALDPVGIDCHIGSQIMDLDPFSQSLACLLSLLERLTSLGIDLKHIDIGGGLGVSYKDELSPSPKELIDKVAPQLSGYDLELIVEPGRSVVANAGILATEVVYLKYNDYRQFAIVDAAMNDLIRPSLYDAWQDIEPVQLKKESRQLWDVVGPICETGDFLGKDRPLALKEGDLLAVLNAGAYGYSMASNYNSRPR

SEQ ID NO: 147366 - protein, 221 aa, Unknown
  Bacterial polypetide isolated from the Sargasso Sea
ISGIACHIGSQISDNSLIIKSLEHLLDAQKLLIKDEHKLEFLDIGGGLGITYKEETPGNPESLILEILNKISALNLNIILEPGRSITGTAGILVTKVEYLKLTEHKNFAIIDAGMNDLMRPALYDAWHTVKEVKKRDLDKKIYELVGPVCESSDVLAKERELSISQGDFIAFMDAGAYGSVMSSNYNSRLKVPEILVNGSSAKLIKRRESFEDLIALETNV

SEQ ID NO: 147367 - protein, 298 aa, Unknown
  Bacterial polypetide isolated from the Sargasso Sea
IKYEILSFNIESESEIKRIEEIASSENKVANVAIRFNPEVDSGGHEYIKTGRKGDKFGISSEESVLKIAKYIYKSNHLKLVGLACHIGSQILDLQSYKLTAKNIKDLSFKIKDLGNELDFLDLGGGLGIPYEQDDTPSPQDLISIIEEELKGIEERIILEPGRSISGNAGILLTKVEYIKDNFLIVDAAMNDLLRPALYKAKHDVWSLKEDDSKSKAWIIAGPVCESSDIIAKDIHTNAGEGDTLAIKTAGAYGFVMSSNYNSRMRSAEVLVDGKEFNIVRTRETFEDLIKNEIDLND

SEQ ID NO: 147368 - protein, 227 aa, Unknown
  Bacterial polypetide isolated from the Sargasso Sea
SGVDYAHLEQVCGAMVRQVVDFGQDLEAISAGGGLSIPYREGEEAIDTDHYYGLWSAARDKIAAHLGHPVKLEIEPGRFLVAESGVLVAQVRSVKEMGSRHFVLIDAGFNDLMRPSMYGSYHHISALAGDGRDLTHAPGVETVVAGPLCESGDVFTQQEGGKVETRTLPDVKPGDYLVLHDTGAYGASMSSNYNSRPLLPEVLFDRGVARLIRRRQTIQELLALELV

SEQ ID NO: 147369 - protein, 422 aa, Unknown
  Bacterial polypetide isolated from the Sargasso Sea
MSVGGCSIEELVKKYDSPLYILDEITLRKSCRAYKKALEKYYPGESLPIYASKANSSIFMSNLVSSEGLGLDAVSEGELLTALKGGVPNEKIVFHGNNKSDKEIDFAIRNNIKIIVDNDYDLRRLEEISNSSNHDLEIMIRFTPGIECHTHEYIRTGSFDSKFGFGIEYLNNLFASIRETKHLKLKGIHAHIGSQIFELDPHKDLGEIMAKVILDAKKFGHDIKELNVGGGLGIKYTTNDDPPSIDEWVKTISNSVVKACKKHNLDLPKLMCEPGRSIVSTAGITIYKIGAFKEIPGIRTYLSVDGGMSDNPRPITYQSNYSACLVKNPFNINSKNKYTIAGKHCESGDVLFKEIELANCETGDLICVFGTGAYNNSMSSNYNRIPRPAALLVCNGEAEIIQKRESPIDLLKYDVLPDRFIK

SEQ ID NO: 147370 - protein, 414 aa, Unknown
  Bacterial polypetide isolated from the Sargasso Sea
MDHFLYQDNTLYAEGCRVNDLAQQYGTPLYIYSRATLERHWHAFNNAVADHPHLVCYAVKANSNLAVLNVLARLGSGFDIVSGGELARVIEAGGDPAKVVFSGVGKTVAEMEQALNLGIYCFNVESSAELEQLNDVAGRLGKVAPVSLRVNPDVDAGTHPYISTGLKENKFGIAMDEAEVVFARAHALPHLQVKGVDCHIGSQLTEIQPFLDAMDRMLALIDRLAEQGIVIEHFDVGGGLGVTYDDETPPHPDVYAAALLARLGNRKLKLIFEPGRAIAANAGIFVTQVLYLKENSDKRFAIVDGAMNDLIRPALYSAWQNIIPVNPRDEQAQVFDIVGPVCETGDFLGKDRALAIAAGDLLVVRSSGAYGFAMASNYNTRPRAAEVMVDGDKAYLVREREKLAQLWQGEQLLP

SEQ ID NO: 147371 - protein, 407 aa, Unknown
  Bacterial polypetide isolated from the Sargasso Sea
MKEIEGQLCIENIPVINLAREYGSPLFIYSAELIKNNFEKYQNELGSNDLICYAVKANSNLHILKLLSELGSGFDVVSGNELKRCLRAGADKNKIVFSGVAKSNEEIKLAIENDILSINIESYGEFERIAKISEQLKKSVNCALRVNPDIAIGSHKYIETGSKTSKFGLDSEAVNKISDEARDNKLVNITSVACHIGSQISDENLILKSLDVISEIANNLSLNGHAIKFLDIGGGLGIQYKDEEEGDPGILMAGVKNRLEGKEYKIILEPGRSIIGSAGILVTKIEYIKNAGGKKFAIIDAGMNDLIRPSLYEAWHEVKELENKEISSDTYDLAGPVCETGDILAKDRNLKILPNDFVAFMDVGAYGSVMSSNYNSRLKPMELLVMDGEIEVIRRKETFEDLIALES

SEQ ID NO: 147372 - protein, 412 aa, Unknown
  Bacterial polypetide isolated from the Sargasso Sea
MEGFNEKEGQLYVDDLPISDIAHKFGTPAFIYSGSAIKNNYNRYANALRKGDQICYAVKANSNIHILKELVRLGSGFDVVSGNELKRCIEAGADPRKIVFSGVAKSTEDIELAINLGILSINIESEDEFDRIAKISKAIKKAVQCSIRINPDIPTGSHKYIETGLKTSKFGVDNETLLNISLKAKDTPLIKISGIACHIGSQISDNSLIIKSLEFLLDARQLLMKNGHEINFLDIGGGLGITYKEESPGNPESLMSEISNALKGSNINIVLEPGRSITGNAGILISNVEYLKLTEYKNFAIIDAGMNDLMRPALYDAWHAVKAIKRNDSAKRIYELVGPVCESADVLAKDRELVLAQGDLIAFMDAGAYGSVMSSNYNSRLKAPEILVHGSSSKLIKRRESYEDSIALEKDL

SEQ ID NO: 147373 - protein, 422 aa, Unknown
  Bacterial polypetide isolated from the Sargasso Sea
MLSDQEPSTVTTFNPQQLVELARQYGTPLWVYDADVIRQRIAELRSFDVIRYAQKACSNVHILKLMRDEGAMVDAVSLGEITRSLAAGFTPDGDPEGVVLTADLVDHATLATVIEHRITVNTGSLDMLERVGQHAPEGHRVWLRINPGFGHGHSNKTNTGGEHSKHGIWLDDVPLAIAMVRRYGLKLVGLHMHIGSGVDYTHLARVCNAMVEAVRSLGHDIEAISAGGGLSVPYSAGEPRIDAGHYFRLWDDARKQIEAHLGHHVRLEIEPGRFLVAEAGVLIAEVHALNRRPNRQFVLVDAGFNDLVRPSFYGSRHEMTVVKGNGMRSEATVGAFTVAGPLCEAGDVFTQEAGGVVTNRAMATPEVGDFIVFHDAGAYGASMSSNYNSRPLAPEVLLEKGKPRLIRRKQTMQELIALEMPG

SEQ ID NO: 147374 - protein, 405 aa, Unknown
  Bacterial polypetide isolated from the Sargasso Sea
MTWKVLTKISVPITTSIEGDGKLSVGGCSIEELVKKYDSPLYILDEITLRNSCRAYKKALEKYYPGKSLPIYASKANSSIFMSSLVSSEGLGLDAVSEGELLTAIKGGVPNEKIVFHGNNKSDKELEFAVRNKIKVIVDNDYDLERLDEISNSFDNDLEIMIRFTPGIECHTHEYIRTGSFDSKFGFGIEYLDILFNRISNTKHLKLKGLHAHIGSQIFELDPHKDLGEIMVKVILNAKKYGHNIEELNVGGGLGIRYTESDDPPSIDEWVKTISSSVVEACKKNNIDLPTLMCEPGRSIVSTAGITIYKIGAFKEIPGIRTYLSVDGGMSDNPRPITYQSNYSACLVSNPFNINSKNKYTIAGKHCESGDVLFKEIELAECKTGDLICVFGTGAYNNSMSSNYN

SEQ ID NO: 147375 - protein, 407 aa, Unknown
  Bacterial polypetide isolated from the Sargasso Sea
MKTIDGQLFVENIPVIELAKEYGSPLFIYSSKEIEDNFLNYKNEIRDQDLVCYAVKANSNIHILKLLSDLGSGFDVVSGNELQRCLLAGADRKKIVFSGVAKSHEEIKLAIESDILSINIESVGEFERIAAIAKELNKTVNCALRINPDIKIGSHKFIETGSKTSKFGLDRESVSKISELSKSNEHINIKAVACHIGSQISDENLILKSLIYIKEIADQLKGEGHELNYLDIGGGLGIQYKDEEKGDPKILISEVKTLLKETDYQVIVEPGRSIVGTSGILLTKVEYIKEAGEKKFAIIDAGMNDLIRPSLYEAWHKVREVEEGDVESETYDLAGPVCETGDILARDRSLKIQPNDYLVFMDVGAYGSVMSSNYNSRLKPAELLVTKDVAKVIKRKENFEDLIALES

SEQ ID NO: 147376 - protein, 411 aa, Unknown
  Bacterial polypetide isolated from the Sargasso Sea
MSYFSYKNNILYCEKVKISDIADKYGTPAYIYSKKTLSENFDAYANAFDKKSGLICFSVKSLSNLSILKFLSEKGSGFDIVSGGELERTLLAGADPKKIIFTGIAKTDEEILFGIEKNILSFNIESKSEMMRIEKIARDKKKLVDVAIRFNPEIDAGGHEYIKTGRKKDKFGILVSETLKLAKYISNSEHLNLIGLSCHIGSQIFELDDFKAAANFTKKLAEEVNKMSIELKFLDVGGGLGISYTDSNFPSPKDLLKIIENELQDRDEKIILEPGRSISGNAGIMISKIEYIKENYLIIDAGMNDLIRPALYNAKHSVINTTKGAGNNGSWTIVGPICESSDVLAKDYEMEAAEGDIIAVETAGAYGHVMSSNYNSRRKPPEILVSNDKYELIRKRETYEDLLKNEVDLSG

SEQ ID NO: 147377 - protein, 414 aa, Unknown
  Bacterial polypetide isolated from the Sargasso Sea
MDHFLYQDNTLYAEGCRVNDLAQQYGTPLYIYSRATLERHWHAFNNAVADHPHLVCYAVKANSNLAVLNVLARLGSGFDIVSGGELARVIEAGGDPAKVVFSGVGKTVAEMEQALNLGIYCFNVESSAELEQLNDVAGRLGKVAPVSLRVNPDVDAGTHPYISTGLKENKFGIAMDEAEVVFARAHALPHLQVKGVDCHIGSQLTEIQPFLDAMDRMLSLIDRLAEQGIVIEHFDVGGGLGVTYDDETPPHPDVYAAALLKRLGHRKLKLIFEPGRAIAANAGIFVTEVLYLKENSDKRFAIVDGAMNDLIRPALYSAWQNIIPVNPRDEEAQVFDIVGPVCETGDFLGKDRQLAIAAGDLLVVRSSGAYGFAMASNYNTRPRAAELMVDGNKAYLVREREKLAQLWQGEQLLP

SEQ ID NO: 147378 - protein, 412 aa, Unknown
  Bacterial polypetide isolated from the Sargasso Sea
MDYFAYKNKNLYCEDVNLQEIVEEYGTPTYVYSKKTIERHVDVYKNAFKLHKNLICFSVKSLSNISILDLINKKGCGFDVVSGGELKRALHAGADPKKIIFSGVGKSYDEILLGIKYEILSFNIESESEVNRIEEIASSQNKIANVAIRFNPEVDSGGHEYIKTGRKGDKFGISSEESVLKIAEYIYKSNHLKLVGLACHIGSQILDLQSYKQTAKNIKDLSFKIKDLGNELDFLDLGGGLGIPYEQDETPSPQDLISIIEEELKDMEERIILEPGRSISGNAGILLTKVEYIKDDFLIVDAAMNDLLRPALYKAKHDVWSLKKDDTNSKAMTIAGPVCESSDIIAKDIHTNAGEGDILAIKTAGAYGFVMSSNYNSRMRSAEVLVDRKEFNIVRTRETFEDLIKNEIGLYD

SEQ ID NO: 147379 - protein, 338 aa, Unknown
  Bacterial polypetide isolated from the Sargasso Sea
MDYFAYKNNELFCEDINLREIAEEFGTPAYVYSKKTIERHIDVYKNAFKKKDNLICFSVKSLSNIAILNILKEKDCGFDIVSGGELQRALYVKTNPKKIIFSGVGKSNNEILEGINNEILSFNIESESELMRVERVASENNKIVDVAIRFNPEVDSGGHEYIKTGRKGDKFGISSNELILKLSAYIYNSDNLRLVGLACHIGSQIGDLESYKSTAISIKNLAEDIDKTGNELKFLDLGGGLGVPYKDDKTPSPEELVSVIECELEDRKEKIILEPGRSITGNAGVLLTKVEYIKDNFLIVDAAMNDLMRPALYDANHDVWNVKKNNTGSKKWTIVGPI

SEQ ID NO: 147380 - protein, 394 aa, Unknown
  Bacterial polypetide isolated from the Sargasso Sea
STVRERCKTFIEEFRSRYPETHVAYASKAFINQKLTSILSEEGMGMDVVSLGEFIAAKQGGMDTSKIHLHGNNKSPEELEYVISNNIGRIIIDNFDEIENLSNIIKSKNCSIKALIRISPGVDPHTHSYISTGILDSKFGFAIETGDAEKAIKQCLEIDGLDLVGIHCHIGSQIFEIEPYNDAMDISVNFAVNMANNYNFILSEISIGGGFAIAYTQNENPPSVKEYAEIITNALKNACASNNIELPKLIIEPGRAIAGPSGVAIYRVGSIKDIPNIRKYVSVDGGMGDNIRPALYESEYEAVVLNKIDQENTEIVTIAGKYCESGDILIKDINLPHIEKDDLICIPASGAYCIPMSSNYNMNLKPAVILVHDGKSEIIRKRETYDDILSLEVF

SEQ ID NO: 147381 - protein, 412 aa, Unknown
  Bacterial polypetide isolated from the Sargasso Sea
MDYFLYKNSELFCEEINLQEIAKEFGTPAYVYSKKTIERHIDVYKNAFQKKDSLICFSVKSLSNISILNILKEKDCGFDIVSGGELQRALHIKTNPKKIIFSGVGKSNEEILKGINNEILSFNIESESELFRIEKIASENNKVVDVAIRFNPEVDSGGHEYIKTGRKGDKFGISPNDLVLKLSHYIYNSKHLRLIGLACHIGSQIGDLESYKLTAINIRQLAEEIDKTGNELKFLDLGGGLGIPYNSDKTPSPKDLVSIIEEELKDRNEKIILEPGRSITGNAGILLTKVEYIKDNFLVVDAAMNDLLRPALYDAKHDIWNLKQNDSDNKKWTIVGPVCESSDILAKDHEMNASEGDILAIKTAGAYGFVMSSNYNSRVRAPEILVDNNQYTVIRKRESFKDLIRNEVSLND

SEQ ID NO: 147382 - protein, 399 aa, Unknown
  Bacterial polypetide isolated from the Sargasso Sea
TLRNSCKAYKKALEKYYPGKSLPIYASKANSSIFMSSLVSSEGLGLDAVSEGELLTAIKGGVPNEKIVFHGNNKSDKELEFAVRNNIKVIVDNDYDLERLDEISNSFNHDLEIMIRFTPGIECHTHEYIRTGSFDSKFGFGIEYLNILFNKISNTKHLKLKGLHAHIGSQIFELDPHKDLGEIMVKVILEAKKFGHNINELNVGGGLGIRYTESDDPPSIDEWVKTISSSVVEACKKNKLDFPILMCEPGRSIVSTAGITIYKIGAFKEIPGIRTYLSVDGGMSDNPRPITYQSNYSACLVSNPFNINSKNKYTIAGKHCESGDVLFKEIELAECKTGDLICVFGTGAYNNSMSSNYNRIPRPAALLVKDGEAEIIQKRESPLDLLKYDVLPDRFIKQN

SEQ ID NO: 147383 - protein, 411 aa, Unknown
  Bacterial polypetide isolated from the Sargasso Sea
MSKFIYKDNVLFCENVAVTDIVKEVGTPAYVYSKKTLLDNFESYSNAFEKNDGLVCFSVKSLSNISVLRLLKYKGSGFDIVSGGELERVLAAGVDPKKIIFTGIAKSNEEIIQGIRKNILSFNIESEAEMLRIEKLATDENKIVDVAIRFNPEIDSGGHEYIKTGRKKDKFGVLLEGVINLSKYILSSSSLNLIGLSCHIGSQIFELNDFEESAKYIKKLAKEINKLGIELKFLDVGGGLGISYNDSNFPSPSNLIKDLENILSDRNEKIILEPGRSISGDAGILLTSVEYVKDDYLIIDAGMNDLIRPALYDAKHQIINVEKNKVPAKEWTIVGPICESSDVMAKNYSLGASGGSILAIKTTGAYGHVMSSNYNSRRKPPEILVDDDKFEIIRKRETYEDLIRHEVNLGS

SEQ ID NO: 147384 - protein, 407 aa, Unknown
  Bacterial polypetide isolated from the Sargasso Sea
MKEIEGQLCIENIPVINLAREYGSPIFIYSVEQIKSNFGKYQNEVGSNDLICYAVKANSNLHIIKLLSELGSGFDVVSGNELKRCLKAGADKNKIVFSGVAKSNEEIKLAVENEILSINIESYGEFERIAKISEQLNKSVNCALRVNPDIAIGSHKYIETGSKTSKFGLDSEAVNKISDEARDNKLVNIASVACHIGSQISDENLILKSLDVICEIADNLSLNGHAIKFLDIGGGLGIQYKDEKEGDPGILMAGVKNRLEGKEYKIILEPGRSIIGSAGILVTRIEYIKNAGGKKFAIIDAGMNDLIRPSLYDAWHEVKELENREISSDTYDLAGPVCETGDILAKGRNLKILPNDYVAFMDVGAYGSVMSSNYNSRLKPMELLVTGNEIEVIRRKETFEDLIALES

SEQ ID NO: 147385 - protein, 228 aa, Unknown
  Bacterial polypetide isolated from the Sargasso Sea
YLKNDSIKLVGLTCHIGSQIMELKGFEDAAKQALELLIELDKLNISLDFIDMGGGLGVNYIGEETIQPFELIQSYEKIFANRNERLILEPGRSISANAGIMLTRVEYKKDGFLIADAAMNDLLRPALYEAHHDVWPVIENNNLSNVNLVGPICETGDYLAKNLNIGACEGDLLAVRTVGAYGFVMSSNYNSRPRAAEVLVDKDQFYLIRKREDFSDLTVLEEGLDDQI

SEQ ID NO: 147386 - protein, 417 aa, Unknown
  Bacterial polypetide isolated from the Sargasso Sea
MNFKGFKYKNNNLFCEHVSLEDISYEFGTPIYVYSGSSIEDAYSQLSSSISNTNTEINFALKANSTLGILSLLSKLGAGADIVSGGELVKALHVKINPKKIVFSGVGKTTEEIKLAIKNGIKQINAESYSEIENIISIANELNTKVPVAIRVNPNISVKTHEKIATGSNDTKFGMPIEETANIYKRLSSEKNIKTMGLAIHIGSQIFDMNEFKLAYLNILSVANSLRQEGFKVPNLDLGGGLGVDYKIAKINFFDYGKTISDVFKGYDYSLSIEPGRSLVANSGILLTKVIYLKKTKSKNFIIVDGAMNDFIRPTLYNAHHNVEPVNLSKGGLEKFDIVGPICETGDYFAKDALLNNPTEGQLLAIFSTGAYGSVMSSMYNSRVPANEILVYNGKVHKLKEKERIEDQINKEILPKF

SEQ ID NO: 147387 - protein, 341 aa, Unknown
  Bacterial polypetide isolated from the Sargasso Sea
FQGGMPGERMVLHGNNKNDEELLLAYNNNVTIVVDNQHDLERLAELVPAGGPPARLMLRFTPGIECHTHEYIQTGHLDSKFGFDPDLLESVLRQLVDKPWAKLTGLHAHIGSQIFELEPHRDLAAVMADALKLARSLGHPVEDLNVGGGLGIRYVASDDPPTIEQWVKVVADAVTAACRDRQLELPRLLCEPGRSLVATAGVTLYAVGSRKTIPGVRTYVAVDGGMSDNPRPITYQSLYTCCLADRPLAPAEETVNLVGKHCESGDVLLKDLPLPTTRSGDIVAVFATGAYNASMSSNYNRIPRPAAVVVQSGSSELVQKREQPDDLLRYDVLPERFRALP

SEQ ID NO: 147388 - protein, 223 aa, Unknown
  Bacterial polypetide isolated from the Sargasso Sea
IDCHIGSQITEVAPYLDAVDKVLELVEQIEQDGVKIRHIDVGGGLGITYDDETPPEIGEFVRTVLDRIEARGHGHREVYFEPGRSLVGNAGVLLTRVEFLKPGAEKNFAIVDAAMTDLARPAMYEAYHAIDAVVKRDVPAHVYDVVGPVCESGDWLGRERLLAVEPGDLLAIRSAGAYGFVMSSNYNTRPRAAEVMVDGTQAYVVRAREEVKQLFAGETILPA

SEQ ID NO: 147389 - protein, 106 aa, Unknown
  Bacterial polypetide isolated from the Sargasso Sea
CAAGMAAHLAGAVAAQTTRPVIGVPISSGSLQGVDALLSTVQMPGGIPVATVAIGKAGAKNAAYLASQILATSDDSLFERVRADREKNKEKVISQNQALQEILSGS

SEQ ID NO: 147390 - protein, 184 aa, Unknown
  Bacterial polypetide isolated from the Sargasso Sea
WCFTADYILEKKVKLSKEISVVITRFGNGEIYTYEPIENIHKDQILKYSKIPADITDDIFKKAQDKAKLIAEKLDYVGTMCVEYFIDQNNTLLVNEIAPRVHNSGHLTINAFNISQFENHVRAVCGFKKEKVQKISNAEMTNVLGKEIEEYRSKSFSDVEFFFDYKKKVIKDKRKMGHLTILKK

SEQ ID NO: 147391 - protein, 212 aa, Unknown
  Bacterial polypetide isolated from the Sargasso Sea
RFGYDGKGQALVKNTKNLERQWKENDYQDCIIERKINLKQEVSVICARDIKRNFYFYPTFANVHKNHILCETTSPSSIDAKIEGKLLKMSKKIITKLNYIGLLTIEFFIDKENNIFVNEIAPRVHNSGHITLDNANISQFELHIKAITGKKIFKPKILTKGLMRNLIGNEIKKVNRIKSMRKYKSFKKNIKYDYGKKIIKGGRKMGHINFIS

SEQ ID NO: 147392 - protein, 109 aa, Unknown
  Bacterial polypetide isolated from the Sargasso Sea
NSADRNNIAVIIAGAGGSAHLPGMISALTSIPVLGVPIESKKLKGLDSLLSIAQMPKGIPVGTLAIGEDGAINAALLAASILANNNPVIKKKLKNWRLSLTKSVKKNPN

SEQ ID NO: 147393 - protein, 210 aa, Unknown
  Bacterial polypetide isolated from the Sargasso Sea
SENTTMGYDGKGQYPLKSLNELNELNIDFSKEYILEKLVRLKKEISVIITRFGNNKFEIYEAIENTHENQILKKSKIPADISDKLVEQSREWSKQISEELKYIGTLCVEFFIDRNDNLYVNEIAPRVHNSGHLTINAFNISQFENHVRAVCSLDQVPLKKLHNAEMVNIIGNQILPFRQNLNLNNNEFFFDYLKKDIKEKRKMGHLTKIF

SEQ ID NO: 147394 - protein, 164 aa, Unknown
  Bacterial polypetide isolated from the Sargasso Sea
MSQKKNTYKVSIIMGSQSDYSTMKHCKKVLDILKIKSETNIISAHRTPKRLFKFAENAEKNKISVIIAGAGGSAHLPGMIAAITKIPVIGVPIESKKLKGLDSLLSIAQMPKGIPVGTVAIGKDGAINSALYAASIIALNDIKVRRKLALWRKKQTKSVKLKPR

SEQ ID NO: 147395 - protein, 80 aa, Unknown
  Bacterial polypetide isolated from the Sargasso Sea
MNNKVAIIMGSQSDHSIMKECAKILKTLKIKYQISIVSAHRTPKRMFEFAESASKNGFGVIVAGAGGSAHLPGMVASLSS

SEQ ID NO: 147396 - protein, 103 aa, Unknown
  Bacterial polypetide isolated from the Sargasso Sea
MKKKSLVSIIMGSQSDWPIMKLTSKVLKEFKIAHEVKIISAHRTPKRMFEFAEKAEARGIKIIIAGAGGAAHLPGMTASISNIPVLGVPIESKKLKGLDSLLS

SEQ ID NO: 147397 - protein, 228 aa, Unknown
  Bacterial polypetide isolated from the Sargasso Sea
FRLKKSEIDVLEDFLPGILKTTTLGYDGKGQYPIKSSNELNSLNIDFSKGYILEKLVKLKKEISIIITRFSNNKYEIYEPIENTHEDQILKYSKIPAEINEKIFNQSKDWAILIAEELKYVGTLCVEFFIDRNDNLYVNEIAPRVHNSGHLTINAFNVSQFENHVRAVCGLEQIPLKKISNAKMMNLLGDQITHFRKMQKFNENEFFFDYLKKDIKEKRKMGHITTLI

SEQ ID NO: 147398 - protein, 153 aa, Unknown
  Bacterial polypetide isolated from the Sargasso Sea
MKKKQIGFLLVLRRDLDLVGVMGVEMFLLPDGSLLVNEIAPRPHNSGHFTMDSCETSQFQQHLLAVSGWPLGPTQIMKPALMLNLIGDQQDKLLQNLKHLPEGAKLHLYGKKEVRPGRKMGHLNLSMENPSELLETLIKLQVWDQDSLERMLN

SEQ ID NO: 147399 - protein, 82 aa, Unknown
  Bacterial polypetide isolated from the Sargasso Sea
MTNQTIQVAIIMGSDSDLPIVEAIFPILDSFGVKFTKNVMSAHRTPHDVMELIKNSEDNGCKVFIAAAGMAAHLAGAIAAHS

SEQ ID NO: 147400 - protein, 107 aa, Unknown
  Bacterial polypetide isolated from the Sargasso Sea
MKKKRYSHRVSIIMGSKSDYSTMKLCEKTLKLLKVNYETSIVSAHRTPERMFNYAKSAESRNINVIIAGAGGSAHLPGMIAALTRIPVIGVPIESKKLKGLDSLLSI

SEQ ID NO: 147401 - protein, 320 aa, Unknown
  Bacterial polypetide isolated from the Sargasso Sea
TIILTNDSDAPAQNFCDEFICSNYTAKDNLEKFAKTCDIITFEFENIPFETLNDLSAIKPVFPDPNINKIVQNRLLEKNYVNELGVKTTKYAHIKNKKDLIKNSSLLPGFLKTTTLGYDGKGQLFLENINNLKIKEIDYLKDYILEKKINYSFEFSIILTRFQNKNIQMYSPFFNLHKNGILRMSTTKIPEKVIKDDLEIAKEYSKKIAQKLNYIGTMCVEFFLDEDGPKLNEIAPRVHNSGHLTIEAYNISQFENHVRAVMNLENSITTLKHDAVMTNILGSDIIDARKSKYLNKQFFHDYLKTDIKENRKMGHLTELL

SEQ ID NO: 147402 - protein, 150 aa, Unknown
  Bacterial polypetide isolated from the Sargasso Sea
MGSKSDWPTMKYAANILKSLRIKFETKIVSAHRTPKRMFEYSMNAKKNNIGVIIAGAGGSAHLPGMIASLTTVPVIGVPIESKKLKGLDSLLSIVQMPKGIPVGTVAIGKGGAINAALLSASILAINNIKINNQIKKYRNRQTKSVKLRL

SEQ ID NO: 147403 - protein, 161 aa, Unknown
  Bacterial polypetide isolated from the Sargasso Sea
MKNPSLVSIIMGSQSDWPTMKHASKILSLFNVKHEVKIISAHRTPKRMFEYAESVEQRGIKIIIAGAGGAAHLPGMTASISNIPVLGVPIESKKLKGLDSLLSIAQMPPGVPVGTLAVGEAGAKNAALLAVSILSDNNTKLKKKYASWRSKQTKSIKNIPK

SEQ ID NO: 147404 - protein, 251 aa, Unknown
  Bacterial polypetide isolated from the Sargasso Sea
AIKYANNYAIKQYDDFDEIDTFIQGCDFITYEFENIPFKTLSYIENKITVSPSSQINKIIQDRLTEKNYVNEINIPTVPYIEIKDIEDLKSVNTNFFPAILKTRKLGYDGKGQYIVNSSKEIPEIPKNDYILEKKIYLQQEISIIAVRYQDGTIFTYQPIENVHKDQILFKSYSPANSNQSIIEEAKNHAVNFAKKISYVGTFCLEFFITDKNELLLNEIAPRVHNSGHLTIESYNVSQFESHLRSVCDLE

SEQ ID NO: 147405 - protein, 185 aa, Unknown
  Bacterial polypetide isolated from the Sargasso Sea
NDSEYILEKMVSLKKEISVIVTRFKKNEYEIYEPFENKHEDQILKVSKIPASISKEHFSQSVEYAKKISEKLDYVGTLCVEFFIDDKDNLLVNEIAPRVHNSGHMTINSHNISQFENHVRAVCGLKKVKTLKLYNAKMTNILGNEITKYKGKKFQDNEFFFDYLKKEIKKKRKMGHFTEINKIND

SEQ ID NO: 147406 - protein, 176 aa, Unknown
  Bacterial polypetide isolated from the Sargasso Sea
SRKLVKLKKEISIIITRFSNNKYEIYEPIENTHEDQILKYSKIPAEINEKIFNQSKDWAMLIAEELKYVGTLCVEFFIDRNDNLYVNEIAPRVHNSGHLTINAFNVSQFENHVRAVCGLEQIPLKKLSNAKMMNLLGGQITHYRNVQKFNDNEFFFDYLKKDIKEKRKMGHITTLV

SEQ ID NO: 147407 - protein, 71 aa, Unknown
  Bacterial polypetide isolated from the Sargasso Sea
ESKKLKGLDSLLSIVQMPKGIPVATVAIGKDGAINSALLAASIISSFDKKIKISLNKLRSKQSKSVKKKPK

SEQ ID NO: 147408 - protein, 181 aa, Unknown
  Bacterial polypetide isolated from the Sargasso Sea
NEFILEKIINLKKEISVIITRFDKSKYEIYEPIENVHEDQILKYSKIPADINGKILEKSKDWAVRISEELNYIGTLCVEYFVDKNNNLYVNEIAPRVHNSGHLTINSHNISQFENHIRAICGLEQIKIKKKFNAKMINLLGDNITAYRGKKFKDNEFFFDYLKKDIKKKRKMGHLTITEKC

SEQ ID NO: 147409 - protein, 150 aa, Unknown
  Bacterial polypetide isolated from the Sargasso Sea
MGSKSDYATMKNCEKILKLLKVKFETKIVSAHRTPERMFKFAKAAEDNNFSVIIAGAGGSAHLPGMIASLTTIPVIGVPVESRKLKGLDSLLSIVQMPKGIPVGSVAIGEDGAMNAGLYAASIIALTNKEIKKNLKNYRTKQSKAVKQKP

SEQ ID NO: 147410 - protein, 163 aa, Unknown
  Bacterial polypetide isolated from the Sargasso Sea
MSNKKNHKVAIVMGSQSDYSTMKYCVKVLKTLKINHESKIVSAHRTPDRMYNFAKSAGKNSISVIIAGAGGSAHLPGMIAAITTIPVIGVPIVSKKLNGLDSLLSISQMPKGIPVGTVSIGKDGAINAALLSASIISIYDKNVRKNLNLWRNKQTRSVKKKPR

SEQ ID NO: 147411 - protein, 257 aa, Unknown
  Bacterial polypetide isolated from the Sargasso Sea
ITQDRIKEKEFLSKNDISVTNFQEISNLSELKSGAEKILFPAIIKTNRFGYDGKGQFLVNSYDELISSWNNLEKQKCILEKKINFQNEISVILARKNNNDIKIYDPSINVHENGILRSSEISSFINKNIKSQAEKIAKKIANTMEHVGIICVEMFLTHENNILVNEIAPRVHNSGHWTLDGSVTDQFEQHIRTICNLPLGDPYRHSDIIMKNILGEEIISVEKHLNNSFVKLHIYGKKEVRKNRKMGHLNFITKRRV

SEQ ID NO: 147412 - protein, 105 aa, Unknown
  Bacterial polypetide isolated from the Sargasso Sea
MKKNKALKVAIVMGSQSDYKTMKLAEKTLKNLGVKYETKIVSAHRTPKRMYEFASSAKKNNIGAIIAGAGGSAHLPGMISALTTIPVLGVPIKSKKLKGLDSLLS

SEQ ID NO: 147413 - protein, 163 aa, Unknown
  Bacterial polypetide isolated from the Sargasso Sea
MSQVAIIMGSKSDFEVMSEAIEILKSFDINTEYDIVSAHRTPNKMVEYASNAEKKGIKVIIAGAGGAAHLPGMVASITSLPVIGVPIKSRNSIDGWDSILSILQMPGGVPVATVALNGSKNAGILAAQIIGSFDSKVADKVKAYKKDLEDKVIESSKDLKKNS

SEQ ID NO: 147414 - protein, 166 aa, Unknown
  Bacterial polypetide isolated from the Sargasso Sea
MSNSSVQVAIIMGSDSDLPVVEASFSILDSFGVKYTKNVMSAHRTPHDVMDLIKRSEENGCKVFIAAAGMAAHLAGAVAAHSTKPVIGIPIESGGMGGIDSLLSTAMMPPGVPVATVAVGKSGAKNSAILAVQILAISDDELAQKLKDYKSNMREEVLDKDKKLNS

SEQ ID NO: 147415 - protein, 214 aa, Unknown
  Bacterial polypetide isolated from the Sargasso Sea
FPGILKTTTLGYDGKGQFKINDVKDLERLNIDFSKDYILEKLVKLKQEISVIITRFGHQRFEIYEPIENHHEDQILRTSKIPANISEKISNLSIDHATIVADELDYIGTLCVEYFIDKNDNLYLNEIAPRVHNSGHLTINSHNISQFENHIRAICGLEKIKVKKMHDANMKNLIGDEISNYRNKNFKDSEFFFDYLKKEIKYNRKMGHLTTIKL

SEQ ID NO: 147416 - protein, 188 aa, Unknown
  Bacterial polypetide isolated from the Sargasso Sea
LNSINLDFEQDYILEKFINLKKEISVIITRYGPNSYEIYEPIENLHEDQILKHSKIPADIDEKNFNISREWAMLISEKLSYIGTLCVEYFVDNNDNLYVNEIAPRVHNSGHLTINSHNVSQFENHIRAVCKLEKKNTIKLFNAEMFNLIGEDIINYRNKKFNKNEYFFDYLKKDIKPKRKMGHITKTY

SEQ ID NO: 147417 - protein, 151 aa, Unknown
  Bacterial polypetide isolated from the Sargasso Sea
YEPIENIHKDQILNNSKIPAEISKEIYDEAQSKAKLISAKLDYVGTMCVEYFIDQGDNLLVNEIAPRVHNSGHLTINAFSVSQFSGHVAAVCNLGVKKAEKISNAEMFNVLGKDIEAYRSKTFSKNEFFYDYGKKSIKDKRKMGHLTILKK

SEQ ID NO: 147418 - protein, 122 aa, Unknown
  Bacterial polypetide isolated from the Sargasso Sea
DLIVASAHRNPKKVEEYIMTAQKEGVEVFVAAAGGAAALPGVVASHTTLPVIGVPIASSEMGGGVDALYSIVQMPPGIPVATVAIGSWGARNAALLAAEILGIKYPEIREEVEQYRERLRQR

SEQ ID NO: 147419 - protein, 229 aa, Unknown
  Bacterial polypetide isolated from the Sargasso Sea
NNKDDLISNADLLPAMLKTATLGYDGKGQFKLNNLEDCENINLSKDIGYILEKMVNLKKEISVIVTRFKKNEYEVYEPFENKHEDQILKVSKIPASISKEHFSQSIEYAKKISEKLDYVGTLCVEFFIDDKDNLLVNEIAPRVHNSGHMTINSHNISQFENHIRAVCGLKKVKTLKLYNAEMTNILGNEITKYKGKKFQDNEFFFDYLKKEIKEKRKMGHFTEINKIND

SEQ ID NO: 147420 - protein, 196 aa, Unknown
  Bacterial polypetide isolated from the Sargasso Sea
YKLNSLSDINEGIDFTKEYILEKFINLKKEISIVICRFGNQKYEIYEPIENVHEDQILKHSKIPAEISDSIKMKSKEWAKQIVEELDYIGTLCVEFFIDKNENLYVNEIAPRVHNSGHLTINSHNVSQFENHIRAVCGLEKIETKKIYNAQMINLIGDDITIYRNKTFKENEFFYDYLKKQVKAKRKMGHLTIIEK

SEQ ID NO: 147421 - protein, 178 aa, Unknown
  Bacterial polypetide isolated from the Sargasso Sea
YILEKKVNLKKEISVVITRYLNGETYIYEPIENVHKDQILNHSKIPAGINKEIFVKAQSNAKLISEKLDYVGTMCVEYFIDQDDNLLVNEIAPRVHNSGHLTINAFSISQFSGHVAAVCNLGLKKVEKISNAEMFNVLGKDIETYRSKTFNKNEFFYDYGKKSIKDKRKMGHLTVLKK

SEQ ID NO: 147422 - protein, 148 aa, Unknown
  Bacterial polypetide isolated from the Sargasso Sea
MPKVLIVMGSKSDWDIMKKAQDFLEEHGIEAEMHVASAHRNPERVHGLAKNAEETCQAVIAGAGMAAHLGGVMASLVTIPVIGVPINASLNGLDSLLSTSQMPPGIPVATVAINGAKNAAILAMQIIATSDAAVKQTLLKFRKEMNAA

SEQ ID NO: 147423 - protein, 149 aa, Unknown
  Bacterial polypetide isolated from the Sargasso Sea
MSKKKKVPKVAIVMGSKSDYSTMKNCVKVLKILNINFEKKIVSAHRTPDRMYAFAKNAEKNNVSVIIAGAGGSAHLPGMIAALTSLPVIGVPIESKKLKGLDSLLSIAQMPKGIPVGTVAIGSDGAINAALLSASILSISDFKIKKKLN

SEQ ID NO: 147424 - protein, 111 aa, Unknown
  Bacterial polypetide isolated from the Sargasso Sea
LKYIGTLCVEFFIDRNDNLFVNEIAPRVHNSGHLTINAYNISQFENHIRAVCSLEKVQLKKISNAKMVNLIGNQIKPYRENKNLTDKEFFYDYLKKEIKDKRKMGHITTLI

SEQ ID NO: 147425 - protein, 165 aa, Unknown
  Bacterial polypetide isolated from the Sargasso Sea
MPQKNKKPLVSIIMGSQSDYSTMKYAEDTLKSLKIRFETKIISAHRTPNRLFEFATKAEINNISVIIAGAGGSAHLPGMVAAITTIPVIGIPIESKKLKGLDSLLSIVQMPKGIPVGSVAIGKDGAINAALFAASILSVGDKNIKSKLKQLRTKQTKSVKKKPSK

SEQ ID NO: 147426 - protein, 268 aa, Unknown
  Bacterial polypetide isolated from the Sargasso Sea
NEINKFKPVLPKPSVNRLIQHRLAEKDFVNKLNIRTTRYVSIEKKSDIDALEDFLPGILKTTTLGYDGKGQYPIKSGNELDSLNIDFSKGYILEKLVKLKKEISIIITRFSNNKYEIYEPIENSHEDQILKYSKIPAEINEKIFNQSKDWAMLIAEELKYVGTLCVEFFIDRNDNLYVNEIAPRVHNSGHLTINAFNVSQFENHVRAVCGLEQIPLKKISNAKMMNLLGDQITHYRNIQKFNENEFFFDYLKKDIKEKRKMGHITTLI

SEQ ID NO: 147427 - protein, 164 aa, Unknown
  Bacterial polypetide isolated from the Sargasso Sea
MKNRKNNQKVAIVMGSQSDYSTMQFCEKVLKVLKIKFETKIVSAHRTPDRMYQFARMAEKNGISVIVAGAGGSAHLPGMIAALTSIPVIGVPIESKKLKGLDSLLSIAQMPKGIPVGTVAIGKDGAINAGLFAASILASSNIQIKKNLNNWRTKQSKSVTKKPK

SEQ ID NO: 147428 - protein, 284 aa, Unknown
  Bacterial polypetide isolated from the Sargasso Sea
MLGGGQLGMMFTEAAHEEDLKVLAVDQKADCSISMIADKFIKSEYVNKSTLDKIIENCEVCTTEFENVPCEALEYLEKQIKVFPSSRIMKIVQNRDLEKKFLKENNIPVTNFTKYNSKNDLQDLQKMEQDTIFPAFIKTSCFGYDGKGQISVENISEIEKAHNKLNNVQCIIERKVNLKLEVSQVAACNWDGKVEFLPISENHHINNILHTSKVPATISNSQKKEIQDITKKIVKSLSYIGVICVEFFISLDEKIMVNEIAPRTHNSGHYSIEACDISQFLYQA

SEQ ID NO: 147429 - protein, 173 aa, Unknown
  Bacterial polypetide isolated from the Sargasso Sea
KKEFSVIVTRFASEKYEIYEPIENYHEEQILKNSKIPSDISEEIKEKSKVWSKTIAEKLNYIGTMCVEFFIDKNENLYVNEIAPRVHNSGHLTINSHNVSQFENHIRAICSLEKIPTKKLFNAEMINLIGNEISNYRNKKFKENEFFFDYLKNEIKNKRKMGHLTIVKKLKNK

SEQ ID NO: 147430 - protein, 225 aa, Unknown
  Bacterial polypetide isolated from the Sargasso Sea
KKSDIDALEDFLPGILKTTTLGYDGKGQYPINSSNALSSLNIDFSKGYILEKIVKLKKEISIIITRFSNNKYEIYEPIENTHEDQILKYSKIPAEINEKIFNQSKDWAMLIAEELKYVGTLCVEFFIDRNDNLYVNEIAPRVHNSGHLTINAFNVSQFENHIRAVCGLEQIPLKKISNAKMMNLLGDQITHYRNIQKFNDNEFFFDYLKKDVKEKRKMGHITTLV

SEQ ID NO: 147431 - protein, 244 aa, Unknown
  Bacterial polypetide isolated from the Sargasso Sea
PKETLELIDSEKLRPGIKSLEQTQDRLTERKLLQKLDIPCAPYVELKNEEDFKYSISNFGESIIKTRRFGYDGKGQIGINENTKLNNDISALFNEAIIEKKIPFEFEFSQVSCRDIYGNISNFPLTRNIHENHILKHSYAPLKLNDNLEIYAKEITKKILSDLEHIGVLTVEFFKTKENIIVNEIAPRVHNSGHWTIEGCSDSQFQMHMQAVSGIKIKQPELLYKCHMENLIGNEINEWINKKS

SEQ ID NO: 147432 - protein, 159 aa, Unknown
  Bacterial polypetide isolated from the Sargasso Sea
MSKVGIIMGSKSDYPVMKEAENILKDFGIDYEIDIVSAHRTPEKMMEYSKNAHKNGISVIIAGAGGAAHLPGMVASNTPLPVIGVPVKSRNSIDGWDSILSILQMPGGVPVATVALDGAKNAGILAAEILGSSNPEILQKIIDYKKQLENKVKSSSLDD

SEQ ID NO: 147433 - protein, 307 aa, Unknown
  Bacterial polypetide isolated from the Sargasso Sea
GSLLSDAAKKIDIQTVILSDDPDAPGKHFATKFIFGQYNDDTTINNFINEVDLVTYEFENIPFAILKKINEKKKVLPKPEINQLIQHREIEKKFLNDNNIATTKYVTVKNEKDLSENIDLLPGLLKTTTLGYDGKGQYRLNTVDDIRNEIDFTKEYILEKLIHLKKEISVVITRYDQNSYEIYDPIENVHEEQILKYSTIPSDISNDIRIKSIEWAKHVVEKLDYIGTLCVEFFIDNDDNLYANEIAPRVHNSGHLTMNSHNISQFENHVRAVCGLEKIETKKLYNAKMINLIGDEIKPYRNKIFKD

SEQ ID NO: 147434 - protein, 150 aa, Unknown
  Bacterial polypetide isolated from the Sargasso Sea
MGSKSDWKTMIHCSDMLKKFNVKHEVKVISAHRTPKRLHKFLKEAEKNKIEIIIAAAGMSAHLAGVTASLTILPVLGVPTESKLKGLDSLLSTVQMPSGIPVGTLAIGKAGAINAALLAISILSVRYKKIANKLIAYRNNFEKRVPKKPF

SEQ ID NO: 147435 - protein, 166 aa, Unknown
  Bacterial polypetide isolated from the Sargasso Sea
MTNETSQVAIIMGSDSDLPIVEAAFPILDSFGIKYTKNVMSAHRTPHDVMELIKNSEKNGCKVFIAAAGMAAHLAGAVAAHSTKPVIGIPIESGGMGGIDSLLSTAMMPPGVPVATVAVGKSGAKNSAILAVQILATSNDDLARKLKDYKENMRAEVLEKDKKLNS

SEQ ID NO: 147436 - protein, 104 aa, Unknown
  Bacterial polypetide isolated from the Sargasso Sea
MCRIFIDRNDNLYVNEIAPRVHNSGHLTINAFNVSQFENHVRAVCGLEQIPLKKLSNAKMMNLLGDQITHYRNMQKFNDNEFFFDYLKKDIKEKRKMGHITTLV

SEQ ID NO: 147437 - protein, 276 aa, Unknown
  Bacterial polypetide isolated from the Sargasso Sea
ENIPYETLNEMNKLKPVLPKPSINRLIQHRIAEKDFINKLNIRTTRYVSIEKKSDIETLEDFLPGILKTTTMGYDGKGQYPLKKIEDISSLNIDFSKGYVLEKLVKLKKEVSVIITRFGNNSYEVYDPIENTHQDQILKYSIIPAEISEKILHQSKEWATQIAEELKYIGTLCVEFFIDKNENLYVNEIAPRVHNSGHLTINAYNVSQFENHIRAVCSMEKIPLKKLHNAKMMNLIGDQIEPYRKNLILNDKEFFFDYLKKEIKEKRKMGHITTLL

SEQ ID NO: 147438 - protein, 175 aa, Unknown
  Bacterial polypetide isolated from the Sargasso Sea
EKKVNLKKEISVVITRFKDGTLSFYEPIENEHRNQILFKSKIPANISKKIYEQAISNAKKISEELNYIGVLTVEYFITEKDELLVNELAPRFHNSGHLTIDAFNISQFQKHVLSVMDLGSKPIGKISNAEMYNILGSEILDYRKKTFKKNEFFYDYLKKEPRKGRKMGHITILKD

SEQ ID NO: 147439 - protein, 92 aa, Unknown
  Bacterial polypetide isolated from the Sargasso Sea
MAQIGIIMGSKSDMPVLNEAIEIIKEFKIDYEVDIVSAHRTPEKMIEYGKKAHERGIKVIIAGAGGAAHLPGMIAACSPLPVIGVPVKSKNS

SEQ ID NO: 147440 - protein, 164 aa, Unknown
  Bacterial polypetide isolated from the Sargasso Sea
MPQKNKPLVSIIMGSQSDYSTMRYTEEVLKNLSIRFETKIVSAHRTPKRLFEYANQAEVNKISVIIAGAGGSAHLPGMVAAITNIPVIGVPIESKKLKGLDSLLSIVQMPKGIPVGSVAIGKDGAINSALYAASILAVSDKNIRSKLKKLRSKQTKSVRKKPRK

SEQ ID NO: 147441 - protein, 140 aa, Unknown
  Bacterial polypetide isolated from the Sargasso Sea
MKNKKYSHKVSIVMGSNSDYSTMKFCEKILKLLKINYETNIVSAHRTPERMFKYAKSAEKNNISVIIAGAGGSAHLPGMIASLTRIPVIGVPIESKKLKGLDSLLSIAQMPKGIPVGTVAIGTDGAINAALYAASIISTV

SEQ ID NO: 147442 - protein, 218 aa, Unknown
  Bacterial polypetide isolated from the Sargasso Sea
MQDFFPGILKTSTMGYDGKGQYPIKKMEDLDSLDIDFSKEYILEKLVKLKKEISVIVTRFGNNNYEIYEPIENTHENQILKHSKIPADISPKILDQSKEWATRISEELKYIGTLCVEFFIDRNENLYVNEIAPRVHNSGHLTINAYNISQFENHIRAICSLEKIQLKKLSNAIMINLIGNQINPYRQNLKLKDNEFFFDYQKKEIKEKRKMGHITTLI

SEQ ID NO: 147443 - protein, 162 aa, Unknown
  Bacterial polypetide isolated from the Sargasso Sea
MSKIQVGLIMGSQSDWSTMKEAADILSELGVTYETKIVSAHRTPDRLWEYGKSAEKRGLKVIIAGAGGAAHLPGMIASKTNLPVVGVPVTTTSLNGIDSLYSILQMPRGYPVATMAIGAQGAKNGGLLAVQIIALSDAKLNKTLSDWRIALSASIPDEPKDE

SEQ ID NO: 147444 - protein, 205 aa, Unknown
  Bacterial polypetide isolated from the Sargasso Sea
MIAEEFQPFERELSVVVARSRSGEIRCFPVSENLHRQNILTICRIPARISGLVEKEANRISACLAEGLGLVGVMGVEMFLLPDGSLLVNEIAPRPHNSGHFTMDSCETSQFQQHLLAVSGWPLGPTHIMKPALMLNLIGDQQDKLLQNLKLLPEGTKLHLYGKKEVRPGRKMGHLNLSMENPSELLETLIKLQVWDQDSLERMLN

SEQ ID NO: 147445 - protein, 174 aa, Unknown
  Bacterial polypetide isolated from the Sargasso Sea
STRNILDTVLAPASAPLEMQKRCQEIAVKIAESFHYVGIMAIEFFVCKSGVLRVNEVSPRPHNSGHYTIEASATSQFEQHVRAVTGQKLGPSDLKSSAATLNLLGSDCSSGKPVFKGVEKYSINERIYIHNYRKPIVRPGRKMGHVTILGDDREYILEKAKEIKSEIKVEGTNG

SEQ ID NO: 147446 - protein, 97 aa, Unknown
  Bacterial polypetide isolated from the Sargasso Sea
MKNIKKLKVSIVMGSQSDYKTMKLAAKILKNLGVKFETKIISAHRTPNRMFEYASSADRNNIGVIIAGAGGSAHLPGMISALTTIPVLGVPIESKKL

SEQ ID NO: 147447 - protein, 163 aa, Unknown
  Bacterial polypetide isolated from the Sargasso Sea
MSQNNKSRVSIVMGSQSDYKTMKLSAKILKSLKIQYEIKIISAHRTPKRMYRFAKNAEKNKISVIIAGAGGSAHLPGMIASLTSLPVIGVPIQSKKLKGLDSLLSIVQMPKGIPVGTVAIGEDGAINAALLAASIIAISNKEVRNRLNNLRNKQTKSVKKIPR

SEQ ID NO: 147448 - protein, 161 aa, Unknown
  Bacterial polypetide isolated from the Sargasso Sea
KKVNHIVSIVMGSKSDYSTMKFCEKVLKILKISYETNIVSAHRTPDRMFKYAKSSENRNISVIIAGAGGSAHLPGMIASLTRVPVIGVPIESKKLKGLDSLLSIAQMPKGIPVGTVAIGKDGAINAGLFAASIISNFDNKIKNNLIKWRTKQSKSVKKKPK

SEQ ID NO: 147449 - protein, 217 aa, Unknown
  Bacterial polypetide isolated from the Sargasso Sea
EDFLPGIIKTTTLGYDGKGQHPISSAEELKNLKLDLSRGYILEKLVKLKKEISIIITRFSNNKYEIYEPIENTHEDQILKHSKIPADINEKIFNQSKDWAILIAEELKYVGTLCVEFFIDRNDNLYVNEIAPRVHNSGHLTINAFNVSQFENHIRAVCGLEQIPLKKLSNAKMINLLGDQISQYRNSPKLKDNEFFFDYLKKEIKDKRKMGHITILE

SEQ ID NO: 147450 - protein, 293 aa, Unknown
  Bacterial polypetide isolated from the Sargasso Sea
MKTKKTIGILGGGQLGMFLCNSAKKQEVKVSIFSEVDNCSAKSFADKFYLGDFSKLNSLDKFINSVDLITVETENIPLKILHYIEKKKKLFPNSNVISIAQDRMKEKTFINSLNKIKTTNFNPINTFEDLKISLNNFGGKILIKSCQFGYDGKNQYLINNKNLIDFKNFNLSNFIAKEIIDFKKEFSVIVARDFYGNIVNYPPVENIHRNNILHKSIYPAKIPEVIKKEAVDFSKFFANKIDLVGILAIEMFLLKNNKILVNEIAPRPHNSGHWTMDGCNESQFDYLINILLR

SEQ ID NO: 147451 - protein, 114 aa, Unknown
  Bacterial polypetide isolated from the Sargasso Sea
MYEYAAKVEQNNIGVIIAGAGGSAHLPGMVSALTHVPVLGVPVESKKLKGLDSLLSIAQMPKGIPVGTLAIGEDGAINAALLAAAIIANNNSNVQKKLKNFRTSQTKSVKKSPK

SEQ ID NO: 147452 - protein, 188 aa, Unknown
  Bacterial polypetide isolated from the Sargasso Sea
MGGGQLGRMLAVSGAPMGVRLKALDPTENAPASIAATQVVGSFRDEAAVKAFAETCDVVTVEIEHIDVEALRQLAAAGVDVQPTPETLATIQDKYAQKVHFTNAGVPLGPYADCPDAEALERAANEFGFPLMLKSKRLAYDGRGNAVAKTADDLNDAVSKLGGFEQGLYCEKWVPFEKELAVMVVRAR

SEQ ID NO: 147453 - protein, 240 aa, Unknown
  Bacterial polypetide isolated from the Sargasso Sea
INKCNISTTRYVSIKEKSDLNANVKLIPGLLKTCRLGYDGKGQYKLNNPSDLENLNIDFSQEYILEKMINLKKEFSIILTRFGHSIHSVYEPIENEHENQILKYSKIPADIDDKIVAKAKDWASIIADDLDYVGTICVEYFIDKNDNLYVNEIAPRVHNSGHLTINSYNVSQFENHIRAICGLEKQELKKIYNAKMINIIGEEIVSYRSKKYTDNEFFFDYGKKEIKANRKMGHLTVIQK

SEQ ID NO: 147454 - protein, 86 aa, Unknown
  Bacterial polypetide isolated from the Sargasso Sea
MKNKKYSHKVSIVMGSNSDYSTMKFCEKILKLLNINYETNIVSAHRTPERMFKYAKSAEKNNISVIIAGAGGSAHLPGMIASLTRI

SEQ ID NO: 147455 - protein, 163 aa, Unknown
  Bacterial polypetide isolated from the Sargasso Sea
MPQKNKPLVSIIMGSQSDYSTMKYAEEVLKNLRIKFEIKIVSAHRTPKRLYNYASKVDGEGIAIIIAGAGGSAHLPGMVAAITTVPVIGVPIESKKLKGLDSLLSIVQMPKGIPVGSVAIGKDGAINAALYAASILGVSDKKIKSKLKQLRSKQTKSVKKKPK

SEQ ID NO: 147456 - protein, 151 aa, Unknown
  Bacterial polypetide isolated from the Sargasso Sea
MGSQSDYSTMRYSKKVLKILKIKHEIKIVSAHRTPERMYQFAKTAERNNISVIIAGAGGSAHLPGMIAALTKIPVIGVPIESKKLKGLDSLLSIAQMPKGIPVGTVAIGKNGAINAALFAASIISLIDPKSKKNLNLWRNKQTRSVKKKPN

SEQ ID NO: 147457 - protein, 142 aa, Unknown
  Bacterial polypetide isolated from the Sargasso Sea
QILKHSTIPAHINLSHFEKSQEWAKLISEELKYVGTLCVEFFIDKEQNLYVNEIAPRVHNSGHLTINAYNISQFENHIRAVCGLEKIKLQKIYNAKMINIIGDEINNYRNKKFTENQFFFDYLKKQIKPKRKMGHLTIIENK

SEQ ID NO: 147458 - protein, 144 aa, Unknown
  Bacterial polypetide isolated from the Sargasso Sea
ATMKYAEKVLKSLKIRFEIKIISAHRTPKRLFNFALSAEKNNISVIIAGAGGSAHLPGMVAAISPIPVIGVPIESKKLKGLDSLLSIVQMPKGIPVGSVAIGKDGAINAALYAASILAISDKKIKSRFNQLRSKQTKSVKKKPK

SEQ ID NO: 147459 - protein, 273 aa, Unknown
  Bacterial polypetide isolated from the Sargasso Sea
CRPLVEDFTVGRLTDEDAIYQWGKKFDLITIEIENVSVAALKRLEKEGVKVFPQPHIIELIQDKRTQKVFYKENEIPTADFELVEDLQDIQSKKHWLPAVNKVGKEGYDGKGVQILRTEDDLRKGFDSPGLLENLVDFEKELSVIVARNEKGEMKCFPLVELSYHPEQNLVEFLFAPAQVSKSIEAAAYELAKDVISKLSMVGLLAVEMFLTKDGHLLVNEVAPRTHNSGHHTIEANVTSQFEQHIRAILNIPLGSTLLRTPAAKGNLLGEDG

SEQ ID NO: 147460 - protein, 214 aa, Unknown
  Bacterial polypetide isolated from the Sargasso Sea
VPGILKTCTLGYDGKGQYKIGNEKELDNLKIDFDNEYIFEKLIKLKKEISVIITRFGPEKYEVYDPIENVHEDQILKYSIIPAEVNQSLYDQSVRWAKYISEELNFIGTMCVEYFIDKNENLYVNEIAPRVHNSGHLTINAYNVSQFENHIRAVCGLKKIETKKIYNAKMINLIGDDILVYRNKKFKDNEFFFDYLKKTIKEKRKMGHLTIIEK

SEQ ID NO: 147461 - protein, 142 aa, Unknown
  Bacterial polypetide isolated from the Sargasso Sea
MNNKVAIIMGSQSDHSIMKECAKILKTLKIKYQISIVSAHRTPKRMFEFAESASKNGFGVIVAGAGGSAHLPGMVASLSSLPVIGVPIETKKLKGLDSLLSIVQMPRGCPVATMAINGSINAGLLAASIIGNFDEKIKIKFR

SEQ ID NO: 147462 - protein, 243 aa, Unknown
  Bacterial polypetide isolated from the Sargasso Sea
KDFVNKLNIRTTRYVSIEKKSDLETLDDFLPGILKTATMGYDGKGQYPIKSLSELNGLNIDFSKEYILEKLVKLKKEISVIVTRFGNNRYEIYEAIENIHENQILKKSKIPADISNKLVDQSREWSKQISEELKYIGTLCVEFFIDRNDNLYVNEIAPRVHNSGHLTINAFNISQFENHIRAVCSLEQIPLKKLHNAEMINLIGNQITPYRQNINLKDNEFFFDYQKKEIKDKRKMGHLTKIL

SEQ ID NO: 147463 - protein, 163 aa, Unknown
  Bacterial polypetide isolated from the Sargasso Sea
MKKKVSHKVSIVMGSQSDYSTMKFCEKVLKILNISYETSIVSAHRTPERMFKYAKLAENRNVSVIIAGAGGSAHLPGMLASLTRIPVIGVPIESKKLKGLDSLLSIVQMPKGIPVGTVAIGKNGAINAGLFAASIISNFDKKIKNSLIKWRTKQSKAVKKKPK

SEQ ID NO: 147464 - protein, 272 aa, Unknown
  Bacterial polypetide isolated from the Sargasso Sea
MKKTNLGILGGGQLGCMLCMAAKKLDVYTIVWSDDPMSPAKEFSDEFILSNYNDEEKINYFTKKVDKITFEFENIPFDILDKLNSIKEVLPKPQINKIIQNRILEKNFVNDQNIKTTQYKKINNKDDLISNGDLLPAMLKTATLGYDGKGQFKLNNLEDCENISLSKNSDYILEKMVILKKEISVIVTRFKKNEYEIYEPFENKHEDQILKVSKIPASISKEHFSQSVEYAKKISEKLDYVGTLCVEFFIDDKDNLLVNEIAPRVHNSGHMT

SEQ ID NO: 147465 - protein, 146 aa, Unknown
  Bacterial polypetide isolated from the Sargasso Sea
ENIHKNQILKYSKIPCNINKKIKNKAIAYAKLISEKLNYIGTLCVEYFIDKKNNLYVNEIAPRVHNSGHLTINSHNVSQFENHIRAVCKLKKIKTKRIYKARMINLIGNDIRKYRNKKNKKNQFFFDYLKSDIKAKRKMGHVTIIK

SEQ ID NO: 147466 - protein, 168 aa, Unknown
  Bacterial polypetide isolated from the Sargasso Sea
MNNQNITPSVAIIMGSQSDWETMKFSEEILIKLKIAFTTKIISAHRTPDRMNDFAKKARDNSIQVIIAGAGGAAHLPGMVASHTELPVIGVPIQSSSLNGIDSLLSIVQMPGGVPVATMSIGKAGAINAAIYAAKILSLSNKEINTKLTNWLSSQKDNVPLTPNKKND

SEQ ID NO: 147467 - protein, 217 aa, Unknown
  Bacterial polypetide isolated from the Sargasso Sea
GDAIIKTRRFGYDGKGQISVNQKTNFDKNISSLFNQSIIEKKIPFEFEFSQVSCRDVFGNVFHFPLTKNIHENHILKHSYAPLDLPNDLEEYAREITKKIISDLDHVGVLTVEFFKTKENILVNEIAPRVHNSGHWTIEGCSSSQFKVHMQAVSGIKITQPKLLNECHMVNLIGDEINDWINKQSDSDMNIHLYHKKEIKNGRKMGHLTYIKDKKIL

SEQ ID NO: 147468 - protein, 151 aa, Unknown
  Bacterial polypetide isolated from the Sargasso Sea
MGSQSDYSTMKLSEKVLKMLKIKYETKIVSAHRTPKRMYEFAKSSEKNGFSVIIAGAGGSAHLPGMIASLTKIPVIGVPIESKKLRGIDSLLSIAQMPKGIPVGTVAIGEDGAINAGLLAASILSLSDKVLKKKLNLWRDKQTNSVKKKPR

SEQ ID NO: 147469 - protein, 95 aa, Unknown
  Bacterial polypetide isolated from the Sargasso Sea
AGGSAHLPGMIAALTQIPVLGVPIESKKLRGLDSLLSIVQMPKGIPVGTLAIGEDGAINAAILAASIISNNNPIVRFKLKSWRASQTKSVKKNPK

SEQ ID NO: 147470 - protein, 51 aa, Unknown
  Bacterial polypetide isolated from the Sargasso Sea
MINETVQVAIIMGSDSDLPVVESSFSILDDFGVKYTKNVMSAHRTPHDVRN

SEQ ID NO: 147471 - protein, 150 aa, Unknown
  Bacterial polypetide isolated from the Sargasso Sea
MGSKSDYATMKNCEKILRLLKVKFETKIVSAHRTPERMFKFAKSAEDNNISIIIAGAGGSAHLPGMIASLTTIPVIGVPIESRKLKGLDSLLSIVQMPKGIPVGSVAIGEDGAMNAGLYAASIIAVTNKDIKKNLINYRTKQSKAVKQKP

SEQ ID NO: 147472 - protein, 285 aa, Unknown
  Bacterial polypetide isolated from the Sargasso Sea
SRFCKNVDVLTYEFENIYTKALEELDLFVNMRPSVKALKISQDRLTEKSYLNSLGIKTAQFYKIDGVSEIEKLFTRLKKPILIKTRRLGYDGKGQILVKTLDDINNHFLSKKLFPSIAEEVISFDRELSVIIVRDKKGNIKTFEPGENVHESGILATTTLPSPTSEALKNAAITIARKIVADLDYIGVMGVEFFLKDSELYVNEIAPRVHNSGHWTMDGSYSSQFQQHIRAIMDLPLLSTERHSDIIMYNLIGKVTSNLVKNELAKIYLYGKKETRPGRKWVTLI

SEQ ID NO: 147473 - protein, 220 aa, Unknown
  Bacterial polypetide isolated from the Sargasso Sea
LKDFLPGILKITTMGYDGKGQFPINKIEDLDFLNIDFSKKYILEKLVKLKKEISIVLTRFGNNNYEIYDPIENTHEDQILKHSKIPANISQTNMNKSRDWAKSIAEELKYIGTLCVEFFIDRNENLYVNEIAPRVHNSGHLTINAYNVSQFENHVRAVCSLKKITLKKVSDAEMINLIGNQIKPYRENLRLNENEYFFDYLKKEIKDKRKMGHITRLINA

SEQ ID NO: 147474 - protein, 87 aa, Unknown
  Bacterial polypetide isolated from the Sargasso Sea
MAKIAIVMGSTSDWPTMQNAAVMLKQFGVEFEAQVVSAHRTPNLLVEFAEQAEQNGFCAIIAGAGGAAHLPGMIAAHTHLPVFGCPV

SEQ ID NO: 147475 - protein, 303 aa, Unknown
  Bacterial polypetide isolated from the Sargasso Sea
CFLQLAKNLNLKTIIISDDEHAPAQFFADEFIFCNYNDELKIDEFSNKIDFVTYEFENIPYETLCKIDNIKKVNPRPSINKIIQNRLSEKDFLNKNNIKTTSYISVKNESELKSSQDFIPGILKTCTLGYDGKGQYKINNEEELDNLKVNFENHYILEKLVKLKKEISVIITRFGKQKYEVYDPIENVHEDQLLKYSKIPAEVSEVLFDKSKEWAKYIAEELDYIGTMCVEYFIDKNDNLFVNEIAPRVHNSGHLTINAYNVSQFENHIRAVCGLDKVETKKLHNAKMINLIGEDILVYRKKI

SEQ ID NO: 147476 - protein, 187 aa, Unknown
  Bacterial polypetide isolated from the Sargasso Sea
ISSLFNQSIIEKKIPFEFEFSQVSCRDIFGNIVHFPLTRNIHENHILKHSYAPLNLSNDLEEHAKEITKKIISELDHVGVLTVEFFKTKENILVNEIAPRVHNSGHWTIEGCSSSQFKVHMQAVYGVKITQPKLLNECHMVNLIGEEINDWINKKSDSDVNIHLYHKKEIKNGRKMGHLTYIKNKKI

SEQ ID NO: 147477 - protein, 218 aa, Unknown
  Bacterial polypetide isolated from the Sargasso Sea
KDLLPGILKTSKFGYDGKGQSKINSVKEIENLKIDFKYDYILEKLVKLKKEISIILTRFGPGSFEIYEPIENVHEDQILKSSKIPSQISKELNDKSKEWAKIIADELDFIGTMCVEYFIDKNDNLFVNEIAPRVHNSGHLTINSYNVSQFENHIRAVCKLEKIPIKKLYDSEMINILGDNIVNYRNKKYSNNEFFFDYLKTEIKSKRKMGHLTTLKIQ

SEQ ID NO: 147478 - protein, 99 aa, Unknown
  Bacterial polypetide isolated from the Sargasso Sea
GMLASITCIPVIGVPVESKTLKGIDSLLSIVQMPAGIPVATVAINGGQNAGLLAIGMISLFDESMKENLKKFRENLHKQVRTKNSKLSTIGAENYLQNK

SEQ ID NO: 147479 - protein, 280 aa, Unknown
  Bacterial polypetide isolated from the Sargasso Sea
MNKPTLGIIGGGQLGSLLADAAKNIDIQTVILSDDPDAPGKHFATKFIFGQYDDDTTINNFINEVDLVTYEFENIPFTILKKINEKKKVLPKPEINKLIQHREAEKKFLNDNKITTTKYVTVRNEKNLSDNIDLLPGLLKTTTLGYDGKGQYKLNSLDDITSEIDFTKEYILEKIIHLKKEISVVITRYDQNSYEIYDPIENVHEEQILKYSTIPSDISHDIQTKSVEWAKQVVEKLDYIGTLCVEFFIDADDNLYANEIAPRVHNSGHLTMNSHNISQF

SEQ ID NO: 147480 - protein, 217 aa, Unknown
  Bacterial polypetide isolated from the Sargasso Sea
EDFLPGILKTTTLGYDGKGQYPIKSGDELNSLNIDFSKGYILEKLVKLKKEISIIITRFSNNKYEIYEPIENIHEDQILKYSKIPAEINEKIFNQSKDWAMLIAEELKYVGTLCVEFFIDRNDNLYVNEIAPRVHNSGHLTINAFNVSQFENHVRAVCGLEQIPLKKISNAKMMNLLGGQITHYRNVKQFNDNEFFFDYLKKDIKEKRKMGHITTLV

SEQ ID NO: 147481 - protein, 164 aa, Unknown
  Bacterial polypetide isolated from the Sargasso Sea
MKKKIFISIVMGSQSDWKTLTYCENIFKKIGIDYEKKIVSAHRTPDRLYEFAKNLKKTNIEVVIAGAGGAAHLPGMIASLTHIPVLGVPIESKTLKGLDSLLSIVQMPAGIPVPTLAIGKAGAINSALAAAAILGNKYPDIKKKLILFRSKQTKSIKKKPINEK

SEQ ID NO: 147482 - protein, 275 aa, Unknown
  Bacterial polypetide isolated from the Sargasso Sea
MSEITLGIIGGGQLGSMLAIAAKKLNVKTVIFCDDIDAPAQNFCNQFVTGSYDNNEKISEFINQVDLVTYEFENIPYKTLNEINKFKPVLPKPSVNRLIQHRLAEKDFVNKLNIRTTRYVSIEKKSDIDALEDFLPGILKTTTLGYDGKGQYPIHSSKELNSLNIDFSKGYILEKLVKLKKEISIIITRFSNNKYEIYEPIENAHEDQILKYSKIPAEINEKIFNQSKDWAMLIAEELKYVGTMCVEFFIDRNDNLYVNEIAPRVHNSGHLTINA

SEQ ID NO: 147483 - protein, 301 aa, Unknown
  Bacterial polypetide isolated from the Sargasso Sea
CENYEDENLINEFISKVDLVTFEFENIPYKILKNINNYKPVLPSPEINKLIQNRYSEKDFLNQIDIRTTKYKLIKNKDEIKLNENLIPGILKTCTLGYDGKGQFKINSIKEIDENIDFNNEYILEKLINLKKEISIIISRFGHQKYELYEPIENVHEDQILKHSKIPADISETLKEKSIDWAKKIVEDLDYIGTLCVEYFIDKNDNLYVNEIAPRVHNSGHLTMNTHNISQFENHVRAVCGLEKIETKKISNGKMINLIGSDISEYRGKTFADNEFFYDYLKTEIRDKRKMGHLTIIENKS

SEQ ID NO: 147484 - protein, 260 aa, Unknown
  Bacterial polypetide isolated from the Sargasso Sea
HICAAFDDETGLAKLAELSDIVTYELEQLPADTLRWLIARVPVAPGVRILEVAQDRVREKTFLSSVGIPTAAWRAVERKDDLLAALAEIGRPAVLKVAYGGYDGKGQAMLEQTTMDAEVLAIWDRFADGADMTVIIEEKLDFEYELSVIVGRSAAGDKVAYDPAFNIHKNHILDTSEVPGPFTPLVVESAKAIGFNLAEALELVGVLCIELFLLASGELRANEIAPRPHNSGHWTLDAAHTDQFEQLVRAACGLPLGNPG

SEQ ID NO: 147485 - protein, 213 aa, Unknown
  Bacterial polypetide isolated from the Sargasso Sea
PGILKTSTMGYDGKGQYPIKKIEDLDSLDIDFSKEYILEKLVKLKKEISVIVTRFGNNNYEIYEPIENTHENQILKYSKIPADISQKILDQSKEWATRISEELKYIGTLCVEFFIDRNENLYVNEIAPRVHNSGHLTINAYNISQFENHIRAICSLEKIQLKKLSNAIMINLIGNQINPYRQNLKLKDNEFFFDYQKKEIKEKRKMGHITTLI

SEQ ID NO: 147486 - protein, 142 aa, Unknown
  Bacterial polypetide isolated from the Sargasso Sea
MKNKKYSHKVSIVMGSNSDYSTMKFCEKILKLLKINYETNIVSAHRTPERMFKYAKSAEKNNISVIIAGAGGSAHLPGMIASLTRIPVIGVPIESKKLKGLDSLLSIAQMPKGIPVGTVAIGKDGAINAALYAASIISTFDK

SEQ ID NO: 147487 - protein, 318 aa, Unknown
  Bacterial polypetide isolated from the Sargasso Sea
ISTSVFTDDKDGPAQNFCDNFIYSKYDDKEKIKEFIENTDIVTYEFENIPVEFLKLIEKERPVLPSPDINKIAQNRKLEKTFVNELGIKTTDWAYIKSAEDIKKNQNLLPGILKSNTLGYDGKGQFVLNSLDDVKKDWCFTADYILEKKVNLKKEISVVITRFKDGTLSFYEPIENEHRNQILFKSKIPANISKKIYEQAISNAKKISEELNYIGVLTVEYFITEKDELLVNELAPRFHNSGHLTIDAFNISQFQKHVLSVMDLGSKPIGKISNAEMYNILGSEILDYRKKTFKKNEFFYDYLKKEPRDGRKMGHITI

SEQ ID NO: 147488 - protein, 317 aa, Unknown
  Bacterial polypetide isolated from the Sargasso Sea
LAIAAKKLNVKTVVFCDDIDAPAQNFCNQFVTGSYDNKEKISEFINLVDLVTYEFENIPFETLNEINKFKPVLPKPSINRLIQHRLAEKDFVNKLNIRTTRYVSIEKKSDIDALEDFLPGILKTTTLGYDGKGQYPIKSGDELNSLNIDFSKGYILEKLVKLKKEISIIITRFSNNKYEIYEPIENIHEDQILKYSKIPAEINEKIFNQSKDWAMLIAEELKYVGTLCVEFFIDRNDNLYVNEIAPRVHNSGHLTINAFNVSQFENHVRAVCGLEQIPLKKISNAKMMNLLGGQITHYRNVKQFNDNEFFFDYLKKI

SEQ ID NO: 147489 - protein, 107 aa, Unknown
  Bacterial polypetide isolated from the Sargasso Sea
GVLTVEYFITENDKLLVNEIAPRFHNSGHLTIEAFNISQFENHVRAVCNLQPKLIKKVSNAEMYNVLGFEIQDYKKRTLKENEFFYDYLKKEPREGRKMGHLTILKE

SEQ ID NO: 147490 - protein, 92 aa, Unknown
  Bacterial polypetide isolated from the Sargasso Sea
VNEIAPRVHNSGHLTINSHNISQFENHIRAVCKLEKIPVKKLYNAEMINILGENIINYRKRKYLDNEFFFDYLKKEIKSKRKMGHLTTLKNQ

SEQ ID NO: 147491 - protein, 111 aa, Unknown
  Bacterial polypetide isolated from the Sargasso Sea
MDHIGTICVEYFIDKNDNLYVNEIAPRVHNSGHLTINAYNISQFENHIKAVCGLRKEDIKKKYNAKMINIIGDEIVSYRSKKYSDNEFFFDYGKKEIKPKRKMGHLTIILK

SEQ ID NO: 147492 - protein, 241 aa, Unknown
  Bacterial polypetide isolated from the Sargasso Sea
KEFIDKVDIVTFEFENIPVDILKKIELKKKVLPKPEINKIIQNRKLEKTFVNDLGIKTTDWSFIKQAGDVEKNKNLLPGILKSNTLGYDGHGQFVLNSLDDVKKDWCFTADYILEKKVNLKKEISVVITRYLNGETYIYEPIENIHKDQILNHSKIPADINKEIFTKAQSNAKLIAEKLDYVGTMCVEYFIDQDDNLLVNEIAPRVHNSGHLTINAFNISQFENHVRSVCDLGLEKVEKIS

SEQ ID NO: 147493 - protein, 163 aa, Unknown
  Bacterial polypetide isolated from the Sargasso Sea
MSNKRNHKVTIVMGSQSDYSTMKYCTKVLKILKIKHETKIVSAHRTPHRMYKFAKNAEKNNISVIIAGAGGSAHLPGMIAAITTIPVIGVPIESKKLKGLDSLLSISQMPKGIPVGTVTIGKDGAINAALLSASIISINDKKVRNNLNLWRNKQTRSVKKKPS

SEQ ID NO: 147494 - protein, 119 aa, Unknown
  Bacterial polypetide isolated from the Sargasso Sea
MGKTRVEKTRYIGTLCVEFFIDTDDNLYANEIAPRVHNSGHLTMNSYNISQFENHVRAVCGLEKIETKKLYNAKMINLIGDEITPYRNKKFKDNEFFYDYLKTEIKHKRKMGHITIIEK

SEQ ID NO: 147495 - protein, 170 aa, Unknown
  Bacterial polypetide isolated from the Sargasso Sea
MRYTARPSAGSTRPTNHDKPRWPARVACWFLMRREAPERRGTTMSALVGVIMGSKSDWSTLSHTAEMLDKLGIPHEVKVVSAHRTPDLLFQYAEEAEARGIQVIIAGAGGAAHLPGMCAAKTHLPVLGVPVQSSMLSGVDSLLSIVQMPAGIPVATLAIGKAGAVNAALL

SEQ ID NO: 147496 - protein, 164 aa, Unknown
  Bacterial polypetide isolated from the Sargasso Sea
MKNKKYSHKVSIVMGSNSDYSTMKFCEKILKLLKINYETNIVSAHRTPDRMFKYAKSAEKNNISVIIAGAGGSAHLPGMIASLTRIPVIGVPVESKKLKGLDSLLSIAQMPKGIPVGTVAIGTDGAINAALYAASIISTFDMGVKNNLNKWRSKQSKSVKKKPK

SEQ ID NO: 147497 - protein, 129 aa, Unknown
  Bacterial polypetide isolated from the Sargasso Sea
MRPWRETMAVLPFCVVPPVLPRVAVVMGSDSDLPTMEPAAAILRELGVEVEVRVLSAHRTPLEMVNFAHAARDQGFGVIVAGAGGAAHLPGMVAALTTLPVIGVPVKSRALSGVDSLHSIVQMPGGIPV

SEQ ID NO: 147498 - protein, 251 aa, Unknown
  Bacterial polypetide isolated from the Sargasso Sea
EDLPRAVADFGGVVVKARSGGYDGRGTWIVGEGGDLSAVPAVELAGKAIVEQKIPFRRELSIVGARSITGETLFYPLTRNWHVDGILRLSLAPANACSDLQAPAEIMLKCIMEELDYAGVMAVEFFEVDGQLMVNEIAPRVHNSGHWTHEGADWSQFDLHVHALAGVPLHALNVHGSSAMVNLIGTPFENAWLQHPGVVHWYGKSVRPGRKVGHANLAASSLDDLRQGLDAWADVLPEGYQQVLDSERALG

SEQ ID NO: 147499 - protein, 274 aa, Unknown
  Bacterial polypetide isolated from the Sargasso Sea
IAAKKLNVKTVVFCDDIDAPAQNFCNQFVTGSYDNKEKIAEFINQVDLVTYEFENIPYETLNEINKSKPVLPKPSVNRLIQHRLAEKDFVNKLNIRTTRYVSIEKKSDIDALEDFLPGILKTTTLGYDGKGQYPIKSSDELNSLNIDFSKGYILEKLVKLKKEISIIITRFSNNNYEIYEPIENTHEDQILKYSKIPAEINEKIFNQSKDWAMLIAEELKYVGTLCVEFFIDRNDNLYVNEIAPRVHNSGHLTINAFNVSQFENHVRAVCSLEQ

SEQ ID NO: 147500 - protein, 164 aa, Unknown
  Bacterial polypetide isolated from the Sargasso Sea
MSIKKKYYKVALVMGSQSDFSTMRHCKKVLNLLKINHEVKIISAHRTPDRLYKFAKSAENNKISVIIAGAGGSAHLPGMIAALTKVPVIGVPIESKKLKGLDSLLSIVQMPKGIPVGTVAIGKDGAINAGLFAASIISINDTAVKKKLDDWRKKQSASVKKKPK

SEQ ID NO: 147501 - protein, 163 aa, Unknown
  Bacterial polypetide isolated from the Sargasso Sea
MINKKNYKVAIVMGSQSDYSTMKSAVKILKMLKIKYEAKIVSAHRTPNRMFDFAKKAEKNNFSVIIAGAGGSAHLPGMIASLTNLPVIGVPIESKKLKGLDSLLSIVQMPKGIPVGTVAIGIDGAINAALLSASIMSIYDNKLKKRIEIWKNKQTKSVKKKPR

SEQ ID NO: 147502 - protein, 242 aa, Unknown
  Bacterial polypetide isolated from the Sargasso Sea
LKNINERKTILPKPEINKLLQNRYTEKDFLNKNGIRTTIYTLIKDEDEIKINQNLIPGILKTCTFGYDGKGQYKINSIKDINKDIDFNNEYILEKIINLKKEISIIITRFGHQKYEVYEPIENVHEDQILKHSKIPADISDSLIEKSTDWAKKIVEDLDYIGTLCVEYFIDKNNNLYVNEIAPRVHNSGHLTINTHNISQFENHIRAVCGLEKIETKKIYNGKMLNLIGSDISNYRGKTFAD

SEQ ID NO: 147503 - protein, 210 aa, Unknown
  Bacterial polypetide isolated from the Sargasso Sea
KTTTMGYDGKGQYLIQNMKQISSLDIDFSKEYILEKLVKLKKEISVIITRFGNNKYEIYEPIENTHEDQILRYSKIPAKINKILFNQSKDWAIQIAEELKYIGTLCVEFFIDRNDNLYVNEIAPRVHNSGHLTINAYNISQFENHVRAVCALKQTPLKKISNAEMMNLIGDQITPYRQKNFSLNDNQFFFDYLKNEIKEKRKMGHLTTLK

SEQ ID NO: 147504 - protein, 139 aa, Unknown
  Bacterial polypetide isolated from the Sargasso Sea
MSQVAIIMGSKSDFDIMNEAIEILESFDIETEYDIVSAHRTPNKMVEYASNAEKKGIKVIIAGAGGAAHLPGMVASITSLPVIGVPIKSRNSIDGWDSILSILQMPGGVPVATVALNGSKNAGILAAQIIGSFNSNVAN

SEQ ID NO: 147505 - protein, 112 aa, Unknown
  Bacterial polypetide isolated from the Sargasso Sea
MKKNKSLKVSIVMGSQSDYKTMKLTEKTLKKIGVSFETKIVSAHRTPKRMYDYALKAEQNNIGVIIAGAGGSAHLPGMISALTSLPVLGVPIESKKLKGLDSLLSIAQMPKG

SEQ ID NO: 147506 - protein, 99 aa, Unknown
  Bacterial polypetide isolated from the Sargasso Sea
MKKNKTQKVSIVMGSQSDYKTMKFAEKTLKKIGISFETKIISAHRTPKRMYEYANKAEKNNIAVIIAGAGGSAHLPGMISALTHLPVLGVPIESKKLKG

SEQ ID NO: 147507 - protein, 314 aa, Unknown
  Bacterial polypetide isolated from the Sargasso Sea
MNISVLGIVGGGQLASLWTEAAKKLKIKTIILSDDIDAPAKNFAEKFIYGKYDDESIVNEFINSVDLVTYEFENIPNSILNKIEYEKVILPKPKINKLVRNRLTEKDFLNKNNIRTTNYASVNNFEDVKLNQKLLPGLLKTCTLGYDGKGQFIINKLEDLNDDFDFTKKYILEKKINLKQEISVVITRYGHQKYEIYEPIENVHEDQILKYSKIPANISDKIMNKSKEWAMIIAEELDYIGTLCVEYFIDKNENIYANEIAPRVHNSGHLTINTHNISQFENHIRAICGLKQINIKKIYNAKMINLLGDENIII

SEQ ID NO: 147508 - protein, 153 aa, Unknown
  Bacterial polypetide isolated from the Sargasso Sea
IVMGSQSDYKTMQLSAKILKKMGIKYETKIISAHRTPKRMYEFANTVAKNNIGVIIAGAGGSAHLPGMISAMTSIPVLGVPVESKKLKGLDSLLSIAQMPKGVPVGTLAIGEDGAINAALLAAAIIANNNPVIKKKLNNWRLLQTKSVRKKPK

SEQ ID NO: 147509 - protein, 172 aa, Unknown
  Bacterial polypetide isolated from the Sargasso Sea
VKLKKEISIIITRFSNNRYEIYEPIENTHEDQILKYSKIPAEINEKIFNQSKDWAMLIAEELKYVGTLCVEFFIDRNDNLYVNEIAPRVHNSGHLTINAFNVSQFENHVRAVCSLEQIPLKKISNAKMTNLLGDQITHYRNIQKFNDNEFFFDYLKKDIKEKRKMGHITTLV

SEQ ID NO: 147510 - protein, 279 aa, Unknown
  Bacterial polypetide isolated from the Sargasso Sea
EDENLINDFISKVDLVTFEFENIPYKILKNINNYKPVLPNPEINKLIQNRYSEKDFLNQIDIRTTKYKLIKNEDEIKLNENLIPGILKTCTLGYDGKGQFKINSIKEIDENIDFNNEYILEKLINLKKEISIIISRFSHQKYEVYEPIENVHEDQILKHSKIPADISDTLKEKSIDWAKKIVEDLDYIGTLCVEYFIDKNDNLYVNEIAPRVHNSGHLTINTHNISQFENHVRAVCGLEKIETKKIFNGKMVNLIGSDISAYRGKTFADNEFFYDYLKT

SEQ ID NO: 147511 - protein, 158 aa, Unknown
  Bacterial polypetide isolated from the Sargasso Sea
YSSRRSNNSAHRTPERLNEYAKHAEKSKFKVIIAGAGGAAHLPGMIASHTTIPVIGVPIMVYNDKQMKKTDKNKYSAFGGLDSLLSISEMPTGSPVVAVGVNKASNAGIYALKILGNSYPEIKTKLKKHKFDQYTSVLKESEELKKLGLTKFVKKKFR

SEQ ID NO: 147512 - protein, 287 aa, Unknown
  Bacterial polypetide isolated from the Sargasso Sea
VKKVSIITYEFENIPYETLNEINKLKTVNPKPSINRLIQHRLAEKDFVNKLNIRTTRYVSIEKKSDLETLDDFLPGILKTTTMGYDGKGQYPIKSLNELNGLNIDFSKEYILEKMVKLKKEISVIITRFGNNRYEIYEAIENIHENQILKKSKIPADISDKLVDQSREWSKQISEELKYIGTLCVEFFIDRNDNLYVNEIAPRVHNSGHLTINAFNISQFENHIRAVCSLQQIPLKKLHNAEMINLIGNQITPYRQNRNLNDNEFFFDYQKKEIKEKRKMGHLTKIL

SEQ ID NO: 147513 - protein, 246 aa, Unknown
  Bacterial polypetide isolated from the Sargasso Sea
MYEKDFINKCNIRTTIYDQIKDKEQLKYSSNLIPGILKTCTMGYDGRGQYKINSVEDIDRLNIDFKIEYILEKMVNLKKEVSVIITRYGHQQYEIYEPIENLHEDQILKNSKIPADISEDLSQKAIDWAGTIAEELGYIGTMCVEYFIDQNDNLYVNEIAPRVHNSGHLTINAYNVSQFENHVRSVCNLERIKLKKLSNAKMINLIGNDIKIYRNKKLTDGEFFYDYMKQEIKEKRKMGHLTILVN

SEQ ID NO: 147514 - protein, 95 aa, Unknown
  Bacterial polypetide isolated from the Sargasso Sea
MPQKNKKPLVSIVMGSQSDYSTMKYAEDTLKSLKIRFETKIISAHRTPNRLFEFATKAERNNISVIIAGAGGSAHLPGMIAALTPIPVIGVPIES

SEQ ID NO: 147515 - protein, 97 aa, Unknown
  Bacterial polypetide isolated from the Sargasso Sea
AGIHNLHSCIGVPVESKTLKGIDSLLSIVQMPAGIPVATVAINGGQNAGLLAIEIISLFDESIKKNLKEFRENLHTQVRNKNNKLSTIGPENYLQNK

SEQ ID NO: 147516 - protein, 141 aa, Unknown
  Bacterial polypetide isolated from the Sargasso Sea
IHKNGILVESKVPANISFSTSSDAIIIASKIVRNLNYVGVMGIEFFITKAKKILVNEMAPRVHNSGHWTQTGCIISQFEQHIRAITGTPIGDGRRHSNVLMNNILGNQIFDINYESGESINIYGKDKVKNNRKMGHTNIIK

SEQ ID NO: 147517 - protein, 163 aa, Unknown
  Bacterial polypetide isolated from the Sargasso Sea
MSNKKLNKVAIIMGSQSDYSTMKYSKKVLQSFSIKCDVKIVSAHRTPKRMFEFAKNAERNNYSVIIAGAGGSAHLPGMVASLTSIPVVGVPIESKKLKGMDSLLSIVQMPKGIPVGTVAIGKDGAINAGLYAASIIGLQNKKVKNSLLKFRLKQSKLVKKKPK

SEQ ID NO: 147518 - protein, 119 aa, Unknown
  Bacterial polypetide isolated from the Sargasso Sea
MSKIQVGLIMGSQSDWSTMKEAANILSELGIKYETKIVSAHRTPDRLWEYGKSAEQRGLKVIIAGAGGAAHLPGMIASKTNLPVIGVPVTTTSLNGIDSLYSILQMPKGYPVATMAIGA

SEQ ID NO: 147519 - protein, 163 aa, Unknown
  Bacterial polypetide isolated from the Sargasso Sea
MSNKKLNKVAIIMGSQSDYSTMKYSKQVLQSFRIKCDVKIVSAHRTPKRMFEFAKNAERNNYSVIIAGAGGSAHLPGMVASLTSIPVIGVPIESKKLKGMDSLLSIVQMPKGIPVGTVAIGKDGAINAGLYAASIIGLQNKKVKNSLLKFRLKQSKSVKKKPK

SEQ ID NO: 147520 - protein, 157 aa, Unknown
  Bacterial polypetide isolated from the Sargasso Sea
MTNETIQVAIIMGSDSDLPIVESIFPILESFGVKFTKNVMSAHRTPHDVMELIKNSEENGCKVFIAAAGMAAHLAGAVAAHSTRPVIGIPIESGGMGGIDSLLSTAMMPPGVPVATVAVGKSGAKNSAILAVQILATSDDGLAKKLIEYKQNMRSEV

SEQ ID NO: 147521 - protein, 262 aa, Unknown
  Bacterial polypetide isolated from the Sargasso Sea
FENIPFITLDLISQSKDVKPRPEINKIVQHRLYEKDFINKCNIRTTNYVSIKQKTDLNANVKLVPAILKTCKLGYDGKGQYRINNLNDLENLNIDFSQDYILEKIINLKKEFSIILTRFSHSVHQIYEPIENEHENQILKYSKIPAIIDERILSKAKDWASIIADDLGYIGTLCVEYFIDKNDNLYVNEIAPRVHNSGHLTINSYNISQFENHIRAVCGLEKVELKKLYNAQMINLIGDQIVPFRSKKYSDNEFFFDYEKKK

SEQ ID NO: 147522 - protein, 103 aa, Unknown
  Bacterial polypetide isolated from the Sargasso Sea
VEYFIDKNDNLYVNEIAPRVHNSGHLTINAYNVSQFESHIRAVCGMEKIKLSKLFDAKMINLIGSDINLYRGKKLNENEFFFDYLKKDIKDKRKMGHLTILKK

SEQ ID NO: 147523 - protein, 111 aa, Unknown
  Bacterial polypetide isolated from the Sargasso Sea
MQVLQIEIIFGVIIAGAGGSAHLPGMISALTTIPVLGVPIESKKLKGLDSLLSIAQMPKGIPVGTLAIGEDGAINAALLAASIIANNNPIIKKKLKSWRLSQTKSVKKNPK

SEQ ID NO: 147524 - protein, 125 aa, Unknown
  Bacterial polypetide isolated from the Sargasso Sea
LDESKEWSIQIAEELKYIGTLCVEFFIDRNENLYVNEIAPRVHNSGHLTINAYNISQFENHVRAVCSLEKIPLKKISDAEMINLIGNQIEPYRKNLELNNNQFFFDYLKKEIKEKRKMGHITTLI

SEQ ID NO: 147525 - protein, 93 aa, Unknown
  Bacterial polypetide isolated from the Sargasso Sea
AHLPGMTAAKTILPVIGVPIESKSLNGIDSLLSIVQMPKGVPVATVAIGNAGAANAGILAAEIIGLIDDDIQKNIQKKRKNIEKKIKSIDLDI

SEQ ID NO: 147526 - protein, 89 aa, Unknown
  Bacterial polypetide isolated from the Sargasso Sea
MHQKLLVTKKPLVGIIMGSSSDSRIMHGAAEILDSFSVAHEDQIISAHRTPQRLDEYAKHAEKNQFKVIIAGAGGAAHLPGMIASHTTI

SEQ ID NO: 147527 - protein, 238 aa, Unknown
  Bacterial polypetide isolated from the Sargasso Sea
PYAPYKELNDEEDFNYSISNFGDAIIKTRRFGYDGKGQISVNQKTNFDKNITSLFNQSIIEKKIPFEFEFSQVSCRDVFGNVFHFPLTRNIHENHILKHSYAPLNLPNDLEEHAREITKKIISDLDHVGVLTVEFFKTKENILVNEIAPRVHNSGHWTIEGCSSSQFKVHMQAVSGIKITQPKLLNECHMVNLIGNEINDWVNKKSDSGVNIHLYHKNEIKNGRKMGHLTYIKDKNIL

SEQ ID NO: 147528 - protein, 133 aa, Unknown
  Bacterial polypetide isolated from the Sargasso Sea
GVTYETKIVSAHRTPDRLWEYGNSAEQRGLKVIIAGAGGAAHLPGMIASKTNLPVVGVPVTTKSLNGIDSLYSILQMPRGYPVATMAIGAQGAKNGGLLAAQIIALSDAKLNKSLSDWRIALSTSIPDEPKNE

SEQ ID NO: 147529 - protein, 118 aa, Unknown
  Bacterial polypetide isolated from the Sargasso Sea
ASIIADDLDYVGTICVEYFIDKNDNLYVNEIAPRVHNSGHLTINAYNISQFENHIRAICGLGKQELKKLYDAKMINIIGEEIVSYRSKKYSDNEYFFDYGKKEIKVNRKMGHLTVIQK

SEQ ID NO: 147530 - protein, 92 aa, Unknown
  Bacterial polypetide isolated from the Sargasso Sea
SAHLPGMIAALTHVPVLGVPIESKKLKGLDSLLSIVQMPKGIPVGTLAIGEDGAINAALLAAAIMGIKRSKIKNKLKSWRLSQTKSVKKNPK

SEQ ID NO: 147531 - protein, 289 aa, Unknown
  Bacterial polypetide isolated from the Sargasso Sea
GQLGMMLCQASKEIGVNTHIYCPDKNSPAKHYSSKFTCEDYLNEKEIINFSNSVDIITYEFENIPKETLELITDNKLRPGIKSLEQTQDRLIERKLLEKLNIPYAPYNELNGEEDFNNSISNFGDAIIKTRRFGYDGKGQISVNQKTNCDKNISSLFNQSIIEKKIPFEFEFSQVSCRDVFGNVFHFPLTRNIHENHILKHSYAPLNLPNDLEEYAREITKKIISDLDHVGVLTVEFFKTKENILVNEIAPRVHNSGHWTIEGCSSSQFKVHMQAVSGIKIIEPKLLNE

SEQ ID NO: 147532 - protein, 165 aa, Unknown
  Bacterial polypetide isolated from the Sargasso Sea
MNSYRDKIVSIVMGSQSDWPCMKSASIILKELNIQHEVKIISAHRTPDRLFKYAENLEKNGIMVSIAGAGGAAHLPGMIASKTIIPVLGVPVKSKNLNGIDSLLSIVQMPPGVPVGTLAIGNAGAQNAALLAASIIATSDDEITKNLKTWRKNQTQSVKEHPSDE

SEQ ID NO: 147533 - protein, 150 aa, Unknown
  Bacterial polypetide isolated from the Sargasso Sea
MGSKSDHTTMKNCEKILKLLKVKFQTKIVSAHRTPERMFKFAKAAEDNNISVIIAGAGGSAHLPGMIASLTTIPVIGVPVESRKLKGLDSLLSIVQMPKGIPVGSVAIGEDGAMNAGLYAASIIALTNKDIKKNLKNYRSKQSKAVKQKL

SEQ ID NO: 147534 - protein, 115 aa, Unknown
  Bacterial polypetide isolated from the Sargasso Sea
RMYEFAESASRNNIGVIIAGAGGSAHLPGMISAITSIPVLGVPVESKKLKGLDSLLSIAQMPKGIPVGTLAIGEDGAINAALLATAIIANSNPTVKKKLNNWRSSQTRSVKKNPK

SEQ ID NO: 147535 - protein, 134 aa, Unknown
  Bacterial polypetide isolated from the Sargasso Sea
KIPADISEKITNQSIDQATIIAEELDYIGTLCVEYFIDKNDNLYLNEIAPRVHNSGHLTINSHNISQFENHIRAVCGLEKIKVKKLFNASMINLIGHEISSYRKKNYNDNEFFFDYLKKEIKEKRKMGHLTTIK

SEQ ID NO: 147536 - protein, 177 aa, Unknown
  Bacterial polypetide isolated from the Sargasso Sea
PVVENLHENNILRMTIAPGRVSEKVRKEAEDVAHKTMEVLHGAGVFGIEMFVTQDEKILINEIAPRVHNSGHHTLQSSTISQFELHLRAILGLDLGDTSIKSPTIMYNILGPHTFKGEYNVLHREEENIFLKMYGKLESKPQRKIGHINIVDKKNVGIEGLLLQVEDLKKNLVIEPK

SEQ ID NO: 147537 - protein, 209 aa, Unknown
  Bacterial polypetide isolated from the Sargasso Sea
KTTTLGYDGKGQYPIKSGDELNSLNIDFSKGYILEKLVKLKKEISIIITRFSNNQYEIYEPIENTHEDQILKYSKIPAEINEKIFNQSKDWAMLIAEELKYVGTLCVEFFIDRNDNLYVNEIAPRVHNSGHLTINAFNVSQFENHVRAVCGLEQIPLKKISNAKMMNLLGDQITHYRNMQKFNDNEFFFDYLKKDIKEKRKMGHITTLV

SEQ ID NO: 147538 - protein, 157 aa, Unknown
  Bacterial polypetide isolated from the Sargasso Sea
MKNKKNNHKVSIVMGSQSDYSTMQYCEKVLKILKIRYETNIVSAHRTPKKMYRFAKFAEKRNISIIIAGAGGSAHLPGMIASLTSIPVIGVPIESKKLKGLDSLLSIAQMPKGIPVGTVAIGVDGAINAGLFAGSIISIFDNKIKINLKKWRTKQSK

SEQ ID NO: 147539 - protein, 267 aa, Unknown
  Bacterial polypetide isolated from the Sargasso Sea
MIGVVGGGQLARMLVQAAAQRDVPIAVQTSDAADPAAGLASRLVAADPRDVAGTRELVVGCDGITFENEWVNIDALLPLEQQGVRFQPSLAALSPLVDKLSQRQLLDDLVIPSPPWCPLSLISPAQPALPQGWTFPVMAKASRGGYDGKGTVVLRDIDGLAQLLRAVPADDWLLESWVDYELELALVVSRDQRGRIRHFPLVQTHQHRQVCDWVLAPAPVDPSVAALAYNVAASLMTKLGYVGVLALEFFYGPAGLQVNEIAPRTHN

SEQ ID NO: 147540 - protein, 322 aa, Unknown
  Bacterial polypetide isolated from the Sargasso Sea
TISHNPLFMTSAAADNRLSRIGVVGGGQLARMLVDASRQRNVEVIVQTPSLADPAAQVAADVIEADPVDADATQALLKRCSSITFENEWVSIEALTALERKGARFRPSLASLKPLVNKLHQRQLLDRLSIPSPDWVELISIDPGAPSLPKGWSFPVMAKAVTGGYDGRGTRVLKTIDCLAELLRSVDPDDWILEAWVDFESELALVVSRDQSGRVRALPLAQTHQSNQVCDWVVAPADVEQLVEATAYNIAASLLTTLDYVGVMAIEMFYGSKGLLVNEIAPRTHNSGHFSIEACHSSQFDQQLCIAAGLDIPDPVLKGPGH

SEQ ID NO: 147541 - protein, 268 aa, Unknown
  Bacterial polypetide isolated from the Sargasso Sea
NFCDEFMFGDYKDKNKINDFVKKVSIVTYEFENIPYETLNEINKFKTVNPKPSINRLIQHRLAEKDFVNKLNIRTTRYVSIEKKSDLETLDDFLPGILKTATMGYDGKGQYPIKSLGELNRLNIDFSKEYILEKLVKLKKEISVIVTRFGNNRYEIYEAIENIHENQILKKSKIPADISNKLVDQSREWSKQISEELKYIGTLCVEFFIDRNDNLYVNEIAPRVHNSGHLTINAFNISQFENHIRAVCSLEQIPLKKLHNAEMINLIG

SEQ ID NO: 147542 - protein, 97 aa, Unknown
  Bacterial polypetide isolated from the Sargasso Sea
AHLAGATAAHTTKPVIGVPIDAGPLQGLDSLLSTVQMPGGIPVATVAIGKAGAKNAAYLAAQILSLADEALSERVKQERAANSEKVQAQDAALQSSL

SEQ ID NO: 147543 - protein, 156 aa, Unknown
  Bacterial polypetide isolated from the Sargasso Sea
RVNHGSQSDWSTMKEAADILSELGVAYETKIVSAHRTPDRLWEYGKSAEQRGLKVIIAGAGGAAHLPGMIASKTNLPVVGVPVATTSLNGIDSLYSILQMPRGYPVATMAIGAQGAKNSGLLAAQIIALSDAKLNKSLSDWRIALSASIPDEPKDE

SEQ ID NO: 147544 - protein, 273 aa, Unknown
  Bacterial polypetide isolated from the Sargasso Sea
DDKDAPAQFFADEFIFCKYDDDLKVEEFSRKIDFVTFEFENIPYATLTKIDNIKKINPKPSINKIIQNRLSEKNFLNKNNVNTTSYISVKNETELKSSQDFIPGILKTCMLGYDGKGQYKINNEEELDNLKVNFENHYILEKLVKLKKEISVIITRFGKQKYEVYDPIENVHEDQILKYSKIPAEINEVLVNKSKAWAKYIAEELDYIGTMCVEYFIDKNENLFVNEIAPRVHNSGHLTINAYNISQFENHIRAICGLDKVETKKLYNAKMIN

SEQ ID NO: 147545 - protein, 271 aa, Unknown
  Bacterial polypetide isolated from the Sargasso Sea
KESIKICQRFSPVFPDADSLSICQDRVNEKRFLNDINIPFSPFVSGSTVSEILQKGSILQFPLVLKSSRFGYDGKGQRIIYSKQELKNSETEFKNTPIILENFIDFKLEISVIICRDMFGNISAYDPAENSHQNGILVESKVPANISFSLASDAILIASKIVNALQYVGVMGVEFFVTNENKLLVNELAPRVHNSGHWTQSGCLINQFEQHIRAITGWTIGGGKRHSDVTMTNLLGSVTKGLKNKPDSSVNIYGKVTPREGRKMGHINNIN

SEQ ID NO: 147546 - protein, 240 aa, Unknown
  Bacterial polypetide isolated from the Sargasso Sea
INKCNISTTRYVSIKEKSDLNANIKLIPGLLKTCRLGYDGKGQYKLSNPSDIENLNIDFSQEYILEKMINLKKEFSIILTRFGHSIHSVYEPIENEHENQILKYSKIPAVIDDKILLKAKDWASIIADDLDYVGTICVEYFIDKNDNLYVNEIAPRVHNSGHLTINSYNISQFENHIRAICGLEKKELKKIYNAKMINIIGEEIVSYRSKKYSDNEFFFDYEKKEIKKNRKMGHLTIIQK

SEQ ID NO: 147547 - protein, 163 aa, Unknown
  Bacterial polypetide isolated from the Sargasso Sea
MQSKKIHKVSIVMGSQSDFNTMKLCQKVFKILKVRFETKIISAHRTPNRMYDYAKKAEKNKISVIIAGAGGSAHLPGMIASLTTIPVIGVPIESKKLKGLDSLLSIAQMPKGVPVGTVAIGEDGAINAALLAASIISLSDEKLKKNLNKWRLKQSSSVKKKPK

SEQ ID NO: 147548 - protein, 131 aa, Unknown
  Bacterial polypetide isolated from the Sargasso Sea
DINKEIFVEAQSNAKLISEKLDYVGTMCVEYFIDYDDNLLVNEIAPRVHNSGHLTINAFNISQFENHVRAVCDLGLEKVEKISNAEMFNVLGKDIETYRSKKFNKDEFFYDYEKKSIKDKRKMGHLTVLKK

SEQ ID NO: 147549 - protein, 215 aa, Unknown
  Bacterial polypetide isolated from the Sargasso Sea
MTEKDFINKLNIRTTRYALIEKKTDIEPLEDFLPGILKTTTMGYDGKGQFVINNINEIDSGNIDFSKNYILEKRVKLKKEISVIITRFNSNSYEIYDPIENIHEDQILKHSKIPAEISDEILNQSKEWAIRLSEELKYIGTLCVEFFIDRNENLYVNEIAPRVHNSGHLTINAYNVSQFENHIRAVCSLEKIPLKKLSNAKMINLIGNQITHYRK

SEQ ID NO: 147550 - protein, 253 aa, Unknown
  Bacterial polypetide isolated from the Sargasso Sea
INSLIQNRLTEKDFLNKNNIRTTNYALIKNKDEIKDNENLLPGLLKTTTLGYDGKGQYKLNSLTDINEEIDFTKEYILEKFINLKKEISIVICRFGNQKYEIYEPIENVHEDQILKHSKIPAEVSETIKVKSKEWAKQIVEELDYIGTLCVEFFIDKNENLYVNEIAPRVHNSGHLTINSHNVSQFENHIRAVCGLEKIDTKKIYNAQMINLIGDDITIYRNKTFKENEFFYDYLKKQIKAKRKMGHLTIIEK

SEQ ID NO: 147551 - protein, 198 aa, Unknown
  Bacterial polypetide isolated from the Sargasso Sea
QYPIKSGDELNSLNIDFTKGYILEKLVKLKKEISIIITRFGNNKYEIYEPIENTHEDQILKYSKIPAEINEKIFNQSKDWAIRIAEELKYVGTLCVEFFIDRNNNLYVNEIAPRVHNSGHLTINAFNVSQFENHVRAVCGLEQIPLKKISNAKMINLLGDQITHYRNMQKFKDNEFFFDYLKKDVKEKRKMGHITTLV

SEQ ID NO: 147552 - protein, 93 aa, Unknown
  Bacterial polypetide isolated from the Sargasso Sea
GSAHLPGMISALSSLPVLGVPIESKKLKGLDSLLSIVQMPKGIPVGTLAIGEDGAINAALLAASIIGNNNQSIKNKLNNWRAAQTKSVKKKPK

SEQ ID NO: 147553 - protein, 91 aa, Unknown
  Bacterial polypetide isolated from the Sargasso Sea
AHLPGMLASKTLLPVIGVPIPLNNLNGVDSLLSIVQMPRGVPVATVAIGGAENAAILAAEILSISDPKIKQNLTNWRNNMTEKIILDHENN

SEQ ID NO: 147554 - protein, 96 aa, Unknown
  Bacterial polypetide isolated from the Sargasso Sea
MPQKNKPLVSIIMGSQSDYSTMKYAEDVLKNLKIRHETKIISAHRTPKRLFDYASKAEANNISVIIAGAGGSAHLPGMVAAITTIPVIGVPIESSK

SEQ ID NO: 147555 - protein, 144 aa, Unknown
  Bacterial polypetide isolated from the Sargasso Sea
AIEILKSFDINTEYDIVSAHRTPNKMVEYASNAEKKGIKVIIAGAGGAAHLPGMMASITSLPVIGVPIKSRNSIDGWDSILSILQMPGGVPVATVALNGSKNAGILAAQIIGSFDSKVADKVKAYKKDLEDKVIKSSKDLKKNS

SEQ ID NO: 147556 - protein, 162 aa, Unknown
  Bacterial polypetide isolated from the Sargasso Sea
NYKIGKQKYEVYDPIENVHEDQILKYSKIPAEISNDLLNKSKEWAKYISEELNYIGTMCVEYFIDKNENLYVNEIAPRVHNSGHLTINAYNVSQFENHIRAVCGLDKVETKKLYNAKMINLIGEDILVYRSKIFKENEFFFDYQKNTVKKKRKMGHITIIEK

SEQ ID NO: 147557 - protein, 114 aa, Unknown
  Bacterial polypetide isolated from the Sargasso Sea
MLDCFVKPNKINNKVAIIMGSQSDYPVMKDAEKILRILKINFEVLTVSAHRTPKRMFEFAENANKKGFAVIIAGAGGAAHLPGMVSSLATVPVIGVPIETKKMKGLDSLLSIVQ

SEQ ID NO: 147558 - protein, 279 aa, Unknown
  Bacterial polypetide isolated from the Sargasso Sea
FEFENIPFDTLEFINEHKQVLPKPNINQVIQNRFLEKKFVNNLHIKTTDYVMVKNLQDLHNNVNFLPGILKTTTLGYDGKGQFKLNSKNDIEKLKIDFDKEYILEKVVNLKKEISVIITRFKNQTYEIYEPIENIHEDQILKFSEIPANINENVLNLSTEWAKKISEELDYIGTLCVEYFIDEKDNIYVNEIAPRVHNSGHLTINSHNISQFENHIRAVCGMNKIETKKKFNAKMVNLIGDDITKYRNKKIQENEFFFDYLKKEIKPKRKMGHFTTIFK

SEQ ID NO: 147559 - protein, 118 aa, Unknown
  Bacterial polypetide isolated from the Sargasso Sea
MSNETTQVAIIMGSDSDLPIVEAIFPILDTFGVKYTKNVMSAHRTPHAVMELIQNSEDNGCKVFIAAAGMAAHLAGAVAAHSTRPVIGIPIESGGMGGIDSLLSTAMMPPGVPVATVA

SEQ ID NO: 147560 - protein, 306 aa, Unknown
  Bacterial polypetide isolated from the Sargasso Sea
MLGGGQMGGFFAEAALRFGYKVAVWDPSPNAPAKRFASASFDAPFDDPDTLKAFSEVAVCASLEWENVPVSLTDGLQKLIRVRPGSRSLGLAQDRTKEKHFLTEQHIPVTKYAVIEKPSELGAVQLDLPWIVKTATLGYDGHGQWRISNTQDIVSTEKILKGDGPWVVEQVVPYRIELSAVVAFDGKSNLVTFPPTENIHENGILRISISPGRMSKEIARRAQDLAEEVIKNIGEPGVFCVEMFLLENGELLVNEIAPRPHNSGHHTIDSFTVSQYELQIRALVGLPLVNPEQVTPSVLLNVLGEE

SEQ ID NO: 147561 - protein, 254 aa, Unknown
  Bacterial polypetide isolated from the Sargasso Sea
VNRLIQHRLAEKDFVNKLNIRTTRYVSIEKKSDIDALEDFLPGILKTTTLGYDGKGQYPIKTVNELDSLNIDFSKGYILEKLVKLKKEISIIITRFSNNKYEIYEPIENSHEDQILKYSKIPAEINEKIFNQSKDWAMLIAEELKYVGTLCVEFFIDRNDNLYVNEIAPRVHNSGHLTINAFNVSQFENHVRAVCGLEQIPLRKISNAKMMNLLGDQITHYRNIQKFNENEFFFDYLKKDIKEKRKMGHITTLV

SEQ ID NO: 147562 - protein, 166 aa, Unknown
  Bacterial polypetide isolated from the Sargasso Sea
MTNETVQVAIIMGSDSDLPVVETSFSILDDFGVKYTKNVMSAHRTPHDVMELIKTSEENGCKVFIAAAGMAAHLAGAVAAHSTKPVIGIPIESGGMGGIDSLLSTAMMPPGVPVATVAVGKSGAKNSAILAVQILATSDEDLAQKLVEYKQNMRSEVLEKDKKLNS

SEQ ID NO: 147563 - protein, 159 aa, Unknown
  Bacterial polypetide isolated from the Sargasso Sea
MAKVGIIMGSKSDYPVMKEAEDILKEFKVDYEINIVSAHRTPEKMMEYSKNAHERGINVIIAGAGGAAHLPGMVASITPLPVIGVPVKSRNSIDGWDSILSILQMPGGVPVATVALNGAKNAGILAVEILGSSNRELLKKVIQYKKELEDKVNQSKIEE

SEQ ID NO: 147564 - protein, 116 aa, Unknown
  Bacterial polypetide isolated from the Sargasso Sea
RPHNSGHFTLDACNTSQFEQHIRAILGIELGDVSQKGNAIMLNLVGEENSFGKVTYSNLDNALNDDSSYVHIYGKEETRPNRKMGHITIICDNFEDAYTKAKNFKNTIKVKSINNG

SEQ ID NO: 147565 - protein, 130 aa, Unknown
  Bacterial polypetide isolated from the Sargasso Sea
INEKIFDQSKDWAMLIAEELKYVGTLCVEFFIDRNDNLYVNEIAPRVHNSGHLTINAFNVSQFENHVRAVCGLEQIPLKKISNAKMMNLLGGQITHYRNLQKFNDNEFFFDYLKKDIKEKRKMGHITTLL

SEQ ID NO: 147566 - protein, 280 aa, Unknown
  Bacterial polypetide isolated from the Sargasso Sea
ITYEFENIPKETLVLINDNKLRPGVKSLEQTQDRLIERKLLEKLNIPYAPYKELNDEEDFNYSISNFGDAIIKTRRFGYDGKGQISVNQKTNFDKNISSLFNQSIIEKKIPFEFEFSQVSCRDVFGNVFHFPLTKNIHENHILKHSYAPLDLPNDLEEYAREITKKIISDLDHVGVLTVEFFKTKENILVNEIAPRVHNSGHWTIEGCSSSQFKVHMQAVSGIKITQPKLLNECHMVNLIGDEINDWINKQSDSDMNIHLYHKKEIKNGRKMGHLTYIKD

SEQ ID NO: 147567 - protein, 301 aa, Unknown
  Bacterial polypetide isolated from the Sargasso Sea
MRVVFYGAGQLAQMMYLAGSPLGIDVQAVDVNNDTVVHPVSKTPLEISLAQALEGADALTVEFEHVPERLLEDAAKTNKLMPNIDSILVGADRVREKKLLESMQVANCEHQIVTDLAQLDDCVKQLGSKLILKASRDGYDGYGQWRLSDESDLPELKNALQGLDLQTVPLVVEKMVAFDRELSLIGVRNANGDVRTYPLAENLHHQGQLHVSVAPATNVDDALQDQAHDIFVKLAEGMNYVGVLAVELFQVGDKLLVNELAPRVHNSGHWSQSGAVTSQFENHLRAVCGLPLGDTSAIGPS

SEQ ID NO: 147568 - protein, 210 aa, Unknown
  Bacterial polypetide isolated from the Sargasso Sea
MKTTTLGYDGKGQYPIKNINEIDSLNIDFSKEYILEKLVKLKKEISVIITRFNNNKYEIYEPIENTHEDQILRNSKIPAEISEKLFNQSKEWAIEIAEKLKYIGTLCVEFFIDRNDNLYVNEIAPRVHNSGHLTINAYNISQFENHVRAVCSLEQIPLKKLSNAKMINIIGNQIMFYRENPKLSDNQFLFDYLKKEIKEKRKMGHLTTLK

SEQ ID NO: 147569 - protein, 133 aa, Unknown
  Bacterial polypetide isolated from the Sargasso Sea
PAEISEKIKVKSKEWAKQIVEELDYIGTLCVEFFIDKNENLYVNEIAPRVHNSGHLTINSHNVSQFENHIRAVCGLKKIDTKKIYNAQMINLIGDDITIYRNKTFKENEFFYDYLKKQVKAKRKMGHLTIIEK

SEQ ID NO: 147570 - protein, 115 aa, Unknown
  Bacterial polypetide isolated from the Sargasso Sea
VVEKLDYIGTLCVEFFIDTDDNLYANEIAPRVHNSGHLTMNSHNISQFENHVRAVCGLEKIETKKLYNAKMINLIGNDITAYRNKTFKDNEFFYDYLKTEIKHKRKMGHITIIEK

SEQ ID NO: 147571 - protein, 195 aa, Unknown
  Bacterial polypetide isolated from the Sargasso Sea
MQQKLLVTKKPLVGIIMGSSSDSRIMHGAAEILDSFSIAHEDQIISAHRTPQRLDEYAKHAEKSQFKVIIAGAGGAAHLPGMIASHTTIPVIGVPIMVYNDKQMKKTDKNKYSAFGGLDSLLSISEMPTGSPVVAVGVNKASNAGIYALKILGNSYPDIKTKLKKHKFDQYTSVLKESEEMKKMGLSKFVKKKFR

SEQ ID NO: 147572 - protein, 159 aa, Unknown
  Bacterial polypetide isolated from the Sargasso Sea
IYFYPPFENIHKNHILFETISPSQIDEKINKQLIRISKKILNKLNYIGLLTIEFFLDDENNIYVNEIAPRVHNSGHITLDNANMSQFELHIKAITKDKIKTPKIIKKGLMRNLIGNEIKRTKQISKLKSYKVFKKKKAYDYGKKAIKQGRKMGHINFVM

SEQ ID NO: 147573 - protein, 142 aa, Unknown
  Bacterial polypetide isolated from the Sargasso Sea
MRNCEKVFKILKIFFETKIISAHRTPKRMFEYAKSAEKNNISVIIAGAGGSAHLPGMVAAITRIPVIGVPIESKKLKGLDSLLSIAQMPKGIPVGTVAIGKDGAINAGLFAASIISNFDKKVKKNLENWRSKQTKSVKKKPK

SEQ ID NO: 147574 - protein, 132 aa, Unknown
  Bacterial polypetide isolated from the Sargasso Sea
FQVGDQLLVNEIAPRVHNSGHWTQQGADTCQFENHLRAVCGLPLGSTALVRPTLMVNILGEDHVSPAVLSLPSCHLHWYGKGKRPGRKMGHINLSASSTSELAQRFDLLRQHLPEQEFPELDLVAARLKQLQ

SEQ ID NO: 147575 - protein, 89 aa, Unknown
  Bacterial polypetide isolated from the Sargasso Sea
MKKNSKLKVSIIMGSQSDYKVMKLAEKTLKKIEVSFETKIISAHRTPQRMYEYAAKVEQNNIGVIIAGAGGSAHLPGMISALTHVPVLG

SEQ ID NO: 147576 - protein, 210 aa, Unknown
  Bacterial polypetide isolated from the Sargasso Sea
LKTTTLGYDGKGQYPIKSIKELNSLNIDFSKGFILEKLVKLKKEISIIITRFSNNKYEIYEPIENTHEDQILKYSKIPAEINKKIFNQSKDWAMLIAEELKYVGTLCVEFFIDRNDNLYVNEIAPRVHNSGHLTINAFNVSQFENHIRAVCGLEQIPLKKISNAKMTNLLGDQITHYRNMQKFNANEFFFDYLKKDIKEKRKMGHITTLV

SEQ ID NO: 147577 - protein, 189 aa, Unknown
  Bacterial polypetide isolated from the Sargasso Sea
DVKKDWCFTADYILEKRVNLKREISVVITRYSNGENYVYEPIENIHKDQILRFSKIPANVNQNTFKKAQDIAKLIAEKLKYIGTMCVEYFLDQDENLLLNEIAPRVHNSGHLTINAFNVSQFENHVRAVTELKKEEVKKISNAEMNNILGEEIQKFRNKSFTGEKFFFDYGKKEIKEKRKMGHLTILKK

SEQ ID NO: 147578 - protein, 270 aa, Unknown
  Bacterial polypetide isolated from the Sargasso Sea
IGSGQLGSLLCQAAKKLNIKTIVISDDENGPAQNYSDKFIFSKYDDKNKIREFINGADIITYEFENIPINILKEIDKEKKVLPKPEINKIIQNRQLEKTFVNDLGIKTTKWAFIKNAKDIQQNKNLLPGILKTNTLGYDGHGQYVLNTLDDVKKDWCFTADYILEKRVNLKKEISVVVTRFKNKEIYIYEPIENTHKDQILKYSKIPADIKPGIFKKAQDNARLIANELDYIGTMCVEYFIDQEDNLLVNEIAPRVHNSGHLTINAFNVS

SEQ ID NO: 147579 - protein, 111 aa, Unknown
  Bacterial polypetide isolated from the Sargasso Sea
NYIGTLCVEYFIDKNDNLYVNEIAPRVHNSGHLTINSHNVSQFENHIRAICGLEKIKIKKIYNAKMKNLIGDDINNYREKKFNDNEFFFDYLKKKIKKKRKMGHFTTTEKC

SEQ ID NO: 147580 - protein, 113 aa, Unknown
  Bacterial polypetide isolated from the Sargasso Sea
MVSIVMGSKSDYSTMKFCEKVLKLLKIRYETNIVSAHRTPERMFKYAKLAEHRNISVIIAGAGGSAHLPGMIASLTRIPVIGVPIESKKLKGLDSLLSIAQMPKGIPVGTVAI

SEQ ID NO: 147581 - protein, 237 aa, Unknown
  Bacterial polypetide isolated from the Sargasso Sea
LNIRTTRYAAIESKSDIEPLGDFLPGILKTTTLGYDGKGQYPIKKIGEIGSLNLDFSKGYILEKLVKLKKEISVIITRFGNNSYEIYEPIENTHENQILKHSIIPAEISKKIFDESKEWAIRIAEELKYIGTLCVEFFIDRNENLYVNEIAPRVHNSGHLTINAFNVSQFENHVRAVCGLEKIALKKISNAKMVNLIGNQIKPYRENFKLNENEFFFDYQKKEIKDKRKMGHITTLI

SEQ ID NO: 147582 - protein, 163 aa, Unknown
  Bacterial polypetide isolated from the Sargasso Sea
MSQNNKSRVSIVMGSQSDYKTMKLSAKVLKSLKIQYEIKIVSAHRTPKRMYKFAKNTKKNRISVIIAGAGGSAHLPGMIASLTSLPVIGVPIESKKLKGLDSLLSIVQMPKGIPVGTVAIGEDGAINAALLAASIIAISNKEVRNRLNYLRNKQTRSVKKKPR

SEQ ID NO: 147583 - protein, 162 aa, Unknown
  Bacterial polypetide isolated from the Sargasso Sea
MKLSNPKISIVMGSQSDWSTLKHTSTVLKELKISHEKKIVSAHRTPKRLYEYAEQAYDKGIKIIIAGAGGSAHLPGMIAAITHIPVIGVPIESKTLKGLDSLLSIAQMPFGVPVGTVAIGENGAKNAALYAASIISNYDSKVENLLIKWRLAQTKKVKKTPK

SEQ ID NO: 147584 - protein, 291 aa, Unknown
  Bacterial polypetide isolated from the Sargasso Sea
MSIKNLGIIGGGQLGSLLAVAAKKLNINTIIYCDDVDAPAQNFCNKFIHGKYDDKIKMREFINEIDIITYEFENIPYETLNEMNKVKPVLPKPSVNRLIQHRIAEKDFVNKLNIRTTRYASIESKSDMEPLGDFLPGILKTTTMGYDGKGQYPIKKIQDINNLNIDFSKGYILEKLVKLKKEISVIITRFGNNSYEIYEPIENTHEDQILKHSIIPAQINKKIFDESKDWSIRIAEELKYIGTLCVEFFIDRNENLYVNEIAPRVHNSGHLTINAFNISQFENHVRAVCSL

SEQ ID NO: 147585 - protein, 106 aa, Unknown
  Bacterial polypetide isolated from the Sargasso Sea
FVCRYFIDKNDNLYVNEIAPRVHNSGHLTINSHNVSQFENHIRAISGLDQIKIKKIYDAKMINLIGDDINAYRKKKFKNNEFFFDYLKKEIKKKRKMGHFTVIEKC

SEQ ID NO: 147586 - protein, 214 aa, Unknown
  Bacterial polypetide isolated from the Sargasso Sea
MLKTATLGYDGKGQFKLNNLEDCKNISLSKDGEYILEKLVNLKKEISVIVTRFKKNEYEIYEPFENKHEDQILKVSKIPANISKEHFFQSIENAKKISEKLDYVGTLCVEFFIDEKDNLLVNEIAPRVHNSGHMTINSHNISQFENHIRAVCGLKKVNTLKLYNAKMTNILGNEITKYKGKKFQGNEFFFDYLKKEVKEKRKMGHFTEINKIND

SEQ ID NO: 147587 - protein, 132 aa, Unknown
  Bacterial polypetide isolated from the Sargasso Sea
MQVGIIMGSTSDWPTMKNAADMLDKFGIAYETRVVSAHRTPQLLADYASSAASRGLKVIIAGAGGAAHLPGMAAAFTSLPVLGVPVQSKALKGLDSLLSIVQMPKGVAVGTLAIGDAGAANAGLLAAQILAT

SEQ ID NO: 147588 - protein, 105 aa, Unknown
  Bacterial polypetide isolated from the Sargasso Sea
EFFKTKENILVNEIAPRVHNSGHWTIEGCSSSQFKVHMQSVSGIKITQPKLLNECHMVNLIGNEINDWINKKSDSDVNIHLYHKNEIKNGRKMGHLTYIKDKKIL

SEQ ID NO: 147589 - protein, 150 aa, Unknown
  Bacterial polypetide isolated from the Sargasso Sea
MGSKSDYATMKNCEKILKLLKVKFETKIVSAHRTPERMFKFAKAAEDNNISVIIAGAGGSAHLPGMIASLTTIPVIGVPVESRKLKGLDSLLSIVQMPKGIPVGCVAIGEDGAMNAGLYAASIIALTNKEIKKNLKNYRSKQSKAVKQKP

SEQ ID NO: 147590 - protein, 113 aa, Unknown
  Bacterial polypetide isolated from the Sargasso Sea
MTQVAIIMGSKSDFDIMKDAIDILKSFGIETDYDIVSAHRTPKKMIEYATNAEKNGIKVIIAGAGGAAHLPGMVASITSLPVIGVPIKSRNSIDGWDSILSILQMPGGVPVAT

SEQ ID NO: 147591 - protein, 108 aa, Unknown
  Bacterial polypetide isolated from the Sargasso Sea
MDDCVVSVIMGSQSDWETMKACCSILIELDIQYEKKIISAHRTPDRLFEYAENIKKRGIKVIIAGAGGAAHLPGMVASKASLPVIGVPIMSKALSGIDSVYFIFANGK

SEQ ID NO: 147592 - protein, 242 aa, Unknown
  Bacterial polypetide isolated from the Sargasso Sea
FINSLGIKTTSYASVKNINDLNFNSKLLPGILKTCTLGYDGKGQFKINSIKDINSTNIDFENEYILEKLVNLKKEISIIITRFGENSYEIYEPIENLHENQILKYSKIPADVNEKIIDTSKKWAKLISEELKYIGTLCVEYFIDKKDNLYVNEIAPRVHNSGHLTINSHNISQFENHVRAVCNLEKKNTIKLFNAQMINLIGDDILKYRNKKINKNEFFYDYYKKDIKINRKMGHLTKLINL

SEQ ID NO: 147593 - protein, 102 aa, Unknown
  Bacterial polypetide isolated from the Sargasso Sea
MKNETIQVAIIMGSDSDLPVVEAIFPVLEAFGVKYTKNVMSAHRTPHDVMELIKNSENNGCKVFIAAAGMAAHLAGAVAAHSTRPVIGIPIESGGMGGIDSL

SEQ ID NO: 147594 - protein, 220 aa, Unknown
  Bacterial polypetide isolated from the Sargasso Sea
ETLDDFLPGILKTTTMGYDGKGQYPIKSLNELNGLSIDFSKEYILEKLVKLKKEISVIITRFGNNKYEIYEAIENIHENQILKKSKIPADISDKLVNQSREWSKQISEELKYIGTLCVEFFIDRNDNLYVNEIAPRVHNSGHLTINAFNISQFENHIRAVCSLEQIPLKKLHNAEMINLIGNQITPFRQNIKLNENEFFFDYLKKEIKDKRKMGHLTKIL

SEQ ID NO: 147595 - protein, 102 aa, Unknown
  Bacterial polypetide isolated from the Sargasso Sea
MGVIIAGAGGSAHLPGMISALTSVPVLGVPIESKKLKGLDSLLSIAQMPKGIPVGTLAIGEDGAVNAALLAASIIANNNQIIKKKLNNWRLSQTRSVKKNPK

SEQ ID NO: 147596 - protein, 206 aa, Unknown
  Bacterial polypetide isolated from the Sargasso Sea
MPSRNDGKGQYKLYNLKDLSKKIDFTKEYILEKLVNLKKEISVIVTRFGHQKYEIYEPIENVHEDQILKHSKIPADISEAIRKKSNEWATNIAEELDYIGTLCVEFFIDKNDNLYVNEIAPRVHNSGHLTINSHNVSQFENHIRAVCGLEKIETKKIYNAKMINLIGDDISNFKNKSFKDNEFFFDYQKTEIKNKRKMGHLTTIEK

SEQ ID NO: 147597 - protein, 35 aa, Unknown
  Bacterial polypetide isolated from the Sargasso Sea
MCVEYFIDQDNNLLVNEIAPRVHNSGHLTINAFNI

SEQ ID NO: 147598 - protein, 131 aa, Unknown
  Bacterial polypetide isolated from the Sargasso Sea
MSKIQVGLIMGSQSDWSTMKEAADILSELGVAYETKIVSAHRTPDRLWEYGKSAEQRGLKVIIAGAGGAAHLPGMIASKTNLPVVGVPVATTSLNGIDSLYSILQMPRGYPVATMAIGARRCPKIDGLLAA

SEQ ID NO: 147599 - protein, 269 aa, Unknown
  Bacterial polypetide isolated from the Sargasso Sea
LELINDNKLRPGIKSLEQTQDRLTERKLLEKLNIPYAPYKELKSEEDFNYSISNFGDAIIKTRRLGYDGKGQISINQETNFDKNISSLFNQSIIEKKIPFEFEFSQVSCRDIFGNIFHFPLTRNIHENHILKHSYAPLNLPNDLEEHAKEITKKIISDLDHVGVLTVEFFKTKENILVNEIAPRVHNSGHWTIEGCSSSQFKVHMQAVSGVKITQPKLINECHMVNLIGEEINDWINKKSDSDVNIHLYHKKEIKNGRKMGHLTYIKDK

SEQ ID NO: 147600 - protein, 278 aa, Unknown
  Bacterial polypetide isolated from the Sargasso Sea
KKIKEFIDDIDVVTFEFENIPIDILKQIDKEKKVLPKPDINKIIQNRKLEKTFVNELGIKTTDWSFVKSAEDVKKNEKLLPGILKTNTLGYDGHGQFVLNSLTDLKKDWCFTADYILEKRVALKKEISVLVVRFSNGETYTYEPIENIHKDQILKYSKIPADISPKIFQEAQSIGKLIAEKLGYIGVMCVEYFIDQNDNLLVNEIAPRVHNSGHLTINAFNVSQFENHIRAVCDLKVKPTKKVSNAEMNNILGEEIEKYKNRSIKDHEFFFDYKKKRN

SEQ ID NO: 147601 - protein, 119 aa, Unknown
  Bacterial polypetide isolated from the Sargasso Sea
MPQKNKPFVSIIMGSQSDYLTMKYTEDTLKSLKIKFETKIVSAHRTPKRLFEFATNAERNNISVIIAGAGGSAHLPGMVAAITTIPVIGVPIKSKKLNGLDSLLSIVQMPKGIPVGSVA

SEQ ID NO: 147602 - protein, 289 aa, Unknown
  Bacterial polypetide isolated from the Sargasso Sea
QHGLGIAAKKLSIKTVVFSDDTDAPAQNFCNQFFTGSYDNKDQISEFINQVDVVTYEFENIPFETLSEINKLKPVLPKPSINRLIQHRLAEKDFVNKLNIRTTRYVSIEKKSDIDALEDFLPGILKTTTLGYDGKGQYPINSSDELNSLNIDFSKGFILEKLVKLKKEISIIITRFSNNKYEIYEPIENTHEDQILKYSKIPAEINEKIFNQSKDWATLIAEELKYIGTLCVEFFIDRNENLYVNEIAPRVHNSGHLTINAFNISQFENHVRAVCGFEQIPIKKISNAK

SEQ ID NO: 147603 - protein, 143 aa, Unknown
  Bacterial polypetide isolated from the Sargasso Sea
MKKSKISIIMGSKSDWPTMKHASEMLDKLNIKHEVKVVSAHRTPDLLYSFAESARKKGVEIIIAGAGGAAHLAGMTASKTSIPVLGVPIESKTMKGMDSLLSINQMPAGIPVGTLAIGKAGAINAALLAASILSISDPQVEKN

SEQ ID NO: 147604 - protein, 159 aa, Unknown
  Bacterial polypetide isolated from the Sargasso Sea
MKKVGIIMGSKSDLPIMQDAIDILKEFDIESEVNIVSAHRTPNKMFTYASKAKDNGINVIIAGAGGAAHLPGMVASITTLPVIGVPVKSRNSIDGWDSVLSILQMPNGVPVATVALDGAKNAGILAAQIIGLNDNNVAKKLIDYKSKLEQKVFDSEKDL

SEQ ID NO: 147605 - protein, 140 aa, Unknown
  Bacterial polypetide isolated from the Sargasso Sea
MGSKSDYNTMKNCEKVLKLLKVNFEIKIVSAHRTPERMFKFAKAAEENNISVIIAGAGGSAHLPGMIASLTTIPVIGVPVESRKLKGLDSLLSIVQMPRGVPVGSVAIGEDGAINAGLYAASIIALSNNEIKKNLKNYRN

SEQ ID NO: 147606 - protein, 163 aa, Unknown
  Bacterial polypetide isolated from the Sargasso Sea
MQALVAVVMGSKSDWPTMEAAAEIMDKLQVPYHVEVVSAHRTPDKLMEFAAGAADRGFKIIIGGAGGAAHLPGMIASKTRLPVLGVPVQSKALSGMDSLLSIVQMPKGIAVGTLAIGTAGAFNAGLLACQILANNDADLAARLEAFREEQTRAVLDNPDPREA

SEQ ID NO: 147607 - protein, 164 aa, Unknown
  Bacterial polypetide isolated from the Sargasso Sea
MKNKKKIGIIMGSKSDLPIMKEAIEILKLFKIETETDIVSAHRTPSKLMDYGKKAHKRGLKVIIAGAGGAAHLPGMIASLSPLPVIGVPIKSRNSIDGWDSVLSILQMPGGVPVATVALNGAKNAGILAAQIIGVDSSEIQEKIIEYKNELSKNVIESSKKISG

SEQ ID NO: 147608 - protein, 345 aa, Unknown
  Bacterial polypetide isolated from the Sargasso Sea
MLTHAGEPLAIDVRAVDIMTPTDEILPLAPQDIITAEREQWPESALSLQLSSHPHFVNGPVFSRLADRYCQKSLLDQLQVPTAPWTLVDDKTNVENLYQAFGPRVLMKRRTGGYDGKGQHWLKQAEAGDIPQDWRNLAIAEQAINFDEEVSLVGVRTREGQCVFYPLTLNLHQDGILMASISPLTRLNHLQAQAEGMLSAIMHELEYVGVMAMECFRVGDKLLVNELAPRVHNSGHWTQAGTHMDQFQLHLRALCGIAIPQPQVNFQCVMVNLIGIDNDPRWLSLPNAELYWYNKEVRPGRKVGHLNLSVPNTSVLTDSIGALQTWMPSQYQAPLAWILAEFAKA

SEQ ID NO: 147609 - protein, 164 aa, Unknown
  Bacterial polypetide isolated from the Sargasso Sea
MKNKKYSHKVSIVMGSNSDYSTMKFCEKILKFLKINYETKIVSAHRTPERMFKYAKSAENNNISVIIAGAGGSAHLPGMIASLTRIPVIGVPIESKKLKGLDSLLSIAQMPKGIPVGTVAIGIDGAINAALYAASIISTFDDTVKNNLNKWRSKQSKSVKKKPK

SEQ ID NO: 147610 - protein, 170 aa, Unknown
  Bacterial polypetide isolated from the Sargasso Sea
MAAKKPTVAIVMGSKTDWTTLEHTVKTLKEFGVESTVKVMSAHRTPHEATEFAENAAKNGYKVIIGAAGGAAHLCGVLAGHTTLPVIGIPVTGWALDGLDSLLSTVQMPKGVPVATVAIGKAGAINAGILAVQIMGTADATLRRKMKSYKKKMAADVLASDAELQSELNS

SEQ ID NO: 147611 - protein, 163 aa, Unknown
  Bacterial polypetide isolated from the Sargasso Sea
MSKVAIIMGSKSDFNIMKEAIDVLESFGVETEYDIVSAHRTPKKMIEYASNAEKNGIKVIIAGAGGAAHLPGMVASITSLPVIGVPIKSRNKIDGWDSILSILQMPGGVPVATVALNGSKNAGILAAQIIGSFDPIISEKVKSYKKDLENSVIESSKNLKRKS

SEQ ID NO: 147612 - protein, 166 aa, Unknown
  Bacterial polypetide isolated from the Sargasso Sea
MALKSKEKKLISIVMGSQSDWSTMKNAAVFLEELNIPFEKKVVSAHRTPERLYNYAKKAQKRGIKVIIAGAGGAAHLPGMIASLTSLPVLGVPIESKALKGIDSLLSIAQMPAGVPVGTLAIGDPGAKNSAILALSIISVSNKSYLNKLEKWKKNLTDNVPLSPNE

SEQ ID NO: 147613 - protein, 162 aa, Unknown
  Bacterial polypetide isolated from the Sargasso Sea
MKISIPKISIVMGSQSDWSTLRHTGKILKELKIVHEKKIVSAHRTPKRLYEYAEQAYDRGIKIIIAGAGGSAHLPGMIAAITHIPVIGVPIESKTLKGLDSLLSIAQMPFGIPVGTVAIGENGAKNAALYAASIISNYDPNIERSLVKWRLAQTKKVKKTPR

SEQ ID NO: 147614 - protein, 161 aa, Unknown
  Bacterial polypetide isolated from the Sargasso Sea
MKVGIIMGSKSDWPTMKNAADMLDRFQIAYETTVVSAHRTPQLLADYATNAASRGLKVIIAGAGGAAHLPGMAAAFTSLPVLGVPVQSKALKGLDSLLSIVQMPKGVAVGTLAIGDAGAANAGLLAAQILATSDAELMSKIDAFRKEQTDSVLAHPNPAEE

SEQ ID NO: 147615 - protein, 126 aa, Unknown
  Bacterial polypetide isolated from the Sargasso Sea
MFDKSKELAKYIAEELDYIGTMCVEYFIDKNENLFVNEIAPRVHNSGHLTINAYNVSQFENHIRAVCGLEKVETKKLYNAKMINLIGEDILVYRNKIFKDNEFFFDYQKNAVKEKRKMGHLTIIKK

SEQ ID NO: 147616 - protein, 159 aa, Unknown; identical to SEQ ID NO: 147432
  Bacterial polypetide isolated from the Sargasso Sea

SEQ ID NO: 147617 - protein, 138 aa, Unknown
  Bacterial polypetide isolated from the Sargasso Sea
MSKKPLVSIIMGSQSDWPTMKNASKILKSFKITHEVKIISAHRTPKRMFEFAEKAEQRGIKIIIAGAGGAAHLPGMTASISNLPILGVPIESKKLKGLDSLLSIAQMPAGIPVGSLAVGEAGAINAALLAVSILGIEK

SEQ ID NO: 147618 - protein, 240 aa, Unknown
  Bacterial polypetide isolated from the Sargasso Sea
INKCNISTTRYVSIKEKSDLNANIKLIPGLLKTCRLGYDGKGQYKLNNPLDIENLKIDFSQEYILEKMINLKKEFSIILTRFGHSIHSVYEPIENEHENQILKYSKIPADIDDKIVIKAKDWASIIADDLDYVGTICVEYFIDKNDNLYVNEIAPRVHNSGHLTINSYNISQFENHIRAICGLGKQELKKLHDAKMINIIGEEIVSYRSKKYSDNEFFFDYGKKEIKANRKMGHLTIIQK

SEQ ID NO: 147619 - protein, 130 aa, Unknown
  Bacterial polypetide isolated from the Sargasso Sea
MSNTTTRPAVAVCMGSQSDWTTMQEAAQMLEMLDVPYEAKIISAHRTPDRLAAFARGAAEAGFGVIIAGAGGAAHLPGMLAAHTDLPVLGVPVESKSLKGMDSLLSIVQMPAGVPVGTLAIGIPGARNAG

SEQ ID NO: 147620 - protein, 348 aa, Unknown
  Bacterial polypetide isolated from the Sargasso Sea
MSIKNLGIIGGGQLGSLLAVAAKKLNINTIIYCDDVDAPAQNFCNKFIHGKYDDKIKMQEFINEIDVITYEFENIPYETLNEMNKVKPVLPKPSVNRLIQHRIAEKDFVNKLNIRTTRYASIESKSDMEPLEDFLPGILKTTTMGYDGKGQYPIKKIEDINNLNIDFSKGYILEKLVKLKKEISVIITRFGNNSYEIYEPIENTHEDQILKHSIIPAQINKKIFDESKDWSIRIAEELKYIGTLCVEFFIDRNENLYVNEIAPRVHNSGHLTINAFNISQFENHVRAVCSLEKIPLKKISNAKMINLIGNQIKPYRENFKLKENEFFFDYQKKEIKDKRKMGHITTLI

SEQ ID NO: 147621 - protein, 261 aa, Unknown
  Bacterial polypetide isolated from the Sargasso Sea
MTISQDRKKEKQFFTKNKINHAGIGLLNNKISLKKLKTSIQYPVILKTTRFGYDGKGQALVKNIKDLERQWKENGYQDCIIERKINLKKEVSVICARDIKRNSYFYPTFANVHKNHILFETKSPSSIDAEIEGKLLKISKKIITKLNYIGLLTIEFFIDKENTIYVNEIAPRVHNSGHITLDNANISQFELHIKAITGKKILKPKILKKGLMRNLIGNEIKRVKNIKSMGKYKDFKKNIKYDYGKKIIKGGRKMGHINFIS

SEQ ID NO: 147622 - protein, 166 aa, Unknown
  Bacterial polypetide isolated from the Sargasso Sea
MSNETTQVAIIMGSDSDLPVVEAIFPILDSFGVKYTKNVMSAHRTPHAVMDLIKNSENNGCKVFIAAAGMAAHLAGAVAAHSTKPVIGIPIESGGMGGIDSLLSTAMMPPGVPVATVAVGKSGAKNSAILAVQILATGDENLAEKLVAYKQNMRDEVLEKDKKLNS

SEQ ID NO: 147623 - protein, 166 aa, Unknown
  Bacterial polypetide isolated from the Sargasso Sea
MTNETTQVAIIMGSDSDLPIVEAAFSILDSFGIKFTKNVMSAHRTPHDVMELIKNSEQNGCKVFIAAAGMAAHLAGAVAAHSTKPVIGIPIESGGMGGIDSLLSTAMMPPGVPVATVAVGKSGAKNSAILAVQILATCDDDLARKLKEYKENMRAEVLEKDKKLNS

SEQ ID NO: 147624 - protein, 190 aa, Unknown
  Bacterial polypetide isolated from the Sargasso Sea
MVTKKPLVGIIMGSSSDSRIMHGAAEILDSFSIPHEDQIISAHRTPERLNEYAKHAEKSKFKVIIAGAGGAAHLPGMIASHTTIPVIGVPIMVYNDKQMKKTDKNKYSAFGGLDSLLSISEMPTGSPVVAVGVNKASNAGIYALKILGNSYPEIKTKLKKHKFDQYTSVLKESEELKKLGLTKFVKKKFR

SEQ ID NO: 147625 - protein, 348 aa, Unknown
  Bacterial polypetide isolated from the Sargasso Sea
MSNITLGIIGGGQLGSMLAIAAKKLGIKIIIFCDDLEAPAQNFCDEFIGAKYDDKEKINEFVNKVDTVTYEFENIPFETLNDINKLKPVLPKPSVNRLIQHRLAEKDFVNKLNIRTTRYVSVENQSDIDVLEDFLPGIIKTTTLGYDGKGQYPISSAEELKNLKLDLSRGYILEKLVKLKKEISIIITRFSNNKYEIYEPIENTHEDQILKHSKIPADINEKIFNQSKDWAILIAEELKYVGTLCVEFFIDRNDNLYVNEIAPRVHNSGHLTINAFNVSQFENHIRAVCGLEQIALKKLSNAKMINLLGDQISQYRNSPKLKDNEFFYDYLKKEIKDKRKMGHITILE

SEQ ID NO: 147626 - protein, 348 aa, Unknown
  Bacterial polypetide isolated from the Sargasso Sea
MSEITLGIIGGGQLGSMLAIAAKKLNVKTVIFCDDIDAPAQNFCNQFVNGNYDNKEKISEFINQVDFVTYEFENIPYETLNEINKFKTVLPKPSVNRLIQHRLAEKDFVNKLNIRTTRYVSIEKKSDIDALEDFLPGILKTTTLGYDGKGQYPIKSGNDLNSLNIDFSKGYILEKLVKLKKEISIIITRFSNNKYEIYEPIENTHEDQILKYSKIPAEINEKIFNQSKDWAMLIAEELKYVGTLCVEFFIDRNDNLYVNEIAPRVHNSGHLTINAFNVSQFENHVRAVCGLEQIPLKKISNAKMMNLLGNQITHYRNMQKFNDNEFFFDYLKKDIKEKRKMGHITTLV

SEQ ID NO: 147627 - protein, 349 aa, Unknown
  Bacterial polypetide isolated from the Sargasso Sea
MSKINLGILGGGQLGSMLATAAKKLNVQTFIYCDDENAPAQKFADDFILGDYNDESKISEFVNKVNVVTYEFENIPFNTLEFINKHKQVLPKPNINQVIQNRFSEKNFINNLGIKTTDYVIIKNLKDLNNNLNLLPGILKTTTLGYDGKGQFRLNNKNDIDKQKIDFSSQYILERIINLKKEISVIITRFKNQNYEIYEPIENVHKDQILKFSEIPAKISSNILNLSTEWAKKISEELDYVGTLCVEYFIDENDNLYVNEIAPRVHNSGHLTINSHNVSQFENHIRAVCALDKLKTKKIYNAKMINLIGEDITEYRNKKVKENEFFFDYQKKEIKPKRKMGHFTTIIKI

SEQ ID NO: 147628 - protein, 347 aa, Unknown
  Bacterial polypetide isolated from the Sargasso Sea
MSNPTLGIIGGGQLGSLLSVAAQKLNIKTVILSDDINAPAKNFTSNFICGNYEEEKIINDFISKVDLVTFEFENIPYKVLKSINKNKTVLPKPEINQLIQNRYTEKDFLNKNDIRTTRYALIKNEDEIKINQNLIPGILKTCTLGYDGKGQFTINSIEEINQNIDFNKDYILEKKINLKKEISVIITRFGHQKYELYQPIENVHEDQILKHSKIPADISDSIKDKSLDWATKIVEELDYIGTLCVEYFIDKNNNLYVNEIAPRVHNSGHLTINTHNISQFENHVRAVCGLEKIETKKIYNGRMLNLIGNDISIYRGKTFKDNEFFYDYLKTEIKDKRKMGHLTIIEK

SEQ ID NO: 147629 - protein, 415 aa, Unknown
  Bacterial polypetide isolated from the Sargasso Sea
MPLLHVLQRIRPRPTTKMNPDNTPVSPILPGAWLGMVGGGQLGRMFCFAAQAMGYRVAVLDPDESSPAGTVADRHIRASYDDEASLTELARLCAAVSTEFENVPASSLDFLAKTTFVSPAGRCVAVAQDRIAEKRFIASSGVTVAPHVVIESSDALAALDDAKLEAVLPGILKTARMGYDGKGQIRVRNAEEVREAHASLAGVPCVLEKRLPLKFEVSALIARAASGASVVYPLAQNTHRDGVLSHTIVPAPDANPTLVEQAQQAALQIADKLGYVGVLCVEFFILEDGSLVANEMAPRPHNSGHYTVDACATSQFEQQVRAMTGMPLGDTRQHSPAVMLNILGDVWFPDGPKGASVTPPWHEVAAMPAARLHLYGKEEARCGRKMGHVNFTSATLEEARTAARDCARLLHIVTS

SEQ ID NO: 147630 - protein, 164 aa, Unknown
  Bacterial polypetide isolated from the Sargasso Sea
MRNNKNISKVSIIMGSQSDYSTMKFCEKVLKILKISFEKKIISAHRTPKRMFEYARNAEKNNISVIIAGAGGSAHLPGMVAAITRIPVIGVPIESKRLKGLDSLLSIAQMPKGIPVGTVAIGKDGAINAGLFAASIISTFDKKIKKNLENWRSKQTKSVKKKPK

SEQ ID NO: 147631 - protein, 156 aa, Unknown
  Bacterial polypetide isolated from the Sargasso Sea
MNNKVAIIMGSQSDHSIMKECAKILKTLKIKYQISIVSAHRTPKRMFEFAESASKKGFGVIVAGAGGSAHLPGMVASLSSLPVIGVPIETKKLKGLDSLLSIVQMPRGCPVATMAINGSMNAGLLAASIIGNFDEKIKSNLEKWKRLQTKSIKKKP

SEQ ID NO: 147632 - protein, 351 aa, Unknown
  Bacterial polypetide isolated from the Sargasso Sea
MSPNKTIGILGGGQLAKMLATAAADLGFNVNIYCPDTDCPAAQVANKVVFGNYDDNENLVAFVKNVDVLTYEFENIDTKALEELDLFVNMRPSVKALKISQDRLTEKSYLNSLGIKTTQFYRIDEVYEIEKLFTRLKKPILIKTRRLGYDGKGQILVKTLDDINNHFLGKKLFPSIAEEVISFDRELSVIIVRDKEGNIKTFEPGENVHRSGILVTTTLPSSTSEVLKNDAVTIARKIVANLDYVGVMGVEFFLKDSELYVNEIAPRVHNSGHWTMDGSYSSQFQQHIRAIMDLPLLSTERHSDIIMYNLIGKVTSDLVKNELAKVYLYGKKESRPERKMGHINLIKKKGS

SEQ ID NO: 147633 - protein, 348 aa, Unknown
  Bacterial polypetide isolated from the Sargasso Sea
MSEIRLGILGGGQLGSMLSVAAKKLNIRTIIYSDDQDAPAQNFCDEFIFGDYKDKNKINDFAGKVSIVTYEFENIPYETLNEINKFKNVNPKPSINRLIQHRLAEKDFVNKLNIRTTRYVSIEKKSDLESLGDFLPGILKTTTMGYDGKGQYPIKSLNDLNGLNIDFSKEYILEKLVKLKKEISVIITRFGNNRYEIYEAIENIHENQILKKSKIPADISQKLIEQSREWSKQISEELKYIGTLCVEFFVDRNDNLYVNEIAPRVHNSGHLTINAFNVSQFENHIRAVCSLDQIPLKKLHNAEMINLIGNQITPYRQNMNLKENEFFFDYLKKEIKDKRKMGHLTKTF

SEQ ID NO: 147634 - protein, 302 aa, Unknown
  Bacterial polypetide isolated from the Sargasso Sea
MSEINLGIIGGGQLGSMLSSAAKKLNIKTTIYSDDLDAPAQNFCNEFIFGKYNDKIKILEFASKVDVVTYEFENIPYETLNEMNKLKSVLPKPSVNRLIQHRLAEKDFINKLNIRTTRYASIEKKSDIETLVDFLPGILKTTTMGYDGKGQYPIRKIEDLYSLDIDFSKGYILEKLVKLKKEISVIVTRFSNNNYEIYEPIENTHQDQILKHSIIPAEISKKILDQSKDWAIRITEELKYVGTLCVEFFIDRNENLYVNEIAPRVHNSGHLTINAYNVSQFENHIRAVCSLEKIPLKKISNA

SEQ ID NO: 147635 - protein, 152 aa, Unknown
  Bacterial polypetide isolated from the Sargasso Sea
IYEPIENIHKDQILKYSKIPADIKPDIFKKAQDNAELIANELDYIGTMCVEYFIDQEDNLLVNEIAPRVHNSGHLTINAFNISQFENHIRAVCGLKKENVHKIANAEMENILGSEIQDYRKRSFKTDEYFFDYGKKIIKEKRKMGHLTILKK

SEQ ID NO: 147636 - protein, 118 aa, Unknown
  Bacterial polypetide isolated from the Sargasso Sea
MKKNKTHKVSIVMGSQSDYKTMKFAEKTLKKIGISFETKIISAHRTPKRMYDYAYRAEKNNITVIIAGAGGSAHLPGMISSLTYLPVLGVPIESKKLKGLDSLLSISQMPKGIPVELC

SEQ ID NO: 147637 - protein, 289 aa, Unknown
  Bacterial polypetide isolated from the Sargasso Sea
MSDITLGIIGSGQLGSLLCKAAKKLNIKTVVISDDEKGPAQNYTDQFIFAKYENKEKVKEFINKADIVTYEFENIPIEILKSINKEKKVLPKPDINQTVQNRKLEKTFVNNLGIRTTEWAFIKSAQDVKKNEKLLPGILKTNTLGYDGHGQFVLNSLDDIKKDWCFTADYILEKKVNLSREISVVSTRFGNGEIYTYEPIENIHKDQILKYSKIPADISDEIFKKAQSNAKLIAEKLDYIGTMCVEYFIDQKNTLLVNEIAPRVHNSGHLTINAFNISQFENHVRAVCG

SEQ ID NO: 147638 - protein, 296 aa, Unknown
  Bacterial polypetide isolated from the Sargasso Sea
MSNTSIGIIGGGQLGSMLCSAAKKLNIKSVVISDDKDAPAQSFADEFIFSKYDNDVKIQEFCNKVEFITFEFENIHYDVLKKIDEIKKVNPKPQINKIVQNRINEKDFLNKNNIRTTSYISIKNEGELKSAQDFIPGLLKTCTLGYDGKGQYKIESEKELDNLKINFDNDYIFEKLVKLKKEISVIITRFGPEKYEVYDPIENIHEDQILKYSKVPAEIDQNLYNQSIKWAKYISEELNYIGTMCVEYFIDKNENLYVNEIAPRVHNSGHLTINAYNISQFENHIRAVCNLEKIET

SEQ ID NO: 147639 - protein, 163 aa, Unknown
  Bacterial polypetide isolated from the Sargasso Sea
MPANNIHKVSIVMGSQSDFKTMKLCQNVLKILKVKFEIKIVSAHRTPDRMFKYAKMAEKNKVSVIIAGAGGSAHLPGMIAALTPIPVIGVPIESKKLKGLDSLLSIVQMPKGIPVGTVAIGDDGAINAALLAASIIALSDKKVKKNLSTWRTKQSASVKKKPR

SEQ ID NO: 147640 - protein, 169 aa, Unknown
  Bacterial polypetide isolated from the Sargasso Sea
KKEISIVICRFGNQKYEIYEPIENVHEDQILKHSKIPAEVSEKIKVKSKEWAKKIVEELDYIGTLCVEFFIDKNENLYVNEIAPRVHNSGHLTINSHNVSQFENHIRAICGLKKIDTKKIYNAQMINLIGDDITIYRNKTFKENEFFYDYLKKQVKAKRKMGHLTIIEK

SEQ ID NO: 147641 - protein, 263 aa, Unknown
  Bacterial polypetide isolated from the Sargasso Sea
VKKVDPNPEVNKIVQHRYSEKNFLTKKNIKTTEFERIVNESDIKKNKNLLPGILKTSTLGYDGKGQYKLNNLEDLDNHKITFDREFVLEKLVNLEKEISVVITRFSKNNYEIYEPIENLHEEQILKYSTIPAQINLSHFKKSQEWAKLISEELQYVGTLCVEFFIDKDQNLYVNEIAPRVHNSGHLTINAYNISQFENHIRAVCGLEKIKLKKICNAKMINIIGDEINNYRNKKYTENEFFFDYLKKQIKPKRKMGHLTIIKN

SEQ ID NO: 147642 - protein, 347 aa, Unknown
  Bacterial polypetide isolated from the Sargasso Sea
MKNPILGIIGGGQLGSLLSVAANKIGIKTVILSDDENAPAKNFTEKFIYGKYDNKSITQEFIDSVDLVTYEFENIPFHILQSINNEKTVLPKPEINNLIQNRLTEKNFLNDINIQTTQYVSIKHIDELKENENFLPGLLKTTTLGYDGKGQYKLNSKKDISNEIDFSKEYILEKFINLKKEISVIITRFGNQKYEIYEPIENVHEDQILKHSKIPADVSKAIIIKSTEWSKKIVEDLDYIGTLCVEFFIDKNDNLYANEIAPRVHNSGHLTINSHNISQFENHVRAVCGLEKIKTKKIYNAKMINLIGDDISIYRDKKFSENEFFFDYLKKDIKNKRKMGHITIIEK

SEQ ID NO: 147643 - protein, 348 aa, Unknown
  Bacterial polypetide isolated from the Sargasso Sea
MSKPTIGIIGGGQLGSMLSTAAKNLNIKTVIISDDEQAPAQFFADEFIFCKYDDELKIVEFSNKVDFVTFEFENIPYDTLCKIDNIKKIYPKPYINKIIQNRLSEKDFLNKNNIKTTSYISVKNESELKSSQDFIPGILKTCTLGYDGRGQYKINNEEELDNLKVNFENHYILEKLVKLKKEISVIITRFGKQKYEVYDPIENVHEDQILKYSKIPAEVSEELLDKSKEWAKYIAEELDYIGTMCVEYFIDKNDNLFVNEIAPRVHNSGHLTINAYNVSQFENHIRAVCGLEKVETKKLYNAKMINLIGEDILVYRNKTFKDNEFFFDYKKNNIKKKRKMGHLTIIEK

SEQ ID NO: 147644 - protein, 163 aa, Unknown
  Bacterial polypetide isolated from the Sargasso Sea
MQSKKIHKVSIVMGSQSDFKTMKLCQKVFKILKVKFETKIISAHRTPKRMFDYAKKAEKNKISVIIAGAGGSAHLPGMIASLTTIPVIGVPIESKKLKGLDSLLSIAQMPKGIPVGTVAIGEDGAINAALLATSIISLSDEKLKKNLNKWRIKQSSSVKKKPK

SEQ ID NO: 147645 - protein, 166 aa, Unknown
  Bacterial polypetide isolated from the Sargasso Sea
MTNETTQVAIIMGSDSDLSIVEAAFPILDSFGVSFTKNVMSAHRTPHDVMELIKNSEQNGCKVFIAAAGMAAHLAGAVAAHSTKPVIGIPIESGGMGGIDSLLSTAMMPPGVPVATVAVGKSGAKNSAILAVQILATSDDDLATKLKDFKENMRAEVLEKDKKLNS

SEQ ID NO: 147646 - protein, 343 aa, Unknown
  Bacterial polypetide isolated from the Sargasso Sea
MIIGILGGGQLGMMLCQVAKKLNIQTFIYTDSNDSPAIKYANNYAIKQYDDFGEIDTFIDGCDFITYEFENIPFETLSYIENKITVSPSSQINKIIQDRLTEKNYVNEINIPTVPYIEIKDIEDLKSVNTDFFPAILKTRKLGYDGKGQYIVNSSKEITEIPKNDYILEKKINLQQEISIIAVRYQDGTIFTYQPIENVHKDQILFKSYSPANSNQSIIEEAKKHAVNFAKKISYVGTFCLEFFITDKNELLLNEIAPRVHNSGHLTIESYNVSQFESHLRSVCDLEKIKPSLRYKSEMTNILGEDIYNYRDKEFKKDEYFHDYYKKESKIGRKMGHFTKILA

SEQ ID NO: 147647 - protein, 162 aa, Unknown
  Bacterial polypetide isolated from the Sargasso Sea
MKLSNPKISIVMGSQSDWSTLKHTSIVLKELKISHEKKIVSAHRTPKRLYEYAEQAYDKGIKIIIAGAGGSAHLPGMIAAITHIPVIGVPIESKTLKGLDSLLSIAQMPFGVPVGTVAIGENGAKNAALYAASIISNYDSKVENQLIKWRLAQTKKVKKTPK

SEQ ID NO: 147648 - protein, 163 aa, Unknown
  Bacterial polypetide isolated from the Sargasso Sea
MKTKKLKKVSIIMGSQSDYKTMKYCSKILKILKINYESKIVSAHRTPKRMYHFATSAEKNKIQVIIAGAGGSAHLPGMVAALTSIPVIGVPIESKKLKGLDSLLSIAQMPKGIPVGTVAIGKDGAINAALLAASIIGLSDKKIKFKLDLWRNKQTRSVKKKPL

SEQ ID NO: 147649 - protein, 129 aa, Unknown
  Bacterial polypetide isolated from the Sargasso Sea
MFLTETDELIINEVAPRPHNSGHLTIESSYTSQFEQHVRSILNLPLGRSDNKIPAVMVNLVGKKEEFGPVVYKNIDQILVMEGVTPHIYGKKQTHPNRKMGHVTIVNKDLNQALKIAKEVKSIIEVISE

SEQ ID NO: 147650 - protein, 162 aa, Unknown
  Bacterial polypetide isolated from the Sargasso Sea
MAPTVGVVMGSKSDWGIMQHAVSTLEELGIKTEARVMSAHRTPDVAIEFSKTAEERGLEVIIAAAGGAAHLAGVMAAKTTIPVLGVPIQAWSLDGLDSLLSTVQMPRGIPVGTLAIGKAGAVNAALLAGQILGLKYPEVADAVKADRARRRDAVLADSDPRV

SEQ ID NO: 147651 - protein, 151 aa, Unknown
  Bacterial polypetide isolated from the Sargasso Sea
YEPIENEHEDQILKYSKIPAEIDRDIFEKSKEWSKKISEELDYIGTLCVEYFIDKNNTLYVNEIAPRVHNSGHLTINSHNISQFENHIRAVCSLEKIETKKLFNAKMINLIGEDILNYRNKNFNENEFFFDYQKKEVKPKRKMGHFTTLIK

SEQ ID NO: 147652 - protein, 86 aa, Unknown
  Bacterial polypetide isolated from the Sargasso Sea
MTAKSKQKKLISIVMGSQSDWSTMKNAANFLEEQNIPFEKKVVSAHRTPERLYKYARKAQSRGIKVIIAGAGGAAHLPGMIASLTS

SEQ ID NO: 147653 - protein, 132 aa, Unknown
  Bacterial polypetide isolated from the Sargasso Sea
MKSLPLVSIIMGSQSDWPTMKHASKILTTFKIKHEVKIISAHRTPKRLFTYAEEADKRGIKVIIAGAGGAAHLPGMTASISNLPVLGVPVESKKLKGLDSLLSIAQMPTGVPVGSLAVGETGAKNAALLAIS

SEQ ID NO: 147654 - protein, 117 aa, Unknown
  Bacterial polypetide isolated from the Sargasso Sea
MKLKKHRKIAIVMGSQSDFSTMKDCAKILKSLKISFDLKIVSAHRTPKRLYDFAKKSEKSYSVIIAGAGGSAHLPGMIASLTTVPVIGVPIESKKLKGLDSLLSIVQMPKGIPVGTV

SEQ ID NO: 147655 - protein, 88 aa, Unknown
  Bacterial polypetide isolated from the Sargasso Sea
MTIPVVAILMGSQSDWPTMKDATIALKEFNIPYEVKIVSAHRTPNRLFEFGNEAKIRGLKVIIAGAGGAAHLPGMIASKTVIPGLGCQ

SEQ ID NO: 147656 - protein, 123 aa, Unknown
  Bacterial polypetide isolated from the Sargasso Sea
MGCLLVNEIAPRPHNSGHFTMDSCETSQFQQHLLAVSGWPLGPTHIMKPALMLNLIGDQQDKLLQNLKFLPEGAKLHFYGKKEVRPGRKMGHLNLSMENPSELLETLIKLQVWDQDSLERMLN

SEQ ID NO: 147657 - protein, 158 aa, Unknown
  Bacterial polypetide isolated from the Sargasso Sea
MTNSVAIVMGSKSDMALAEATKEVLDGYEISSVIKVLSAHRTPEALKEFIETTIIDGTKVFVGIAGLAAHLSGNIAAHTTLPVIGIPGDGGPLNGLDALFSTVQMPRGVPVATVAIGKAGAVNAGHLAAQMLATGDQDLAKKIADQREEQKRILLEDQ

SEQ ID NO: 147658 - protein, 153 aa, Unknown
  Bacterial polypetide isolated from the Sargasso Sea
MGSQSDWPCMKSASIILKELKIQHEVKIISAHRTPDRLFKYAGNLEKNGIMVSIAGAGGAAHLPGMVASKTIIPVLGVPVKSKNLNGIDSLLSIVQMPPGVPVGTLAIGNAGAKNAALLAASIIATSDDEIAKNLKTWRKNQTQSVKEYPSDE

SEQ ID NO: 147659 - protein, 107 aa, Unknown
  Bacterial polypetide isolated from the Sargasso Sea
MKKNSKLKVSIIMGSQSDYKVMKLAEKTLKKIGVSIEKKIISAHRTPQRMYEYAAKVEQNNIGVIIAGAGGSAHLPGMISALTHVPVLGVPVESKKLKGLDSLYQCT

SEQ ID NO: 147660 - protein, 166 aa, Unknown
  Bacterial polypetide isolated from the Sargasso Sea
MTNQTIQVAIIMGSDSDLPIVEAIFPILESFGVKFTKNVMSAHRTPHDVMELIKNSEENGCKVFIAAAGMAAHLAGAVAAHSTRPVIGIPIESGGMGGIDSLLSTAMMPPGVPVATVAVGKSGAKNSAILAVQILATSDDDLAKKLIEYKQNMRSEVLEKDKKLNS

SEQ ID NO: 147661 - protein, 319 aa, Unknown
  Bacterial polypetide isolated from the Sargasso Sea
VIFCDDPDAPGQNFSDEFIYGRYDNDNSIDQFISSVDFVTFEFENIPYETLNKINNVKPVLPHPSINKIVQNRLTEKDFINKLNIRTTQYTSINNEKDIFSNENLIPGLLKTCTLGYDGKGQHKINSIDDIENENIDFNKKYILEKLVKFKKEISVIITRFKNEEFEIYEPIENIHEDQILKYSKIPANINEKVSEESKKWARLIAEELKYIGTLCVEFFIDKNDNLYVNEIAPRVHNSGHLTINAYNISQFENHIRAVCNLEQIKLNKISNAEMVNLIGDQITIYRKKKYSPNEFFFDYLKKETKDKRKMGHLTTLIK

SEQ ID NO: 147662 - protein, 187 aa, Unknown
  Bacterial polypetide isolated from the Sargasso Sea
KKNWCFTADYILEKKVNLKKEISVVITRYLNGEIYVYEPIENIHKDQILNHSKIPADINKEIFIKAQSNAKLISEKLGYVGTMCVEYFIDQNDNLLVNEIAPRVHNSGHLTINAFSISQFSGHVAAVCNLGVKKVEKISNAEMFNVLGKDIETYRSKTFSKNEFFYDYGKKSIKDKRKMGHLTVLKK

SEQ ID NO: 147663 - protein, 332 aa, Unknown
  Bacterial polypetide isolated from the Sargasso Sea
MSLKVSTVGIIGGGQLGMFLAHSCIKLGLRVFVYSDSKKVPAEKYADKMFYGSFEDIESLKIFSSEVDLITYEFENVSTKALKKLKRKKIYPPISALTISQDRKKEKQFFSKNKINHAGIGLLNKKQNLKKLESSIQYPVILKTTRFGYDGKGQALIQNTKNLKRQWKENNYQDCIIERKINLKEEVSVICARDIKQNFYFYPTFANVHKDHILFETTSPSNIDAKIEGELLKISRRIITKLNYIGLLTIEFFLDKENNIFVNEIAPRVHNSGHITLDNANISQFELHIRAITGKKILKPKILKKGLMRNLIGNEIKKVSRIKYMRRYKGFK

SEQ ID NO: 147664 - protein, 187 aa, Unknown
  Bacterial polypetide isolated from the Sargasso Sea
LFNIDFSKGYILEKLVKLKKEISVIVTRYGNNNFEIYDPIENTHQDQILKFSVIPAEISKKILDQSKDWAIMIAEELKYIGTLCVEFFIDRNENLYVNEIAPRVHNSGHLTINAYNVSQFENHVRAVCSLEKVPLKKLSNAKMVNLIGNQIEPYRKNLELGKNEFFFDYLKKEVKEKRKMGHITTLL

SEQ ID NO: 147665 - protein, 150 aa, Unknown
  Bacterial polypetide isolated from the Sargasso Sea
MGSKSDYATMKNCEKILRLLKVKFETKIVSAHRTPERMFKFAKAAEDNNISVIIAGAGGSAHLPGMIASLTTIPVIGVPVESRKLKGLDSLLSIVQMPKGIPVGSVAIGEDGAMNAGLYAASIIALTNKEIKKNLKNYRTKQSKAVKQKP

SEQ ID NO: 147666 - protein, 166 aa, Unknown
  Bacterial polypetide isolated from the Sargasso Sea
MSNSSLQVAIIMGSDSDLPVVEASFSILESFGVKYTKNVMSAHRTPHDVMDLIKRSEENGCKVFIAAAGMAAHLAGAVAAHSTKPVIGIPIESGGMGGIDSLLSTAMMPPGVPVATVAVGKSGAKNSAILAVQILATSDDELAQKLKDYKSNMREEVLEKDKKLNS

SEQ ID NO: 147667 - protein, 347 aa, Unknown
  Bacterial polypetide isolated from the Sargasso Sea
MSQPVLGIIGGGQLGSMLSEAAKKIDIKTVVLSDDPDAPAKNFANKFIYGNYNDTKIITEFVNNVDLVTYEFENIPFDILNEINKSKSVLPKPEINSLIQNRLTEKDFLNKNNIRTTNYALIKNKDEIKDNENLLPGLLKTTTLGYDGKGQYKLNSFIDINDNIDFTKEYILEKFINLKKEISIVICRFGNQKYEIYEPIENVHEDQILKHSKIPAEISETIKVKSKEWAKQIVEELDYIGTLCVEFFIDKNENLYVNEIAPRVHNSGHLTINSHNVSQFENHIRAVCGLKKIDTKKIYNAQMINLIGDDITIYRSKTFKENEFFYDYLKKQVKAKRKMGHLTIIEK

SEQ ID NO: 147668 - protein, 164 aa, Unknown
  Bacterial polypetide isolated from the Sargasso Sea
MKNKKYSHKVSIVMGSNSDYSTMKFCEKILKLLKINYETNIVSAHRTPERMFKYAKSAEKNNISVIIAGAGGSAHLPGMIASLTRIPVIGVPIESKKLKGLDSLLSIAQMPKGIPVGTVAIGTDGAINAALYAASIISTFDMGVKNNLNKWRSKQSKSVKKKPK

SEQ ID NO: 147669 - protein, 166 aa, Unknown
  Bacterial polypetide isolated from the Sargasso Sea
MTNETVQVAIIMGSDSDLPVVEASFSILDDFGVKYTKNVMSAHRTPHDVMELIKTSEENGCKVFIAAAGMAAHLAGAVAAHSTKPVIGIPIESGGMGGIDSLLSTAMMPPGVPVATVAVGKSGAKNSAILAVQILATSDEGLAQKLVEYKQNMRSEVLEKDKKLNS

SEQ ID NO: 147670 - protein, 161 aa, Unknown
  Bacterial polypetide isolated from the Sargasso Sea
MKNPSLVSIIMGSQSDWPTMKHASKILKLFNIKHEVKIISAHRTPKRMFEYAERAEQRGIEIIIAGAGGAAHLPGMTASISNIPVLGVPIESKKLKGLDSLLSIAQMPAGVPVGTLAVGEAGAKNAALLAVSILSSNNTKLKKKYASWRSKQTKSVKNIPK

SEQ ID NO: 147671 - protein, 80 aa, Unknown
  Bacterial polypetide isolated from the Sargasso Sea
MAKTQPLVSIVMGSQSDWDTMKYSVATLLDLGITHETKIVSAHRTPQRLNKYAASALKRKIRVIIAGAGGSAHLPGMVLR

SEQ ID NO: 147672 - protein, 137 aa, Unknown
  Bacterial polypetide isolated from the Sargasso Sea
MTNETTQVAIIMGSDSDLHIVEAIFPILDSFGVKFTKNVMSAHRTPHDVMDLIKKSEDDGCKVFIAAAGMAAHLAGAVAAHSTRPVIGIPIESGGMGGIDSLLSTAMMPPGVPVATVAVGKSGAKNSAILAVQILLQ

SEQ ID NO: 147673 - protein, 150 aa, Unknown
  Bacterial polypetide isolated from the Sargasso Sea
MGSKSDYATMKNCEKILRLLKVKFETKIVSAHRTPERMFKFAKAAEDNNISVIIAGAGGSAHLPGMIASLTTIPVIGVPVESRKLKGLDSLLSIVQMPKGIPVGSVAIGEDGAMNAGLYAASIIALTNKEIKKNLKNYRSKQSKAVKQKP

SEQ ID NO: 147674 - protein, 210 aa, Unknown
  Bacterial polypetide isolated from the Sargasso Sea
MLKTTTLGYDGKGQYKLNTVDDITKEIDFTKEYILEKLIHLKKEISVVITRYDQNSYEIYDPIENVHEEQILKYSTIPSDISDDIRIKSIEWAKQVVEKLDYIGTLCVEFFIDTDDNLYANEIAPRVHNSGHLTMNSHNISQFENHVRAVCGLEKIETKKLYNAKMINLIGDDITPYRNKTFKNNEFFYDYLKTKIKNKRKMGHITIIEK

SEQ ID NO: 147675 - protein, 275 aa, Unknown
  Bacterial polypetide isolated from the Sargasso Sea
ENIPVDFLNLIQKEKKVLPSPKINKIAQNRKLEKTFVNELGIDTTDWVYIKSAEDIKKNQHLLPGILKSNTLGYDGKGQFVLNSLDDIKQDWCFTNDYILEKKVDLKKEISVVIARYADGTMTNYEPIENVHQNQILFKSKIPADINDKIYKKAISNAKKISEKFNYVGVLTVEYFITEKDELLVNELAPRFHNSGHLTIDAFNQSQFSLHVSCVCNLGSKPIGKISNAEMYNILGSEILEYRKKTFKKNEFFYDYLKKEPRQGRKMGHLTILKD

SEQ ID NO: 147676 - protein, 85 aa, Unknown
  Bacterial polypetide isolated from the Sargasso Sea
MSNSSLQVAIIMGSDSDLPVVEASFSILESFGVKYTKNVMSAHRTPHDVMDLIKRSEENGCKVFIAAAGMAAHLAGAVAAHSTKP

SEQ ID NO: 147677 - protein, 190 aa, Unknown
  Bacterial polypetide isolated from the Sargasso Sea
SQVAACNWDGKVEFLPISENHHINNILHTSKVPATISNSQKKEIQDITKKIIKSLSYIGVICVEFFISLDDEIMVNEIAPRTHNSGHYSIEACDISQFLYQAQIAGNKSIKASNLNHKAIMLNLLGDLWRNGEPNFDFLNNYSNIFLHLYNKKNGVPGRKMGHLTFISDDDEELKILFKKVSDEISKGYI

SEQ ID NO: 147678 - protein, 347 aa, Unknown
  Bacterial polypetide isolated from the Sargasso Sea
MKDPILGIIGGGQLGSLLSVAAKSIGIKTVILSDDKDAPAKNFTEKFIFGNYDNKSITQEFIDSVDLVTYEFENIPFSVLQSINNEKTVLPKPEINNLIQNRLTEKNFLNDINIQTTQYISIKHINELRENESFLPGLLKTTTLGYDGKGQYKLNSAQDISNEIDFSKEYILEKFINLKKEISVIITRFGNQKYEIYEPIENVHEDQILKHSKIPADISEELKIKSTEWSKKIVEDLDYIGTLCVEFFIDKNDNLYANEIAPRVHNSGHLTINSHNISQFENHVRAVCGLEKIKTKKKYNAKMINLIGDDILMYRNKKFSKNEFFFDYLKKEIKNKRKMGHLTIIEK

SEQ ID NO: 147679 - protein, 163 aa, Unknown
  Bacterial polypetide isolated from the Sargasso Sea
MSQVAIIMGSKSDFEIMSEAIEILKSFDINTEYDIVSAHRTPNKMVEYASNAEKKGIKVIIAGAGGAAHLPGMVASITSLPVIGVPIKSRNSIDGWDSILSILQMPGGVPVATVALNGSKNAGILAAQIIGSFDSKVADKVKAYKKDLEDKVIESSKDLKKNS

SEQ ID NO: 147680 - protein, 115 aa, Unknown
  Bacterial polypetide isolated from the Sargasso Sea
MTDKQVSKSKPKVAIVMGSESDWSVMRKVTEVFDDFLVEYESKIISAHRTPDLMSDFSKNASSYGFQYIIAGAGGAAHLPGMIASNTTLPVIGIPIPTTHLEGTDSLLSNCTMPK

SEQ ID NO: 147681 - protein, 378 aa, Unknown
  Bacterial polypetide isolated from the Sargasso Sea
MRVVVYGAGQLAQMMYLAGSPLGIDVQAVDVNNDTVVHPVSKTPLDIPLDEALDGADALTVEFEHVPERLLEVAAQTNKLMPNIQSILVGADRVREKHLLQTMGVANCEHKIVTHLDQLDECVDALGSKLILKASRDGYDGYGQWRLSDDAELPELKQSLQGLDLENVPLVVEKMVAFDRELSLIGVRNAKGDIRTYPLAENLHHQGQLHVSVAPATNVDEALQQQAHDIFTTLADGMDYVGVLAVELFQVNDTLLVNELAPRVHNSGHWSQSGAVTSQFENHLRAVCGLPLGDTSALGPSAMVNIIGCSSFSRELLSIDGSHLHWYGKSVRDKRKMGHINVTTDSYHQLGEKLMALSQYLPLEYFPKLVAEATRLKG

SEQ ID NO: 147682 - protein, 166 aa, Unknown
  Bacterial polypetide isolated from the Sargasso Sea
MLNLFVKRNKLNNKVAIIMGSKSDYAIMKDCEKILKTLKIKFQVSIVSAHRTPKRMFEFAETASKNGFGVIVAGAGGSAHLPGMVASLSSVPVIGVPIESKKLKGLDSLLSIVQMPKGCPVATMAINGSMNAGLLAASIIGNFDEKIKSNFEKWKRLQTKSIKKKP

SEQ ID NO: 147683 - protein, 374 aa, Unknown
  Bacterial polypetide isolated from the Sargasso Sea
MENNSIGIIGGGQLCQMLSEYLDSIDKKVYFIDPSENPPAKSTNAIHIRKDYGDKEALEFLSKQCDAITYEFENIPVESLSFLNTDITINLSPYILSISQNRLNEKRNFTRCGISTPNFTSFNKGDNLVSVIEKSNINFPIILKTNTLGYDGKGQYRIDNREDAEHNLQHLDEKTDYIIEEVVNFKKEFSVIIGKDSFGNIEYFQPIENIHKNGILDISIYPARITKETEKNSIELATKFINEIKLTGILAIEMFLNTNDKILFNEIAPRPHNSGHLTIQTHSISQFGLLGEIVSNKKICKPLSNKKAVMKNILGEFFNKKNYKEILNEIKNMDNHYLKLYNKDDAKTGRKMGHVTIITDDIENSLVKINALID

SEQ ID NO: 147684 - protein, 198 aa, Unknown
  Bacterial polypetide isolated from the Sargasso Sea
GQYKLHTEDDITNEIDFTKEYILEKLIHLKKEISVVITRYDQNSYEIYDPIENVHEEQILKYSTIPSDISDNIRIKSIEWAKHVVEKLDYIGTLCVEFFIDTDDNLYANEIAPRVHNSGHLTMNSHNISQFENHVRAVCGLEKIETKKLYNAKMINLIGDEISLYRNKTFKDNEFFYDYLKTEIKQKRKMGHLTIIEK

SEQ ID NO: 147685 - protein, 374 aa, Unknown
  Bacterial polypetide isolated from the Sargasso Sea
MILPPATLGMLGGGQLGRYFVMAAHRLGYKVVVLDPDPASIAGAAADHHIVAAYDDPTALHDLASRCAAVTCEFENVPATALALLEQYQPVRPAAGAVRICQDRREEKAFLSRAGIPVAPNQTLQPGEPLPALSASLFPAILKTAREGYDGKGQWTIQAADQLPAALAASGVPCVLEQRLALEGEFSLTLARSPSGAIGALPLVQNWHSGGILDQTRSPANVPALEADARRIAEQLIAALDYVGVLTVEFFLVAGKLLVNELAPRPHNSGHPSLDNAECSQFELQVRALCDLPLPARIAVHPAMLLNLLGDLWQGGTPDWAALLALPGVHLHLYGKGEPRPGRKMGHVTITAADWPTVEETCHRVRQLLGLPPR

SEQ ID NO: 147686 - protein, 169 aa, Unknown
  Bacterial polypetide isolated from the Sargasso Sea
MNTPPLIGLVMGSDSDWPVMQAAARILKEHGVPYEARVVSAHRTPDLLFEYAASARERGLRAIIAGAGGAAHLPGMVAAKTTIPVLGVPIPTRQLKGMDSLLSIVQMPKGVPVATFAIGEAGAANAGLFAVSLLSVAQDGDAPRYQQQLDGFRANERDRVLALTLEDPA

SEQ ID NO: 147687 - protein, 163 aa, Unknown
  Bacterial polypetide isolated from the Sargasso Sea
MKKANNHKVSIIMGSQSDYSTMQNCEKVFKILKIKFETKIISAHRTPKRMFEYAKTAEKNNISVIIAGAGGSAHLPGMVAAITRIPVIGVPIESKKLNGLDSLLSIVQMPKGIPVGTVAIGKNGAINAALFAASIISNFDKKIKNNLESWRSKQTKSVKKKPK

SEQ ID NO: 147688 - protein, 164 aa, Unknown
  Bacterial polypetide isolated from the Sargasso Sea
MSNKKKNHKVSIIMGSQSDYSTMRYCQKVLKILKIKHEIKIVSAHRTPNRMYKFAKNAEKNNISIIIAGAGGSAHLPGMIAALTRIPVIGVPIESKKLKGLDSLLSIAQMPKGIPVGTVAIGKDGAINAGLLAASIVAITDPKIRKNLNIWRNKQSKSVKKKPK

SEQ ID NO: 147689 - protein, 163 aa, Unknown
  Bacterial polypetide isolated from the Sargasso Sea
MKTKKNLNKVTIVMGSKSDFKTMKFCKKILKILDINHDVKIVSAHRTPERMFEFARNAEKNNISVIIAGAGGSAHLPGMIASLTTIPVIGVPVESKKLKGLDSLLSIVQMPKGIPVGTVAIGVDGAINAALYAASILSVNDTMVKKKLAHWRNKQTKSVKKRP

SEQ ID NO: 147690 - protein, 166 aa, Unknown
  Bacterial polypetide isolated from the Sargasso Sea
MINETTQVAIIMGSDSDLPIVEAAFPILENFGIKFTKNVMSAHRTPHDVMELITDSEKNGCKVFIAAAGMAAHLAGAVAAHSTKPVIGIPIESGGMGGIDSLLSTAMMPPGVPVATVAVGKSGAKNSAILAVQILATSDDDLARKLKDYKENMRTEVLEKDKKLNS

SEQ ID NO: 147691 - protein, 365 aa, Unknown
  Bacterial polypetide isolated from the Sargasso Sea
MTQASAKPKVWVLGNGQLGAMLTHAGEPLAIDVRAVDIMTPTDEILPLAPQDIITAEREQWPESALSLQLSTHPHFVNGPVFSRLADRYSQKSLLDQIQVPTAPWTLVDDKTDVENLYQDFGPRVLMKRRTGGYDGKGQHWLKQAEAGEIPQDWRNLAIAEQAINFDEEVSLVGVRTREGQCVFYPLTLNLHQDGILMASISPLTRLNHLQAQAEGMLSAIMHELEYVGVMAMECFRVGDNLLVNELAPRVHNSGHWTQAGTHMDQFQLHLRALCGIAIPQPQVNFQCVMVNLIGIENDPRWLSLPNAELYWYNKEVRPGRKVGHLNLSVPNAAVLKDSISALQTWMPSQYQAPLAWILAEFAKA

SEQ ID NO: 147692 - protein, 163 aa, Unknown
  Bacterial polypetide isolated from the Sargasso Sea
MQALVAVIMGSKSDWPTMEAAAEIMDKLQVPYHVEVVSAHRTPDKLMEFAAGAADRGFKIIIGGAGGAAHLPGMIASKTRLPVLGVPVQSKALSGMDSLLSIVQMPKGIAVGTLAIGTAGAFNAGLLACQILANNDAELAARLEAFREEQTRAVLDNPDPREA

SEQ ID NO: 147693 - protein, 167 aa, Unknown
  Bacterial polypetide isolated from the Sargasso Sea
MNKPFVAVLMGSDSDFPVMQTTLEVLKSFDIAVEVKVTSAHRTPAATHQYVTDAEARGCKVFICAAGLAAHLAGAVAGITTRPVIGVPIDGGPLKGLDALLSTVQMPGGVPVATVAIGKAGAKNAGYLAAQMLAVADDELAAKVQAERQKNADEVLAKDAALQALLK

SEQ ID NO: 147694 - protein, 147 aa, Unknown
  Bacterial polypetide isolated from the Sargasso Sea
ENYHEDQILKNSKIPADINKDIVDQSLNWAKLIVEKLNYIGTLCVEYFLDQNENLYVNEIAPRVHNSGHLTINSHNISQFENHIRAVCSLEKIETKKIYNAEMLNILGNDIIKYRSKKHEDNEYFFDYLKKDIKEKRKMGHITKVFK

SEQ ID NO: 147695 - protein, 60 aa, Unknown
  Bacterial polypetide isolated from the Sargasso Sea
MTNETIQVAIIMGSDSDLPIVEAIFPILDSFGVKYTKNVMSAHRTPHDVMQLIKDSENNG

SEQ ID NO: 147696 - protein, 119 aa, Unknown
  Bacterial polypetide isolated from the Sargasso Sea
KKIVEDLDYIGTLCVEYFIDKNDNLYVNEIAPRVHNSGHLTMNTHNISQFENHVRAVCGLEKIETKKISNGKMINLIGSDISAYRGKTFADNEFFYDYLKTEIRDKRKMGHLTIIENKL

SEQ ID NO: 147697 - protein, 110 aa, Unknown
  Bacterial polypetide isolated from the Sargasso Sea
MKKNKNFKVAIVMGSQSDYKTMQLSTKILKKMGIKFETRILSAHRTPKRMYEFARKAEKNNFKVIIAGAGGSAHLPGMIAAITHLPVLGVPIESKKLKGLDSLLSIAQMP

SEQ ID NO: 147698 - protein, 114 aa, Unknown
  Bacterial polypetide isolated from the Sargasso Sea
MSNKRNHKVTIAMGSQSDYSTMKYCAKILKILKIKHETKIVSAHRTPDRMYKFAKNAEKNNISVIIAGAGGSAHLPGMIAAITTIPVIGVPILSKKLNGLDSLLSISQMPKGIP

SEQ ID NO: 147699 - protein, 96 aa, Unknown
  Bacterial polypetide isolated from the Sargasso Sea
NENLYVNEIAPRVHNSGHLTINAFNISQFENHVRAVCSLEKIPLKKISNAKMVNLIGNQIKPYRENFKLNENEFFFDYQKKEIKDKRKMGHITTLI

SEQ ID NO: 147700 - protein, 151 aa, Unknown
  Bacterial polypetide isolated from the Sargasso Sea
MTNETVQVAIIMGSDSDLPVVEASFSILDGFGVKYTKNVMSAHRTPHDVMELIKNSEENGCKVFIAAAGMAAHLAGAVAAHSTKPVIGIPIESGGMGGIDSLLSTAMMPPGVPVATVAVGKSGAKNSAILAVQILATSEKNLAQKLVEYKQ

SEQ ID NO: 147701 - protein, 164 aa, Unknown
  Bacterial polypetide isolated from the Sargasso Sea
MKNSKNISKVSIIMGSQSDYSTMKFCEKVLKNLKISFEKKIISAHRTPKRMFEYARNAEKNNISVIIAGAGGSAHLPGMVAAITRIPVIGVPIESKKLKGLDSLLSIAQMPKGIPVGTVAIGKDGAINAGLFAASIISTFDKKIKINLENWRSKQTKFVKKKPK

SEQ ID NO: 147702 - protein, 163 aa, Unknown
  Bacterial polypetide isolated from the Sargasso Sea
MSQVAIIMGSKSDFQIMSEAIEILKSFNIDTEYDIVSAHRTPNKMVEYASNAEKKGIKVIIAGAGGAAHLPGMVASITSLPVIGVPIKSRNSIDGWDSILSILQMPGGVPVATVALNGSKNAGILAAQIIGSFDTEVSDKVKAYKKDLENKVIESSKDLKKNS

SEQ ID NO: 147703 - protein, 99 aa, Unknown
  Bacterial polypetide isolated from the Sargasso Sea
MANKNNHKVAIVMGSQSDYSTMKYTVNVLKILKIKHETKIVSAHRTPNRMFEFAKNAEKNNISVIIAGAGGSAHLPGMIAAITRIPVIGVPIESKKLKG

SEQ ID NO: 147704 - protein, 290 aa, Unknown
  Bacterial polypetide isolated from the Sargasso Sea
MPGALLGVLGGGQLGAMFAVAARRMGYRVAVITDTRECPAARHADRLHVGSYDDPAFLAQAAEGLSVVTFEFENVPAAAGEALKAAVPVRPHPEVLFTTQSREREKAFLVERGIPCGRHAMVRTEEELRKAVENIGLPAVLKTAAFGYDGKGQRMLKETSDIHDAWVSLGELPCVLEEWIDFQCELSVVAARGLDGAVVAFPAIRNEHANHILDVSSCPAELPVEVLGEAEHLAATVLSELGVVGVACVEFFLAKDSRLLVNEIAPRTHNSGHLTIEACPTSQFEQQVRA

SEQ ID NO: 147705 - protein, 378 aa, Unknown
  Bacterial polypetide isolated from the Sargasso Sea
MRVVVYGAGQLAQMMYLAGSPLGIDVQAVDVNNDTVVHPVSKTPLEISLAQALEGADALTVEFEHVPERLLEDAAKTNKLMPNIDSILVGADRVREKKLLESMQVANCEHQIVTDLAQLDDCVKQLGSKLILKASRDGYDGYGQWRLSDESDLPELKNALQGLDLQTVPLVVEKMVAFDRELSLIGVRNANGDVRTYPLAENLHHQGQLHVSVAPATNVDDALQAQAHDIFVKLAEGMNYVGVLAVELFQVGDKLLVNELAPRVHNSGHWSQSGAVTSQFENHLRAVCGLPLGDTSAIGPSAMVNIIGCSSFSRDLLSIDGSHLHWYGKSVREKRKMGHINVTTNSYGSLGEKLMALSKYLPLEYFPKLVGEATRLKG

SEQ ID NO: 147706 - protein, 164 aa, Unknown
  Bacterial polypetide isolated from the Sargasso Sea
MAKVAIVMGSTSDWPTMQQAAKMLKSFGVEFEAKVVSAHRTPNLLVEFAESAADEGFSAIIAGAGGAAHLPGMIAAHTHLPVFGCPVKSKALNGLDSLLSIVQMPKGVAVGTLAIGEAGAANAGLLAAQVVALQDESVRNAVIAFRKSQTDTVLASSNTLELDE

SEQ ID NO: 147707 - protein, 163 aa, Unknown
  Bacterial polypetide isolated from the Sargasso Sea
MQNKKNHKVAIVMGSQSDYSTMKYTVKVLKILKIKFETKIVSAHRTPNRMYEFAKKAEKNSISVIIAGAGGSAHLPGMIAALTRIPVIGVPIESKKLKGFDSLLSIAQMPKGIPVGTVAIGVDGAINAALLSASILSVSDTKIRKSLESWRTKQTRSVKKKPH

SEQ ID NO: 147708 - protein, 105 aa, Unknown
  Bacterial polypetide isolated from the Sargasso Sea
LCVEFFIDKNDNLYANEIAPRVHNSGHLTINSHNISQFENHIRAVCGLEKIETKKLYSAKMINIIGDEISIYRKKSFKNNEFFYDYLKKEIKNKRKMGHLTIIDK

SEQ ID NO: 147709 - protein, 168 aa, Unknown
  Bacterial polypetide isolated from the Sargasso Sea
SQVSCRDTYGNISHFPLTRNVHENHILKHSYAPLKLNNDLERYSKEITKKILIELDHIGVLTVEFFKAGENIIVNEIAPRVHNSGHWTIEGCSESQFKIHMQAVSGVKIKQPSLLYECHMKNLIGSEINDWINKQTDNGVNVHLYHKKEVKKGRKMGHLTYIKDVKKL

SEQ ID NO: 147710 - protein, 100 aa, Unknown
  Bacterial polypetide isolated from the Sargasso Sea
FITKKDELLVNELAPRFHNSGHLTIEAFNISQFENHVRAVCSLKSKPIEKISNAEMYNILGFEIHNYKKKTFKKNEFFHDYLKKEPREGRKMGHLTILKD

SEQ ID NO: 147711 - protein, 163 aa, Unknown
  Bacterial polypetide isolated from the Sargasso Sea
MSQVAIIMGSKSDFEIMSEAIEILKSFDIDTEYDIVSAHRTPNKMVEYASNAEKKGIKVIIAGAGGAAHLPGMVASITSLPVIGVPIKSRNSIDGWDSILSILQMPGGVPVATVALNGSKNAGILAAQIIGSFDPKVADKVKDYKKDLENKVIQSSKDLKKNS

SEQ ID NO: 147712 - protein, 166 aa, Unknown
  Bacterial polypetide isolated from the Sargasso Sea
MAANSKEKKLISIVMGSQSDWSTMKNAAVFLEELNIPFEKKVVSAHRTPERLYNYAKKAQKRGIKVIIAGAGGAAHLPGMIASLTSLPVLGVPIESKTLKGIDSLLSIAQMPAGVPVGTLAIGDPGAKNSAILALSIISVSNKSYLYKLEKWKKNLTDNVPLSPNE

SEQ ID NO: 147713 - protein, 103 aa, Unknown
  Bacterial polypetide isolated from the Sargasso Sea
MTNEKIQVAIIMGSDSDLPIVEAIFPILDSFGVKFTKNVMSAHRTPHDVMELIKDSEDNGCKVFIAAAGMAAHLAGAVAAHSTRPVIGIPIESGGMGGIDSLL

SEQ ID NO: 147714 - protein, 127 aa, Unknown
  Bacterial polypetide isolated from the Sargasso Sea
LIIISKKILNKLNFIGLLTIEFFLDDENNIFVNEIAPRVHNSGHITLDNANMSQFELHIKAITKDKIKTPKIIKKGLMRNLIGNEIKRTKQISKLKSYKVYKKKKAYDYGKKAIKQGRKMGHINFVM

SEQ ID NO: 147715 - protein, 278 aa, Unknown
  Bacterial polypetide isolated from the Sargasso Sea
MSKPTIGIIGGGQLGSMLSTAAKNLNLKTIIISDDENAPAQFFADEFIFSKYDDDMKIEEFSNKIDFVTYEFENIPYKTLSKIDGIKKVNPKPSINKIIQNRLSEKDFLNKNNINTTSYISVKNESELKSGQDFIPGILKTCTLGYDGKGQYKINSEKELDNLKVNFENHYILEKLVKLKKEISVIITRFGKQKYEVYDPIENIHEDQILKYSKIPAEISEDLFGKSKEWAKYIAEELNYIGTMCVEYFIDKNENLFVNEIAPRVHNSGHLTINAYNV

SEQ ID NO: 147716 - protein, 111 aa, Unknown
  Bacterial polypetide isolated from the Sargasso Sea
MNKKNLKVSVVMGSQSDFKTMKLAKQILKKLKVPMEIKIISAHRTPMRMYKYASDAEKNNIGVIIAGAGGSAHLPGMIAALTQIPVLGVPIESKKLKGLDSLLSIAQMPKG

SEQ ID NO: 147717 - protein, 190 aa, Unknown
  Bacterial polypetide isolated from the Sargasso Sea
MVTKKPLVGIIMGSSSDSRIMHGAAEILDSFSIPHEDQIISAHRTPERLNEYAKHAEKSKFKVIIAGAGGAAHLPGMIASHTTIPVIGVPIMVYNDKQMKKTDKNKYSAFGGLDSLLSISEMPTGSPVVAVGVNKASNAGIYALKILGNSYPEIKTKLKKHKFDQYASVLKESEELKKLGLTKFVKKKFR

SEQ ID NO: 147718 - protein, 357 aa, Unknown
  Bacterial polypetide isolated from the Sargasso Sea
MSSPYLKLGSTVGILGGGQLGRMISMACSELGYRSLIYCPEGDNPAVEVSSEKIIGNWNDDELIKKFISSVDAVTLEFENIPIRTIKKVEKHFTVFPNSKVLEIAQYRPFEKKYAKDAGIKVPRWWLINSKQELVNAIFQLDGPGILKTTSLGYDGKGQFKILGNEKIEDIWSKIESNEVILEEFIDFKTEVSFLICRKNNNEICIFPPTENIHQNGILQKSKAPAELPEEIWLSGAAHISRLADKLSLNGLMAVEFFLLDNGELVFNEIAPRPHNSFHWTMDGLLSSQFNQLIRCVVGMPFGNVSIINKWEMINILSENYQDIPNYILDNNSKIYIYNKQSIKTKRKLGHINRLLS

SEQ ID NO: 147719 - protein, 347 aa, Unknown
  Bacterial polypetide isolated from the Sargasso Sea
MTISTLGIIGSGQLGSLLCQAAKKLNIKTIVISDDENGPAQNYSGEFIYSQYDNKEKIKEFVSKVDIITYEFENIPINILNEIDKEKKVLPKPEINRIIQNRKLEKTFVNDLGIKTTDWAFIKQAGDVEKNKNLLPGILKSNTLGYDGHGQYVLNSLDDVKKNWCFTADYILEKKVNLKKEISVVITRYLNGETYIYEPIENIHKDQILNHSKIPADINKEIFIKAQSNAKLISEKLDYVGTMCVEYFIDQDDNLLVNEIAPRVHNSGHLTINAFSISQFAGHVAAVCNLGVKKVEKISNAEMFNVLGKDIETYRSKIFSQNEFFYDYGKKSIKDKRKMGHLTVLKK

SEQ ID NO: 147720 - protein, 348 aa, Unknown
  Bacterial polypetide isolated from the Sargasso Sea
MTKVNLGILGGGQLGSLLAIAAKKLDIKTIIFCDDKDAPAKNYCDDFIFGDYKDLKCIEEFVNKVDLVTFEFENIPFETLDQINKQKKVYPKPEINKVIQNRLLEKNFINNLNIKTTSYKSIKSKIEIESNKNLIPGLLKTCTLGYDGKGQFKIDSINDLKNLKLETNNEFILEKFIDLKKEISIILTRFKKNSYEIYEPIENVHKDQILKTSKIPAEINDKLKTLSKEWAVSISESLDYIGTLCVEFFIDKKDNLYVNEIAPRVHNSGHLTINSHNVSQFENHLRAVCQFEKINTKKMFNAEMINLIGDDILEYRDKKLEENEFFFDYKKKSIKPKRKMGHLTRIIK

SEQ ID NO: 147721 - protein, 163 aa, Unknown
  Bacterial polypetide isolated from the Sargasso Sea
MIKNKNHKVAIVMGSQSDYSTMKYAVNVLKILKIKHEIKIVSAHRTPKRMFDFAKSAEKNNFSVIIAGAGGSAHLPGMIASLTNLPVLGVPIESKKLKGLDSLLSIVQMPKGVPVGTVAIGVDGAINAALLSASIISLSDKKLKKRLNNWKTKQTKSVKKKPK

SEQ ID NO: 147722 - protein, 102 aa, Unknown
  Bacterial polypetide isolated from the Sargasso Sea
ELFHTKAGLIVNEIAPRVHNSGHWTQNGCSIDQFEQHIRAITGWPLGDGKRHTNVVMENLIGDEIKRAATLALDGNISLHLYGKNDIKPGRKMGHFNLVKEK

SEQ ID NO: 147723 - protein, 215 aa, Unknown
  Bacterial polypetide isolated from the Sargasso Sea
AIIKTRIFGYDGKGQISVNQKTNFDKNISSLCNQSIIEKKIPFEFEFSQVSCRDVFGNVFHFPLTRNIHENHILKHSYAPLDLPNDLEEHAREITKKIISDLDHVGVLTVEFFKTKENILVNEIAPRVHNSGHWTIEGCSSSQFKVHMQAVSGIKITQPKLLNECHMVNLIGNEINDWINKKSDSGVNIHLYHKNEIKNGRKMGHLTYIKDKNIL

SEQ ID NO: 147724 - protein, 164 aa, Unknown
  Bacterial polypetide isolated from the Sargasso Sea
MKYKKKSHKVSIVMGSQSDYKTMKNCEKVLKILKVNYETNIVSAHRTPDRLYTYAKKAENNNISIIIAGAGGSAHLPGMIAAITRIPVIGVPIESKKLKGLDSLLSIAQMPKGIPVGTVAIGEDGAINAGLYAASIIATYDNNVKKTLLNWRKKQTSKVKKKPK

SEQ ID NO: 147725 - protein, 163 aa, Unknown
  Bacterial polypetide isolated from the Sargasso Sea
MVSASTKHKVAIVMGSKSDYATMKNCEKILKLLKVKFETKIVSAHRTPERMFKFVKAAEDNNFSVIIAGAGGSAHLPGMIASLTTIPVIGVPVESRKLKGLDSLLSIVQMPKGIPVGSVAIGEDGAMNAGLYAASIIALTNKEIKKNLKNYRSKQSKAVKQKP

SEQ ID NO: 147726 - protein, 100 aa, Unknown
  Bacterial polypetide isolated from the Sargasso Sea
MNSKDIYKIAVVMGSDSDLQTLKPAIDILKEFGIKTEVCILSAHRTPIEMMEYAKNAESENIKVIIAGAGGSAHLPGMLASITCIPVIGVPVESKALKGI

SEQ ID NO: 147727 - protein, 163 aa, Unknown
  Bacterial polypetide isolated from the Sargasso Sea
MKKKKNLKVAIIMGSQSDYKTMKLAEKMLKNLGVSFKTQIISAHRTPKRMYDFARSAKKNNFGVIIAGAGGSAHLPGMISALTSIPVLGVPIESKKLKGLDSLLSIAQMPKGIPVGTLAIGEDGAINAALLASSIIANNNSKIKRNLENWRLSQTRSVKKKPK

SEQ ID NO: 147728 - protein, 164 aa, Unknown
  Bacterial polypetide isolated from the Sargasso Sea
MKRSQILVGIIMGSQSDWPVMKHASDTLKDLSIKHEKKVVSAHRTPDLLFHYAENASERGIEVIIAGAGGAAHLPGMTAAKTHVPVIGVPVKTKSLEGKDSLLSIVQMPAGIPVATVAIGKAGSINAALLAASILSIKYPNINKKILAYRKKQTQRVLKSAKLI

SEQ ID NO: 147729 - protein, 144 aa, Unknown
  Bacterial polypetide isolated from the Sargasso Sea
MGSDSDLNTLKPAIDILREFRIKTEVCILSAHRTPIEMMEYAKNAESENIKVIIAGAGGAAHLPGMLASITCIPVIGVPVESKTLKGIDSLLSIVQMPAGIPVATVAINGGQNAGLLAIEIISLFDESIKKNLKEFRENLHTQV

SEQ ID NO: 147730 - protein, 166 aa, Unknown
  Bacterial polypetide isolated from the Sargasso Sea
MTNETVQVAIIMGSDSDLPVVEASFSVLDDFGVKYTKNVMSAHRTPHDVMELIKTSEENGCKVFIAAAGMAAHLAGAVAAHSTKPVIGIPIESGGMGGIDSLLSTAMMPPGVPVATVAIGKSGAKNSAILAVQILATSDEDLAQKLVEYKQNMRSEVLEKDKKLNS

SEQ ID NO: 147731 - protein, 163 aa, Unknown
  Bacterial polypetide isolated from the Sargasso Sea
MKKNKNYKVSIVMGSQSDYKTMKLASKTLKNIGIKFETKIISAHRTPKRMYEYARLAEKNNIEVIIAGAGGSAHLPGMLASLTSIPVLGVPIESKKLKGLDSLLSIVQMPKGIPVGTLAIGENGAINAGLLAASIIAISNSTVKKKLKNWRLSQTKSVKKNPK

SEQ ID NO: 147732 - protein, 140 aa, Unknown
  Bacterial polypetide isolated from the Sargasso Sea
MKKNSRINVSIIMGSQSDYSTMKYAEKTLKSLGIKFEKKIVSAHRTPKRMYEYASNVEKKNINVIIAGAGGSAHLPGMVASLTKIPVIGVPIESKKLKGLDSLLSIVQMPKGIPVATVAIGKDGAINAALLAASILSNSK

SEQ ID NO: 147733 - protein, 128 aa, Unknown
  Bacterial polypetide isolated from the Sargasso Sea
MKKNKSLKVSIVMGSQSDYRTMQLAEKTLKKIGVPFETKIISAHRTPKRMYQYALDAQKKNIGVIIAGAGGSAHLPGMISALTTIPVLGVPIESKKLKGLDSLLSIAQMPKGIPVGTLAIGDDGAINA

SEQ ID NO: 147734 - protein, 168 aa, Unknown
  Bacterial polypetide isolated from the Sargasso Sea
MEKIVSVTVSIIIGSESDLELANKCADTLNSLSITNSIQVLSAHRTPGLLETHVRECESGGTKVFIAMAGLAAHLAGAVASKTVLPVIGVPGDGGPLSGMDALLSTVQMPKGIPVATVAIGSAGATNSAYLAAQILGIESEEVRNALVKVREEGVETIKKSNQKLASS

SEQ ID NO: 147735 - protein, 137 aa, Unknown
  Bacterial polypetide isolated from the Sargasso Sea
MNKNKALKVSIIMGSQSDYKIMKLCEKTLKNLGVLFETKIISAHRTPKRMYEYASNAEKNNIGVIIAGAGGSAHLPGMIAAITSVPVLGVPVESKKLKGLDSLLSIAQMPKGIPVGTLAIGEDGSINAALLAASIIG

SEQ ID NO: 147736 - protein, 163 aa, Unknown
  Bacterial polypetide isolated from the Sargasso Sea
MKKNKNLKVVIVMGSQSDFKTMKLSANILKKMGVRFETKIISAHRTPKRMFEFAKNASKNNIGVIIAGAGGSAHLPGMISAITSIPVLGVPVESKKLKGLDSLLSIAQMPKGIPVGTLAIGEDGAINAALLATAIIANTNPTVKKKLINWRSSQTRSVKKRPK

SEQ ID NO: 147737 - protein, 152 aa, Unknown
  Bacterial polypetide isolated from the Sargasso Sea
MGSVSDWETMKEACDVLEQLQVAFEKKVVSAHRTPQWLTKYAENAQGRGLKVIIAGAGGAAHLPGMVASQTLLPVIGVPVRTSSLNGMDSLYSIVQMPRGVPVATVAIGGAGAHNAGLLAAQILSIHDLELRGSLQQRRDRIRDEVLENKLP

SEQ ID NO: 147738 - protein, 153 aa, Unknown
  Bacterial polypetide isolated from the Sargasso Sea
MKKNKNLKVSIVMGSQSDSKTMKFASNILKKLGIRHEMKIISAHRTPKRMYEFASSAEKNNVGVIIAGAGGSAHLPGMIAALTSIPVLGVPIESKKLKGLDSLLSIVQMPKGIPVGTLAIGSDGAINAGLIAGSIIANSDPKIKKNLNNWRLS

SEQ ID NO: 147739 - protein, 140 aa, Unknown
  Bacterial polypetide isolated from the Sargasso Sea
MDETIDGPLVSIVMGSKSDLPLMQPSMDILSILKVPYEMDIVSAHRTPKKMYSYAQEVESRGVRVVIAGAGGAAHLPGMIAAMTIVPVVGVPIPATKLEGLDSLLSIVQMPAGVPVATVAIGNAENAGLLAAQNFSNISP

SEQ ID NO: 147740 - protein, 165 aa, Unknown
  Bacterial polypetide isolated from the Sargasso Sea
MTKSNYKVGVIMGSDSDYPVMKEAVKILKEFEIDYESTIVSAHRTPERLVEYASTAYERGIRVVIAGAGGAAHLPGMVASLTTIPVIGVPVKSSNSIDGWDSVLSILQMPGGVPVATVALNGAKNAGLLAIQMLATGDERLIGKLKSYKEELKNQVLKKVDKGLE

SEQ ID NO: 147741 - protein, 163 aa, Unknown
  Bacterial polypetide isolated from the Sargasso Sea
MKPLVGIIMGSQSDWDTMRHAVDTLEALDVPCETQVISAHRTPDLLFEYASNARERELRVIIAGAGGAAHLPGMAAAKTTLPVLGVPVQSKTLTGVDSLLSIAQMPAGIPVGTLAIGKAGAINAGLLAAAILAGNHPNIREALDKFRKSQTERVLQNPDPRDP

SEQ ID NO: 147742 - protein, 135 aa, Unknown
  Bacterial polypetide isolated from the Sargasso Sea
MTTKPSVGIIMGSQSDWPTLKYSANILDEFDVKYETKIVSAHRTPDRLWEYGKSAVNRGLKAIIAGAGGAAHLPGMMASKTRIPIIGVPIQTQALSGVDSLYSIVQMPRGFPVATMAIGSTGASNAALMALEILA

SEQ ID NO: 147743 - protein, 162 aa, Unknown
  Bacterial polypetide isolated from the Sargasso Sea
MEKNLISIIMGSQSDWKTMRFACDVLEEFKIKYEKKIISAHRTPDRLFNYARNAHKRKIKVIIAGAGGAAHLPGMVASKTLVPVIGVPILSEALSGVDSLYSIVQMPRGCPVATMAIGIPGAVNSSILAISVLALNDKKLEKKLKNWHKCKTLTVPLVPKDE

SEQ ID NO: 147744 - protein, 162 aa, Unknown
  Bacterial polypetide isolated from the Sargasso Sea
MNKKNLKVSIVMGSQSDFKTMKLAKQILEKLKVPLEIKIISAHRTPMRMYKYASDAEKNNIGVIIAGAGGSAHLPGMIAALTQVPVLGVPIESKKLKGLDSLLSIAQMPKGIPVGTLAIGDDGAINAAILAASIISNNNPLVRSKLKSWRTSQTKSVRKKPK

SEQ ID NO: 147745 - protein, 110 aa, Unknown
  Bacterial polypetide isolated from the Sargasso Sea
MGSVSDWETMKEACDVLEQLQVAFEKKVVSAHRTPQWLTKYAQDAEGRGLQVIIAGAGGAAHLPGMVASQTLLPVIGIPVRTSSLNGMDSLYSIVQMPRGVPVATVAIGG

SEQ ID NO: 147746 - protein, 166 aa, Unknown
  Bacterial polypetide isolated from the Sargasso Sea
MSKSNNLVGIIMGSKSDWPIMKHASLTLKKLKISHESKIVSAHRTPKLLYEYADQAASKGLEVIIAGAGGAAHLPGMTAAISHLPVIGVPIQTKTLDGLDSLLSINQMPKGIPVATVAIGESGAINSALLAASILSNKYEEIQKILIKFRQKQTREVLKNNSPQKK

SEQ ID NO: 147747 - protein, 127 aa, Unknown
  Bacterial polypetide isolated from the Sargasso Sea
MMDFAQMAESNGFGVIIAGAGGAAHLPGMIASLTTLPVIGVPVKSKALSGIDSMYSILQMPSGIPVATVAIEGGLNAGLLASQILAVNNTELTNKLKKYRSELHDLVVKKDQKLKEIGAKTYLEKMS

SEQ ID NO: 147748 - protein, 163 aa, Unknown
  Bacterial polypetide isolated from the Sargasso Sea
MKKNKNLKVSIVMGSQSDYKTMQLTEKTLKKIGVSFETKIISAHRTPKRMYDYALKAENNNIAVIIAGAGGSAHLPGMISAITSIPVLGVPIESKKLKGLDSLLSIAQMPKGIPVGTLAIGEDGAINAALLAAAIIANQNSSIKFKLKNWRSSQTKSVKKNPK

SEQ ID NO: 147749 - protein, 156 aa, Unknown
  Bacterial polypetide isolated from the Sargasso Sea
MSKKIFNKVSIVMGSQSDNKTMKICQKILKALNVKFETRIVSAHRTPMRLYDYARKAEKNKIGVIIAGAGGSAHLPGMIAALTPLPVLGVPIESKKLKGIDSLLSIAQMPKGIPVGTLAIGKDGAINAALLAASIISLNDTKVKKKLNNWRYRQTK

SEQ ID NO: 147750 - protein, 162 aa, Unknown
  Bacterial polypetide isolated from the Sargasso Sea
FVAILMGSESDLSIMQAGADILKQLEIDYEIKITSAHRTPAVTQQYISDAEARGCQVFIAGAGLAAHLAGATAAHTTKPVIGVPIDAGPLQGLDSLLSTVQMPGGIPVATVAIGKAGAKNAAYLAAQILSLADEALSERVKQERAANSEKVQAQDAALQSSL

SEQ ID NO: 147751 - protein, 163 aa, Unknown
  Bacterial polypetide isolated from the Sargasso Sea
MKKNKNLKVAIVMGSQSDFKTMKLSAKILKTMGVKFETKIISAHRTPKRMYEFAENASKNDIGVIIAGAGGSAHLPGMISAITSIPVLGVPIESKKLKGLDSLLSIAQMPKGIPVGTLAIGDDGAINAALLAAAIISNNNPIVKKKLNNWRLSQTRSVKKNPR

SEQ ID NO: 147752 - protein, 163 aa, Unknown
  Bacterial polypetide isolated from the Sargasso Sea
MQSKKIHKVSIVMGSQSDFKTMKLCEKVFKILKVKFETKIISAHRTPNRMYDYSKKAEKNKISVIIAGAGGSAHLPGMIASLTTIPVIGVPIESKKLKGLDSLLSIAQMPKGIPVATVAIGEDGAINAALLAASIISLSDEKLKKNLNKWRIKQSSSVKKKPK

SEQ ID NO: 147753 - protein, 301 aa, Unknown
  Bacterial polypetide isolated from the Sargasso Sea
RCFKKLESNTEINPSPETLRIIQDKFLQKQFLQENHIPVAEFEKVENKEELEKMIKKLGLPLLLKTRRDAYDGRGNYKINSQNDIDDALDLFTGKTLMVEKFVDFQKEVSVIAARNTNGEISTYPVVENMHENNILKMTIAPGRVSEKVRKEAEDVAHKTMEVFHGAGVFGIEMFVTQDEKILINEIAPRVHNSGHHTLQSSTVSQFELHLRAILGMALGDTSIKKSTIMYNILGPHTFKGEYNILHHEQDNVFLKMYGKQESKPQRKIGHINIVDNKNLGIEGLLLQVDEIKKNLIIEPK

SEQ ID NO: 147754 - protein, 163 aa, Unknown
  Bacterial polypetide isolated from the Sargasso Sea
MKKNSKLKVSIIMGSQSDYKVMKIAEKTLKKIGVSFETKIISAHRTPQRMYEYAAKVEQNNIGVIIAGAGGSAHLPGMVSALTHVPVLGVPVESKKLKGLDSLLSIAQMPKGIPVGTLAIGEDGAINAALLAAAIIANNNSNVRKKLKNFRTSQTKSVKKSPK

SEQ ID NO: 147755 - protein, 163 aa, Unknown
  Bacterial polypetide isolated from the Sargasso Sea
MGSDSDLKTMKPAVDILREFNLKTEVCILSAHRTPIEMMEYAKNAESENIKVIIAGAGGAAHLPGMLASITCIPIIGVPVESKTLKGIDSLLSIVQMPAGIPVATVAINGAQNAGLLAIEMISLFDESIKKTLKEFRENLHTEVRAKNSKLSTIGPDKYLQNE

SEQ ID NO: 147756 - protein, 163 aa, Unknown
  Bacterial polypetide isolated from the Sargasso Sea
MKKNKNLKVSIVMGSQSDYKIMQLAEKTLKKIGVSFETKIISAHRTPKRMYDYALKAENNNIAVIIAGAGGSAHLPGMISALTSIPVLGVPIESKKLKGLDSLLSIAQMPKGIPVGTLAIGEDGAINAALLAASIIANQNSSIKLKLKNWRSSQTKSVKKNPK

SEQ ID NO: 147757 - protein, 162 aa, Unknown
  Bacterial polypetide isolated from the Sargasso Sea
MKKKPLKVSIIMGSQSDYKIMLFAEKTLKSIGIKFETKIISAHRTPKRMYNYASSAKKNNIGVIIAGAGGSAHLPGMISALTSIPVLGVPIESKKLKGLDSLLSIVQMPKGIPVGTLAIGKDGAINAALLAASIISNNNPVVSKKLDSWRISQTKSVKKKPN

SEQ ID NO: 147758 - protein, 163 aa, Unknown
  Bacterial polypetide isolated from the Sargasso Sea
MKNNKNLKVSIVMGSQSDYKTMKLTEKILKKLGIKFETKIISAHRTPKRMYEYASAAAKNNIGVIIAGAGGSAHLPGMISALTSLPVLGVPIESKKLKGLDSLMSIAQMPKGIPVGTLAIGDDGAINAGLLAASIIANNNIVVKKKLNNWRLAQTRSIKKNPK

SEQ ID NO: 147759 - protein, 163 aa, Unknown
  Bacterial polypetide isolated from the Sargasso Sea
MKKNKNLKVSIVMGSQSDYKTMQLTEKTLKKIGVSFETKIISAHRTPKRMYDYALKAENNNIAVIIAGAGGSAHLPGMISAITSIPVLGVPIESKKLKGLDSLLSIAQMPKGIPVGTLAIGEDGAINAALLAASIIANQNSSIKLKLKNWRSSQTKSVKKNPK

SEQ ID NO: 147760 - protein, 167 aa, Unknown
  Bacterial polypetide isolated from the Sargasso Sea
MSWVAILMGSESDWPTMQSCKEVFDELDVTSEVRVTSAHRTPKETQEYVLDAEARGCKVFICAAGMAAHLAGAVAAQTTRPVIGVPISSGSLQGVDALLSTVQMPGGIPVATVAIGKAGAKNAAYLASQILATSDDNLFERVRADREKNKDKVISQNQALQEILSGS

SEQ ID NO: 147761 - protein, 155 aa, Unknown
  Bacterial polypetide isolated from the Sargasso Sea
MKKNTNKKVSIVMGSQSDYKTMQLAEKTLKQLGVLFETKIVSAHRTPKRMYDFALKAEKNNIGVIIAGAGGSAHLPGMISALTQIPVLGVPIESKKLKGLDSLLSIAQMPKGIPVGTLAIGEDGAINSALLAAEIIAVNNSSVKNKLKKLEIKAN

SEQ ID NO: 147762 - protein, 163 aa, Unknown
  Bacterial polypetide isolated from the Sargasso Sea
MNKIKTLKVSIIMGSKSDYKIMKLCEKTLKNLGVLFETKIISAHRTPKRMYKYALSAEKNKIGVIIAGAGGSAHLPGMIAALTSLPVLGVPVESKKLKGLDSLLSIAQMPKGIPVGTLAIGKDGAINAALLAASIIGNSNLKVKNKLKSWRISQTKSVKKTPK

SEQ ID NO: 147763 - protein, 104 aa, Unknown
  Bacterial polypetide isolated from the Sargasso Sea
KNINVIIAGAGGSAHLPGMVASLTKIPVIGVPIESKKLKGLDSLLSIVQMPKGIPVATVAIGKDGAINAALLAASILSNSNLKIAKKLSDWRSKQTKSVKKKPY

SEQ ID NO: 147764 - protein, 173 aa, Unknown
  Bacterial polypetide isolated from the Sargasso Sea
FAIEVSTISARDTHGNTFTYPPSENIHKNHILNTSCVPASIDQKTENTLYEISKKMIKNLNYIGVLAIEFFVLKDNSILVNEIAPRVHNSGHWTLDGADISQFEQHIRAISQLKILNPKLIFKTKMLNLIGDDVNIWKDKNSSKNEKIYIYGKTETKMGRKMGHVNFLEEFKY

SEQ ID NO: 147765 - protein, 150 aa, Unknown
  Bacterial polypetide isolated from the Sargasso Sea
MKKNSKLKVSIIMGSQSDYKVMKLAEKTLKKIGVSFETKIISAHRTPQRMYKYAANVEQNHIGVIIAGAGGSAHLPGMISALTHVPVLGVPVESKKLKGLDSLLSIAQMPKGIPVGTLAIGEDGAINAALLAAAIIANHNPNILKKLKKF

SEQ ID NO: 147766 - protein, 128 aa, Unknown
  Bacterial polypetide isolated from the Sargasso Sea
MKKNKNLKVSIVMGSQSDYKTMKLAGKILKKMGIKFETKIISAHRTPKRMYEFASSAKKNNIGVIIAGAGGSAHLPGMISALTSIPVLGVPIESKKLKGLDSLLSIAQMPKGIPVGTLAIGKDGAINA

SEQ ID NO: 147767 - protein, 132 aa, Unknown
  Bacterial polypetide isolated from the Sargasso Sea
MGSDSDLNTLKPAIDILKEFGIKTEVCILSAHRTPIEMMEYAKNAESENIKVIIAGAGGAAHLPGMLASITCIPVIGVPVESKTLKGIDSLLSIVQMPAGIPVATVAINGGQNAGLLAIEIISLFDESIKKN

SEQ ID NO: 147768 - protein, 164 aa, Unknown
  Bacterial polypetide isolated from the Sargasso Sea
MGSDSDLKTLKPAIDILKEFGIKTEVCILSAHRTPIEMMEYAKNAESENIKVIIAGAGGAAHLPGMLASITCIPVVGVPVESKTLKGIDSLLSIVQMPAGIPVATVAINGGQNAGLLAIEMISLFDESIKKNLKEFRENLHTHVRSKNSKLSTIGPDKYLQNMN

SEQ ID NO: 147769 - protein, 163 aa, Unknown
  Bacterial polypetide isolated from the Sargasso Sea
MGSDSDLNTLKPAVDILREFGIKTEVCILSAHRTPIEMMEYAKNAESENIKVIIAGAGGAAHLPGMLASITCIPVIGVPVESKTLKGIDSLLSIVQMPAGIPVATVAINGGQNAGLLAIEIISLFDESIKKNLKEFRENLHTQVRNKNNKLSTIGPDNYLQNK

SEQ ID NO: 147770 - protein, 164 aa, Unknown
  Bacterial polypetide isolated from the Sargasso Sea
MGSDSDLKTLKPAIDILKEFGIKTEVCILSAHRTPIEMMEYAKNAESENIKVIIAGAGGAAHLPGMLASITCIPVVGVPVESKTLKGIDSLLSIVQMPAGIPVATVAINGGQNAGLLAIEMISLFDESIKKNLKEFRENLHTHVSSKNSKLSTIGPDKYLQNMN

SEQ ID NO: 147771 - protein, 168 aa, Unknown
  Bacterial polypetide isolated from the Sargasso Sea
MEKIVTKTVSIVIGSESDLELANKCADTLDSLSISNSIQVLSAHRTPGLLETHVRECESGGTKVFVAMAGLAAHLAGAVASKTVLPVIGVPGDGGPLSGMDALLSTVQMPKGIPVATVAIGSAGATNAAYLAAQILGVESDEVRNSLVKVREDGVEAIKESNKKLSNS

SEQ ID NO: 147772 - protein, 272 aa, Unknown
  Bacterial polypetide isolated from the Sargasso Sea
MKNEISKVIVLDPTENCPAAKVGAEQIIADFKDEESIKKLSELSDIITYEIESGNSDVLKKLEENTEINPSPETLRIIQDKFLQKQFLQENGIAVAEFEKVENREELEKMIEKLGLPLLLKTRRDAYDGRGNYKINSKSDIDDALDLFAGKTLMVEKFVNFQKEVSVIAARNTKGEISTYPVVENLHENNILRMTIAPGRVSEKVRKEAEDVAHKTMEVLHGAGVFGIEMFVTQDEKILINEIAPRVHNSGHHTLQSSTISQFELHLRAILG

SEQ ID NO: 147773 - protein, 163 aa, Unknown
  Bacterial polypetide isolated from the Sargasso Sea
MKKNKNLKVSIVMGSQSDYKTMQLTEKTLKKIGVSFETKIISAHRTPKRMYDYALKAENNNIAVIIAGAGGSAHLPGMISALTSIPVLGVPIESKKLKGLDSLLSIAQMPKGIPVGTLAIGEDGAINAALLAAAIIANQNSSIKFKLKIWRSSQTKSVKKNPK

SEQ ID NO: 147774 - protein, 98 aa, Unknown
  Bacterial polypetide isolated from the Sargasso Sea
IAGAGGSAHLPGMVASLTKIPVIGVPIESKKLKGLDSLLSIVQMPKGIPVATVAIGKDGAINAALLAASILSNSNLKIAKKLYDWRSKQTKSVKKKPY

SEQ ID NO: 147775 - protein, 144 aa, Unknown
  Bacterial polypetide isolated from the Sargasso Sea
MTASVYVPNREAAASASGGGLLSSPRPLVGVIMGSDSDLPCMQAAAEMLDKFEVPYELTIVSAHRTPQRLYEYSRAAAGRGLKVIIAGAGGAAHLPGMVAAMTPLPVIGVPVKSSALSGNDSLLSIVQVRDLPPSPSPSLGACI

SEQ ID NO: 147776 - protein, 155 aa, Unknown
  Bacterial polypetide isolated from the Sargasso Sea
MNKNKTLKVSIVMGSQSDYKIMKLCEKTLKNLGIPFETKIISAHRTPQRMYVYASNAEKNRIAVIIAGAGGSAHLPGMIAALTQIPVLGVPIESKKLKGLDSLLSIAQMPKGIPVGTLAIGEDGAINAALLAASIVGNNNSKIKNKLKSWRLSQT

SEQ ID NO: 147777 - protein, 145 aa, Unknown
  Bacterial polypetide isolated from the Sargasso Sea
MKTKSKPIVSIVMGSKSDYGTMKFCEQVLKKLNIKFDTNIISAHRTPKRLYDFALNAEKKRISIIIAGAGGSAHLPGMIAAITSIPVLGVPIESKKLKGLDSLLSIAQMPKGIPVGTLAIGKDGAINSALLAASILSSSNQVIKN

SEQ ID NO: 147778 - protein, 163 aa, Unknown
  Bacterial polypetide isolated from the Sargasso Sea
MGSDSDLNTLKPAIDILREFRINTEVCILSAHRTPIEMMEYAKNAESENIKVIIAGAGGAAHLPGMLASITCIPVIGVPVESKTLKGIDSLLSIVQMPAGIPVATVAINGGQNAGLLAIEMISLFDESIKNNLKEFRENLHKQVRNKNNKLSTIGPDNYLQNK

SEQ ID NO: 147779 - protein, 182 aa, Unknown
  Bacterial polypetide isolated from the Sargasso Sea
MPVFLVTTVLPRVAVVMGSDSDLPTMEPAAAILRELGVEVEVRVLSAHRTPLEMVAFAQAARTEGFGVIVAGAGGAAHLPGMVAALTTLPVIGVPVRSRALSGVDSLHSIVQMPGGIPVATVAIGGGLNAGLLAAQILSVADEALAARLADYRRRLHDAVAAKDARLLDLGSTAYLDGMSTP

SEQ ID NO: 147780 - protein, 163 aa, Unknown
  Bacterial polypetide isolated from the Sargasso Sea
MKKNRNLKVSIVMGSQSDYKTMRLAEKTLKKIGVSFETKIVSAHRTPKRMYDYALKAEQNNIGVIIAGAGGSAHLPGMISALTSLPVLGVPIESKKLKGLDSLLSIAQMPKGIPVGTLAIGKDGAINAALLAASIIANQNPTIKKKLNNWRSSQTKSVKKNPK

SEQ ID NO: 147781 - protein, 182 aa, Unknown
  Bacterial polypetide isolated from the Sargasso Sea
MPFFSVTTVLPRVAVVMGSDSDLPTMEPAAAILRELGVEVEVRVLSAHRTPLEMVAFAQAARAEGFGVIVAGAGGAAHLPGMVAALTTLPVIGVPVQSRALSGVDSLHSIVQMPGGIPVATVAIGGGLNAGLLAAQILSVADEALAARLADYRRRLHDAVAAKDARLLDLGSTAYLDGMSTP

SEQ ID NO: 147782 - protein, 381 aa, Unknown
  Bacterial polypetide isolated from the Sargasso Sea
MSKTLGIIGGGQLGMMLTEAAQNLDDISKIIVLDPTENCPAAKVGAQQIIADFKDEDAIKKLSELSDIITYEIESGNSDVLKKLEENTEINPSPDTLRIIQDKLLQKQFLQKNGIAVAEFEKIENKEELNQMIDKMGLPLLLKTRRDAYDGRGNYKINSKSEIDDALDLFSGKTLMVEKFVKFEKEVSVIAARNTKGEISTYPVVENIHENNILRTTIAPGRVSEIVRKEAEKIAEKTMEVLHGAGVFGIEMFVTSDDEILINEIAPRVHNSGHHTLQSCNTSQFEQHLRAILGMDLGDSSIKTPTIMYNILGPKTFQGEYNVLFKKQDNIHLKMYGKLESKPQRKIGHVNVVDVENRGMGELLKQVEDLKKNLVIEPKES

SEQ ID NO: 147783 - protein, 166 aa, Unknown
  Bacterial polypetide isolated from the Sargasso Sea
MAVKSLEKKLISIVMGSQSDWSTMKNAAIFLEELNIPYEKKVVSAHRTPERLYNYAKKAQKRGIKVIIAGAGGAAHLPGMIASLTSLPVLGVPIESKALKGIDSLLSIAQMPAGIPVGTLAIGDPGATNSAILALSIISVSNKSYLNKLEKWKKNLTDNVPLDPNE

SEQ ID NO: 147784 - protein, 166 aa, Unknown
  Bacterial polypetide isolated from the Sargasso Sea
MAAKSKEKKLISIVMGSQSDWSTMKNAAIFLEELNIPYEKKVVSAHRTPERLYNYAKKAQKRGIKVIIAGAGGAAHLPGMIASLTSLPVLGVPIESKVLKGIDSLLSIAQMPAGIPVGTLAIGDPGATNSAILALSIISVSNKSYLNKLEKWKKNLKDNVPLSPNE

SEQ ID NO: 147785 - protein, 163 aa, Unknown
  Bacterial polypetide isolated from the Sargasso Sea
MSKKIFNKVSIVMGSQSDNKTMKICQKILKNLNVKFESRIVSAHRTPKRLYDYARKAEKNKIGVIIAGAGGSAHLPGMIAALTPLPVLGVPIESKKLKGIDSLLSIAQMPKGIPVGTLAIGKDGAINAALLAASIISLNDTKVKKKLNNWRYRQTKAVKKKPR

SEQ ID NO: 147786 - protein, 156 aa, Unknown
  Bacterial polypetide isolated from the Sargasso Sea
MKKNSKLKVSIIMGSQSDYKVMKLVEKTLKKIGVSFETKIISAHRTPQRMYEYAAKVEQNHIGVIIAGAGGSAHLPGMISALTHVPVLGVPVESKKLKGLDSLLSIAQMPKGIPVGTLAIGEDGAINAALLASAIIANNNLNVRKKLKNFRTSQTK

SEQ ID NO: 147787 - protein, 135 aa, Unknown
  Bacterial polypetide isolated from the Sargasso Sea
MKKKIINSIVSIVMGSQSDFKTMKYAVKILKKLGVKHEVKIISAHRTPKRMYDFAINVEKKKCEVIIAGAGGSAHLPGMLAAITHIPVLGVPIESKKLKGLDSLLSIVQMPKGIPVGTLAIGKDGAINAALYAAS

SEQ ID NO: 147788 - protein, 163 aa, Unknown
  Bacterial polypetide isolated from the Sargasso Sea
MKKNSKLKVSIIMGSQSDYKVMKLAEKTLKKIGVSFETKIISAHRTPQRMYEYAAKVEQNNIGVIIAGAGGSAHLPGMVSALTHVPVLGVPVESKKLKGLDSLLSIAQMPKGIPVGTLAIGEDGAINAALLAAAIIANNNSNVRKKLKNFRTSQTKSVKKSPK

SEQ ID NO: 147789 - protein, 168 aa, Unknown
  Bacterial polypetide isolated from the Sargasso Sea
MEKIVTETVSIVIGSESDLDLANKCADALDSLSISNSIQVLSAHRTPGLLETHVRECESGGTKVFVAMAGLAAHLAGAVASKTVLPVIGVPGDGGPLSGMDALLSTVQMPKGIPVATVAIGSAGATNAAYLAAQILGVESEEVRNSLLKVREEGVEAIKESNKKLSDS

SEQ ID NO: 147790 - protein, 168 aa, Unknown
  Bacterial polypetide isolated from the Sargasso Sea
MEKIVTKTVSIVIGSESDLDLANKCADTLDSLSISNSIQVLSAHRTPGLLETHVRECESGGTKVFVAMAGLAAHLAGAVASKTVLPVIGVPGDGGPLSGMDALLSTVQMPKGIPVATVAIGSAGATNAAYLAAQILGVESDEVRNSLIKVREDGVEAIKESNKKLSNS

SEQ ID NO: 147791 - protein, 128 aa, Unknown
  Bacterial polypetide isolated from the Sargasso Sea
FETKIISAHRTPQRMYEYAAKVEQNNIGVIIAGAGGSAHLPGMVSALTHVPVLGVPVESKKLKGLDSLLSIVQMPKGIPVGTLAIGENGAINAALLAAAIIANNNSNVRKKLKNFRTSQTKSVKKSPK

SEQ ID NO: 147792 - protein, 162 aa, Unknown
  Bacterial polypetide isolated from the Sargasso Sea
MNKKNLKVSIVMGSQSDFKTMKLAKQILKKLKVPLETKIISAHRTPTRMYKYASGAEKNNIGVIIAGAGGSAHLPGMIAALTQIPVLGVPIESKKLKGLDSLLSIAQMPKGIPVGTLAIGEDGAINAAILAASIISNNNPLVRSKLKSWRISQTKSVRKNPK

SEQ ID NO: 147793 - protein, 163 aa, Unknown
  Bacterial polypetide isolated from the Sargasso Sea
MKKNTNKKVSIVMGSQSDYKTMQLVEKTLKQLGISFETKIVSAHRTPKRMYDFALKAEKNNIGVIIAGAGGSAHLPGMISALTQIPVLGVPIESKKLKGLDSLLSIAQMPKGIPVGTLAIGEDGAINAALLAAEIMAMTNSSIKNSLKNWRSKQTKSVKRAPK

SEQ ID NO: 147794 - protein, 297 aa, Unknown
  Bacterial polypetide isolated from the Sargasso Sea
KLEENTEINLSPETLRIIQDKFLQKQFLQENGIAVAEFEKVENREELEKMIEKLGLPLLLKTRRDAYDGRGNYKINSKSDIDDALDLFAGKTLMVEKFVNFQKEVSVIAARNTKGEISTYPVVENLHENNILRMTIAPGRVSEKVRKEAEDVAHKTMEVLHGAGVFGIEMFVTQDDRILINEIAPRVHNSGHHTLQSSTISQFELHLRAILGMELGDTSIKSPTIMYNILGPHTFKGEYNVLHREEENIFLKMYGKLESKPQRKIGHINIVDKKNVGIEGLLLQVEDLKKNLVIEPK

SEQ ID NO: 147795 - protein, 166 aa, Unknown
  Bacterial polypetide isolated from the Sargasso Sea
MSKPFVAILMGSESDLSIMQAGADILKQLEIDYEIKITSAHRTPAVTQQYISDAEARGCQVFIAGAGLAAHLAGATAAHTIKPVIGVPIDAGPLQGLDSLLSTVQMPGGIPVATVAIGKAGAKNAAYLAAQILSLADEALSERVKKERAANSEKVQAQDAALQSSL

SEQ ID NO: 147796 - protein, 162 aa, Unknown
  Bacterial polypetide isolated from the Sargasso Sea
MTTKPSVGIIMGSQSDWPTLKYSANILGEFDVTYETKIVSAHRTPDRLWEYGKSAVNRGLKVIIAGAGGAAHLPGMMASKTRIPIIGVPIQTQALSGVDSLYSIVQMPRGFPVATMAIGSTGASNAALLALEILALNDESLAKNLEIWRTQLSSSIPDEPQN

SEQ ID NO: 147797 - protein, 163 aa, Unknown; identical to SEQ ID NO: 147756
  Bacterial polypetide isolated from the Sargasso Sea

SEQ ID NO: 147798 - protein, 166 aa, Unknown
  Bacterial polypetide isolated from the Sargasso Sea
MSKSNNLVGIIMGSKSDWPIMKHASLTLKKLKISHESKIVSAHRTPKLLYEYADQAASKGIEVIIAGAGGAAHLPGMTAAISHLPVIGVPIQTKTLDGLDSLLSINQMPKGIPVATVAIGESGAINSALLAASILSNKYEEIQKILVKFRQKQTREVLQNNSPQKK

SEQ ID NO: 147799 - protein, 168 aa, Unknown
  Bacterial polypetide isolated from the Sargasso Sea
MEKTVTVTVSILIGSESDLDLANKCSETLDSLSISNSIQVLSAHRTPTLLESHIRECEAGGTKVFIAMAGLAAHLAGAVASKTVLPVIGVPGDGGPLNGMDALLSTVQMPKGIPVATVAIGSAGAINSAYLAAQMLGIESAEIQAALLKVRQDGIEAIKESNKKLENS

SEQ ID NO: 147800 - protein, 168 aa, Unknown
  Bacterial polypetide isolated from the Sargasso Sea
MEKIVTVTVSILIGSESDLDLANKCSETLDSLSITNSIQVLSAHRTPGLLETHIRECESGGTKVFIAMAGLAAHLAGAVASKTVLPVIGVPGDGGPLSGMDALLSTVQMPKGIPVATVAIGSAGAINSAYLAAQMLGIESEETRSALLKVREDGVEAIKESNKKLADS

SEQ ID NO: 147801 - protein, 163 aa, Unknown
  Bacterial polypetide isolated from the Sargasso Sea
MKKNNKLKVSIIMGSQSDYKIMKLAEKTLKKIGVTFDTKIISAHRTPQRMNEYASKLEQNQIGVIIAGAGGSAHLPGMISALTQIPVLGVPIESKKLKGLDSLLSIVQMPKGIPVGTLAIGEDGAINAALLAAAIIANNNLNVRKKLKNFRNTQTKSVKKTPK

SEQ ID NO: 147802 - protein, 163 aa, Unknown
  Bacterial polypetide isolated from the Sargasso Sea
MKKNSKLKVSIIMGSQSDYKVMKLAEKTLKKIGVSFETKIISAHRTPQRMYEYAAKVEQNKIGVIIAGAGGSAHLPGMISALTHVPVLGVPVESKKLKGLDSLLSIAQMPKGIPVGTLAIGEDGAINAALLAGAIIANNNSNVRKKLKYFRTSQTKSVKKSPK

SEQ ID NO: 147803 - protein, 144 aa, Unknown
  Bacterial polypetide isolated from the Sargasso Sea
FDELDVTSEVRVTSAHRTPKETQEYVLDAEARGCKVFICAAGMAAHLAGAVAAQTTRPVIGVPISSGSLQGVDALLSTVQMPGGIPVATVAIGKAGAKNAAYLASQILATSDDGLFERVRADREKNKDKVISQNQALQETLSGS

SEQ ID NO: 147804 - protein, 170 aa, Unknown
  Bacterial polypetide isolated from the Sargasso Sea
MSKISKDPLVSVIMGSKSDLDTMRLASEVLRELEIPHETKIISAHRTPDLMFEFAKNAKDRGIKVIIAGAGGAAHLPGMVASITELPVIGVPVKSSNLNGLDSLLSIVQMPKGVPVATVAIGQSGAENSALLAGKILALSDKEVSKRIKNRISENSMNVAKDSHIGTWLE

SEQ ID NO: 147805 - protein, 167 aa, Unknown
  Bacterial polypetide isolated from the Sargasso Sea
MSWVAILMGSESDWPTMQSCKEVFDELGVTSEVRVTSAHRTPKETQEYVLDAEARGCKVFICAAGMAAHLAGAVAAQTTRPVIGVPISSGSLQGVDALLSTVQMPGGIPVATVAIGKAGAKNAAYLASQILATSDDSLFERVRADREKNKDKVISQNQALQETLSGS

SEQ ID NO: 147806 - protein, 163 aa, Unknown
  Bacterial polypetide isolated from the Sargasso Sea
MKNNKNLKVSIIMGSQSDYKTMQLAVKILKYMGIKYETKIISAHRTPKRMFEYAIKASKNNIGVIIAGAGGSAHLPGMISALTSIPVLGVPIESKKLKGLDSLLSIAQMPKGIPVGTLAIGSDGAINAGLLAASIISNTNPAVKIKLKNWRLSQTKSVRKNPK

SEQ ID NO: 147807 - protein, 154 aa, Unknown
  Bacterial polypetide isolated from the Sargasso Sea
MAAKSKEKKLISIVMGSQSDWSTMKNAAIFLEELNIPYEKKVVSAHRTPERLYNYAKKAQKRGIKVIIAGAGGAAHLPGMIASLTSLPVLGVPIESKVLKGIDSLLSIAQMPAGIPVGTLAIGDPGATNSAILALSIISVSNKSYLNKLEKWKK

SEQ ID NO: 147808 - protein, 172 aa, Unknown
  Bacterial polypetide isolated from the Sargasso Sea
MATPSSQGSPAPAVGIIMGSKSDWKTLERAATTLSELGVPHECEIVSAHRTPEKLAEYARTAVERGLKVIIAGAGGAAHLPGMVAAQTPLPVLGVPVESAVLRGVDSLLSIVQMPAGIPVGTLAIGGAGAANAALLAVSILSLNDDELRERLCSYRKAQTDRVLADDLPPVV

SEQ ID NO: 147809 - protein, 163 aa, Unknown
  Bacterial polypetide isolated from the Sargasso Sea
MKKNKNLKVAIVMGSQSDFKTMKLSANILKKMGVRFETKIISAHRTPKRMYEFAESASRNNIGVIIAGAGGSAHLPGMISAITSIPVLGVPVESKKLKGLDSLLSIAQMPKGIPVGTLAIGEDGAINAALLATAIIANSNPTVKKKLNNWRSSQTRSVKKNPK

SEQ ID NO: 147810 - protein, 164 aa, Unknown
  Bacterial polypetide isolated from the Sargasso Sea
MANNSVNPVVAILGGSTSDFPVLTKAVEILDELGIPNELKVVSAHRTPDLLFDYAEKASVRGIKIIIAGAGGAAHLPGMLASKTILPVIGVPIPSEHLKGMDSLLSIVQMPRGVPVATVAIGGSENAAILAAEILSISDEDVHNSLQKWRQDMTDKIISDHQKG

SEQ ID NO: 147811 - protein, 163 aa, Unknown
  Bacterial polypetide isolated from the Sargasso Sea
MKSKKIHKVSIVMGSQSDFKTMKLCQKVFKILKVKFETKIISAHRTPNRMFYYAKKAEKNKISVIIAGAGGSAHLPGMIASLTAIPVIGVPIESKKLKGLDSLLSIAQMPKGIPVATVAIGEDGAINAALLAASIISLSDEKLKKNLNKWRVKQSSSVKKKPK

SEQ ID NO: 147812 - protein, 162 aa, Unknown
  Bacterial polypetide isolated from the Sargasso Sea
MKKKINKVSIIMGSQSDFSTLKHTIKVLKILSIAHEVKIVSAHRTPKRMFQYAANAEKNNISVIIAGAGGSAHLPGMVAALTRIPVIGVPIETKKLKGLDSLLSIVQMPKGIPVATVAIGIDGAINAGLLAASILSIFDIKIRKNLIKWRSSQRKSVKIKPL

SEQ ID NO: 147813 - protein, 163 aa, Unknown
  Bacterial polypetide isolated from the Sargasso Sea
MSKNKIVKVSIVMGSQSDYKIMKFCEKTLKSLGISFETKIISAHRTPKRMYEYALNAEKKSIAVIIAGAGGSAHLPGMIAALCSLPVLGVPIESKKLKGLDSLLSIVQMPKGIPVGTLAIGEDGAINAALLAASIIGNNNIKIKNKLKKLRSFQTKSVKKTAK

SEQ ID NO: 147814 - protein, 381 aa, Unknown
  Bacterial polypetide isolated from the Sargasso Sea
MSKTLGIIGGGQLGMMLTEAAQNLDAISKIIVLDPTENCPAAKVGAQQIVADFKDEDAIKKLSELSDIITYEIESGNSDVLKKLEKNTEINPSPDTLRIIQDKLLQKQFLQKNGIAVAEFEKIENKEELNQMIDKMGLPLLLKTRRDAYDGRGNYKINSKSEIDDALDLFSGKTLMVEKFVKFEKEVSVIAARNTKGEILTYPVVENIHENNILRTTIAPGRVSETVRKEAEKIAEKTMEVLHGAGVFGIEMFVTSDDEILINEIAPRVHNSGHHTLQSCNTSQFEQHLRAILGMDLGDSSIKTPTIMYNILGPKTFQGEYNVLFKKQDNIHLKMYGKLESKPQRKIGHVNVVDVENRGMGELLKQVEDLKKNLVIEPKES

SEQ ID NO: 147815 - protein, 166 aa, Unknown
  Bacterial polypetide isolated from the Sargasso Sea
MNNKPKVSIIMGSKSDLDTMRIASEVLRELEVSHEIKIISAHRTPDLMFEFAKNAQNRGIEIIIAGAGGAAHLPGMVAAITELPVIGVPIKSSNLNGIDSLLSIVQMPKGVPVATVAIGDHGAENAALISAKILALNDNKISKNLQKRISNTSNSVKKDSDIGNWP

SEQ ID NO: 147816 - protein, 163 aa, Unknown
  Bacterial polypetide isolated from the Sargasso Sea
MGSDSDLKTLKPAVAILDQFGISNEVRILSAHRTPKEMMDFAQMAESNGFGVIIAGAGGAAHLPGMIASLTTLPVIGVPVKSKALSGIDSMYSILQMPSGIPVATVAIEGGLNAGLLATQILAINNTELKNKLNAYRCELHDLVVKKDHTLKEIGAVTYLEKM

SEQ ID NO: 147817 - protein, 164 aa, Unknown
  Bacterial polypetide isolated from the Sargasso Sea
MTSKKALIGVIMGSDSDWKTLEAATKVCEDFSVPYEAHVVSAHRTPDDMFDYAKNAHKKGLKIIIAGAGGAAHLPGMVASNTPLPVIGVPIKTESLSGMDALLSIVQMPNGVPVATVAIGAARNAALLAIEILATNNQELTDKLIAYKNEIADESRKKDKLIKK

SEQ ID NO: 147818 - protein, 178 aa, Unknown
  Bacterial polypetide isolated from the Sargasso Sea
MSELNSKEIYKIAVVMGSDSDLNTLKPAIDILREFRINTEVCILSAHRTPIEMMEYAKNAESENIKVIIAGAGGAAHLPGMLASITCIPVIGVPVESKTLKGIDSLLSIVQMPSGIPVATVAINGGQNAGLLAIGMVSLFDESIKKNLKEFRENLHTQVRNKNNKLSTIGPDNYLQNK

SEQ ID NO: 147819 - protein, 175 aa, Unknown
  Bacterial polypetide isolated from the Sargasso Sea
MNSKEIYKIAVVMGSDSDLNTLKPAIDILKEFGIKTEVCILSAHRTPIEMMEYAKNAELENIKVIIAGAGGAAHLPGMLASITCLPVIGVPVESKTLKGIDSLLSIVQMPAGIPVATVAINGGQNAGLLAIEMISLFDESIKKSLKEFRENLHTQVRNKNNKLSTIGPDNYLQNK

SEQ ID NO: 147820 - protein, 175 aa, Unknown
  Bacterial polypetide isolated from the Sargasso Sea
MEPIFRSTFYFLFIINLIFAESADIGNTIPDLKIRLLDGTTTTIHELVDDGPLMIDFWATWCVPCKKLMRYLDQYHQDYSSDGFKVLMINTDTPRSMGKVKSYVRAQDYKFYIGMDPNKTISKKLNGMVMPTMILVDKGGEVKWRHQGYISGEEIEVNNQIKQLLENNLEEIFEG

SEQ ID NO: 147821 - protein, 151 aa, Unknown
  Bacterial polypetide isolated from the Sargasso Sea
MSKYQPLFTTIHISGGDEMMKSSKLKKNTTKILGVSILTSMNNKQTKKYYNQSNISTLVKKFAMEAKKNKLDGVVCSPNEIKYVRKNVGKKFIIVTPGIRIDEKVKSDDQKRIQTPRKAIDLGADYLVIGRPITMSKHPLKVLKEINNTLS

SEQ ID NO: 147822 - protein, 156 aa, Unknown
  Bacterial polypetide isolated from the Sargasso Sea
MIIVAVDEIDFKKATSLIDNLDPKKCLVKIGSVSFNSIGHEIISYTAKKGFDIFLDLKLHDIPHTVEKTIKGLSVLPIKILTIHTSGGKDMMIAAMKAAYGTGIKIFGVTTLTSLSDNDTDIIFQRSASEQVSAMLDLAEIAGIDGVVCSPHELEL

SEQ ID NO: 147823 - protein, 92 aa, Unknown
  Bacterial polypetide isolated from the Sargasso Sea
MLIAADIGNTNIVIGFFKDGNFLFSRRLHTGPPQSVDEYEMLLRGMLFAFNIDLDTAESGVMASVVPKLTGVFIELLKRIIGKKPLIVDHAL

SEQ ID NO: 147824 - protein, 235 aa, Unknown
  Bacterial polypetide isolated from the Sargasso Sea
MKKFKAFIAFDSRTNSENIKIIKKLSPYVYGFKVGYSAYYNKDSEKLLYEIKKRKSKLFLDLKLHDIPNTVSNAIKSLSKDNPDYLTVHISGGKSMLEQALKTINKKKLKTKLLGVTLLTSLDNKDSKIIYSDKNANSVVKKLANIANSSKIFGIICSGKDLKDLMRFKNLLKITPGVKMFKRKDDQKRIAYVHDAINDGADYVVIGRELINKKDPIALLKKYYEENQNQNLWTN

SEQ ID NO: 147825 - protein, 130 aa, Unknown
  Bacterial polypetide isolated from the Sargasso Sea
MCDKKLIVALDFNNMDELKDIIKSLDPKKCLVKVGLELYISEGKQVLEFLSEEGFEIFLDLKLHDIPNTVKKSIQELVSLPISMLTIHTSGGKEMMKSAMDAVKGSKIKIFGVTILTSLSDKDSQNIFWK

SEQ ID NO: 147826 - protein, 89 aa, Unknown
  Bacterial polypetide isolated from the Sargasso Sea
MKSKKIIVALDSKNLNKTIKLVKSLKKDVYAFKIGYQFFFNFGLNGYKKIYSICPKIFLDLKLHDIPNTVTKGLEALIKMKPLFTTIHI

SEQ ID NO: 147827 - protein, 167 aa, Unknown
  Bacterial polypetide isolated from the Sargasso Sea
VVERLKKHGWKVLLDLKLHDIPNTVKEATKSAANLGADFLTIHIASSGEALMEASSNKGNTLQILGVSSALTSRAMSSSVSEDVNKEFKEAKYCGVDGVICPASEISKTKEIFDLIVTPGIRLKNDDKNDQKNVATPNFAINEGANYIVMGRTIRNNLDYIINDLQL

SEQ ID NO: 147828 - protein, 180 aa, Unknown
  Bacterial polypetide isolated from the Sargasso Sea
KKLEIPIFIDLKLYDIPNTAKQALSNILQFEPEYTTLHLSGGSEMLIDCVNAKNELYSRTKLIGVTMLTSFNDALISEIGIEKSVNENVKQLTQLAVNCCMDGIVCSPLEISEVKKTHESKLQIISPGIRGKENVANDQKRTLSAKEAIEAGADVLVVGRPITDAKDPAKAAESIYSEIT

SEQ ID NO: 147829 - protein, 215 aa, Unknown
  Bacterial polypetide isolated from the Sargasso Sea
MSNERLIVALDLPNVDLAESLVYQLGNCVSFYKIGLSLIPIGGFSLVEKLKKQGKKVFLDLKLFDIASTVENSVKNLADLDVDFLTVHGDPHVIRAAVKGRRDNKLKVLAITFLTNVDRLDLDNALVQSGDLTDLVVERAKKAFIEGADGVIASAHESLRIRSLKESEGKLIVTPGIRRSKDSDKDDQKRVCSPRVAIQNGSDFIVIGRPIHQSP

SEQ ID NO: 147830 - protein, 110 aa, Unknown
  Bacterial polypetide isolated from the Sargasso Sea
MSKKIIVAIDETNLTILNKILNSLDNNLCMVKIGSVAFNSIGLDALKCAAEKGFDIFLDLKLHDIPNTVYKSVMGLANLPVKMMTVHISGGIQMLKASKEALSGSDIKIL

SEQ ID NO: 147831 - protein, 224 aa, Unknown
  Bacterial polypetide isolated from the Sargasso Sea
MKSKIFIAVDTTSVSKAKKIIKNTQTSKLKIGYKFGLEFLNSKNGRKFVSKLKNQITFGDFKFSDIPNTCVSAVKAIKDLNFNYCTMHISSGLEALKAVKKVSGKTKIVGVSILTSLDNKALKEIGYSKDVKKLVVHHAKLAQKAKLDAIVCSAQEVKIVRKVFKKEIITPGIRFNSDKGDQKRVLTPKAAFKSGSDWLVIGRPIVKKGNIKNNVKKLIDHLNK

SEQ ID NO: 147832 - protein, 192 aa, Unknown
  Bacterial polypetide isolated from the Sargasso Sea
MIIVAIDENNFKKASELINKLDPKKCMVKIGSVAFNSIGHEIIYYAADHGFKIFLDLKLHDIPNTVKKSILGLASLPIRMLTIHTSGGKDMMMAAMEATSDTQIKVFGVTALTSLSDDEIDEIFQRTSSEHVNAMLDLAESAGIDGIVCSPHELKLVKKRGTLLSITPGIRLQDSNDDQKRVMTPKEAINLG

SEQ ID NO: 147833 - protein, 208 aa, Unknown
  Bacterial polypetide isolated from the Sargasso Sea
KENNILVIMDAKRGDIGSTSFAYAKAWLGKNSPFGANALTVNPWMGLETLLPFIEVANKNKNGVFILLKTSNSGSKDIQDLLVNNRAVFLHLAKILQKETLTNLGKFGYSDIGVVVGATHPKEAKLIRKILPKSLFLIPGFGAQGASANEALSGLILKNRIYEGGLINSSRSILFPKNTHDLNHSLKWKEKIVSALKKTTDELKFKAG

SEQ ID NO: 147834 - protein, 210 aa, Unknown
  Bacterial polypetide isolated from the Sargasso Sea
MLIAADIGNTNIVIGFFKEGNFLFSRRLHTGPPQSVDEYEMLLRGMLFAFNGDLDTTESGVVASVVPELTGVFIELLKRITGQKPLIVDHALKLGIRIETDFPEKVGHDRIANAVAAYHQHRTSLIVIDCGTATTFDVIRSDGVFAGGLICPGMLISAEALYSRAAQLFQVNLDKPEQLIGKNTTESMQSGIFNGYCAMIEALVVKITED

SEQ ID NO: 147835 - protein, 114 aa, Unknown
  Bacterial polypetide isolated from the Sargasso Sea
IREVDSDKELYVVITMSHPKGGDFFRIEDFCSLALEAGATGVVAPATRPEDVAKVRSLVGNLKIISPGVGAQGGSSKDTLRAGADYIIVGRGIYQSDNPAEAAEKYCNDCSIDD

SEQ ID NO: 147836 - protein, 232 aa, Unknown
  Bacterial polypetide isolated from the Sargasso Sea
MSIKNSDRLIFAVDVPEVEQAKDLVTQLGSSVDFFKIGMELMMTGDYFELLDWLVERDKKVFVDLKLFDVPATVSKAIKRLSKRGAYFTTIHGNQSMMEAAASEKGDLKVLAVTALTSLDRGDLDDLGFDCPVEDLVISRARRAYESGVDGIVASGLELPSIRKALEDKILIVTPGIRPVENRQTDDQKRVVTVERAFQDGADYIVVGRPIQNADNPRKAAELIQESISNSL

SEQ ID NO: 147837 - protein, 103 aa, Unknown
  Bacterial polypetide isolated from the Sargasso Sea
MIIVAIDETNFERASEVIESLDPKKCMVKIGSVAFNAIGHKIIRFAAEKGFEIFLDLKLHDIPNTVKKSIKGLSSLPIKMLTIHTSGGKDKMKAAIEAASGTQ

SEQ ID NO: 147838 - protein, 241 aa, Unknown
  Bacterial polypetide isolated from the Sargasso Sea
MNNIDNPSEKIIIALDGMDKNNVINLLEKIPEIVWVKVGLELFVSEGPDVLSILRDKEKKIFLDLKFHDIPTTVARACFAASQTGAEFISLHTCAGIKALKMANEAAQEGAAKVNLQPPKLLGITILTSWTSESFASDLLINQSIDQRVKHLAEIASKTGLGGCVCSPREVQFLRKVYPKEFELVTPGIRSLGSDINDQSRVSDASEALKMGASKLVIGRAITQSNHPANMFKSFCNKLLI

SEQ ID NO: 147839 - protein, 77 aa, Unknown
  Bacterial polypetide isolated from the Sargasso Sea
MIIVAIDEINFKKASNVIDNLDSEKCMVKIGSVAFNSLGHKIIDYAAQKSFDIFLDLKLHDIPNTVKKTIEDLSSLQ

SEQ ID NO: 147840 - protein, 79 aa, Unknown
  Bacterial polypetide isolated from the Sargasso Sea
MNLKKIIIALDSDNINETLKIIKNLKNDAFAFKIGYEFFLNFGISGYNIIKKENVNIFLDLKLHDIPNTVAKGIKAITK

SEQ ID NO: 147841 - protein, 224 aa, Unknown
  Bacterial polypetide isolated from the Sargasso Sea
MSIKNSDRLIFAVDVPEVEQAKDLIIQLGPSVDFFKIGMELMMTGDYFELLDWLVERDKKVFVDLKLFDVPATVSKAIKRLSKRGAYFTTIHGNQSMMEAAAAEKGDLKVLAVTALTSLDRGDLDDLGFDCAVEDLVISRARRAYESGVDGIVASGLELPSIRKAVEDKILIVTPGIRPVENRQTDDQKRVVTVERAFQDGADYIVVGRPIQNADNPREAAELI

SEQ ID NO: 147842 - protein, 165 aa, Unknown
  Bacterial polypetide isolated from the Sargasso Sea
IPNTVKQALSNILQFQPEYTTLHLSGGPEMLTECVKAKNELHSRTKLIGVTMLTSFNDATISEIGIEKSVNENVKQLTQLAVSCGMDGIVCSPLEISEVKNTHKSKLQIISPGIRGKENAVNDQKRTLSAKEAIDAGADILVVGRPITDAKDPAKAAENIYSEIT

SEQ ID NO: 147843 - protein, 76 aa, Unknown
  Bacterial polypetide isolated from the Sargasso Sea
MNTKRFIFCALDFTDLKKTLDFTETIKNNVGGIKLGLEFFSKNGPQGVEKMKKFGLPIFLDLKLHDIPNTVKQSLK

SEQ ID NO: 147844 - protein, 118 aa, Unknown
  Bacterial polypetide isolated from the Sargasso Sea
MINNRFNSEDKIILAIDGLDVSQAKLLLEKCPNIKWVKVGLELFVREGPKVIEILKGLNKKIFLDLKFHDIPNTMRAACFQVSKLGVDIISIHASAGLKALKDSKKASLEGATSVSLK

SEQ ID NO: 147845 - protein, 243 aa, Unknown
  Bacterial polypetide isolated from the Sargasso Sea
MNVVADIGNTQIKIAIERKNGISRVKAFQSDDFTCIKKYLKSLDYDNKPYLFYSSVLGANYDKKLIKTLKSFFEKITTFKSTRSLLSTTNSYKKASSLGSDRWAQIVAAKNIFKKDCIIVSCGSAISIDCVTKNGTHKGGMLMSGAEKYINCFSDIHNLKNISLTQTKKNNLLQTDTAEQINVGYRTMISASVHKVYEEFKKNTKSKPAVIVSGGYARQIASYIEVNTSVEPFFVLKSLAFIK

SEQ ID NO: 147846 - protein, 93 aa, Unknown
  Bacterial polypetide isolated from the Sargasso Sea
MDRIYVALDTVSLQEAQSLARLLKGKVGGVKLGKEFFSAHGPQGVSIISKEGLPIFLDLKFHDIPNTVEAAIKASVPLNLSMLNVHVSGGLEM

SEQ ID NO: 147847 - protein, 119 aa, Unknown
  Bacterial polypetide isolated from the Sargasso Sea
MNNRFNSEDKIILAIDGLDVSQAKLLLEKCPNIKWVKVGLELFVREGPRVIDILKGLNKKIFLDLKFHDIPNTMRAACFQVSKLGVDIISIHASAGLKALKDSKNASLEGATLSQCRTF

SEQ ID NO: 147848 - protein, 180 aa, Unknown
  Bacterial polypetide isolated from the Sargasso Sea
EKFKGNFFLDLKLNDISATAKAAINSIKDLKRCRYITIHANGGLEMMRAVKKEAKKTNKNLKILGVTVLTSLNNRSLKETGHTKNINQIVRKQASLIKKSGCHGIVCSAQEAKFIKMKYKNLFVVTPGIRLPGDKKDDQSRVVTPFDAFVKNQADAIVMGRSLTKNNIKKNIQNLINHIY

SEQ ID NO: 147849 - protein, 225 aa, Unknown
  Bacterial polypetide isolated from the Sargasso Sea
DLKSNTQNITLVKKLYPHVYGFKVGYRSFYNRRLKELISEIKRSKCKLFLDLKLHDIPNTVSSAIDSLSTINPDYLTLHISGGEEMMKAALKSIKKNKLKTKILGVTLLTSLDGKDSKKIFKEGNTKELVKKFTEIANNVNIHGLICSGDDLRVLGKFNKLIKITPGVKMFARNDDQKRVTFAHNALQDGASFVVIGRELIESKKPLEILKKYGEQYKNKNLWTK

SEQ ID NO: 147850 - protein, 235 aa, Unknown
  Bacterial polypetide isolated from the Sargasso Sea
MKKFKSFIALDLKSNSNNINIVNKLYRHVYGFKVGYRSFYSKRSNELISEIKKKKSKLFLDLKLHDIPNTVISAIDSLSKINPDFLTLHISGGNEMIKAAVDCVKKNKLKTKVLGVTLLTSLDAKDSKKIYNEKNTKKLVRKFAETANKYKIHGLICSGEELIALKKYNKLIKITPGVKLFSRKDDQKRVTFAHNALQSGASFVVIGRELIESKEPVSLLEKYAEQYKDKDLWTK

SEQ ID NO: 147851 - protein, 155 aa, Unknown
  Bacterial polypetide isolated from the Sargasso Sea
KSAADLGIWMVNVHASGGRAMLEASKKALEGFDQPPLLIAVTVLTSLSEDSLNEVGIKDLSEQVLRLAELTNECDLNGVVCASTDVKAIKNIFGKDFITVTPGIRPNDSKVNDQNRISTPSEAVKNGSDYLVIGRPITESENPTKALEKIIKEIL

SEQ ID NO: 147852 - protein, 158 aa, Unknown
  Bacterial polypetide isolated from the Sargasso Sea
SANQLGPFMLNVHASGGCAMMKAAVRANSESRKPSSILLAVTLLTSLSSDDLRDIGMKANVGQQVVRLARLAQDCGMDGVVCSPLEIDLIREACGQDFILVVPGVRPTWAAAGDQKRIATPSEAIARGADYLVIGRPITAADDPVAAAVRIGEELAVV

SEQ ID NO: 147853 - protein, 84 aa, Unknown
  Bacterial polypetide isolated from the Sargasso Sea
MTTSINSKDRLIFALDVPDKREAQRLVKLLHDSVGCFKVGLQLFVQEGPDILKLIKDHSTADIFLDLKLHDIPATVRGALKSAE

SEQ ID NO: 147854 - protein, 232 aa, Unknown
  Bacterial polypetide isolated from the Sargasso Sea
MSIKNSDRLIFAVDVPEVEQAKDLVTQLGSSVDFFKIGMELMMTGDYFELLDWLVERDKKVFVDLKLFDVPATVSKAIKRLSKRGAYFTTIHGNQSMMEAAASEKGDLKVLAVTALTSLDRGDLDDLGFDCAVEDLVISRARRAYESGVDGIVASGLELPSIRKALEDKILIVTPGIRPVENRQTDDQKRVVTVEQAFQDGADYIVVGRPIQNADNPRKAAELIQESISNSL

SEQ ID NO: 147855 - protein, 94 aa, Unknown
  Bacterial polypetide isolated from the Sargasso Sea
MLSKKLIVALDFSSFQEVNEFIKYIDPSKCLVKVGLQLYTSCGNKVIELLSEKGFEIFLDLKLHDIPNTVKKTINEISSLSVVMTTIHLSGEKR

SEQ ID NO: 147856 - protein, 112 aa, Unknown
  Bacterial polypetide isolated from the Sargasso Sea
MESKNRIFVALDTPDLEYALALSKDLLGFIGGVKLGKEFFTANGLDGVKKIAKSGMPIFLDLKFHDIPNTVAGAVKSSLQVNPSIITIHASGGRAMLEAAANMVEQKPAPKP

SEQ ID NO: 147857 - protein, 163 aa, Unknown
  Bacterial polypetide isolated from the Sargasso Sea
MNNRFNSEDKIILAIDGLDLSQAKLLLEKCPNIKWVKVGLELFVREGPRVIEILKGFNKKIFLDLKFHDIPNTMLAACFQVSKLGVDIISIHASAGLKALKDSKKASLEGATSVRVKPPLVVGITVLTSFSLKDFQTDLDRNNSIEENVLRLAKLSFDAGLDG

SEQ ID NO: 147858 - protein, 114 aa, Unknown
  Bacterial polypetide isolated from the Sargasso Sea
MNNRFNSEDKIILAIDGLDVSQAKLLLEKCPNIKWVKVGLELFVREGPRVIEILKGLNKKIFLDLKFHDIPNTMRAACFQVSKLGVDIISIHASAGLKALKDSKKASLEGATSV

SEQ ID NO: 147859 - protein, 126 aa, Unknown
  Bacterial polypetide isolated from the Sargasso Sea
MTNKVIVALDNKNLKQIIALVKKTKSEAFGFKIGKEFFYNYGIEGYKKIYKLSPNIFLDLKLHDIPNTVEKALKAIIKLNPLFTTIHISGGDDMQKTSSKIKRNRTKILGVTILTSLNSVQTKKYF

SEQ ID NO: 147860 - protein, 157 aa, Unknown
  Bacterial polypetide isolated from the Sargasso Sea
MNLKKIIIALDSDNFNETLSIVKNLKNDAFAFKIGYEFFLNFGISGYKAIKKENANIFLDLKLHDIPNTVANGIKAISKLEPYFTTIHLSGGDEMQKISSYFKMNTKILGVSILTSLDSKQTKKYYNNNVEEIVSNFAKNALINKLDGIVCSPKEIT

SEQ ID NO: 147861 - protein, 150 aa, Unknown
  Bacterial polypetide isolated from the Sargasso Sea
NTVANSVRKISNFNVSLTTIHLNGGKDMIEAASSEKGNIKILGVSILTSLSKSDIFEITHTEFDAYFNNLISMASNTNIDGVVCSPNELIKLKNFKKLKVVPGIRNDISNDDQKRVMSSMEAYEKGADYIVVGRPITKSEDPRKALELFL

SEQ ID NO: 147862 - protein, 251 aa, Unknown
  Bacterial polypetide isolated from the Sargasso Sea
FKKTFLCLGLDTDIDKIPKHLLNSQDPVFDFNKSLIDRLSSKIVAVKINTAFYESRGKDGWSSLEKSIDYIKSNHPDLFTIADAKRADIGNTSEMYAKAFFEKMNFDSITLSPYMGEDSVREFLKYDDKYAILLALTSNHGANDFQMPNDLFLDVISKSQNWNNSQKLMYVVGATKSDYLLKIRDIVKDNFLLIPGIGTQGGNLQQTIKNSTKYNKRILINMSRAIIYASNDFKYLDAAEKVIDDFNLKSF

SEQ ID NO: 147863 - protein, 224 aa, Unknown
  Bacterial polypetide isolated from the Sargasso Sea
MKKKSKLIFVACDTSNINQVKKIINNIKNDELKIIPKFGLQFFYSKNGRSFLKKIKRDFWLDVKISDIPQTAFSAIESLKDLKKCKYITVHASGGLEMLKAVKKKVKKINNNIKILGVTILTSLNNKSLKEIGYTDNVDKIVLKQTNLIVKSGCDGVVCSAKEARLIRKKYKNLFIVTPGIRLPGDSKNDQSRVVTPYEALVKNQVSGIVIGRSLILGNIKKNI

SEQ ID NO: 147864 - protein, 211 aa, Unknown
  Bacterial polypetide isolated from the Sargasso Sea
KDLVTQLGPSVDFFKIGMELMMTGDYFELLDWLVERDKKVFVDLKLFDVPATVSKAIKRLSKRGAYFTTIHGNQSMMEAAAAEKGDLKVLAVTALTSLDRGDLDDLGFDCAVEDLVISRAKRAYESGVDGIVASGLELPSIRKAVEDKILIVTPGIRPVENRQTDDQKRVVTVERAFQYGADYIVVGRPIQNADNPREAAELIQESISNSI

SEQ ID NO: 147865 - protein, 186 aa, Unknown
  Bacterial polypetide isolated from the Sargasso Sea
VSRGCGCFLDLKFHDIPFTMAGACRRAAALGAELITVHACAGSEALQAAQAAAVEGAQSAGLATPTLLAVTVLTSWEEQRLQRELAIAQGIGERVPALAQLSATVGIGGCVCSPLEAAALRAQHPEPFALVTPGIRHQGVAVGDQARVMGPAEAIAAGASQLVIGRPITKAGDPSAAFALCCGELV

SEQ ID NO: 147866 - protein, 118 aa, Unknown
  Bacterial polypetide isolated from the Sargasso Sea
LKILLVTVLTSISNSSIKKIGHTKSIKELVKKQALLAKTCGCHGIVCAGPDLKSVKKIFKGEIVTPGIRLKGDSAGDQKRVIGPKEAFKNGSTALVMGRSIIKGNIKNNISRLIKELK

SEQ ID NO: 147867 - protein, 74 aa, Unknown
  Bacterial polypetide isolated from the Sargasso Sea
TNIDGVVCSPNELIKLKNFKKLKVVPGIRNDISNDDQKRVMSSTEAYEKGADYIVVGRPITKSEDPRKALELFL

SEQ ID NO: 147868 - protein, 230 aa, Unknown
  Bacterial polypetide isolated from the Sargasso Sea
MKHKNIFIACDTSNLSEIKKIIKQTQTNKLKVIPKFGLQFFYSKNGRKFLENFKKDFWLDLKINDIPQTALSALDSLKDLKKCKYITVHANGGFEMLKAIKKKAKSINKNLKVLGVTILTSLNKKSLKEIGHTKSVEQLVLKQAGLIKKSGCDGIVCSAQEAKLVRKKYKNLFIVTPGIRLPGDSLNDQSRIMTPKDAFKNKVSGIVIGRSLIKGNIKKNTQRLIDHLNK

SEQ ID NO: 147869 - protein, 114 aa, Unknown
  Bacterial polypetide isolated from the Sargasso Sea
MDRGDLDDLGFDCAVEDLVISRARRAYESGVDGIVASGLELPSIRKSLKDKILIVTPGIRPVENRQTDDQKRVVTVERAFQDGADYIVVGRPIQNADNPREAAELIQESISNSI

SEQ ID NO: 147870 - protein, 189 aa, Unknown
  Bacterial polypetide isolated from the Sargasso Sea
MIIVAIDENNFKKASELINKLDPKKCMVKIGSVAFNSIGHEIIYYAADHGFKIFLDLKLHDIPNTVKKSIQGLASLPIKMLTIHTSGGKEMMLAAMEATSDTQIKVFGVTALTSLSDDEIDEIFQRTSSEQVNAMLDLAESAGIDGIVCSPHELKLVKKRGTLLSITPGIRLQDSNDDQKRVMTPKEAI

SEQ ID NO: 147871 - protein, 97 aa, Unknown
  Bacterial polypetide isolated from the Sargasso Sea
MKNRFNSEDKIILAIDGLDVSQAKLLLEKCPNIKWVKVGLELFVREGPSVIEILKGLNKRIFLDLKFHDIPNTMRAACFQVSKLGVDIISIHASAGL

SEQ ID NO: 147872 - protein, 104 aa, Unknown
  Bacterial polypetide isolated from the Sargasso Sea
MIGNLLCLYYFNLLMKGKTMNFVGTTTYEGTKKDADELYSIFKDDLAKCTSSFEWAHIREGKMIFIANVTDEEKFYALFEDQRSKDWNAKFNAKDEAWKLEKIM

SEQ ID NO: 147873 - protein, 104 aa, Unknown; identical to SEQ ID NO: 147872
  Bacterial polypetide isolated from the Sargasso Sea

SEQ ID NO: 147874 - protein, 301 aa, Unknown
  Bacterial polypetide isolated from the Sargasso Sea
CGSADMLEQLAERVPGANVTLRINPGFGHGHSQKTNTGGEGSKHGIWHETIPDVLQRAEWAGLAVNGLHMHIGSGADLDHLATVAESLEKTAHDIGRSLTTISAGGGLPVPYQKHERRADLAEYFKLWDATRKRLEDSFGHRIRLEIEPGRYLTAESGILVTEVRAVKRQGSKKYLLVDAGFHTLARPVLYGSYHPMSLCPTSTTPPHELEAVAIGGPLCESGDIFTQKEGGFVSTRDLPPARVGDLLIIEVAGAYGFVMASNYNSKPFPAEVLIDGGTSQLVRARQTAEELFSGESLPQE

SEQ ID NO: 147875 - protein, 242 aa, Unknown
  Bacterial polypetide isolated from the Sargasso Sea
MNNRFNSEDKIILAIDGLDVSQAKLLLEKCPNIKWVKVGLELFVREGPRVIEILKGLNKKIFLDLKFHDIPNTMRAACFQVSKLGVDIISIHASAGLKALKDSKKASLEGATSVSVKPPLVIGITVLTSFSLKDFQTDLDRNNSIEENVLRLAKLSFDAGLDGCVCSPWEVKMLRSIYKDNFELITPGIRLNIDNKDDQNRIMTPYEAIDNGASKLVIGRSISKAIDPNKSLIEIFKSIESD

SEQ ID NO: 147876 - protein, 220 aa, Unknown
  Bacterial polypetide isolated from the Sargasso Sea
MIIVAIDEITFEKASEIINNLDPKKCIVKIGSVAFNSIGHKIISYAANKDFDIFLDLKLHDIPNTVKKSIQGLATLPIKMLTIHTSGGKDMMMAAMEAASRTKIKVFGVTALTSLSDDETNEIFQRTSSEQVNVMLDLAESAGIDGIVCSPHELKLVKKRGTLLSITPGIRLKDSNDDQKRVMTPKEAIKLGADFLVIGRPITEAENIGEALNEIFQNIS

SEQ ID NO: 147877 - protein, 232 aa, Unknown
  Bacterial polypetide isolated from the Sargasso Sea
MSIKNSDRLIFAVDVPEVEQAKDLVTQLGPSVDFFKIGMELMMTGDYFELLDWLVERDKKVFVDLKLFDVPATVSKAIKRLSKRGAYFTTIHGNQSMMEAAAAEKGDLKVLAVTALTSLDRGDLDDLGFDCAVEDLVISRARRAYESGVDGIVASGLELPSIRKAVEDKILIVTPGIRPVENRQTDDQKRVVTVERAFQDGADYIVVGRPIQNADNPREAAELIQESISNSI

SEQ ID NO: 147878 - protein, 232 aa, Unknown; identical to SEQ ID NO: 147877
  Bacterial polypetide isolated from the Sargasso Sea

SEQ ID NO: 147879 - protein, 232 aa, Unknown
  Bacterial polypetide isolated from the Sargasso Sea
MSIKNSDRLIFAVDVPEMEQAKDLVTQLGSSVDFFKIGMELMMTGDYFELLDWLVERDKKVFVDLKLFDVPATVSKAIKRLSKRGAYFTTIHGNQSMMEAAASEKGDLKVLAVTALTSLDRGDLDDLGFDCAVEDLVISRARRAYESGVDGIVASGLELPSIRKALEDKILIVTPGIRPVENRQTDDQKRVVTVEQAFQDGADYIVVGRPIQNADNPRKAAELIQESISNSL

SEQ ID NO: 147880 - protein, 235 aa, Unknown
  Bacterial polypetide isolated from the Sargasso Sea
MKKFKSFIALDLKSNTQNITLVKKLYPHVYGFKVGYRSFYNRRLKELISEIKRSKCKLFLDLKLHDIPNTVSSAIDSLSTINPDYLTLHISGGEEMMKAALKSIKKNKLKTKILGVTLLTSLDGKDSKKIFKEGNTKELVKKFTEIANNVNIHGLICSGDDLRVLGKFNKLIKITPGVKMFARNDDQKRVAFAHNALQNGASFVVIGRELIENKKPLELLKKYGEQHKNKNLWTK

SEQ ID NO: 147881 - protein, 235 aa, Unknown
  Bacterial polypetide isolated from the Sargasso Sea
VAAFKPQVAFFEEWGPEGLSLLAKISKFAKDLDIPIIMDAKRGDIGSTSVAYANAWLGDNSHFYADALTVNPWMGIDTIRPFIEVAKKESKGVFILLKTSNPGSKDIQSLEVNGESIFLKISKLIKENLPLNLGKSGYSNIGVVVGATKPKEAELIRQILPSHLFLIPGYGAQGGSAKDAFSGLILSKNIYEGGLINSSRAILFPEKSKKYNSIYEWRESVIMALNKAKNDLMIN

SEQ ID NO: 147882 - protein, 232 aa, Unknown
  Bacterial polypetide isolated from the Sargasso Sea
MSIKNSDRLIFAVDVPEVEQAKDLVTQLGSSVDFFKIGMELMMTGDYFELLDWLVERDKKVFVDLKLFDVPATVSKAIKRLSKRGAYFTTIHGNQSMMEAAASEKGDLKVLAVTALTSLDRGDLDDLGFDCAVEDLVISRARRAYESGVDGIVASGLELPSIRKALEDKILIVTPGIRPVENQQTDDQKRVVTVERAFQDGADYIVVGRPIQNADNPRKAAELIQESISNSL

SEQ ID NO: 147883 - protein, 221 aa, Unknown
  Bacterial polypetide isolated from the Sargasso Sea
MIDAKKIIVALDYNNIEDALKFIVDIDPSLCRLKIGKELFTKYGPKTILELHDKGFEVFLDLKFHDIPTTVYKACISALSLNVWMLNIHLSGGCEMAIAAMNAKKDCQSDSKVIGVTALTSLTDDDCIRIYGCKRSEQLKRLKDIGLDANVDGFVCSPYDINILRTDNKIFVTPGIRTDGNANDHHKVITPQEALKLGSNYLVIGRSVTESSNPNKEIKRI

SEQ ID NO: 147884 - protein, 101 aa, Unknown
  Bacterial polypetide isolated from the Sargasso Sea
MIIVAIDENNFKKASELINKLDPKKCMVKIGSVAFNSIGHEIIYYAAEHGFKIFLDLKLHDIPNTVKKSIQGLSSLPIKMLTIHTSGGKDMMMAAMEAASR

SEQ ID NO: 147885 - protein, 195 aa, Unknown
  Bacterial polypetide isolated from the Sargasso Sea
VVAQLREQGLRFFLDLKFHDIPATMVGACQRAAALGAELITVHACAGSEALKAAQAAAVEGAQQAGLNLPTLLAVTVLTSWEEQRLQRELAIQQSIGERVPALAQLSATAGIGGCVCSPLEAAALRGQQPEPFALVTPGIRPQGAAVGDQARVMGPAEAIAAGASQLVIGRPITRAEDPSAAFAACCAQLPGSID

SEQ ID NO: 147886 - protein, 232 aa, Unknown
  Bacterial polypetide isolated from the Sargasso Sea
MSIKNSDRLIFAVDVPEVEQAKDLVNQLGQSVDFFKIGMELMMTGDYFELLDWLVERDKKVFVDLKLFDVPATVSKAIKRLSKRGAYFTTIHGNQSMMEAAAAEKGDLKLLAVTALTSLDRGDLDDLGFDCAVEDLVISRAKRAYESGVDGIVASGLELPSIRKAVEDKILIVTPGIRPVENRQTDDQKRVVTVERAFQDGADYIVVGRPIQNADNPREAAELIQESISNSI

SEQ ID NO: 147887 - protein, 132 aa, Unknown
  Bacterial polypetide isolated from the Sargasso Sea
MNNKIIVALDSNNLKKIKSLVSKLRSEVYAFKIGYEFFLNFGINGYNEIKKICPNIFLDLKLHDIPNTVEKGIKAIEKLSPKFTTIHISGGDEMQKSTHSKKNRKLKILGVSILTSLNSLQTKKYYNEANVE

SEQ ID NO: 147888 - protein, 258 aa, Unknown
  Bacterial polypetide isolated from the Sargasso Sea
MLIAADIGNTNIVIGFFKDGNFLFSRRLHTRPPQSVDEYEMLLRGMLFAFNEDLDTAESGVLASVVPELTGVFVELFERITGQKPLIVDHALKLGIRIETDFPEKVGHDRIANAVAAYHQHGTSLIVIDCGTATTFDVIRSDGVFEGGLICPGMLISAEALYSRAAQLFQVNLDKPEQLIGKNTTESMQSGIFNGYCAMIEALVVKITEDLRKRNQPEPKVIITGGHATKISEYLPDAAIEENLTLTGLSLIHLLNQK

SEQ ID NO: 147889 - protein, 213 aa, Unknown
  Bacterial polypetide isolated from the Sargasso Sea
EIDLIKASIIIDNLDPEKCMVKIGSISFNSIGKDIIYYAAEKGFDIFLDLKLHDIPTTVKKTIQGLSLLPISMLTIHTSGGKDMMLSAMEAVKNSKIKVFGVTALTSLSDEDTLSIFKRTTSDQVNAMLDIAELAGIDGVVCSPHELKLVNSRQSLLAITPGIRIKDLKDDQKRVMTPKEAIKMGSDFIVIGRPITLSSDISKSLNEVYESIQ

SEQ ID NO: 147890 - protein, 106 aa, Unknown
  Bacterial polypetide isolated from the Sargasso Sea
MIIVAIDETTFEKAADVINKLDPKICMVKIGSVAFNSIGHKIILYAANKDFDIFLDLKLHDIPNTVKKSIQGLASLPIKMLTIHTSGGKDIMMAAMEATSGTQIKV

SEQ ID NO: 147891 - protein, 224 aa, Unknown
  Bacterial polypetide isolated from the Sargasso Sea
MKSKIFIACDTTSVSKVKKIIKNTQTSKLKIGYKFGLEFLNSKNGRKFLSKLNNQITFGDYKFSDIPNTCFSAVKAIKDLKFNYYTMHISSGLEALKAAKKVSGKTKIIGISILTSLDNKALKEIGYNKDVKKLVVHQAKLAQKAKLDAIVCSAQEVKIVRKVFKKEIITPGIRFNPNKDKGDQKRVLTPKEAFKNGSDWLVIGRPITKGNIKNNIKKLIDHLN

SEQ ID NO: 147892 - protein, 263 aa, Unknown
  Bacterial polypetide isolated from the Sargasso Sea
MNLNQLEENIISKKTFLCLGLDTDIEKIPKHLLSQDDPVFQFNKLLVDRLSNKIAAVKINTAFYEARGVDGWNSLEKTIKYIGDNHPDLFTIADAKRADIGNTSKMYAKAFFEKMPFHSITLSPYMGHDSVTEFLNYENKYTILLALTSNDGAVDFQLQNDLYLSVVSESQKWQNADRIMYVVGATKSDYLLKIRNISEKSFLLIPGVGSQGGDFENVILNSTQKNKRILVNISRAIIYAGNDENFLDSSEKVVDHYNSRTSF

SEQ ID NO: 147893 - protein, 235 aa, Unknown
  Bacterial polypetide isolated from the Sargasso Sea
MKKFKSFIALDLKSNTQNISIVKKLYRYVYGFKVGYRSFYNNRSNELISEIKKSKCKLFLDLKLHDIPNTVSSAIDSLSNINPDFLTLHISGGKEMMKAAVNSIKKNKLKTKILGVTLLTSLDGKDSEKIYKEGSTKKLVKKFTEIANNVNIHGLICSGDDLRVLRKFNKLIKITPGVKMFARNDDQKRVTFAHNALQDGASFVVIGRELIESKKPLELLKKYGEQYKNKNLWTK

SEQ ID NO: 147894 - protein, 258 aa, Unknown
  Bacterial polypetide isolated from the Sargasso Sea
MLIAADIGNTNIVIGFFKDGNFLFNRRLHTGPLQSVDEYEMLLRGMLFAFNEDLDTVESGVVASVVPELTGVFIELLKRITGQKPLIVDHALKLGIRIETDFPEKVGHDRIANAVAAYHQHRTSLIVIDCGTATTFDVIRSDGIFEGGLICPGMLISAEALYSRAAQLFQVNLDKPEQLIGKNTTESMQSGIFNGYCAMIEALVVKIAEDLRKRNQPKPKVIITGGHATKISEYLPDAAIEENLTLTGLSLIHLLNQK

SEQ ID NO: 147895 - protein, 242 aa, Unknown
  Bacterial polypetide isolated from the Sargasso Sea
MNNRFNSEDKIILAIDGLDVSQAKLLLEKCPNIKWVKVGLELFVREGPRIIEILKGLNKKIFLDLKFHDIPNTMRAACFQTSKLGVDIISIHASAGLKALKDSKKASLEGATSVSVKPPLVVGITVLTSFSLKDFQTDLDRNNSIEENVLRLAKLSFDAGLDGCVCSPWEVNKLRSIYKHNFELITPGIRLHIDNKDDQNRIMTPHEAIDNGASKLVIGRSISKAIDPNKALIEIFKSIDSD

SEQ ID NO: 147896 - protein, 101 aa, Unknown
  Bacterial polypetide isolated from the Sargasso Sea
MTNRIIIPLDMEYTSAVSIADKLDPNICRLKVGNQLFTSSGPKIVKTLHDKGFEIFLDLKFHDIPNTVYESVRSAANLGVWMINVHASGGSKMLDASKKAL

SEQ ID NO: 147897 - protein, 235 aa, Unknown
  Bacterial polypetide isolated from the Sargasso Sea
MKKFKSFIALDLKSITQNISIVKKLYRHVYGFKVGYRAFYNNGSNELISEIKKSKCKLFLDLKLHDIPNTVKSAIDSLSNINPDFLTLHISGGNEMMKAAVNSIKKNKLKTKILGVTLLTSLDGKDSEKIYKERNTSKLVKKFAQIANNVNIHGLICSGDDLKVLRKYNKLIKITPGVKMFARNDDQKRVTFAHNALQDGASFVVIGRELIESKKPLDLLKEYGEQNKNKNLWTK

SEQ ID NO: 147898 - protein, 135 aa, Unknown
  Bacterial polypetide isolated from the Sargasso Sea
MIIVAIDETELDQLKYIVDSLDNRKCMLKIGSVSFNSIGQASIMYASEKGFDIFLDLKLHDIPNTVKKSIESLTSLPIKMLTVHTSGGKDMMSAAMEAVSGTGIKVFGVTVLTSLSDQDTAAIFNKMSSEQVEAM

SEQ ID NO: 147899 - protein, 94 aa, Unknown
  Bacterial polypetide isolated from the Sargasso Sea
FDTHTEFDTYFNNLISIASNTNIDGVVCSPNELDKLKNFNKLKVVPGIRKDISDDDQKRVMSPIEAYKKGADFIVVGRPITKSEDPRKALELFL

SEQ ID NO: 147900 - protein, 86 aa, Unknown
  Bacterial polypetide isolated from the Sargasso Sea
MNNRFNSEDKIILAMDGLDLSQAKLLLEKCPNIKWVKVGLELFVREGPRVIEILKGLNKKIFLDLKFHDIPNTMRAACYQVSKIRG

SEQ ID NO: 147901 - protein, 99 aa, Unknown
  Bacterial polypetide isolated from the Sargasso Sea
MCLYYFNLIKKGITMNFVGTTTYEGTKKDADELYSMFKDDLAKCTSSFEWAHIREGKMIFIANVTDEEKFYALFEDQRSKDWNAKFNAKDEAWKLEKIM

SEQ ID NO: 147902 - protein, 85 aa, Unknown
  Bacterial polypetide isolated from the Sargasso Sea
MNFVGTTTYEGTKKDADELYNMFKDDLAKCTSSFEWAHIREGKMIFIANVTDEEKFYGLFEDQRSKDWNAKFNAKDEAWKLEKIM

SEQ ID NO: 147903 - protein, 147 aa, Unknown
  Bacterial polypetide isolated from the Sargasso Sea
MSVKPIFFALDGKELSEFTETLEKLKGVIYGVKVGLEMFTAEGPSSVEKLKNDGWKVFLDLKLHDIPNTVQAATVSAGNIGADYLTIHIASEKEALLAASENKTDNIKLLGVSSALTSKAMDEETSNKVEKDFIVAKESGIDGVICP

SEQ ID NO: 147904 - protein, 96 aa, Unknown
  Bacterial polypetide isolated from the Sargasso Sea
MSVKPIFFALDGKSLKEFKEQLDVLKDHIYGVKVGLELFTSEGPSCVEQLKNDGWVVFLDLKLHDIPNTVGEAAASVSNIGADYLTLHISSGERSI

SEQ ID NO: 147905 - protein, 174 aa, Unknown
  Bacterial polypetide isolated from the Sargasso Sea
MKKKLIVALDFDSAELALNFLENLDAQKCLVKVGLELFISEGWKVLDLISEKGFEIFLDLKLHDIPNTVANSVRQISNFNVALTTIHLNGGKDMIEAASSEKGNIKILGVSILTSLSENDIFEITKTEFDTYFNNLISIASNSNIDGVVCSPNELDKLKNFNKLKVVPGIRNHI

SEQ ID NO: 147906 - protein, 174 aa, Unknown
  Bacterial polypetide isolated from the Sargasso Sea
MDSKKVIVALDSSNFDKTIKLVKILKDDVYAFKIGYEFFFNFGLIGYKKVYSICPKIFLDLKLHDIPNTVKKGLKALIKIKPILTTIHISGGDEMMQSTKSEKKLTKVLGVSILTSMNNEQTNKYYNEKKISSLVKKFARAAKQNMLDGVVCSPQEIKHIRKTVGKKFIIVTPG

SEQ ID NO: 147907 - protein, 204 aa, Unknown
  Bacterial polypetide isolated from the Sargasso Sea
MIKKNKVIVALDTNSLEKAISVATLIDVDIVFKIGMEFFYSFGYEGIEKIKNIRGNIKIFLDLKLHDIPNTVCKAIIPLIEKVNPYMLTLHSTGGEVMLKKVVKVVKETSREKRPLLLGVTVLTSLDSKSLVQLGWGANIKKNVINYALLCKSAGLDGVVCSAHEIEDVRKACGENFLIVTPGIRLGKNSNDDQMRVLSPIGCL

SEQ ID NO: 147908 - protein, 182 aa, Unknown
  Bacterial polypetide isolated from the Sargasso Sea
TGARIFLDLKFHDIPNTVAGAIKAILHLQPYMLTVHLSGGYDMLMKANEIVSEYCLKNAIKKPIILGVSVLTSLDDNDFVSLGINGKVEDQVVRLAKLAEAAGLDGLVSSAKELKMIRKELGSSLILVTPGIRLMDGQVNDQKRIVTPSQAINDGANFLVIGRPITASKDPEAALEHISKVI

SEQ ID NO: 147909 - protein, 238 aa, Unknown
  Bacterial polypetide isolated from the Sargasso Sea
MSFKNKNALFCALDMKSIDQALSFTNIIKDYIDGIKIGMEAFYSMGIDGYLRLQDLNIPIFLDLKLHDIPNTVSSAIKSLIPLNPYMINVHISGGAVMLREAVSAIHESKDNRPKIVGVTILTSMNESSFEEQGLKLNIQDQVINLATLAADCGLDGVVCSPHEAGRVKSKCGSDFLTVVPGIRLEKTQSDDQKRTLTPYEAVRNGADILVVGRPLTKASDPMGVAKIIRKNIDDYES

SEQ ID NO: 147910 - protein, 231 aa, Unknown
  Bacterial polypetide isolated from the Sargasso Sea
MTNKVIVALDNKNLRQIVSIVKKTKSEAYGFKIGKEFFYNYGIEGYKKIYNLSPNIFLDLKLHDIPNTVEKALKVILKLKPLLSTIHISGGDEMQKVSLKVKKNNTKILGVTILTSLNSHQTKKYYNNQNVKQLVKKFALNAKKNNLDGIVCSPLEITTVRKAVGNEMLIVVPGIRLEKKQTNKKDDQKRILTPKQAINLGADYLVIGRPILESNNPLRTLKEINKSIIDK

SEQ ID NO: 147911 - protein, 102 aa, Unknown
  Bacterial polypetide isolated from the Sargasso Sea
VSGVTPEQQVLRLAALTEKAGLDGIVCSAQEASALREKHSDDFLLVTPGIRPVGADAGDQKRVMTPPDAMKAGVSYLVMGRPITKAEDPIAVLKAVNASING

SEQ ID NO: 147912 - protein, 122 aa, Unknown
  Bacterial polypetide isolated from the Sargasso Sea
MIGVTLLTSLDQQDLLTITRNTVSLDKYVSSLALMAKNKGLDGVVCSANEVPLVRDVCGTDFLLVTPGIRLVDEGDDQKRVVTPQDALRVGADCLVLGRPITQSPRPREVAIELLNSVKSLD

SEQ ID NO: 147913 - protein, 211 aa, Unknown
  Bacterial polypetide isolated from the Sargasso Sea
MKKINSEEKIILAIDGLDIYQAKVLLDRCPNIKWVKVGLELFTKEGPNVIKILKDLNKKIFLDLKFHDIPNTMSAACYEVSKLGVDIISVHASAGAKALIASKNASLEGAKITNVNAPYVIGITVLTSLSSKEFQIDLDRKNSIEENVVRLAKLSFDAGLDGCVCSPLEAKILRSIYKNNFELITPGIRTKIQNKDDQNRIMTPHEAISNG

SEQ ID NO: 147914 - protein, 73 aa, Unknown
  Bacterial polypetide isolated from the Sargasso Sea
MSVKPIFFALDGKELSEFTETLEKLKGVIYGVKVGLEMFTAEGPSSVEKLKNDGWKVFLDLKLHDIPNTVQAA

SEQ ID NO: 147915 - protein, 168 aa, Unknown
  Bacterial polypetide isolated from the Sargasso Sea
MKSKKIIVALDNSDLKKVKKIVSDLKSEAFAFKIGYEFFLNNGISGYKEIKKICPNIFLDLKLHDIPNTVQKGLEAIYKLKPILSTVHISGGDDMMRVTTLNRKHTKILGVTILTSLDSRQTKKYYNEKNLKILIQKFVKEAKKFKLDGVVCSPKRNKKYIRELVGKN

SEQ ID NO: 147916 - protein, 140 aa, Unknown
  Bacterial polypetide isolated from the Sargasso Sea
MKKKLIVALDFDSAELALNFLENLDPHKCLVKVGLELFISEGWKVLDLISEKGFEIFLDLKLHDIPNTVANSVKKISNFNVALTTIHLNGGKDMIEAASSEKGNIKILGVSILTSLSENDIFEITHTKFDTYFNNLISIA

SEQ ID NO: 147917 - protein, 175 aa, Unknown
  Bacterial polypetide isolated from the Sargasso Sea
MFTAEGPSSVEKLKNDGWKVFLDLKLHDIPNTVQAATVSAGNIGADYLTIHIASEKEALLAASENKTENIKLLGVSSALTSKAMDEETSNNVEKDFTVAKESGIDGVICPASEILTTKKLFDLIVTPGIRLESDSKDDQRNTTTPEKAIELGAKYIVMGRSIKNNLDYVINNLTI

SEQ ID NO: 147918 - protein, 189 aa, Unknown
  Bacterial polypetide isolated from the Sargasso Sea
MNEKKIIVALDSDNIFKTLELVEEIKEHAFAFKIGYEFFLNFGHEGYKKIQKKNVKIFLDLKLHDIPNTINNAIKAISILDPYFTTIHISGGDDMQLITNLNKKNVKVLGVSVLTSLDKKQTKKYYDSDNIEKLVEKFVRYSIENKLDGVVCSPHEIKIAKSLKNLSSNNFIIVTPGIRIDMGEDEIKK

SEQ ID NO: 147919 - protein, 161 aa, Unknown
  Bacterial polypetide isolated from the Sargasso Sea
MIIVAIDEINFENASMIINNLDPNKCMIKIGSVAFNSIGHEVIKYAAEKGFDVFLDLKLHDIPNTVKKSIQGLVSLPINMITIHVSGGKEMMKAAMDAVSGTKIKVFGVTALTSLSDEDTNIIYKRKILEQVNVMLDQAEIAGIDGIVCSPHELEIVKKRG

SEQ ID NO: 147920 - protein, 206 aa, Unknown
  Bacterial polypetide isolated from the Sargasso Sea
MIIVAIDETDFNKASSILDSLDSKKCMVKIGSIAFNSIGPDLIFFAAEKGFDVFLDLKLHDIPNTVKKSIQGLSSLPIKMLTVHTSGGIDMMEAAMEAVAGTDIKVFGVTALTSLNDEDTNNIYQRNASDHVNAMLDLAESAAIDGVVCSPHELKLVKKRGTLLSITPGIRLQDSNDDQKRFMTPKEAINLGADYLVIGRPNNSVR

SEQ ID NO: 147921 - protein, 231 aa, Unknown
  Bacterial polypetide isolated from the Sargasso Sea
SESKVIVALDYDNSDDAIAMAKTLDPNLCKVKVGLELFVSCGPKIIDQLHKLGYKIFLDLKFHDIANTVEKSCIVASKLNVWMLNLHASGGTKMMSNAKKIFFGEKPLLIGVTILTSLDQEETREIGYTREISEQVLHMAELCYKSNLNGVVCSASEVEAIKKRFSNDFICVCPGIRNHNDDQNDQKRIYTPAMAAKNGADYIVVGRPITKSDNPLESLKKVKMEFEKNIQ

SEQ ID NO: 147922 - protein, 216 aa, Unknown
  Bacterial polypetide isolated from the Sargasso Sea
MKKKLIVALDFDSAESALKFLENLDPKKCLVKVGLELFISEGWKILDLISEKGFEIFLDLKLHDIPNTVANSVRKISNFNVALTTIHLNGGKDMIEAASLEKGNIKILGVSILTSLSENDIFEITHTVFDTYFNNLISIASNTDIDGVVCSPNELDKLKNFNKLKVVPGIRNDISNDDQKRVMSSMEAYEKGANFIVVGRTITKSENPRKALELFL

SEQ ID NO: 147923 - protein, 129 aa, Unknown
  Bacterial polypetide isolated from the Sargasso Sea
MKKKLIVALDFESAELALNLLENLDPQKCLVKVGLELFISEGWKVLDLISEKGFEIFLDLKLHDIPNTVANSIRKISNFNVALTTIHLNGGKDMIEAASSEKGNIKILGVSILTSLSENDIFEITHTEF

SEQ ID NO: 147924 - protein, 165 aa, Unknown
  Bacterial polypetide isolated from the Sargasso Sea
MKKKLIVALDFDSAELALNFLENLDPQKCLVKVGLELFISEGWKVLDLISEKGFEIFLDLKLHDIPNTVANSVRKISNFNVALTTIHLNGGKDMIEAASSEKGNIKILGVSILTSLSENDIFEITHTEFDAYFNNLISIASNTNIDGVVCSPNELDKLKNFNKLK

SEQ ID NO: 147925 - protein, 168 aa, Unknown
  Bacterial polypetide isolated from the Sargasso Sea
MKSKKIIVALDSKDLIKTINLVKILKKDVFAFKIGYQFFYSFGLEGYKKIYSICPKIFLDLKLHDIPNTVEKGLEALIKMKPLFTTIHISGGDEMMQISSSNKKKTKILGVSVLTSLNSNQTKKYYNQKNVTELVKKFSQSAKKNKLDGVVCSPQEIKYIRKKMEKIL

SEQ ID NO: 147926 - protein, 194 aa, Unknown
  Bacterial polypetide isolated from the Sargasso Sea
MIKIGTIAFNSIGSEIISYANSKGFEIFLDLKLHDIPNTVKKSIEGLISQPIKMLTIHISGGKEMMTAAMEAVSGTGIKVFGVTALTSLSDDDTKEIYRRNTSEQVNVMLDLAESAGIDGVVCSPHELNLVSKRKSLLSITPGIRVQNSNDDQKRVMTPKEAIDMGSDYLVIGRPITKSANIEQSLNEIYKSIK

SEQ ID NO: 147927 - protein, 131 aa, Unknown
  Bacterial polypetide isolated from the Sargasso Sea
MNKKLIVALDFDSAELALNFLENLDPQKCLVKVGLELFISEGWKVLDLISEKGFEIFLDLKLHDIPNTVAHSVRKISNFNVTLTTIHLNGGKDMIEAASSEKGNIKILGVSILTSLSENDIFEITHTEFDT

SEQ ID NO: 147928 - protein, 223 aa, Unknown
  Bacterial polypetide isolated from the Sargasso Sea
MSKKIIVAIDETDIILFKKIVTALDKEKCLIKIGSVSFNSIGKEAVDYASSLGFDIFLDLKLHDIPNTVEQSIKGLSSLPIKMLTIHISGGTEMMKAAKKAVSGTKIKIFGVTTLTSLNDDDTNYIFRRSASEQVLKMLDMAESVGIDGVVCSPQELEIVKSRKSLLCMTPGIRLDHLNDDQKRVMSPKNAIDLGADYIVIGRPITLSNDINKTLNDIYQSIL

SEQ ID NO: 147929 - protein, 180 aa, Unknown
  Bacterial polypetide isolated from the Sargasso Sea
EIISFAAEKGCDIFLDLKLHDIPNTVKKSIQGLASLPISMLTIHTSGGKDMMMAAMDAVSGSQIKVFGVTALTSLNNDDTNQIFQRTTSGQVSAMLDLAEEAGIDGVVCSPHELQLVSKRKTLLSITPGIRLQESNDDQKRVMTPKEAIDLGADYIVIGRPITGAKNISEILDKINRSIL

SEQ ID NO: 147930 - protein, 212 aa, Unknown
  Bacterial polypetide isolated from the Sargasso Sea
MHPADRIIVALDGMDPDQALRFSAQVEGLRWVKVGLELFVQAGPEVVAQLREQGLRVFLDLKFHDIPATMAGACRRASALGAELITVHACAGSEALSAAQAAAVEGAQSAGMATPTLLAVTVLTSWQEQRLQRELAIAQGIGERVPAFAQLSATAGIGGCVCSPLEAAALRAQHPEPFALVTPGIRPKFSAVGDQARVMGPAEAIAAGASQL

SEQ ID NO: 147931 - protein, 212 aa, Unknown
  Bacterial polypetide isolated from the Sargasso Sea
MSVKPIFFALDGKSLSEFEFELKILKDHIYGVKVGLELFVSEGPSVVEKLKKQGWQVFLDLKLHDIPNTIKEATRSAANVGADFLTIHIASTSDALIEASNTKGNTLQILGVSSALTSRAMSNSVSEEVNKEFKEAKECGVDGVICPASEISKTKEIFDLIVTPGIRLKNDDKNDQKNVATPNFAINEGAKYIVMGRSIRNNLDYIINDLEL

SEQ ID NO: 147932 - protein, 162 aa, Unknown
  Bacterial polypetide isolated from the Sargasso Sea
KNDGWKVFLDLKLHDIPNTVQAATVSAGNIGADYLTIHIASEKEALLAANENKTDNIKLLGVSSALTSKAMDEETSNNVEKDFIVAKESGIDGVICPASEILTTKKLFDLIVTPGIRLESDSKDDQRNTTTPEKAIELGAKYIVMGRSVKNNLDYVVERLKI

SEQ ID NO: 147933 - protein, 114 aa, Unknown
  Bacterial polypetide isolated from the Sargasso Sea
MKPSDHIFVALDLTDQNEARGLARRLAGHVGGFKLGLEFFAANGPDAVRNIVDSGLKVFLDLKFHDIPNTVAGSVGAAVATGASIINVHASGGLDMMRAAGEAAAEGAERHGVA

SEQ ID NO: 147934 - protein, 208 aa, Unknown
  Bacterial polypetide isolated from the Sargasso Sea
MSKKIIVAIDETDIISFKKIVIALDKDKCLIKIGSVTFNAIGKEAVDYVSNLGFDIFLDLKLHDIPNTVEQSIKGLSSLPIKMLTIHISGGREMMKAAKKAVSGTKIKIFGVTTLTSLNDDDTNYIFRRSASEQVLKMLDMAESVGIDGVVCSPHELELVKSRKSLLCMTPGIRLDHLNDDQKRVMSPKDAIDLGADYIVIGRPITLS

SEQ ID NO: 147935 - protein, 239 aa, Unknown
  Bacterial polypetide isolated from the Sargasso Sea
MKKFNTEEKIILAIDGLDIFQAKVLLERCPNIKWVKVGLELFMREGPNVIKILKNLNKKIFLDLKFHDIPNTMSAACYEVSKLGVDIISVHASAGSKAITASKKASLEGAKIATVNAPCVIGITVLTSLSTKEFQTDLDRKNSIEENVIRLAKLSFDAGLDGCVCSPLEAKILRSRYKNNFELITPGIRTKMQKKDDQNRIMIPYEAIRNGASKLVIGRAITKAKDPNKAFLDICDSIY

SEQ ID NO: 147936 - protein, 242 aa, Unknown
  Bacterial polypetide isolated from the Sargasso Sea
MNNGFNSEDKIILAIDGLDVNQAKLLLEKCPNIKWVKVGLELFVREGPRVIEILKSLNKKVFLDLKFHDIPNTMSAACFQVSKLGVDIISIHASAGLKALKDSKKASLEGASSVRVKPPFVVGITVLTSFSLKDFQTDLDRNNSIEENVLRLAKLSFDAGLDGCVCSPWEVNMLRSIYNDNFELITPGIRLNIENKDDQNRIMTPHEAIDNGASKLVIGRSISKAIDPNKALIEIFKSIDSD

SEQ ID NO: 147937 - protein, 231 aa, Unknown
  Bacterial polypetide isolated from the Sargasso Sea
MTNKVIVALDNKNLTQIVAIVKKTKSEAYGFKIGKEFFYNYGIEGYKKIYKLSPNIFLDLKLHDIPNTVEKALKAIVKLKPLLSTIHISGGDEMQKVSAKLKKNKTKILGVTILTSLNSSQTKKYYNNQNVNQLVKKFAINAKKNNLDGIVCSPLEISTVRKEVGNKMLIVVPGIRLEKKQINKKDDQKRILTPKQAINLGADYLVIGRPIVESNNPLKILKEINKSIIEK

SEQ ID NO: 147938 - protein, 152 aa, Unknown
  Bacterial polypetide isolated from the Sargasso Sea
MIIVAIDEITFDKASVIIDSLDSKKCMLKIGSVAFNSIGHEIISFAAGKGFDIFLDLKLHDIPNTVKKSIQGLASLPISMLTIHTSGGKDMMMAAMDAVSGSQIKVFGVTALTSLNNDDTNQIFQRTTSEQVNAMLDLAESAGIDGVVCSPL

SEQ ID NO: 147939 - protein, 180 aa, Unknown
  Bacterial polypetide isolated from the Sargasso Sea
KKVYSICPKIFLDLKLHDIPNTVEKGLNALIKMKPLFTTIHISGGDEMMQLSIANKKNTKILGVSILTSLDSDQTKKYYGQKNVPTLVKKFAQEAKKNKLDGVVCSPQEIKHIRKIVGKNFIIVTPGIRITNKLKIDDQKRVETPKKALKLGANYLVIGRPITKSRDPLKTLKEINKSLI

SEQ ID NO: 147940 - protein, 212 aa, Unknown
  Bacterial polypetide isolated from the Sargasso Sea
MSVKPIFFALDGPNLNKFEFMLKKLESHIFGVKVGLEMFISEGPKVVEKLKKDGWTVFLDLKLHDIPNTVKKATKSANNLGADFLTIHIASGKDALQEASTSKNDSLKILGVSQALTSSTMDAKMSKGVSEDFLLAKQCGVDGVICPPSEIERTKNLYDLIVTPGIRLNNDTKDDQKNTTTPKNAILAGAKYIVMGRSIINNLDFVMNELDI

SEQ ID NO: 147941 - protein, 212 aa, Unknown
  Bacterial polypetide isolated from the Sargasso Sea
MSVKPIFFALDGKELSEFTETLEKLKGVIYGVKVGLEMFTAEGPSSVEKLKNDGWKVFLDLKLHDIPNTVQAATVSAGNIGADYLTIHIASEKEALLAASENKTDNIKLLGVSSALTSKAMDEETSNKVEKDFIVAKESGIDGVICPASEISSTKELFDLIVTPGIRLESDSKDDQRNTTTPEKAIELGAKYIVMGRSIKNNLDYVINNLTI

SEQ ID NO: 147942 - protein, 235 aa, Unknown
  Bacterial polypetide isolated from the Sargasso Sea
MAKEIDNRERLIFAMDVPDCNQARQLVETLDDSVVFFKLGLELMMTDGYFDLMDWMLKRNKKIFADLKFFDIPATVGAAVNRLRNRGASFVTVHGNQAIMEAAAKNKGKHLKVLAVTALTSLDRGDLDDMGFACDIGDLVLSRAKRALEAGCDGVVSSGLEVPELRKNIDSQLLVVTPGIRPVDNKESEDQKRVVTVAKAFKNGADYIVVGRPIRDADNPRNAAEEIQSSISECF

SEQ ID NO: 147943 - protein, 222 aa, Unknown
  Bacterial polypetide isolated from the Sargasso Sea
MIIVAIDEISFIKASEILNNLDPRKCMVKIGSVSFNSIGQEIIYYAAEKGFDIFLDLKLHDIPNTVRKSIEGLKSLPIKMLTIHISGGKDMMEAAMDAVTGTDIKIFGVTALTSLSNADTNEIFQRTTLEQVNAMLDLAESVGIDGVVCSPHELELVSKRESLLSITPGIRLKDSNDDQKRVMIPKEAIDLGANYLVIGRPITQSDDMLGTLEDIFNKIYNS

SEQ ID NO: 147944 - protein, 433 aa, Unknown
  Bacterial polypetide isolated from the Sargasso Sea
MRVTEVSKREQVLENIQKTSARLQDAQIQMATGQRINKPSDDPIGTAKMQDIVSTMSAQEQHLRNITDNIASLQHAEKEITHMTELLGRAKTLAISQSGSDANEESRMMVAREFAALRESLFDAGNSRNGKLYLFSGLKSLSPALEKNSMIQPAKVETRGIIQKDIRDLIDIDQYRAVFEGHSNNEYRLRITKGGPWGKARCQISDDGGRTWAKEQVLRPVTAMFNPDGKQDDLVKLKFSDEQGLLGNTIPGYFDFTNEVSEDVEAESLGLVFPDGMEFIGRPNPEISYIGAEDKKEVLISDGLASPVQVTARELLLSEEAGGVDVFSMLSSLERAMLENDGTALALRLKELDQALEQILKRQADIGNTVREFETAMQKIESQKFEQERRLSEIRDSDLAETVIEVKTAEANNRLALDTGSKLIQPTLSDFLR

SEQ ID NO: 147945 - protein, 216 aa, Unknown
  Bacterial polypetide isolated from the Sargasso Sea
MNKKLIVALDFNSAELALNFLENLDPQKCLVKVGLELFISEGWKVLDLISEKGFEIFLDLKLHDIPNTVANSVRKISDFNVALTTIHLNGGKDMIEAASSEKGNIKILGVSILTSLSENDIFEITHTEFDAYFNNLISIASNTNVDGIVCSPNELDKLKNFNKLKVVPGIRNDISDDDQKRVMSPMEAYKKGADFIVVGRPITKSEDPRKALELFL

SEQ ID NO: 147946 - protein, 227 aa, Unknown
  Bacterial polypetide isolated from the Sargasso Sea
MNKQIIVPLDMDHDKAIELAKCFNPELCRLKVGNQLFTSSGPKIIEELNALGYEIFLDLKFHDIPNTVYEAVRSAADLGVWMLNVHIAGGRSMLEKAKEALDSSTQPPLLIGVTMLTSLSNEDVKEIGINDISDSILNLASLAKECGLDGVVCSPREVSLIKDKLGKDFIAVTPGIRLETSSDDQVRVLTPIEAVNNGSDFLVIGRPITKSRNPLESLKEIITDLNS

SEQ ID NO: 147947 - protein, 231 aa, Unknown
  Bacterial polypetide isolated from the Sargasso Sea
MNEFNEKLIVALDSKEISQSKKLVSSLENKVSFFKIGLRTFVINGFNLVDEIKQKGKKVFLDLKLYDIKSTIQETVARISEHKIDFLTVNGDPSVVEAAVIGRKDEKMKILAVTFLTNQNRNDLDLSLIKDGNLNELVAERASNAFIAGADGIICSPLEANLIRSKDHFSNKIIVTPGIRLNYSANEDQKRVSTPSEALKAGADYIVVGRPIWNAKDPILAVNDIFNDMIN

SEQ ID NO: 147948 - protein, 143 aa, Unknown
  Bacterial polypetide isolated from the Sargasso Sea
GGERMMRAAKEALLPYGDKAPLLIGVTVLTSMEQADMAPLGLTVGPAEQVIRLAKLTKEAGLDGVVCSAEEARELKALLGADFKLVTPGIRPAGSAAGDQRRVMTPLAAVEAGADYLVIGRPITQAADPAAMLAGINAELANR

SEQ ID NO: 147949 - protein, 217 aa, Unknown
  Bacterial polypetide isolated from the Sargasso Sea
MISKRLIIALDTDDLNLVKKLSAFFDPKLCLMKVGLQLYIAHGKEVLDYLSEQGFEIFLDLKLHDIPNTVAKSIKEIQKFNIKMTTIHSQGGVEMINAALDQSNDIKILAVSLLTSLDRRDVSRLYDNDFEKQFEMLLKVITDTKTHGIVCSSHELAKITDNNLIKVVPGIRNDDVSDDQKRIMSSKAAYANGADFIVVGRPIINSENPSEEYKKYL

SEQ ID NO: 147950 - protein, 113 aa, Unknown
  Bacterial polypetide isolated from the Sargasso Sea
MEQSDLVELGINLTPQQQVLRLAGLVEKSGLDGVVCSAQEAVELKQQFGKEFCLVTPGIRPSFATADDQKRVMTPADALKAGVDYMVIGRPITKAADPLSALQQIYREIYPAH

SEQ ID NO: 147951 - protein, 235 aa, Unknown
  Bacterial polypetide isolated from the Sargasso Sea
MSSNKEDSKVIIALDYSNKKDTLNLVSKLDKSLCNLKVGYELFLSEGQSLIKELHKREFKIFLDLKLHDIPNTVKRAINVICDYGIWMTNVHVLGGKEMLASAKQVVKKESPETKLIGVTILTSLNDDLLKPLGFSNSVEETVYNFADLCHEAGLDGIVCSAGEAIHIRKKFLDNFLIVTPGIRLKNDTADDQKRVVTPVQAKNNGVSYIVVGRPVTMSSDPLSILKKINNEFNE

SEQ ID NO: 147952 - protein, 232 aa, Unknown
  Bacterial polypetide isolated from the Sargasso Sea
MTIKNSDRLIFALDVPEIEQAKDLINQLGPSVDFFKIGMELMMTGDYFNLLDWLVEKDKKVFVDLKLFDVPATVSKAIKRLSKRGAYFTTIHGNQSMMEAAAAEKGDLKVLAVTALTSLDRGDLDDLGFDCAVEELVISRARRAYESGVDGVVASGLELPSIRKAVEDKILIVTPGIRPVDNRQTDDQKRVVTVEQAFQDGADYIVVGRPIQNADNPREAAELIQESISKTI

SEQ ID NO: 147953 - protein, 218 aa, Unknown
  Bacterial polypetide isolated from the Sargasso Sea
SYVEQKTNYCTRFKNIDEVSNFISKLDPQKCIAKVGLQLFISEGPKVLEFLSHKGFEIFLDLKLHDIPNTVKKSVEEISQYNVKLTTIHLQGGRDMIQAANEAKGDTKILGVSLLTSLDDSDTRELYNNDFKKQFDNLISLAMETKIDGIVCSSQELDIVKDTSLIKVVPGIRNQHTFDDQKRVMTSGEAYSKGADYIVVGRPITQAKDIGEAIKDYS

SEQ ID NO: 147954 - protein, 100 aa, Unknown
  Bacterial polypetide isolated from the Sargasso Sea
MSSPIIIPLDTNYDKAITLARSFDPDLCRLKVGNQLFTSSGPRVIDELSSLGYDVFLDLKFHDIPNTVFEAVRSVADLGVWMTKYTYFWWFKICLIVQKE

SEQ ID NO: 147955 - protein, 220 aa, Unknown
  Bacterial polypetide isolated from the Sargasso Sea
MIIVAIDETTFERASEVIEDLDSKKCMVKIGSVAFNTIGHKIISFASEKGFEIFLDLKLHDIPNTVKKSIQGLTSLPINMLTIHTSGGKDMMMAAMEAVSGSQIKVFGVTALTSLNNNDTKYIFKRTTSEQVNAMLDLAEDAGIDGVVCSPHELELVSKRDNLLSITPGIRLHESNDDQKRVMTPREAIDLGANYLVIGRPITESKDIKKSLNEIYQSMI

SEQ ID NO: 147956 - protein, 185 aa, Unknown
  Bacterial polypetide isolated from the Sargasso Sea
MSVKPIFFALDGKELSEFTETLKKLKGVIYGVKVGLEMFTAEGPSSVEKLKNDGWKVFLDLKLHDIPNTVEAATVSAGNIGADYLTIHIASEKEALLAASENKTDNIQLLGVSSALTSKAIDEETSNNVEKDFIVAKESGIDGVICPASEILTTKKLFDLIVTPGIRLESDSKDDQRNTTTPEKA

SEQ ID NO: 147957 - protein, 146 aa, Unknown
  Bacterial polypetide isolated from the Sargasso Sea
MPKKFITSSTGGGVLQDTASSSSLVALIAAREKASNGEINDSGYNQKLTVYTSSQAHSSIEKAVKIAGIGKNNLRLVDVDDSFAMDPNHLRKLILTDIEQGLQPAYVCATVGTTSSTAIDPVDKIGPICKEFGIWLHVDAAMAGPA

SEQ ID NO: 147958 - protein, 350 aa, Unknown
  Bacterial polypetide isolated from the Sargasso Sea
LHLPKKFKSTSSGGGVIQDTASSATLCALIAAREKISNGKINESGFDDSIRVYTSKEAHSSIEKAIKIAGIGRKNLRLIKVDNNFAMDPIKLREAINQDINNNKTPAFVCATVGTTSSTAIDPLKEIGKICDEFGLWLHVDAAMAGSASICPEYQFIHDGIEYADSYCFNPHKFFLTNFDCSCLYVSDRQALINSLTINPEYLKTEVSNSDTVFDYRDWQIPLGRKFRSLKLWSVIKYYGIDGIQSHVRQHISSAKLLSELIIKEEKFEIMAPTILNLVCFRYKGSDHFNKTLLEELNSSGKIYLVHTKLNDIYTLRFSIGQTNTTKDHVLNGWKFILKKTEELERNGVK

SEQ ID NO: 147959 - protein, 333 aa, Unknown
  Bacterial polypetide isolated from the Sargasso Sea
SSATLCALLTAREKITADTVNKSGFNAENSKLTVYTSEEAHSSAEKGAKIAGFGRDNIRFIRTDSLFGMCADTLRAQILSDLEQGALPTCVVASIGTTGVGAVDPIRKIASVCEEFDLFLHVDAAWAGSAMILPEQKAMADGVELADSIVINPHKWLLTNFDCSAHFVKDPEALVRTLTILPEYLKNNESENIIDYRDWSIPLGRRFRALKLWFVIRYYGVEGLQEIIRKHIKLASQVEEWINRSSNFELVTPRSLSLINFRFLPEQNGKFLDIDELNLKLINELNDSGSVYFTQNRVRGDFVIRWSIGQTNTELRHVEDAWIQVQKIASSLN

SEQ ID NO: 147960 - protein, 255 aa, Unknown
  Bacterial polypetide isolated from the Sargasso Sea
EKATDWRTNKEGMNSLSSSLIVYTSEEAHSSTEKGAKIAGFGKDSVRLIRTGNNFEMCSEALERTILEDISNGYTPACVVASMGTTGVGATDPLKAIGQLCKEYEIFLHVDAAWAGSALILPEERWMAEGIEMADSIVFNPHKWLLTNFDCSAHYVKQPELLIRTLSILPEYLKSREQDQVIDYRDWSVPLGRRFRALKLWFVIRSYGVKGLQKIIRNHIKLAQYAATWMDEDPEFELVSPRSLSLLNFRFRPKN

SEQ ID NO: 147961 - protein, 272 aa, Unknown
  Bacterial polypetide isolated from the Sargasso Sea
KIKVTQQGEVISDNFANSDLSQINLKIILSSVIEASLNEKESHSEKWKDLMNFLSNESYDYYRKLINEENFVDYVKKSTPLEEFSKMNIGSRPSKRNSGSNTLKDLRAIPWVFSWSQSRQIITGWYGFGYAIERAIEEGKEEEIKKMHKELKFFRALVSNVEMNLAKTDMAISESYVDELHDGQHEILNEIKKEFSRSESLIKKITSQKSLLENNPTLKKTLDVREAYLIPLNMFQIIFLKKIREGVGDPQLLTRGLLLTINGLSAGLKNTG

SEQ ID NO: 147962 - protein, 198 aa, Unknown
  Bacterial polypetide isolated from the Sargasso Sea
TVTPHMALGKLSIGSRPSKRKNVDNINSLRAIPWVFAWTQIRLMLPAWLGTAEALRYSSIKKFKKTLIDMEKNWPYFNSTMDLLDMVISKVDPEISKIYEKNLADDKLIRVGKKLRFQFDAVKKLNDQITPKEIFKQRKIFRGPAIIRNIYSEILNVLQAVVMNKLLKRNLNKKDKKDLNDAMMASIAGISAAIKNTG

SEQ ID NO: 147963 - protein, 307 aa, Unknown
  Bacterial polypetide isolated from the Sargasso Sea
KTLNNLSPSNTFKLTRAFSHFMNFINLAESIDASRRLNEYENSKKKSSSKNIFIEEIFEELFKNKNISSNTIYNLAKNLNIGIVLTAHPTEVKRRTLIQKYHKITEIMEQRELLKKFPSKLKTLDKKIYDEFTIIWNTDDLKRTRPSPFDEARWGLAIIEDSLWETIPRVYRRLNNIFLKNMNKNLPKNFNPIEFGSWMGGDRDGNPNVTAEVTKEVILLSRWEAAKLYEKELTKLIRSYSMAKCSKKIIKSTGKSFEPYRVYLRPLRNKMRLTHRSIEQHLINNQTLDKDKLLKSKEEILQPLRIV

SEQ ID NO: 147964 - protein, 243 aa, Unknown
  Bacterial polypetide isolated from the Sargasso Sea
MEATLNPPPQPKDSWRKLIEKMTKISTLAYRKNINENSDFIRYFKTVTPHLALGKLSIGSRPSKRKNVDNIQSLRAIPWVFAWTQIRLMLPAWLGTGDALKYSSVKKYKTTLTDMEKNWPFFNSTMDILDMVISKVDPEISEVYENALADKKLTEVGHKLRSEFGMIKKLNRYITPWEIINQRKKFRTTVLVRDIYSEVLNILQAVVMNKLSKKKFKSNDKKYLNDAMMTSIAGISAAMKNTG

SEQ ID NO: 147965 - protein, 370 aa, Unknown
  Bacterial polypetide isolated from the Sargasso Sea
RGSQTFWWRTDELHQFKPSVLDEVDYALHYFQQVLFNAMPKLRGRIFEALTENYPDVQMPSESFCNFGSWVGSDRDGNPSVTPEITWRTACYQRQLMLERYITATSNLRDQLSVSMQWSQVSSSLLESLETDRVKFPEIYEARATRYRSEPYRLKLSYILEKLRLTQERNNLLADSGWKSDLEGEIDTKNIDKVENLYYKSVSEFTYDLELIKNSLISTDLNCEAVNTLLTQVHIFGFSLASLDIRQESTRHSDAIQELTNYLDLSVLYDQMSEEEKIKWLVEELNTKRPLIPPDVNWTKTTEETFSVFKMVKRLQQEFGSRICHSYVISMSHSASDLLEVLLLAKEMGLLHQKSQKSKLFGVPLFETVE

SEQ ID NO: 147966 - protein, 286 aa, Unknown
  Bacterial polypetide isolated from the Sargasso Sea
MKKRDLYYERIPTKLLRDDIRLLGTFLGRVIKDQEGSVFFEIVEKFRLLSKNTLSDKNKSKIFSKISKEVKKLSPKNTFKLTRAFSHILNLMNLAESLDASRKLNEFENPYFKSKNQNLFIEDIIESLFKNKKIPDKKIYEQATKLDIGIVLTAHPTEVKRRTLIQKYANLIEIMEQRHLYKKYPSKIIELDRKLYSEIAIIWKTDELKRTKPSPLDEARWGLAVIEDSLWDTIPKVYKRLNDIFRKNLKKDLPRDFNPIQFGSWMGGDRDGNPNVTAEVTKKVIL

SEQ ID NO: 147967 - protein, 229 aa, Unknown
  Bacterial polypetide isolated from the Sargasso Sea
MNLLNLAEMVDASRNLDDYENKKKINNKNIFIEEIFEKLFKNKKISNNKIYDFAKNLNIGIVLTAHPTEVKRRTLIQKYHNITEILEQRDLFKNFPFKTVKLDKKLYDELTVIWNTDDLKRFKPSPFDEARWGLAIIEDSLWETIPKVYRRLNSIFIKNMNKGLPKNFNPIEFGSWMGGDRDGNPNVTSKVTKEVILLSRWEAAKLYEKALTKIIRAYSMEKCSNKITK

SEQ ID NO: 147968 - protein, 295 aa, Unknown
  Bacterial polypetide isolated from the Sargasso Sea
MYFGSWVGSDRDGNPSVTPEITWRTACYQRQLMLERYIIATSNLRDQLSVSMQWSQVSSSLLESLETDRVKFPEIYEARATRYRSEPYRLKLSYILEKLRLTQERNNLLADSGWKFDLEGEIDKKNLDKLENLHYKSVNEFTYDLELIKNSLISTDLTCESVNTLLTQVHIFGFSLASLDIRQESTRHSDAIQELTNYLDLSLQYDQMSEEEKIKWLIEELNTKRPLIPSDVNWTQTTEETFSVFKMVKRLQQEFGSRICHSYVISMSHSASDLLEVLLLAKEMGLLDQNSQKSK

SEQ ID NO: 147969 - protein, 200 aa, Unknown
  Bacterial polypetide isolated from the Sargasso Sea
YRLKLSYILEKLRLTQERNNLLADSGWKFDLEGEIDNKNLDKVENLYYKSVNEFTYDLELIKNSLISTDLTCESVNTLLTQVHIFGFSLASLDIRQESTRHSDAIQELTNYLDLSVQYDQMSEDEKIKWLIDELNTKRPLIPPDVNWTKTTEETFSVFKMVKRLQQEFGSRICHSYVISMSHSASDLLEVLLTGKRNGTS

SEQ ID NO: 147970 - protein, 93 aa, Unknown
  Bacterial polypetide isolated from the Sargasso Sea
MGLLDQNSQKSKLLVVPLFETVEDLKRAPEVMEKLFKLDFYRSLLPKVGESFKPLQELMLGYSDSNKDSGFVSSNWEIHRAQIALQNLSSRNN

SEQ ID NO: 147971 - protein, 324 aa, Unknown
  Bacterial polypetide isolated from the Sargasso Sea
KSFQNLSNKIKNLSPVNLFKLTRAFTHFMNFINIAESIDGARKLDEYENKNQIDSNKNIFIEEIFESFFKNRKISNNKIYDIAKNLNIGIVLTAHPTEVKRRTLILKYHKIAEILEQRDLLKKYPSKIKILDKKLYDEFTIIWNTDELKRSRPTPSDEARWGLAIIEDSLWETIPKVYRRLNDIFVKNIGRGLPKNFNPIEFGSWMGGDRDGNPNVTAKVTKEVILLSRWEAAKLYEKELTKLIRSLSIEKCSKKILSKTGKTFEPYRVYLRPLRNKMRLTHKLIEQHLVEKIPLDQKKLLNNREEILKPLRVVRESLEENKNE

SEQ ID NO: 147972 - protein, 316 aa, Unknown
  Bacterial polypetide isolated from the Sargasso Sea
MFQAVTIWFHLSQILDEILNIRRSRRSGYKGSTGVEPTQYDFRGILSESDPENRKHLLGIVRKNKLSIGPTITAHPTEAKRVSVLEIHRRIYQTLVKFDSFRWGPKEILQLEKDLEGEIDLLWLTGELRLERPSLEAEIEWGLQFYKTSIIKALPRVFESYDDAVKSVFGRQDIDHFDLRFHSWIGGDRDGNPNVTSEKTLFALESAKEMVLSVYSESLTEIASQLSISNKIMPLSESNFMTLNEIIRVRSSDPENLIRRNPNETFRQALTGMNQCLDDGRYKYVKDFIADLRAIEAALHSIGAVNISDKLVRPLR

SEQ ID NO: 147973 - protein, 301 aa, Unknown
  Bacterial polypetide isolated from the Sargasso Sea
GRGGGPIQATLRSLPPNSVNGKIRITDQGEVIQQKYGYEPLANYNLCSYIGAVTEATLNPPPSPKNNWRNLIEKMSDISKSSYRKNINQSLEFIKYFETVTPHKALGKLSIGSRPSKRKNIDNIKSLRAIPWVFAWTQIRLMLPAWLGSAEALRYSYINKFRRTLVDMEKNWPFFNSMLDTLDMVIAKADPEISKIYEEYLADESLKRVGKKLRFQFDVIKKLNKKITPKEIAAIRKQFRSPIIARSIYSEVLNIIQPTVIKKLQVNKNPKNKQFLNDALLTSYSWYFSCNEKYWLMVFFR

SEQ ID NO: 147974 - protein, 251 aa, Unknown
  Bacterial polypetide isolated from the Sargasso Sea
NLCSYIGAVTEATLNPPPKPKNNWRTLIEKMSDISKSSYRKNINQSTEFIKYFKTVTPHQALGKLSIGSRPSKRKNVDNIKSLRAIPWVFAWTQIRLMLPAWLGSAEALRYSYIKKFRKTLYDMEKNWPFFNSMLDMLDMVISKADPDISKIYEEYLADEELKRVGKKLRFQFNAIKKLNKKITPKEIINLRKQFRTSIIVRNIYSEVLNIIQPIVISKLKKSKKIKDKKYLNDSLMTSIAGISAAMKNTG

SEQ ID NO: 147975 - protein, 268 aa, Unknown
  Bacterial polypetide isolated from the Sargasso Sea
FESLFKNRKISTNKIYNIAKNLNIGIVLTAHPTEVKRRTLIQKYHKITEILEQRDLLKKFPSKLKMLDKKLYDEFTIIWNTDELKRNRPTPSDEARWGLAIIEDSLWETIPKVYRRLNDIFLKNMGKGLPKNFNPIEFGSWMGGDRDGNPNVTSKVTKEVILLSRWEAAKLYEKELTKLIRSLSIEKCSKKIKSKTGKSFEPYRVFLRPLRNKMRLTHKLIEQHLVNKIPLDQRKLLSSREEILKPLRIVRQSLEENKNENIASGDLL

SEQ ID NO: 147976 - protein, 296 aa, Unknown
  Bacterial polypetide isolated from the Sargasso Sea
EVILLSRWEAAKLYEKELTKLIRGLSMEKCSKKILKTTGKTFEPYRVYLRPLRDEMRKTHRLIERHLVAKKPLDQKKLLSSKEEILKPLRVVRESLEQNQSENIASGELLDLMRRAKCFGINLAKLDIRQESSRHSQLLVEYVKKKNKSNYLNWDENKKIKYLANEMKKNKKIFKNFNFKNKENKEVWSTFKILADEPSECLGAYVISMTSAASDVLAVYLMQMQANIKNKLRVVPLFETLQDLKNAKSIMEKLFSLKWYRKLIKNNQEIMIGYSDSSKDAGKLSASWHQYKLKKK

SEQ ID NO: 147977 - protein, 182 aa, Unknown
  Bacterial polypetide isolated from the Sargasso Sea
MPQETAVKPGITDLRAIPWVFGWTQSRQIILGWFGAGTGLHAAMEAGRADDLRHMYAEWHFFSTFVSNVEMTLAKTDLAIARHYVERLVDPKLHHLFDQVVEEHTLTMEMITSITGTALLSDKPMLRRTLEVRDAYLDPISVLQVELLTRSRREKSRDRNDQMQRALLLSINGIAAGLRNTG

SEQ ID NO: 147978 - protein, 213 aa, Unknown
  Bacterial polypetide isolated from the Sargasso Sea
MILKVLVDYYSAASPVEELVKMNIGSRPARRTGENSLKDLRAIPWVFAWTQNRHLVPGWYGVGTAIKEFTDKHAGKGEKLIKKMFTDSRLFRLIIDETEKTLALIDFDICKAYSSLVENKTERENIFNMISAEYNLTKEVILNITGEEKLCQRFKKFSRKLNRRSPVLHQAGLEQIKLIKEFRQQNGNGDNIDDLIPLLLSINCISSGLGWTG

SEQ ID NO: 147979 - protein, 204 aa, Unknown
  Bacterial polypetide isolated from the Sargasso Sea
FIRYFKTVTPHKSLGKLAIGSRPTKRKNVDNIQSLRAIPWVFAWTQIRLMLPAWLGTTEALRYGSIKKFKRTMTDMEKNWPYFISTMDILDMVISKVDPKISVIYENNLADASLKRIGKKLRFQFEALVKLHNKITPKEVVKERKEFRKSLFIRNNYTEMLNILQANVMKKLTNKKYKNLDKKLLEDALMTSIAGISAAMKNTG

SEQ ID NO: 147980 - protein, 259 aa, Unknown
  Bacterial polypetide isolated from the Sargasso Sea
MLREDISYLGNILGEVIKEQEGIKFFNLVEKVRKLSKANKINLKNKNSFKKLVKTVRKSNPRDTLRLTRAFTHFINFINLAESIDTARNLDEYETKRKNLKYNIFIEEIFEKLFKNKKISNNKIYNLAKNLNIGIVLTAHPTEVKRRTLIQKYHKIIEILEQRDLYKSNSSKLIQLNKQLYDEFTIIWNTDDLKRSKPSPFDEARWGLAIIEDSLWDTVPKVYRRLNSIFLKNMNRGLPKNFNPIQFGSWMGGDRDGNP

SEQ ID NO: 147981 - protein, 282 aa, Unknown
  Bacterial polypetide isolated from the Sargasso Sea
SWIGGDRDGNPNVTHQITQSTIEALRAAARELWDEQLKELHRELSPSVRRVDLPEASVDLVDGKDQRRHEPLRLRIEALRDGVRDHTISPTELCDELLAIRSDLIAAGLSRVANARPLTDAIVRSRAFGLHLAKLDIRQHSQVHLSALSELFEHAGIHDDFSSLPETEKMDLLRKELANPRPLAAPVTPLSSQTEEVLRTLKVAKAAQASDENTIGSCIVSMTHHISDLLVLRLLMKEVGFELNDDRTPPVVPLFETVEDLHRAPDLLQGILNEPTLSPRVD

SEQ ID NO: 147982 - protein, 282 aa, Unknown
  Bacterial polypetide isolated from the Sargasso Sea
LRNFPSKLKILDKKLFDELTIIWNTDDLKRSRPSPFDEARWGLAIIEDSLWDTIPKVYRRLNSIFVKNMNKGLPKNFNPIEFGSWMGGDRDGNPNVTAEVTRKVILLSRWEAAKLYEKALTKIIRSYSMKKCSKKILNKVGNSYEPYRVFLRPLRNKMRKTHRLIEQHLVNNKSLNHNELLYNKEEILKPLRVVRESLEQNQNENLASGELLDLMRRAKCFGINLAKLDIRQESFRHSKLISEFIKKKYHKDYLKMSENEKIEFLKSKLLSKKNYINKFQFK

SEQ ID NO: 147983 - protein, 195 aa, Unknown
  Bacterial polypetide isolated from the Sargasso Sea
PHMALGKLSIGSRPSKRKNIDNINSLRAIPWVFAWTQIRLMLPAWLGTAEALRYSSIKKFRKTLIDMEKNWPYFNSTMDLLDMVISKVDPEISKIYEKNLADDKLIRVGKKLRFQFDAVKKLNDQITPKEIFKQRKIFRGPAIIRNIYSEILNVLQAVVMNKLLKRNLNKKDKKDLNDAMMASIAGISAAIKNTG

SEQ ID NO: 147984 - protein, 286 aa, Unknown
  Bacterial polypetide isolated from the Sargasso Sea
SPKNTFKLTRAFSHILNLMNLAESLDASRKLNEFENPYFKSKNQNLFIEDIIESLFKNKKISDKKIYEQATKLDIGIVLTAHPTEVKRRTLIQKYANLIDIMEQRHLYKKYPSKIIELDRKLYSEIAIIWKTDELKRTKPSPLDEARWGLAVIEDSLWDTIPKVYKRLNDIFRKSLKKDLPRDFNPIQFGSWMGGDRDGNPNVTAEVTKKVILFSRWQAAKLYERELTKLIQDLSMEECSTKIKKATGNSYEPYRVYLRPIRDKVRLTHQLIENHLNKNAFLDEKK

SEQ ID NO: 147985 - protein, 325 aa, Unknown
  Bacterial polypetide isolated from the Sargasso Sea
MYLLAHPTEAKRRSKLEAMRRIFNTILELQRYKGQSIKREELIEELQAEILILWRTDEVRLKKPTVIDEVENGLYYFRTSLFKSIPEVYKDMEKAIKRVYHTDNIKVPSFIKFGSWIGGDRDGNPFVTPDITREAVYMHAETAIHEYMRRAQNLSTILTHSLELTRPSNQFLESSKSDEIYLANAFKNTTQDFAKEPYRRKFKIIRYRLDQRLKVINQLKNNNQPEAEHAYQSEQELLNDLYVIRDSLISDNDLILSDFGLNDFIRLVETFGFHLVNLDIREESTNHTNAISDVLNVSSQIDYTSLDEKSRINELEKFIKSDISL

SEQ ID NO: 147986 - protein, 178 aa, Unknown
  Bacterial polypetide isolated from the Sargasso Sea
KNVDNINSLRAIPWVFAWTQIRLMLPAWLGTAEALRYSSIKKFKKTLIDMEKNWPYFNSTMDLLDMVLSKVDPEISKIYEKNLADDKLIRVGKKLRFQFDAVKKLNDQITPKEIFKQRKIFRGPAIIRNIYSEILNVLQAVVMNKLLKRNLNKKDKKDLNDAMMASIAGISAAIKNTG

SEQ ID NO: 147987 - protein, 275 aa, Unknown
  Bacterial polypetide isolated from the Sargasso Sea
PFIVNHPTLLNNWILSRERALKEIREIKDVKSQDSDLFLDCVKKSLKNITSWNTDSEYQQKKISSLLKDVEKFLNFIDKDFNFESEYPFNKIYQWLEDNTCEECIEYIVSIMMEPYNNIVNPLVKEMSSDEEKYFNIPTHRKVEELRNIIEAKYPNILDINFEEKENNKNFWFISKNKEEPRLADRFEEHGSELEQPLAIARDIKKLYDKLLVSKNSLTIAEFLTSNSELRHVVRRAFIVEKFPYSEIQDNTIGKDLMPIDMLRLKLSFFGALKI

SEQ ID NO: 147988 - protein, 255 aa, Unknown
  Bacterial polypetide isolated from the Sargasso Sea
SKYNLCSYISSVMLATLIPPPEPKNNWRTLIESMSDISKSSYRKNLTSNSEFIRYFKTVTPHLALGKLSIGSRPSKRKQVDSIKSLRAIPWVFAWTQIRLMLPAWLGTAEALRYSSIKKFRKTLIDMEKNWPFFNSTMDLLDMVISKVDPEISKIYEENLADIDLRRVGKKLRFQFEALKKLNHSITPPEILKQRKAFRGPAIIRNVYSEVLNILQATVMMKLTKKNNNKISNDYLNDALMTSIAGISAAIKNTG

SEQ ID NO: 147989 - protein, 231 aa, Unknown
  Bacterial polypetide isolated from the Sargasso Sea
SNWRDLIQKMSEISTSSYRKYLNQSEDFIRYFKTVTPHKSLGKLAIGSRPTKRKNVDNIQSLRAIPWVFAWTQIRLMLPAWLGTTEALRYGSIKKFKRTMTDMERNWPYFVSTMDILDMVISKVDPEISVIYENNLADASLKRIGKKLRFQFDALVKLHNKITPIEVVKERKEFRKALFIRNNYTEMLNILQANVMNKLTNKKNKKLDKKFLEDALMTSIAGISAAMKNTG

SEQ ID NO: 147990 - protein, 343 aa, Unknown
  Bacterial polypetide isolated from the Sargasso Sea
AVDAISQNLYPIFSTNFIRRTWLIETQAGAKIEVVLDKGEIAASGQVEMISELEIELIEGSRNELFALADILVSQNCIRLGLYSKAARGYRLADDNPLKPSKSIGFVKLPRSATQESALKEAMNFGIRFVQKHEQCYFDKPSLKTLKRVTDGISLIRHTFWLFDDIVSKDSTEQLRTELKWLLSELAWVENAIQLKTYTSKRHAFYKKINAAPALAQVINDLKELQPSIDDINALFHSARYNRLLLSLTTWLIDKQWRKDWGQVELQAAENPVSSIAERLFNKDWKNLHQLLPKEQTLGVVDYLNLRMQLENSLLSGICLGSMFDKEERLEFRLPWVDISHGV

SEQ ID NO: 147991 - protein, 294 aa, Unknown
  Bacterial polypetide isolated from the Sargasso Sea
KPVKIFKLARAFTHFMNFINLAESIDASRKLDEFENSGLKDKHKNIFIEEIFENLFKNKKIKPQKIYNIAKNLHIGVVLTAHPTEVKRRTLIQKYHKITEIMDQRDLLKNKPSRLKILDKKLYDEFTIIWNTDDLKRFKPTPAEEARWGLAVIEDSLWETIPKVYRRLNAIFVKNMGKGLPKNFNPIEFGSWMGGDRDGNPNVTAAITKEVILLSRWEAAKLYEKELTKLIRGLSMEKCSKKILKTTGKTFEPYRVYLRPLRDEMRKTHRLIERHLVAKKPLDQKKLFLQKRKF

SEQ ID NO: 147992 - protein, 192 aa, Unknown
  Bacterial polypetide isolated from the Sargasso Sea
SLGKLSIGSRPSKRKNVDNIKSLRAIPWVFAWTQIRLMLPAWLGTAEALRYSSIKKFKKTLYDMERNWPFFNSTMDILDMVISKVDPEISKIYEDNLGDKKLKRVGKKLRFQFETIKILNKNITPKEIVKARKEFRRSVIIRNIYSEVLNIIQATVMNKLLKKGYKINQKKYLEDALMTSIAGISAAMKNTG

SEQ ID NO: 147993 - protein, 181 aa, Unknown
  Bacterial polypetide isolated from the Sargasso Sea
SKRKNVDNINSLRAIPWVFAWTQIRLMLPAWLGTAEALRYSSIKKFRKTLTDMEKNWPYFNSTMDLLDMVLSKVDPEISKIYEKNLADHKLVSLGDKLRFQFNAVKKLNYDITPKEILKQRKAFRGPAIIRNIYSEILNVLQVTVMKKQKQKKLNKRSKKLLDDAMMTSIAGISAAIKNTG

SEQ ID NO: 147994 - protein, 252 aa, Unknown
  Bacterial polypetide isolated from the Sargasso Sea
QKISFLSKGIKSKRNIINNFKFKNNENLEVWSTFNVLSDEPEECLGGYIISMTASASDILAVSFLQKEAKIKKKLRVIPLFETLDDLKNAKSIMQKLFSLSWYRKLIKNKQEIMIGYSDSSKDAGKLSASWHQYKLQEDIVKLANKFKIDLTFFHGRGGSAGRGGGPIQSTLRSQPPGSVKGKIRITDQGEMIQQKYGYEPLAKYNLCSYIGAVMQATLNPPSKPKDKWRRLIEEMAQISTLSYRQNIKNNS

SEQ ID NO: 147995 - protein, 303 aa, Unknown
  Bacterial polypetide isolated from the Sargasso Sea
GTKKEIRKIRLLIESLKVGGFVTAEMDIREDSAITTNAAKEIISKIYDESTSIADAINFIDRENNFDLSNLEINEVTREVINTFETVKVSRKKYGINSINTWIVAMTGSSDDLTSIAFLALLTKTVESKKELSGFRIVPLLETIDDLKNANEILKTFWTQTYEEGSLVEVMIGYSDSNKDGGIIKSQWNLYSSQREIFNLSKQLKLDLILFHGRGGSSSRGGGPSGEAILSQPLETINGKIKITQQGEVISDNFANPELSETNLKIIMSSVLEASLDYPEENNKDKKWFDLMNILSDESYSHY

SEQ ID NO: 147996 - protein, 285 aa, Unknown
  Bacterial polypetide isolated from the Sargasso Sea
SWHQYKLQEELRGLAKKYKFDLVFFHGRGGSPGRGGGPIQATLKSQPAGTVNGKIRITDQGEVIQQKYGYKPLAEYNLCSYIGAVMDASLNPPPRSKPKWRELIHSMSEISTSAYRKYLNQSEDFIRYFKTVTPHKSLGKLAIGSRPTKRKNVDNIKGLRAIPWVFAWTQIRLMLPAWLGTTEALRYGSIKKFKNTMMDMEKNWPYFVSTMDILDMVISKVDPEISVIYENNLADAPLRRIGKKLRYQFDALVKLHNKITPREVVKERKKFRKALFIRSNYTEML

SEQ ID NO: 147997 - protein, 265 aa, Unknown
  Bacterial polypetide isolated from the Sargasso Sea
FFHGRGGSAGRGGGPIQATLRSQPAGSVNGKIRITDQGEVIQQKYGYEPLAKYNLCSYIGSVMEATLNPPPKPKDSWVKLIQSMSEISTSSYRKNINQSSDFIRYFKTVTPHMALGKLSIGSRPSKRKNVDNINSLRAIPWVFAWTQIRLMLPAWLGTAEALRYSSIKKFKKTLIDMEKNWPYFNSTMDLLDMVLSKVDPEISKIYEKNLADDKLIRVGKKLRFQFDAVKKLNDQITPKEIYKQRKSFRSPAIIRNIYSEILNVL

SEQ ID NO: 147998 - protein, 222 aa, Unknown
  Bacterial polypetide isolated from the Sargasso Sea
MSSSKSKKVRREKIFFAEKDQALKADVRRLGELVGELVKEQGGEALFDLVEEARRISIAHREGSVDELEKLQALLSALEPGIARDFIRAFSTYFQMVNMAEKVHRIRRRRAYLRDSTKHQPLGFLDIFKQLKESGLEAPDIEDALAQISVEPVFTAHPTEASRRTLLRKQQNIARHLVTMLDPYLTPQEEQEVLGQILHEMTSGWQTEEHPQAYMRVADEAE

SEQ ID NO: 147999 - protein, 276 aa, Unknown
  Bacterial polypetide isolated from the Sargasso Sea
MKDKHKNIFIEEIFENLFKNKKIKPQKIYNIAKNLNIGIVLTAHPTEVKRRTLIQKYHKITEIMDQRNLLKDKPSRLKILDKKLYDEFTIIWNTDDLKRFKPTPAEEARWGLAVIEDSLWETIPKVYRRLNAIFVKNMGRGLPKNFNPIEFGSWMGGDRDGNPNVTAAITKEVILLSRWEAAKLYEKELTKLIRGLSMAKCSKKILKNTGKTFEPYRVYLRPLRDEMRRTHRLIERHLVAKKPLDKKKLLSSKEEILKPLRVVRESLEQNQNENIA

SEQ ID NO: 148000 - protein, 175 aa, Unknown
  Bacterial polypetide isolated from the Sargasso Sea
DNIQSLRAIPWVFAWTQIRLMLPAWLGTTEALRYGSIKKFKRTMTDMERNWPYFVSTMDILDMVISKVDPKISVIYENNLADASLKRIGKKLRFQFEALVKLHNKITPKEVVKERKEFRKALFIRNNYTEMLNILQANVMKKLTNKKYKNLDKKFLEDALMTSIAGISAAMKNTG

SEQ ID NO: 148001 - protein, 320 aa, Unknown
  Bacterial polypetide isolated from the Sargasso Sea
LAELTRYLQLPQDYEAMEEPQRVEWLLEQLQPRRPLIPTGPLWSDSTAETFAVFQMLRRLQEEFGQRICRTYVISMSHTESDLLEVLLLAKEAGLVDPVEGTTRLQVIPLFETVEDLRCAPEVMGAVMARPFYKRLLANEEVPLQEVMLGYSDSNKDSGFLSSNWEIHRAQIALQSLCSEHNISLRIFHGRGGSVSRGGGPAYQAILAQPSGTLKGRIKITEQGEVLASKYALPELALYNLETVTTAVLQNSLLSSGVDDTPSWNELMERLASRSRQHYRALVHEHPDLVAFFEQVTPIEEISKLQISSRPARRRTGARD

SEQ ID NO: 148002 - protein, 261 aa, Unknown
  Bacterial polypetide isolated from the Sargasso Sea
IGYSDSSKDAGKLSASWHQYKLQEELRSLAKKYKIDLVFFHGRGGSPGRGGGPIQATLKSQPSGTVNGKIRITDQGEVIQQKYGYKPLAEYNLCSYIGAVMDASLNPPPRSKPNWRELIHNMSEISTSAYRKYLNQNEDFIRYFKTVTPHKSLGKLAIGSRPSKRKNVDNIQGLRAIPWVFAWTQIRLMLPAWLGTTEALRYGSIKKFKKTITDMEKNWPYFISTMDILDMVISKVDPKISIIYENNLADNSLKRIGKKLR

SEQ ID NO: 148003 - protein, 303 aa, Unknown
  Bacterial polypetide isolated from the Sargasso Sea
CLKKFLNGHYDIESIINDLNLVLNSLNEHRGTKKEIRKISLLIESLKVGGFVTAEMDIREDSAITTNAAKEIISKIYDESTSISDAINLIDKKNDFDLSNLKLNDASREVINTFETVKITRKKYGASSINTWIVAMTGSSDDLSSIAFLTLLTKTVESKKDLPSFRIVPLLETIDDLKNAKEILRNFWTQIYDQNSLVEVMIGYSDSNKDGGIIKSQWNLYSSQKEIFNLSKQLKLDLVLFHGRGGSSSRGGGPAGEAILSQPLETINGKIKITQQGEVISDNFANSELSETNLKIIMSSVLE

SEQ ID NO: 148004 - protein, 316 aa, Unknown
  Bacterial polypetide isolated from the Sargasso Sea
LSNKIKNLSPINLLKLTRAFTHFMNFINIAESIDGARKLDEYENNSQNNSNKNIFIEEIFESFFNDRKISANKIYNVAKNLNIGVVLTAHPTEVKRRTLILKYRKIAEILEQRDLLKKYPSKIKILDKKMYDEFTIIWNTDDLKRTKPRPVDEARWGLAIMEDSLWVTIPKVYRRLNDIFVKNMGKSLPKNFNPIEFGSWMGGDRDGNPNVTANVTKEVILLSRWEAAKLYEKELTNLIRSLSIEKCSKKILKKTGKTFEPYRVYLRPLRNKMRSTFTLIEQYLVNKKPLDQKKLISSREEILRPLRVVRESLEQN

SEQ ID NO: 148005 - protein, 251 aa, Unknown
  Bacterial polypetide isolated from the Sargasso Sea
MVKKIKYKIANIQLSKIVSLLGKILGIVVKEQEGLPLYNKIEEIRSLSKASRGTKNKRKIKLNETKKFRQLIATINKLKPKESLVIARSFSKFLNFSNLAESLDSVHKIDEGRIQKKQGTNAFTLLEDAINRLLEQKSISKEKFYQVAKSLKIDLVLTAHPTEVKRRTLIQKYTNVNNILEKFNKSRIFKLKNIKTETLAMERNLHEEITSIWKTDELKRSKPKPTEEAQWGISSNRGQSMERSSKNMFKI

SEQ ID NO: 148006 - protein, 150 aa, Unknown
  Bacterial polypetide isolated from the Sargasso Sea
MWDTIPKVYRRLNSIFVQNMGKGLPKNFNPIEFGSWMGGDRDGNPFVTSKVTKEVILLSRWEAAKLYEKALTKIIRSYSMQNCSKKISSKVGITHEPYRVFLRPLRDKMRNTHRQIEQHLINKKQLDQTKLLNSKEEILKPLRIVRESLE

SEQ ID NO: 148007 - protein, 176 aa, Unknown
  Bacterial polypetide isolated from the Sargasso Sea
VDNIQSLRAIPWVFAWTQIRLMLPAWLGIAEALKYSSSGKLKKILVEMEKDWPFFNSNMDILDMVISKADPEISKIYEENLADIKLKRVGKNLRYQFHNIKKLNKKITPKEIIKARKEFRTSVIVRNIYSEVLNIIQSATMNKLSQKKYNKQGKKYLNDALMTSIAGISAAMKNTG

SEQ ID NO: 148008 - protein, 314 aa, Unknown
  Bacterial polypetide isolated from the Sargasso Sea
YALHYFQQVLFNAMPQLRGRITEALTENYPDVQLPSQSFCNFGSWVGSDRDGNPSVTPEITWRTACYQRQLMLERYIIAISNLRDQLSVSMQWSQVSSSLLESLETDRVKFPEIYEARATRYRSEPYRLKLSYILEKLRLTQERNNLLADNGWKFDLEGEINNKNLDKVDNLHYKSVNEFTYDLELIKNSLISTDLTCESVNTLLTQVHIFGFSLASLDIRQESTRHSDAIQELTNYLDLSFQYDQMSEEEKIKWLIDELNTKRPLIPSDADWTKTTEETFSVFKMVKRLQQEFGSRICHSYVISMSHSASDLL

SEQ ID NO: 148009 - protein, 266 aa, Unknown
  Bacterial polypetide isolated from the Sargasso Sea
MGRVIKDQEGLVFFKIVEKFRLLSKNTLIDKNKFKILSKISKEVKKLSSENIFKLTRAFSQILNLLNLAESIDASRRLNEYQNPYFKSKNQNLFIEDVIEGLFKNKAISKKKIYEQATKLDIGIVLTAHPTEVKRRTLIQKYANLIHIMEQRHLYKKYPSKIIELDRQLYSEIAIIWKTDELKRTKPSPLDEARWGLAVIEDSLWDTIPRVYKRLNDIFRKNLKKDLPRDFNPIQFGSWMGGDRDGNPNVTAEVTKRVILFSRWQA

SEQ ID NO: 148010 - protein, 207 aa, Unknown
  Bacterial polypetide isolated from the Sargasso Sea
NSDFIRYFKTVTPHLALGKLSIGSRPSKRKNVDNIQSLRAIPWVFAWTQIRLMLPAWLGTGDALKYSSVKKYKKIITEMEKNWPFFNSTMDLLDMVISKVDPEISEVYENNLADKKLKEVGDKLRSEFEIIKKLNKYITPTEILNQRKKFRTTILVRNIYSEVLNILQAVVMKKLSNQNLKTDDKKNLNDAMMTSIAGISAAMKNTG

SEQ ID NO: 148011 - protein, 285 aa, Unknown
  Bacterial polypetide isolated from the Sargasso Sea
REDVRYLGIVLGKVIKDQEGKDFFKLIEKIRKLSKTNKFNFKSDKSKKNISKILIKLDPKKTLKITRAFTHFMNLLNLAELVDVSRNLNEYENKKNINSKNIFIEEIFEKLFKNTKVSNNKIYNFAKNLNIGIVLTAHPTEVKRRTLIQKYHNITEILEQRDLLKNFPSKTKNLNKKLYDELTIIWNTDDLKRFKPSPFDEARWGLAIIEDSLWETIPKVYRRLNSIFLKNMNKSLPKNFNPIEFGSWMGGDRDGNPNVTAKVTKEVILLSRWEAAKLYEKALTK

SEQ ID NO: 148012 - protein, 293 aa, Unknown
  Bacterial polypetide isolated from the Sargasso Sea
MVKKTKYKIANIELSKIVSLLGKILGIVVKEQEGLPLYNKIEEIRSLSKASRGTKNKKKIKLNETRKFRQLIFKINKLKPRESLVIARSFSKFLNFSNLAESLDSVHKIDEGKIQKKQGTNAFMVLEDAINRFLKQKSISKEKFYQVAKSLKVDLVLTAHPTEVKRRTLIQKYTNVNNILEKFNKSRIFKLKNIKTETLAMERNLHEEITSIWKTDELKRSKPKPTEEAQWGLAVIEDSLWNAVPKICSRFNESVESYTGKKLPIDFSPLVFGSWMGGNGDGNPKCYCQDYRT

SEQ ID NO: 148013 - protein, 260 aa, Unknown
  Bacterial polypetide isolated from the Sargasso Sea
NVTAAITKEVILLSRWEAAKLYEKELTKLIRGLSMEKCSKKILKATGKTFEPYRVYLRPLRDEMRKTHRLIERHLVAKKPLNKKKLLTSKEEILKPLRVVRESLEQNQSENIASGDLLDLMRRAKCFGINLAKLDIRQESSRHSQLLAEYIKKKNKSNYLNWDENKKIKYLISEMNKNKKNFKNFNFKNKENKEVWSTFKILADEPSECLGAYVISMTSSASDILEVYLMQMQANIKSKLRVVPLFETLQDLKNAKSIME

SEQ ID NO: 148014 - protein, 215 aa, Unknown
  Bacterial polypetide isolated from the Sargasso Sea
SYRKNINQSSDFIRYFKTVTPHMALGKLSIGSRPSKRKNVDNINSLRAIPWVFAWTQIRLMLPAWLGTAEALRYSSIKKFKKTLIDMEKNWPYFNSTMDLLDMVLSKVDPEISKIYEKNLADDKLIRVGKKLRFQFDAVKKLNDQITPKEIFKQRKIFRGPAIIRNIYSEILNVLQAVVMNKLLKRNLNKKDKKDLNDAMMASIAGISAAIKNTG

SEQ ID NO: 148015 - protein, 284 aa, Unknown
  Bacterial polypetide isolated from the Sargasso Sea
QKRLLSSKEEILKPLRVVRESLEENQSENIASGDLLDLMRRAKCFGINLAKLDIRQESSRHSQLLAEYVKKKNNSNYLKWNENKKIKYLISEMKKNRKSFKNFNFKNKENKEVWSTFKLLADEPSECLGAYVISMTSAASDILAVYLMQMQANIKNKLRVVPLFETLQDLKNAKSIMERLFSLSWYRKLIKNKQEIMIGYSDSSKDAGKLSASWHQYKLQEDVLTIAKKYKINLTFFHGRGGSHGRGGGPIQATMRSQPPNSVYGRIRITDQGENDPQNMVMNL

SEQ ID NO: 148016 - protein, 229 aa, Unknown
  Bacterial polypetide isolated from the Sargasso Sea
MEKLIEEMTKISTLAYRKNINENSDFIRYFKTVTPHLALGKLSIGSRPSKRKNVDNIQSLRAIPWVFAWTQIRLMLPAWLGTGDALKYSSIKNHKTTLTNMEKDWPFFNSTMDILDMVISKVDPEISKVYENSLADKKLREVGDKLRSEFAIIKKLNRYITPREIINQRKEFRKTVLVRNIYSEVLNILQAVVMNKISKKKFKSNDKKYLNDAMMTSIAGISAAMKNTG

SEQ ID NO: 148017 - protein, 231 aa, Unknown
  Bacterial polypetide isolated from the Sargasso Sea
KNWRTLIESMSDISKSSYRKNLTSNSEFIRYFKTVTPHLALGKLSIGSRPSKRKQVDSIKSLRAIPWVFAWTQIRLMLPAWLGTAEALRYSSIKKLRKTLIDMEKNWPFFNSTMDLLDMVISKVDPEISKIYEENLADENLKRVGKKLRFQFDALKTLNKKITPTEILQQRKVFRSPAIIRNLYSEVLNILQATVMMKLSKKNNKRENKAYLNDALMTSIAGISAAIKNTG

SEQ ID NO: 148018 - protein, 307 aa, Unknown
  Bacterial polypetide isolated from the Sargasso Sea
KFKIDLVFFHGRGGSPGRGGGPIQATLKSQPSGTVNGKIRITDQGEVIQQKYGYKPLAEYNLCSYIGSVMDASLNPPPRSKTNWRELIQKMSEISTSSYRKYLNQSEDFIRYFKTVTPHKSLGKLAIGSRPTKRKNVDNIQSLRAIPWVFAWTQIRLMLPAWLGTTEALRYGSIKKFRTTMTDMERNWPYFVSTMDILDMVISKVDPEVSVIYENNLADASLKRIGKKLRFQFDALVKLHNKITPKEVVKERKEFRKALFIRNNYTEMLNILQANIMNKLTNKKYKNLDKKFLEDAFMTSIAGISAA

SEQ ID NO: 148019 - protein, 291 aa, Unknown
  Bacterial polypetide isolated from the Sargasso Sea
YHTIIEIMEQIELLKKHPSKIKILEKKLYDEFTIIWNTDDLKRFRPTPSEETRWGLAVIEDSLWESIPKVYRRLNGIFVKNMGKNLPKNFNPIEFGSWMGGDRDGNPNVTSKVTKEVILLSRWEAAKLYEKALTKLIRSYSMEKCSNKITRIIGKSHEPYRVYLRPLRNKMRYTHRAIENHLVRNKSLNRKKLLSSKEEILKPLRIVRESLENNQSENIASGDLLDLMRRAKCFGINLAKLDIRQESYRHAQLVNELLKKKLKKNYFKFTENQKIKFLSKSIRSNKNLINN

SEQ ID NO: 148020 - protein, 258 aa, Unknown
  Bacterial polypetide isolated from the Sargasso Sea
EPLAKYNLCSYIGSVMQATLNPPPQPKESWRKLIEEMTKISTLAYRKNINENSDFIRYFKTVTPHLALGKLSIGSRPSKRKNVDNIQSLRAIPWVFAWTQIRLMLPAWLGTGDALKYSSVKNYKNIITDMEKNWPFFNSTMDILDMVISKVDPEISEVYENSLADKKLREVGDKLRAEFAIIKKLNKYITPREIINQRKKFRTTVLVRNIYSEVLNILQAVVMKKISKKKFKFDDKKYLNDAMMTSIAGISAAMKNTG

SEQ ID NO: 148021 - protein, 140 aa, Unknown
  Bacterial polypetide isolated from the Sargasso Sea
MKKCSKKILKKVGKSFEPYTVFLRPLRDKIPTTHRSIEQHLVNKKPLNHKKLLSSREEILKPLRVVRESLEQNQNENIASGELLDLMRRAKCFGINLARLDIRQESSRHSQLISEFIKRKYNKNYSKFSEDKKIEFLKNK

SEQ ID NO: 148022 - protein, 246 aa, Unknown
  Bacterial polypetide isolated from the Sargasso Sea
KRFNKITSEIQRLKPIKIFKLARAFNHFMNFINLSESIDASRKLDEFENSDLKDKHKNIFIEEIFENLFKNKKIKPQKIYNIAKNLHIGIVLTAHPTEVKRRTLIQKYHKITEIMDQRDLLKDKPSRLKILDKKLYDEFTIIWNTDDLKRFKPTPAEEARWGLAVIEDSLWETIPKVYRRLNAIFVKHMGRGLPKNFNPIEFGSWMGGDRDGNPNVTAATTKEVILLSRWEAAKLYEKELTKLIRG

SEQ ID NO: 148023 - protein, 261 aa, Unknown
  Bacterial polypetide isolated from the Sargasso Sea
YGYEPLAKYNLCSYIGSVMEATLNPPPKPKDSWRQLIQSMSEISTSSYRKNINQSSDFIRYFKTVTPHMALGKLSIGSRPSKRKNVDNINSLRAIPWVFAWTQIRLMLPAWLGTAEALRYSSIKKFKKTLIDMEKNWPYFNSTMDLLDMVISKVDPEISKIYEKNLADDKLIRVGKKLRFQFDAVKKLNDQITPKEIFKQRKIFRGPAIIRNIYSEILNVLQAVVMNKLLKRNLNKKDKKDLNDAMMASIAGISAAIKNTG

SEQ ID NO: 148024 - protein, 309 aa, Unknown
  Bacterial polypetide isolated from the Sargasso Sea
FKLVKKTRLLSKANIANKNKKDPFKNLSKEIKKQKPKNLLKLTRAYNHFMNLYNLAESVDASRTLDQFENFSKNKKNKNIFIEEIFESFFKDNTISNKRIYDLAKRLNIGIVLTAHPTEVKRRTLIQKYHKLTEILEQRNLLQNYPSKIKVLDKKMFDEITIIWNTDELKRYKPSPFDEARWGLAIIEDSLWDTIPKVYRRLNEIFVKNMKKNLPKNFNPIEFGSWMGGDRDGNPLVTSKVTEEVLLLSRWEAAKLYEKSLTKLIRSFSMQKCSKKILEYTGNTCEPYRVYLRPLRDKRRRTHRMIERH

SEQ ID NO: 148025 - protein, 305 aa, Unknown
  Bacterial polypetide isolated from the Sargasso Sea
VKKVRKLSKANKANPNSKKLNNDVINAIKKLDPKNTFKLTRAFSHFMNFMNLAELVDASRSINENENNKKKLNKKNLFIEEIFEDLFRKKNISDNKIYDLAKNLNIGIVLTAHPTEVKRRTLIQKYHRIIEILEEQELFKNFPSKLKVLDKNLYDELTIIWNTDDLKRFKPSPFDEARWGLAIIEDSLWDTVPKVYRKLNSIFVKNMGKNLPKNFNPIVFGSWMGGDRDGNPNVTSEVTRKVILLSRWEAAKLYEKALTKIIRSYSMEKASKKILSKVGQSFEPYRVFLRPLRDKMRITHRSMNN

SEQ ID NO: 148026 - protein, 166 aa, Unknown
  Bacterial polypetide isolated from the Sargasso Sea
KGQSIKREELIEELQAEILILWRTDEVRLKKPTVIDEVENGLYYFRTSLFKSIPEVYKDMEKAIKRVYHTDNIKVPSFIKFGSWIGGDRDGNPFVTPDITREAVYMHAETAIHEYMRRAQNLSTILTHSLELTRPSNQFLESSKRDEIYLTNAFKNTTQDFAKEPY

SEQ ID NO: 148027 - protein, 290 aa, Unknown
  Bacterial polypetide isolated from the Sargasso Sea
KLDEFENSDIKDKHKNIFIEEIFEKLFKNKKIKPQKIYNIAKNLQIGIVLTAHPTEVKRRTLIQKYHKITEIMDQRNLLKDKPSRLKILDKKLYDEFTIIWNTDDLKRFKPTPAEEARWGLAVIEDSLWETIPKVYRRLNAIFVKHMGKGLPKNFNPIEFGSWMGGDRDGNPNVTAAITKEVILLSRWEAAKLYEKELTKLIRGLSMEKCSKKILKATGKTFEPYRVYLRPLRDEMRKTHRLIERYLVAKKPLDKKKLLSSKEEILKPLRVVRESLEQNQSENIASGDCS

SEQ ID NO: 148028 - protein, 220 aa, Unknown
  Bacterial polypetide isolated from the Sargasso Sea
FQCCLQAYRQFVETPGLPEYFTTSTPVEELGSMNIGSRPARRSAAKTGIADLRAIPWVFGWTQSRQIIPGWFGAGTGLRAGMEAGHADDLRRMYAEWHFFSTFVSNVEMTLAKTDLAIARHYVERLVDPKLHHLFDQVVEEHTLTIEMITSITGTALLSDKPMLRRTLEVRDAYLDPISVLQVELLTRSRREKSRDRNDQMQRALLLSINGIAAGLRNTG

SEQ ID NO: 148029 - protein, 179 aa, Unknown
  Bacterial polypetide isolated from the Sargasso Sea
RKNVDNIQSLRAIPWVFAWTQIRLMLPAWLGSADALKYSSSGKLKKILVEMEKDWPFFNSNMDILDMVISKADPEISKIYEENLADNKLKSVGKNLRFQFHKIKKLNKQITPKEIIKARKEFRTSVIVRNIYSEVLNIIQAVTMNKLSRKKYNKEGKKYLNDALMTSIAGISAAMKNTG

SEQ ID NO: 148030 - protein, 254 aa, Unknown
  Bacterial polypetide isolated from the Sargasso Sea
ITKEVILLSRWEAAKLYEKELTKLIRSFSMEKCSKKILKVTGKTFEPYRVFLRPLRDKMRLTHRAIENHLVRHKPLDQNKLLSSKEEILKPLRVVRDSLEKNQNENIASGELLDLMRRAKCFGINLARLDIRQESSRHSQLLYEFIKKKYRADYYKWSEKQRINFLSKHLKTNKKIIKNFRFKNRENLEVWSTFKILADQPEECLGAYIISMTSSASDILAVSFLQKEANINKRLRVVPIFETLDDLKNAKSIM

SEQ ID NO: 148031 - protein, 245 aa, Unknown
  Bacterial polypetide isolated from the Sargasso Sea
NLNIGIVLTAHPTEVKRRTLIQKYHKIIEILEERELFKNFSSKLKVLDKNLYDELTIIWNTDDLKRFKPSPFDEARWGLAVIEDSLWNTVPKVYRKLNSIFVKNMNKNLPKNFNPIVFGSWMGGDRDGNPNVTSDVTRKVILLSRWEAAKLYEKALTKIIRSYSMEKASKKILSKVGQSFEPYRVFLRPLRDKMRITHRSIEQHLVHNKSLDQKKLLSSREEILKPLRVVRESLEQNQNENIANG

SEQ ID NO: 148032 - protein, 286 aa, Unknown
  Bacterial polypetide isolated from the Sargasso Sea
LKSQPSGTVNGKIRITDQGEVIQQKYGYKPLAEYNLCSYIGSVMDASLNPPPKSKTKWRELIEKMSEISTSSYRKYLNQSEDFIRYFKIVTPHKSLGKLAIGSRPTKRKNVDNIQSLRAIPWVFAWTQIRLMLPAWLGTTEALRYGSIKKFKKTMTDMERNWPYFVSTMDILDMVISKVDPEISVIYENNLADASLKRIGKKLRFQFEALVKLHNKITPKEVIKERKQFRKSLFIRNNYTEMLNILQANVMNKLTSKKYKSSDKKFLEDALMTSIAGISAAMKNTG

SEQ ID NO: 148033 - protein, 61 aa, Unknown
  Bacterial polypetide isolated from the Sargasso Sea
VETPGLPEYFTTSTPVEELGSMNIGSRPARRSAAKAGIADLRAIPWVFGWTQSRQIIPGWF

SEQ ID NO: 148034 - protein, 180 aa, Unknown
  Bacterial polypetide isolated from the Sargasso Sea
KRKNVDNIQSLRAIPWVFAWTQIRLMLPAWLGTGDALKYSSIKKYKTILTDMEKNWPFFNSTMDILDMVISKVDPEISEVYENSLADKKLREVGDKLRSEFAIIKKLNRYITPREIINQRKEFRSKVLVRNIYSEVLNILQAVVMNKISKKKFKSNDRKYLNDAMMTSIAGISAAMKNTG

SEQ ID NO: 148035 - protein, 319 aa, Unknown
  Bacterial polypetide isolated from the Sargasso Sea
FLKLVEKFRLLSKNTLSDKNKTRIFSKISKEVKKLSPKNTYKLTRAFSHILILMNLAESLDASRKLNEFENPYFKSKNQNLFIEDIIEGLFKNRKISDKKIYEQATKLDIGIVLTAHPTEVKRRTLIQKYANLIEIMEQRHLYKKYPSKIIELDRKLYSEIAIIWKTDELKRTKPSPLDEARWGLAVIEDSLWDTIPKVYKRLNDIFRKNLKKDLPRDFNPIQFGSWMGGDRDGNPNVTAEVTKKVILFSRWQAAKLYEKELTQLIQDLSMKECSLKIKRATGNSFEPYRVYLRPIRDKVRLTHQLIESHLNNNIALDE

SEQ ID NO: 148036 - protein, 199 aa, Unknown
  Bacterial polypetide isolated from the Sargasso Sea
EQVTPNKTIGKLYIGSRPTKRNTSKDINSLRAIPWVFAWTQIRFLLPAWLGTTEAMDFASEKSNKKILNDMLKNWPFFYEMMDMLDMVLTKTDQRVIKYYEECLADKNSKKIGFQLRQKLNFLISLNKKIIPKHIQNQRKAFRKSIKLRNTYAEILNILQADIMKKLENKRLSKKNEKILMDAMFVTISGISASMKNTG

SEQ ID NO: 148037 - protein, 207 aa, Unknown
  Bacterial polypetide isolated from the Sargasso Sea
NSDFIRYFKTVTPHLALGKLSIGSRPSKRKNVDNIQSLRAIPWVFAWTQIRLMLPAWLGTGDALKYSSIKNYKTTLTDMEKNWPFFNSTMDILDMVISKVDPEISEVYENSLADKKLKEVGDKLRSEFAIIKKLNRYITPQEIINQRKEFRSTVLVRNIYSEVLNILQAVVMNKISKKKFKSDDKKYLNDAMMTSIAGISAAMKNTG

SEQ ID NO: 148038 - protein, 327 aa, Unknown
  Bacterial polypetide isolated from the Sargasso Sea
KRRTLIQKYTKVNDILEKFNKSRIFKIKNIEKENKILEKKLHEQITSIWKTDELKRSKPTPVQEAKWGLAVIEDSLWNSIPKICSRLDEAVQRYSGKQLPINYSPFKFGSWMGGDRDGNPNVNHKITKEVILLSRWEAANLYEKEITKIIQDLSMHECSNEIKRKTGESQEPYRVYLRPVRSKLQKTQKEIELYLLKRKKFNDKLIVNSINEIINPLVVVYNSLCKTKCKALADGSVLDLIRRAYAFGLNLAKLDIRQEASRHTDIISKIYKHKFKKDYLKIDEKEKISFLIKSLKSNKKVFNKRIKLTKDEKETWETFNMLSHTPY

SEQ ID NO: 148039 - protein, 256 aa, Unknown
  Bacterial polypetide isolated from the Sargasso Sea
LAKYNLCSYIDSVMEATLNPPPKPKDSWRQLIQSMSEISTSSYRKNINQSSDFIRYFKTVTPHMALGKLSIGSRPSKRKNVDNINSLRAIPWVFAWTQIRLMLPAWLGTAEALRYSSIKKFKKTLIDMEKNWPYFNSTMDLLDMVLSKVDPEISKIYEKNLADDKLIRVGKKLRFQFDAVKKLNDQITPKEIFKQRKIFRGPAIIRNIYSEILNVLQAVVMNKLLKRNLNKKDKKDLNDAMMASIAGISAAIKNTG

SEQ ID NO: 148040 - protein, 297 aa, Unknown
  Bacterial polypetide isolated from the Sargasso Sea
RAFTHFMNFVNLTETLDSSRKLDEFENSKIKNDNKYIFIEEIFEKLFKSKKISKNKIYNIAKNLNIGIVLTAHPTEVKRRTLIQKYHKITEIMEQRELLKHYPSKIKILEKKLYDEFTIVWNTDDIKRFRPSPTDEARWGLAVIEDSLWETIPKVYRRLNGIFLKNMGKNLPRNFNPIQFGSWMGGDRDGNPNVTSSITKEVILLSRWEAAKLYEKELTKLIRSFSMEKCSSQILRITGKTFEPYRVFLRPLRDKIRLTHRAIENHLVRQKPLDEKKLLSSKEDILKPLRVVRESLE

SEQ ID NO: 148041 - protein, 239 aa, Unknown
  Bacterial polypetide isolated from the Sargasso Sea
YSLGTYIGAVLEATIAPPIHPKKDWRELINKMSELSSEAYRNYLLKDENFLNYFELITPKNILDRLYIGSRPSKRKNSQDIRNLRAIPWVFAWTQIRFLLPAWLGTFEALKISSKEKNKVILKDMLYNWPFFYEMMDMLDMVLTKTDQRVIKFYEECLATNQLKTLGEDLRHKLSLLIDLNKKLIPPHILNQRKEFRKSIMVRETYAEILNLLQASIMLKLNKKNLNKKERDILMDAMI

SEQ ID NO: 148042 - protein, 249 aa, Unknown
  Bacterial polypetide isolated from the Sargasso Sea
ATRLFHGRGGYYLGCEHLCLDWFAPVLLLTSFTPLDAAELAECQQAITARWQVIQPNRPLNLVYQYRSGGETFSQVLAGEVPDPHVVSENGAQFQVHLLRGQNHGLFLDMANGREWVRAHARHKKVLNLFAYTCGFSVAALQGGADEVVNMDMSKGALAIGKQNHLLNGFSAGARFLGHDIFKSWGKLRKLGPYDIVVADPPSNQKGSFVATKDYVRLIRHLPELLAENAEVLLCLNAPELDTQFYASR

SEQ ID NO: 148043 - protein, 266 aa, Unknown
  Bacterial polypetide isolated from the Sargasso Sea
VIQQKYGYEPLAKYNLCSYIGAVMEATLNPPPKPKEKWRALIEKMSDVSTSSYRKNINQNSDFIRYFKTVTPHVSLGKLSIGSRPTKRKNVDNIKSLRAIPWVFAWTQIRLMLPAWLGTAEALRYSSYRNYKSILTDMEKNWPFFNSTMDILDMVISKVDPEISKVYEENLADFKLKRVGKKLRFQFDTVKKLNIIITPKEIINARKKFRKSVIVRNIYSEVLNILQAIVMKKLSSKKHSRIQKKYLQDAMMTSIAGISAAMKNTG

SEQ ID NO: 148044 - protein, 284 aa, Unknown
  Bacterial polypetide isolated from the Sargasso Sea
FETLDDLKNAKSIMENLFSLGWYRNLIKKNHEIMIGYSDSSKDAGKLSASWHQYKLQEEIVQLGKKYKINLTFFHGRGGSAGRGGGPIQSTLRSQPAGSVNGKIRITDQGEMIQQKYGYEPLAKYNLCSYIGAVMQATLKPPSKPKESWRRLIEDMTKISTKSYRKNIRENSDFIRYFKTVTPHVALGKLSIGSRPSKRKNIDNIKGLRAIPWVFAWTQIRLMLPAWLGTGDALKYSSVKKFKSTLVDMEKNWPFFNSTMDILDMVISKVDPDISEIYEDGLAD

SEQ ID NO: 148045 - protein, 284 aa, Unknown
  Bacterial polypetide isolated from the Sargasso Sea
IRQESSRHSQLLAEYIKKKLNQNYSTWDEDRKIKYLSNKMQSKNVLKKFQFKNKENKEVWSTFKVLASQPKECLGAYVISMTSSASDILSVMFFQKEANIKNRLRVVPLFETLDDLINAKPIMEKLFSLKWYRKDINNKQEIMIGYSDSSKDAGKLSASWHQFKLQEEIIKLAKKYKIDVTFFHGRGGSAGRGGGPIQATLRSQPAGSVNGKIRITDQGEVIQQKYGYEPLAKYNLCSYIGSVMEATLNPPPKPKDSWRQLIQSMSEISTSSYRKNINQSSDFI

SEQ ID NO: 148046 - protein, 241 aa, Unknown
  Bacterial polypetide isolated from the Sargasso Sea
YVVILGAVAEASLNPPPSPKKSWRELIEKMSDISKSSYRRNINQSSEFIKYFRTVTPHVALGKLSIGSRPSKRKKTDNIKSLRAIPWVFAWTQIRLMLPAWLGTAEAFRYSYNKKLRKTLFDMEKNWPFFNSMLDILDMVISKVDPNVSKIYEHYLADDNLKKVGKKLRFQFDTIKKLNKKITPVEISNNRKQYRTSIIIRNIYSEVLNIIQPIVIKKLKNKKNFKNKKDLNDALMTSIAG

SEQ ID NO: 148047 - protein, 307 aa, Unknown
  Bacterial polypetide isolated from the Sargasso Sea
PTKSLREDVRYLGNILGKVIKQQEGINFFRLVEDVRRLSKANTSNTDKRKSFQNLSNKIKNLSPINLFKLTRAFTHFMNFINIAESIDGARKLDEYENKNLIGSNKNIFIEEIFENFFKDRKIPNNKIYEIAKNLNIGIVLTAHPTEVKRRTLILKYRKITEILEQRDLLKNFPSKIKILDKKLYDEFTIIWNTDELKRTRPTPFDEARWGLAIIEDSLWETIPKVYRRLNDIFVKNIGKGLPKNFNPIEFGSWMGGDRDGNPNVTAKVTKEVILLSRWEAAKLYEKELTKLIRSLSIDKCSKKIIK

SEQ ID NO: 148048 - protein, 279 aa, Unknown
  Bacterial polypetide isolated from the Sargasso Sea
FFDLVEKVRKLSKANKKNPNQKKLNSKVINVIKKLNPKNTFKLTRAFSHFMNFINLAELVDASRSLNKYENNKKKINKQNLFIEEIFEDLFKKNISKNKIYNLAKNLNIGIVLTAHPTEVKRRTLIQKHHKIIEILEQRELFKNFKSKLKTLDKELFDELTIIWNTDDLKRVRPSPFDEARWGLAVIEDSLWDTVPKVYRKLNSIFVKNMGKNLPKNFNPIVFGSWMGGDRDGNPNVTADVTRKVILLSRWEAAKLYEKALTKIIRSYSMKKCSKKILK

SEQ ID NO: 148049 - protein, 228 aa, Unknown
  Bacterial polypetide isolated from the Sargasso Sea
EILIENMTQISTRSYRKNIRENTDFIRYFKTVTPHLALGKLSIGSRPSKRKNVDNIKGLRAIPWVFAWTQIRLLLPAWLGTGEALKYSSVKKFKSILVDMERNWPFFNSTMDILDMVISKVDPEISEVYEDGLADAKLKKVGDKLRLQFDNIKKINQFITPTEIINQRKKFRSSVIVRNIYTEVLNILQAVVMKKLSRKSIQKKHKKYLDDAMMTSIAGIAAAMKNSG

SEQ ID NO: 148050 - protein, 406 aa, Unknown
  Bacterial polypetide isolated from the Sargasso Sea
MLKRDLYYESIPSKSLRDDVRYLGNILGKVIKKQEGDSFFNLVEKIRLLSKANISGKNNINRFRKIISEVSKLSPSKIFKLSRAFNHFMNFINLSESIDASRKLDDFENSKKKDKHKNIFIEEIFEGLFKNKKISNNKIYNIAKSLDIGIVLTAHPTEVKRRTLIQKYHKITEILEQKELQKNYSSKLKILDKKLYDEFTIIWNTDDLKRFKPTPSEEARWGLAVIEDSLWDTIPKVYRRLNGIFLKNMGKNLPKNFNPIEFGSWMGGDRDGNPNVTAEVTKEVILLSRWEAAKLYEKELTKLIRSLSIEKCSKKIKKETGKTFEPYRVFLRPLRDKMRITHRAIENHLVRKKPLNQKKLLSEKEEILKPLRIVRESLEQNQSENIASGDLKDLMRRAKCFGINLA

SEQ ID NO: 148051 - protein, 361 aa, Unknown
  Bacterial polypetide isolated from the Sargasso Sea
MRDDVRYLGNILGRVIKKQEGEIFFNLVERIRLLSKANIKNKNNKNRFNKITSQIQRLKPIKIFKLARAFTHFMNFINIAESIDASRKLDEFENSGLKDKHKNIFIEEIFENLFKNKKIKPQKIYNIAKNLNIGIVLTAHPTEVKRRTLIQKYHKITEIMDQRNLLKDKPSQLKILDKKLYDEFTIIWNTDDLKRFKPTPVEEARWGLAVIEDSLWETIPKVYRRLNAIFVKNMGKGLPKNFNPIEFGSWMGGDRDGNPNVTAAITKEVILLSRWEAAKLYEKELTKLIRGLSMEKCSKKILKITGKTFEPYRVYLRPLRDEMRKTHRLIERHLVAKKPLDKKKLLYSKEQILKPLRVVRE

SEQ ID NO: 148052 - protein, 279 aa, Unknown
  Bacterial polypetide isolated from the Sargasso Sea
SVYGRIRITDQGEMIQQKYGYEPLAKYNLCSYIGSVMQATLNPPPHPKDSWRKLIEEMTKISTLAYRKNINENSDFIRYFKTVTPHLALGKLSIGSRPSKRKNVDNIQSLRAIPWVFAWTQIRLMLPAWLGTGDALKYSSVKNQKTILTDMEKNWPFFNSTMDILDMVISKVDPEISEVYEDSLADKKLREVGDKLRSEFAIIKKLNRYITPREIINQRKKFRTTVLVRNIYSEVLNILQAVVMNKISKKKLKSNDKKYLNDAMMTSIAGISAAMKNTG

SEQ ID NO: 148053 - protein, 173 aa, Unknown
  Bacterial polypetide isolated from the Sargasso Sea
IKSLRAIPWVFAWSQIRLLLPAWLGTGEALRYSSIKKLRKTLIEMEKNWPFFNSTMDLLDMVISKVDPDISKIYEEALGDEKLKRVGKKLRFQFETIKKLNNQITPKEIHKQRKNFRGPAIIRNIYSEVLNVLQAVVMNKLSKKNLKKNTKKNLNDAMMTSIAGISAAIKNTG

SEQ ID NO: 148054 - protein, 303 aa, Unknown
  Bacterial polypetide isolated from the Sargasso Sea
MQGFIDALATIKVSEDATRLFHGRGGHYPGCEHLCLDWFAPVLLLTSFSALEAAELALCQQAITARWQVIQPNQPLNLVYQYRSGGETFSQLLAGDVPEPHIVTENGARFQVHLLRGQNHGLFLDMANGREWVRANARHKKVLNLFAYTCGFSVAALQGGADEVVNMDMSKGALAIGKQNHLLNGFTAGARFLGHDIFKSWGKLRKLGPYDIVVADPPSNQKGSFVATKDYVRLLRHLPELLADNAEVLLCLNAPELDTQFLRQQVEEAAPELEYLERLPNPASFADISEEKSLKVLRYRLKA

SEQ ID NO: 148055 - protein, 171 aa, Unknown
  Bacterial polypetide isolated from the Sargasso Sea
GLRAIPWVFAWTQIRLMLPAWLGSAEALRYSSIKNFEKTIIDMEKNWPFFNSMMDILDMVISKVDPDISKIYEEYLADKDLKRVGKKLRFQFEVIKKLNKKITPKEIINERKKFRSGVIVRNIYTEVLNIIQAVVMNKIKNKKLNSDKKNDLNDALLTSIAGISAAMKNTG

SEQ ID NO: 148056 - protein, 236 aa, Unknown
  Bacterial polypetide isolated from the Sargasso Sea
PPYPKKEWRELIEKMSEISTISYRKNINENSDFIRYFKTVTPHVSLGKLSIGSRPSKRKNVDNIQSLRAIPWVFAWTQIRLMLPSWLGSAKALRFSSKSKYKKTLIKMEKDWPFFNSMMDILDMVLSKADPEISKIYEENLADYNLKKVGSKLRIQFQEIQKLNKQITPKEIIKARKEFRTTVIVRNIYSEVLNIVQAATMSKLSRKRYNFKQKKYLNDALMTSIAGISAAMKNTG

SEQ ID NO: 148057 - protein, 186 aa, Unknown
  Bacterial polypetide isolated from the Sargasso Sea
MDQDQPKGKNVDNIQSLRAIPWVFAWTQIRLMLPAWLGTTEALRYGSIKKFRRTMTDMERNWPYFVSTMDILDMVISKVDPEISVIYENNLADASLKRIGKKLRFQFDALVKLHNKITPKEVVKERKEFRKALFIRNNYTEMLNILQANVMNKLTNKKYKNLDKKFLEDALMTSIAGISAAMKNTG

SEQ ID NO: 148058 - protein, 238 aa, Unknown
  Bacterial polypetide isolated from the Sargasso Sea
MNLGNKLKVRIPNQEFLQELSDKSYEEYRSFFTDPNLIDYFEMGTPVKLLSTLNIGSRPTKRTKNVKTLQNYRAIPWVFGWAQTRNTLTGWYGSGTALNYMIEKYGINYVRKIYKNSDFMQNLISNIEMTLSKSDLKIAKRYVDELLDEDALKIYKKILKESQLANISIKKIKKIDELLEDNKILKNTLNIRNAYLDPLSLIQITLMKKLKMRKLNSVENNSLLLSVNGLAAGLRNTG

SEQ ID NO: 148059 - protein, 369 aa, Unknown
  Bacterial polypetide isolated from the Sargasso Sea
MKKRDLYYERIPTKLLREDIRYLGNILGEVIKEQEGIKFFNLVEKVRKLSKANKINLKNKNSFKKLVKTVRNSNSIDTLRLTRAFTHLINFINLAESIDTSRNLDEYETKRKNLKYNIFIEEIFEKLFKNKKISNNKIYNLAKNLDIGIVLTAHPTEVKRRTLIQKYHKIIEILEQRDLYKSHPSKLTQLNKQLHDEFTIIWNTDDLKRTKPSPFDEARWGLAIIEDSLWDTIPKVYRRLNSIFLKNMNRGLPKNFNPIQFGSWMGGDRDGNPNVTAKVTKEVILLSRWEAAKLYEKSLTKIIRSYSMKKCSKKISSKVGKTFEPYRVFLRPLRDKLRFTHRSIEQYFINKTPLDKKILLSSTEEILKP

SEQ ID NO: 148060 - protein, 303 aa, Unknown
  Bacterial polypetide isolated from the Sargasso Sea
MQRFIEALATIEVGEDATRLFHGRGGYYLGCEHLCLDWFAPVLLLTSFTPLDAAELAECQQAITARWQVIQHNRPLNLVYQYRSGGETFSQVLAGEVPDPHVVTENGAQFQVHLLRGQNHGLFLDMANGREWVRAHARHKKVLNLFAYTCGFSVAALQGGADEVVNMDMSKGALAIGKQNHLLNGFSSGARFLGHDIFKSWGKLRKLGPYDIVVADPPSNQKGSFVATKDYVRLIRHLPELLAENAEVLLCLNAPELDTQFLRQQVEDAAPALEYLERLPNPAAFVDVSEEKSLKVLRYRLKA

SEQ ID NO: 148061 - protein, 173 aa, Unknown
  Bacterial polypetide isolated from the Sargasso Sea
IQSLRAIPWVFAWTQIRLFLPAWLGTGEALKFSSIKKNLKTLIDMEKNWPFFNSTMDILDMVISKVDPDISEVYETNLADKSLKKVGDKLRNEFNTIKRLNKNITPKVIIGQRKKFRGNIIVRDIYSEVLNILQATVMKKLSKRKINKNHKKYLNDAMMTSIAGISAAMKNTG

SEQ ID NO: 148062 - protein, 247 aa, Unknown
  Bacterial polypetide isolated from the Sargasso Sea
FGAVVEATLNPPPFPKKNWRNLIEKMSDISKSSYRKNINDNSDFINYFKTVTPHISLGKLSIGSRPSKRKNIDNIKSLRAIPWVFAWTQIRLMLPAWLGSAEALRYSSIKKFRKTLIDMEKNWPFFNSMMDILDMVISKADPEISRIYEDNLADKKLKRVGKKLRFQFNVIKNLNKKITPGEIIKIRKQFRSSVIVRNIYSEVLNIAQAIVIKKLKQKKIKSVNKKYLDDALMTSIAGISAAMKNTG

SEQ ID NO: 148063 - protein, 180 aa, Unknown
  Bacterial polypetide isolated from the Sargasso Sea
IAKKYKIDVTFFHGRGGSAGRGGGPIQATLKSQPPNTVNGKIRITDQGEVIQQKYGYQPLAIYNLCSYIGAVMEATLTPPPVPKKDWRNLIEKMSDISKSSYRKNINQSSDFIKYFKTVTPHVSLGKLSIGSRPSKRKNIDNIKGLRAIPWVFAWTQIRLMLPAWLGSAEALRYSSIRKI

SEQ ID NO: 148064 - protein, 349 aa, Unknown
  Bacterial polypetide isolated from the Sargasso Sea
MKKRDLYYERIPTKLLREDFRLLGTFLGKVIKDQEGNIFFNIVEKFRLLSKNTLTDKNKSKVFSKISTEVKKLSPENTFKLTRAFSHILNLLNLAESIDASRKLNEYENPYFKNKNQNLFIEDLIEGLFKNKKISDKKIYKQATKLDIGIVLTAHPTEVKRRTLIQKYANLINILEQRHLYKKYPSKIIELDRQLYSEIAIIWKTDELKRTKPSPLDEARWGLAVIEDSLWDTIPKVYKRLNDIFRKNLKKDLPRDFNPIQFGSWMGGDRDGNPNVTAEVTKKVLLFSRWQAAKLYDKELTKLIQDLSMEECSTKIKKITGSSFEPYRVFLRPIRNKVRLTHQLMKIIK

SEQ ID NO: 148065 - protein, 207 aa, Unknown
  Bacterial polypetide isolated from the Sargasso Sea
MIEDKNLIYYFESVTPVNLLSVLNIGSRPSKRSKISSVKNYRAIPWVFGWAQTRQTITGWYGSGTALEELINKYGINQVRKIYNSSSFFQNLLSSIEMTLAKTDLNISRFYAENLVEKEMYYLYENIVEESLKVESAIKRITLSKELLDSNKILKNTLAIRDTYLDPLSLIQVFLLQKLQKNELTNYEKTSLLLSVNGLAAGLRNTG

SEQ ID NO: 148066 - protein, 210 aa, Unknown
  Bacterial polypetide isolated from the Sargasso Sea
MSRKTELSETIHILGEVLGRVIKDQEGISAFNKIEKIRLLSKSSRGKNNIKAIEKSFKKLKSEISKLTNKESLIIARSFSKFLNLSNIAESLYSINNIHDHNIRKIQETNEIVLLEEAIIKILKNKNVSKENFYKTASKLKIDLVLTAHPTEVKRRTIIQKYAKINKILDEFNRLGTLSKENIDREKNLVKNELHEEITSIGKLRNKKIK

SEQ ID NO: 148067 - protein, 406 aa, Unknown
  Bacterial polypetide isolated from the Sargasso Sea
MKKRDLYYERIPTKLLREDFRLLGTFLGRVIKDQEGLAFFKIVEKFRVLSKNTLSDKNKRKVLSRISKEVKKLTPENTFKLSRAFSHILNLLNLVESLDASRKLNEYENPYFKSKNQNLFIEDIIEGLFKNKKISDKNIYEQAKKLDIGIVLTAHPTEVKRRTLIQKYANLIYIMEQRHLYKKYPSKIIELDRQLYSEIAIIWKTDELKRTKPSPLDEARWGLAVIEDSLWDTIPKVYKRLNDIFRKNLKKDLPRDFNPIQFGSWMGGDRDGNPNVTAEVTKKVILFSRWQAAKLYEKELTKLIQDLSMEECSAKIKKATGNSFEPYRVYLRPIRDKVRLTHQLIENHLNNNSNLNEEKLIQNKHEITIPLREVRNSLKLNKGDHIANADLLDLMRRVRCFGINLA

SEQ ID NO: 148068 - protein, 400 aa, Unknown
  Bacterial polypetide isolated from the Sargasso Sea
MIKRDLYYERIPTKSLREDVRYLGSILGKVIKKQEGIVFFKLVEKVRLLSKANIANNINQRSFQNLSNQIKNLNPNNLFKLTRAFTHFMNFINIAESIDGARRLDEYENKSQNKINKNIFIEEIFENLFKNKKISSNKIYNIAKNLNIGIVLTAHPTEVKRRTLIQKYHKITEILEQRDLLKKYPSKLKILEKKLYDEFTIIWNTDDLKRTRPTPFDEARWGLAIIEDSLWETIPKVYRRLNDIFVKNMGKGLPKNFNPIEFGSWMGGDRDGNPNVTAKITKEVILLSRWEAAKLYEKELTKLIRSLSIEKCSKKIIAITGKTFEPYRVFLRPLRDKIRLTHELIEQHLVEKTPLDQKKLISTREEILIPLRVVRQSLEENKNENIASGDLLDLMRRAKC

SEQ ID NO: 148069 - protein, 350 aa, Unknown
  Bacterial polypetide isolated from the Sargasso Sea
MVISDSNKDGGYLTANWELNKAQVSLTKVGDEAGIPISFFHGRGGSVSRGGAPTGIAIAAQPAGSIHGQMRITEQGEVVSSKYANEGTAQYQMELLAASVFQHTLRSLNEDQLKPNSDFDNAMELLSSLALKKYRELANSKGLVDYYSAASPVEELAKMNIGSRPARRTGENSLKDLRAIPWVFAWTQNRHLVPGWYGVGTAIKEFTDKHADKGEKLIKKMFTDSRLFRLIIDETEKTLALIDFDICEAYSTLVENKTEREVIFNMISAEYNLTKEVILNITGEEKLCQRFKKFSRKLNRRSPVLHQAGLEQIKLIKEFRQRNENGDNIDDLIPLLLSINCISSGLGWTG

SEQ ID NO: 148070 - protein, 306 aa, Unknown
  Bacterial polypetide isolated from the Sargasso Sea
NHPTLLNNWILSRERALKEIREIKDVKSQDSYLFIDCVKKSLRNITSWNTNSEYQQKKISSLLKDVEKFLNFIDKDFNFEIEYPFNKIYQWLEDNTCEECIEYIVSIMMEPYNNIVNPLVREMSSDEEKYFNIPTYRKVEELRNIIEAKYPNILDINFEEKENNKNFWFISKNKEEPRLADRFEEHGSELEQPLAIARDIKKLYDKLLVSKNSLTIAEFLTSNSELRHVVRRAFIVEKFPYSEIQDNTIGKDLIPIDMLRLKLSFFGALKFDPRSDKWLRICMFQGAPLPNELKNYDEHWVYKTNI

SEQ ID NO: 148071 - protein, 178 aa, Unknown
  Bacterial polypetide isolated from the Sargasso Sea
KNIDNIKGLRAIPWVFAWTQIRLMLPAWLGSAEALRYSSIEKFEKTLIDMEKNWPFFNSMMDILDMVISKVDPDISKIYEEYLADKDLKRVGKKLRFQFEVIKKLNKKITPKEIINERKKFRSGVIVRNIYTEVLNIIQAVVMNKIKNKKLNSDKKNDLNDALLTSIAGISAAMKNTG

SEQ ID NO: 148072 - protein, 280 aa, Unknown
  Bacterial polypetide isolated from the Sargasso Sea
PYSVNGNIRITDQGEVIQQKYGYEPLANYNLCSYIGAVTEATLNPPPVPKKNWRDLIEKMSEISKNSYRKNINQSSDFIQYFRTVTPHKALGKLSIGSRPSKRKNVDNIKSLRAIPWVFAWTQIRLMLPAWLGSAEALRYSHIKKFRKTLYDMEKNWPFFNSMLDMLDMVISKADPEISKIYEEFLADKKLQRVGQKLRFQFDTIKELNKKITPKEILKIRKEFRSKVLARNIYSEVLNIIQPIVIYKLKKKKDKKNRKYLEDALLTSIAGISAAMKNTG

SEQ ID NO: 148073 - protein, 285 aa, Unknown
  Bacterial polypetide isolated from the Sargasso Sea
KTVRGMIKITEQGEVLSYKYAVPQSASYELELAISGLIKASKHLVIDDTVCTNNFEEIMSEMSIVGEKKYRDLTDDKEGIMDYFYEATPVQELAELNIGSRPSHRKKTQRSKYSIRAIPWVFGWSLSRHTLPAWYGLGSALTQMIASDQSSMDKLKTMYAEWPFFRVLLDNIQMALAKSDLGIARDYSLLVKDRNAANQIIDDIEKEFEWTVQTLLRIVGSDQLLSDNTKLSLSLSRRQPYLDPLNYIQVMLLKAHREIPDEDTVNLDPLLRTIHAIATGMKNTG

SEQ ID NO: 148074 - protein, 284 aa, Unknown
  Bacterial polypetide isolated from the Sargasso Sea
CLGAYVISMTSSASDILSVMFFQKEANIKNRLRVVPLFETLDDLINAKPIMEKLFSLKWYRKDINNKQEIMIGYSDSSKDAGKLSASWHQFKLQEEIIKLAKKYKIDVTFFHGRGGSAGRGGGPIQATLRSQPAGSVNGKIRITDQGEVIQQKYGYEPLAKYNLCSYIGSVMEATLNPPPKPKDSWRQLIQSMSEISTSSYRKNINQSSDFIRYFKTVTPHMALGKLSIGSRPSKRKNVDNINSLRAIPWVFAWTQIRLMLPAWLGTAEALRYSSIKKFKKNTY

SEQ ID NO: 148075 - protein, 272 aa, Unknown
  Bacterial polypetide isolated from the Sargasso Sea
SGDLLDLMRRTKCFGINLAKLDIRQESKRHSQLISELIKKKYKSNYLSWSEDKKISFLSSKLRTKKNIINNFLFKNKENKEVWSTFKILSEQPKECLGAYVISMTSSSSDILSVLFLQKEAKIKDRLRVVPLFETLDDLINAKSIMEKIFSLNWYKKLINFKQEIMIGYSDSSKDAGKLSASWHQYKLQEEIIKLAKKYKIEVTFFHGRGGSAGRGGGPIQATLKSQPPNSVNGKIRITDQGEVIQQKYGYEPLAKYNLCSYIGAVVEATLN

SEQ ID NO: 148076 - protein, 321 aa, Unknown
  Bacterial polypetide isolated from the Sargasso Sea
PYRVFLRPLRDKMRFTHRAIEQFIVNKKPLDYNKLLNSKEEILKPLRIVRESLEENQSENIASGELLDLMRRAKCFGINLAKLDIRQESSRHSQLINELVQKKNKHNYLKWSEEEKIKFLSSKMKKKSNFIKNFNFKNKENKEVWLTFKILSEEPPECLGAYVISMTSSASDIISVLYLQKEANIKNRLRVVPLFETLDDLINAKSIMASLFSLKWYRDLIKNKQEVMIGYSDSSKDAGKICASWHQYKAQEEIIKIAKKYKIDVTFFHGRGGSAGRGGGPIQATLKSQPPNTVNGKIRITDKGEVIQQKYGYQPLAIYNL

SEQ ID NO: 148077 - protein, 299 aa, Unknown
  Bacterial polypetide isolated from the Sargasso Sea
MIKRDLYYERIPTKSLRNDVRYLGNILGKVIREQEGNTFFKLVEKTRLLSKANIANKNKKDPFKNLSKEIKKQNSKDLLKLTRAYNHFMNLYNLAESVDASRTLDQFENFSIDKKNKNIFIEEIFESFFKNKNISNKEIFDLAKRLNIGIVLTAHPTEVKRRTLIQKYHTLTEILEQRNLLKNYPSKIKVLDKKMFDEITIIWNTDELKRYKPSPFDEARWGLAIIEDSLWDTIPKVYRRLNEIFVKNMKKNLPKNFNPIEFGSWMGGDRDGNPFVTSKVTQEVLLLSRWEAAKLYEKA

SEQ ID NO: 148078 - protein, 317 aa, Unknown
  Bacterial polypetide isolated from the Sargasso Sea
SKPSPADEARWGLAIIEDSLWETIPKVYRRLNEIFLKNMGKGLPKNFNPIEFGSWMGGDRDGNPNVTSKVTKEVLLLSRWEAAKLYEKELTKLIRSYSMKKCSKKIQKLTGKSFEPYRVFLRPLRDKMRFTHRAIEQFIVNKKPLEYNKLLNSKEQILKPLRIVRESLEENQSKNIASGELLDLMRRAKCFGINLAKLDIRQESSRHSQLINELVKKKNKHNYLKWSEEEKIKFLSSKMKKKSNFIKNFNFKNKENKEVWSTFKILSEEPPECLGAYVISMTSSASDILSVLYLQKEANIKNKLRVVPLFETLDDLI

SEQ ID NO: 148079 - protein, 258 aa, Unknown
  Bacterial polypetide isolated from the Sargasso Sea
MRYIPVFTAHPTEAKRRSKLEAMRRIFNTILELQSYKGQSIKREELIDELQAEILILWRTDEVRLRKPTVLDEVENGLYYFRTSLFRAIPEVYRDLEKAIKRVYHTDNVKVPSFIRFGSWIGGDRDGNPFVTPDITREAVYMHAETALHEYMRRAQKLSTLLTHSSGLTTPSNEFLSSLKEDEKYLQGAFEDTTQDFAKEPYRRKLKIIRYRLKERLNVIKQLKNKNEIRSPHAYKSEKELLNDLYLIKDSLISDNDK

SEQ ID NO: 148080 - protein, 307 aa, Unknown
  Bacterial polypetide isolated from the Sargasso Sea
QKIQTKRVIKAIRDLSPKNTFKLTRAFSHFMNLMNLAELIDTSRNLNEYENNKKKFKNNNLFIEEVFENLFNNKNISNIKIYNTAKKLNIGIVLTAHPTEVKRRTLIQKYHNIIEILEQRNLLKNYPSKMKILDKKLFDELTIIWNTDDLKRFKPSPFDEAKWGLAIIEDSLWDTIPKVYRRLNSIFVQNMGKGLPKNFNPIQFGSWMGGDRDGNPNVTAEVTKKVILLSRWEAAKLYEKYLTKLIRSYSMEKCSKKIKRKVGKSFEPYRVFLRPLRDKMRTTHRSIEQYLVNNKPLDNRKLLNPRE

SEQ ID NO: 148081 - protein, 317 aa, Unknown
  Bacterial polypetide isolated from the Sargasso Sea
SKQILKKTGKSYEPYRVFLRPLRDKMRITHRMIEQHLVNKKPLDQKKLLNSKEEILKPLRVVRQSLEQNNNENLASGELLDLMRRAKCFGINLAKLDIRQESSRHSQLISEFVKKKYNKDYSKFSEIEKINFLKTKLNSSKNVINKFKFKNRENSEVWSTFNILAEEPSECLGAYVISMTSAASDILSVSFLQKEAKIKNKLRVVPLFETLDDLINAKSIMESLFSHKWYRKLINHKQEVMIGYSDSSKDAGKICASWHQYKAQEEIVKLGKKFNIEITFFHGRGGSAGRGGGPIQATMRSLPPNSVNGRIRITDQG

SEQ ID NO: 148082 - protein, 290 aa, Unknown
  Bacterial polypetide isolated from the Sargasso Sea
NLKVTGKTFEPYRVFLRPLRDKMRLTHRAIENHLVRHKPLDQNKLLSSREEILKPLRVVRDSLEKNQNENIASGELLDLMRRAKCFGINLARLDIRQESSRHSQLLYEFIKKKYRADYYKWSEKQRINFLSKYLKTNKKVIKNFKFKNRENREVWSTFKILADQPEECLGAYIISMTSSASDILAVSFLQKEANINKRLRVVPLFETLDDLKNAKSIMENLFSLSWYRKLIKNNHEIMIGYSDSSKDAGKLSASWHQYKLQEEIVKLGKKYKIDLTFFHGRGGSAGRGGG

SEQ ID NO: 148083 - protein, 280 aa, Unknown
  Bacterial polypetide isolated from the Sargasso Sea
KNKENKEVWSTFKLLADEPLECLGAYVISMTSAASDVLAVYLMQMQANIKNKLRVVPLFETLQDLKNAKSIMERLFSLSWYRKLIKNKQEIMIGYSDSSKDAGKLSASWHQYKLQEEVLIIAKKYKIDLTFFHGRGGSHGRGGGPIQATMRSQPPNSVYGRIRITDQGEMIQQKYGYEPLAKYNLCSYIGSVMQATLNPPPHPKDSWRKLIEKMTKISTSAYRKNINDNSDFIRYFKTVTPHLALGKLSIGSRPSKRKNLDNIQSLRAIPWVFAWTQIRL

SEQ ID NO: 148084 - protein, 281 aa, Unknown
  Bacterial polypetide isolated from the Sargasso Sea
LAESIDASRTLDIYENTKKDKKLKNIFIEEIFENFFKNKKISNSKIYNVAKQLHIGIVLTAHPTEVKRRTLIQKYHTLTEILEQRNLLKNYPSKIKILDKRMFDEITIIWNTDELKRSKPTPSEEARWGLAIIEDSLWETIPKVYRRLNQIFVKNMGKGLPKNFNPIEFGSWMGGDRDGNPFVTSNVTKEVILLSRWEAAKLYEKSLTKLIRSYSMQKCSKKIRKFAGKSYEPYRVYLRPLRDKIRKTHRSIEQHLVNNTPLNEKILISSKKEILKPLRDV

SEQ ID NO: 148085 - protein, 305 aa, Unknown
  Bacterial polypetide isolated from the Sargasso Sea
LAIIEDILWDTIPKVYRKLNSIFVKNMNKNLPKNFNPIVFGSWMGGDRDGNPNVTAEVTRKVILLSRWEAAKLYEKALTKIIRSYSMEKCSKKILKKVGNSFEPYRVFLRPLRDKMRITHRLIEQHLVQKKPLDQKKLLSSREEILRPLRVVRESLEENQNENIASGDLLDLMRRAKCFGINLARLDIRQESSRHKQLISELMKAKYNKNYLNFSEKEKLNFLRSSITSKSKKIGNFRFKNKENKEVWSTFKTLSKEPPECLGAYVISMTTSASDILSVSFLQKEAEIKDKLRVVPFVETLDDLI

SEQ ID NO: 148086 - protein, 283 aa, Unknown
  Bacterial polypetide isolated from the Sargasso Sea
LIKNKQEVMIGYSDSSKDAGKICASWHQYKAQEEIIKIAKKYKIDVTFFHGRGGSAGRGGGPIQATLKSQPPNTVNGKIRITDQGEVIQQKYGYQPLAIYNLCSYIGAVMEATLTPPPVPKKDWRNLIEKMSDISKSSYRKNINQSSDFIKYFKTVTPHVSLGKLSIGSRPSKRKNIDNIKGLRAIPWVFAWTQIRLMLPAWLGSAEALRYSSIEKFEKTLIDMEKNWPFFNSMMDILDMVISKVDPDISKIYEEYLADKDLKRVGKKLRFQFEVIKKLNKKI

SEQ ID NO: 148087 - protein, 254 aa, Unknown
  Bacterial polypetide isolated from the Sargasso Sea
MAEVTRKVILLSRWEAAKLYEKALTKIIRSYSMEKASKKISSKVGKSFEPYRVFLRPLRDRMRITHRSIEQHLVYSKPLDQKKLLSSKEEILKPLRVVRESLEQNQNENIASGELLDLMRRAKCFGINLARLDIRQESSRHEKLISELVKTKYNKNYLNLSEKEKLNFLRLSITSKSNKIGNFQFRNKENKEVWSTFKTLAKEPPECLGAYVISMTTSASDILSVSFLQKEAEIKDKLRVVPLFETLNDLINAK

SEQ ID NO: 148088 - protein, 183 aa, Unknown
  Bacterial polypetide isolated from the Sargasso Sea
LDLMRRAKCFGINLAKLDIRQESSRHSQLIAEYVKKKFNQNYSHWDENKKINFLSKNLKSKKNNINNFTFKNRENKEVWSTFKAIASEPSECLGAYVISMTSSASDILTVSFLQKEAKIKNKLRVVPLFETLDDLINAKPIMEKLFSLGWYRKLINYKQEIMIGYSDSSKDAGKLSASWHQYK

SEQ ID NO: 148089 - protein, 262 aa, Unknown
  Bacterial polypetide isolated from the Sargasso Sea
RDLLIDHPSKLKILDKKLYDELTIIWNTDDLKRFKPSPFDEARWGLAVIEDSLWDTIPKVYRRLNSIFLKNMKKGLPKNFNPIEFGSWMGGDRDGNPNVTAAVTKNVILLSRWEAAKLYEKSLTKIIRSYSMKKCSNKISRKVGKTFEPYRVFLRPLRDKMRITHRSIEQHLVYKKPLDQKKLLRQREEILKPLRIVRESLEQNNNENIASGELLDLMRRAKCFGINLARLDIRQESVRHSQLISEFVKNRYKKNFLKFDEK

SEQ ID NO: 148090 - protein, 289 aa, Unknown
  Bacterial polypetide isolated from the Sargasso Sea
IYEALLSQPPGTVNGRTRVTEQGEIIQQKYATESLAEYSLGTYIGSVLEATLAPPIKPKKNWRELMNAMSKVSTKAYRNNFFNKDFLRYYFNITPQRLLEQLSIGSRPAKRNKSKDVKSLRAIPWVFAWTQIRFLLPAWLGIYEALNFAIKNKNINTLKEMLKVWPYFYAMMDMLDMVLAKTDQRIIKFYEECLGDHSLKNTGEKLRKQLSTLIYLNRKIIPTYVLEQRKEYRDSIRKRNTYAEVLNILQADIMKKLYKKKLKTKDKKLLIDAMLVTIAGIAAAMKNVG

SEQ ID NO: 148091 - protein, 289 aa, Unknown
  Bacterial polypetide isolated from the Sargasso Sea
QYKLQEEILALSKKFKIKLSFFHGRGGSAGRGGGPIQATLKSQPPGSVNGKIRITDQGEVIQQKYGYEPIAKYNLCSYISSVMLATLIPPPQPKENWRNLIKSMSDISKSSYRKNLTSSTEFIRYFKTVTPHLALGKLSIGSRPSKRKNLDNIKGLRAIPWVFAWTQIRLMLPAWLGTAEALRYSSIRKFKKTLIDMEKNWPFFNSTMDLLDMVISKVDPEISKIYEGYLADDNLKRVGKKLRFQFEALKKLNHSITPSEILKQRKVFRSPAIIRNVYSEVLNILSSNQ

SEQ ID NO: 148092 - protein, 235 aa, Unknown
  Bacterial polypetide isolated from the Sargasso Sea
DILSVYFLQMQAQNKNLLRVVPLFETLDDLKNANGVMTNLFKLSWYRKMIKSKQEVMIGYSDSSKDAGKLSASWHQYKLQEELRSLAKKYKIDLVFFHGRGGSPGRGGGPIQATLKSQPSGTVNGKIRITDQGEVIQQKYGYKPLAEYNLCSYIGSVMDASLNPPPRSKTNWRELIQNMSEISTSSYRKYLNQSEDFIRYFKTVTPHKSLGKLAIGSRPTKRKNVDNIQSLRAIP

SEQ ID NO: 148093 - protein, 327 aa, Unknown
  Bacterial polypetide isolated from the Sargasso Sea
TFEPYRVYLRPLRNKVRLTHKLIEQHLIENVPLDQKKLLCNREEILKPLRVVRESLEENNSENIASGDLLDLMRRAKCFGINLARLDIRQESSRHSQLISEILKRKYKFNYNNLSEDKKIKFLSSKIKSKTNLINRFSFKNKENKEAWETFKILSKEPKECLGAYVISMTSAASDILSVVYLQKEANIKEPLRVVPLFETLNDLINAKPIMEKLFSLNWYRKLINYKQEVMIGYSDSSKDAGKLSASWHQYKAQEEIIKIAKKYKIDVTFFHGRGGSAGRGGGPIQATLRSQPPNSVNGKIRITDQGEVIQQKYGYEPMAKYNLCSY

SEQ ID NO: 148094 - protein, 277 aa, Unknown
  Bacterial polypetide isolated from the Sargasso Sea
CSNKITKVVGKSFEPYRVYLRPLRDKIRKTHRLIEHHLINGEPLDQSKLLNSKEEILKPLRVVRESLEQNQCENIASGELLDLMRRTKCFGINLARLDIRQESARHSQLINEFFLKKYKKKYLMLSEKEKLKFFKNTLTSKKNLLNNFKFKNKENKEVWSTFNILSKEPKECLGAYVISMTTLASDILSVSFLQKEANIKDKLRVVPLFETLDDLINARKIMETLFSQNWYRKLIKNSQEIMIGYSDSSKDAGKLCASWHQYKAQEEIIKLAKKYNI

SEQ ID NO: 148095 - protein, 271 aa, Unknown
  Bacterial polypetide isolated from the Sargasso Sea
TEQGEVIQQKYDTASLAENSLGTYIGSVFEATLIPPVKPKQKWRNVMDEMSKVSAKAYHSNIMDDQNFLRYFDEVTPQRNLEKLFIGSRPTRRSASKDIKSLRAIPWMFAWTQMRFILPAWLGILEALSETKKKHTNKILKEMLNQWPFFYAMMDMLDMVLVKTDQRVIEFYEECLADRTLKNTGRNLRGQLNKLIKMNREIMPKHILEERESYRNSIKIRNTYSDILNLLQADVMKKLNSANKIRSKSQKDLLNDTMMVTVAGISAGMKN

SEQ ID NO: 148096 - protein, 242 aa, Unknown
  Bacterial polypetide isolated from the Sargasso Sea
NRPTPVEEARWVFAAIENSLWKAIPNVLRQTDATLRRATGLHLPLEAAPIRFASWMGGDRDGNPNVTAMVSREVLLTARWVAADLYLREIEGLITALSMSEASEELLRLTGDSAEPYRVLLKPLRQRLRATREWARAAIEHGQPAPAEVLQDCAELRRPLELCYRSLHARGMGMIADGALLDCLRRLAVFGLFLVRLDIRQDAARHAAALAEITDYLGLGDYQAWDEQRRLDWLQLELSNRR

SEQ ID NO: 148097 - protein, 194 aa, Unknown
  Bacterial polypetide isolated from the Sargasso Sea
MRYIPVFTAHPTEAKRRSKLEAMRRIFNTILELQSYKGQSIKREELIDELQAEILILWRTDEVRLRKPTVLDEVENGLYYFRTSLFRAIPEVYRDLEKAIKRVYHTDNVKVPSFIRFGSWIGGDRDGNPFVTPDITREAVYMHAETALHEYMRRAQKLSTLLTHSSGLTTPSDEFLSSLKEDEKYLQGAFEDTT

SEQ ID NO: 148098 - protein, 295 aa, Unknown
  Bacterial polypetide isolated from the Sargasso Sea
PVQEAKWGLAVIEDSLWNSVPKICSRLDEAVQKYSGKKLPIHYSPFKFGSWMGGDRDGNPNVDHKITKEVILLSRWEAANLYEKNLTKIIQDLSMHECSHKIRKVVGNSQEPYRVYLRPIRSKLKNTQKEIENFLNEKKQLNKNLLVNSIQEIIDPLTTVYESLCSVKCKALADGEVLDLIRRAYSFGLNLAKLDIRQEASRHSSLISKFYKIKTKKSYFNLTEKQKISFLIKLIKANKKVNFNKIKLSSEDKETWNTFKLLGQTPLECLGAYVISMASSSSDVLAVMFFKKQLV

SEQ ID NO: 148099 - protein, 283 aa, Unknown
  Bacterial polypetide isolated from the Sargasso Sea
ACYQRQLMLELYISSVQSLRQQLSISMQWSQVAPSLLESLEMDRLRFPEIYERRAARYRLEPYRLKLCYVLEKLERTLARNNQLSEAGWQMPCEALADPKDGLGNAEVLHYTSVDQFRSDLELVRNSLVSTELSCEQLDTLLHQVHIFGFSLASLDIRQESTRHSDAIDELTRSLELPQAYGDMDETERMAWLLQELQTRRPLIPPAASWSAATAETLAVFRMLQRLQEEFGPRICNSYVISMSHTASDLLEVLLLAKEAGLVDPPNKRASLLVVPLFETVED

SEQ ID NO: 148100 - protein, 283 aa, Unknown
  Bacterial polypetide isolated from the Sargasso Sea
DSSKDAGKICASWHQYKAQEEIVKLGKKFNIDVTFFHGRGGSPGRGGGPIQATLRSQPPNSVNGKIRITDQGEVIQQKYGYEPIAEYNLCSYIGAVTEATLNPPPVPKQNWRELIEKMADISKSSYRKNINQSSEFIKYFKTVTPSAALGKLSIGSRPAKRKNIDNIKSLRAIPWVFAWTQIRLMLPAWLGSAEALRYGYIKKFRKTLIDMEKNWPFFNSMLDILDMVITKVDPEVSKIYEAYLADKTLKRVGKKLRFQFDAIKTLNKKITTKEIILTRKQFR

SEQ ID NO: 148101 - protein, 263 aa, Unknown
  Bacterial polypetide isolated from the Sargasso Sea
NYDKPLNEKKLLSEREEILKPLRVVRESLEQNQNENIASGELLDLMRRAKCFGINLARLDIRQESSRHSQLMNEFIKRKSRQNYNSWSEVEKIKYLSKRITGKNIVNNFVFRNKENKEVWSTFKVLASQPKECLGAYVISMTSSASDILSVMFLQKEANIKSKLRVVPLFETLEDLINGKEIMEKLFSLKWYRKYIQNKQEIMIGYSDSSKDAGKLSASWHQYKLQEEIIRLAKKYKINVTFFHGRGGSAGRGGGPIQATLRS

SEQ ID NO: 148102 - protein, 275 aa, Unknown
  Bacterial polypetide isolated from the Sargasso Sea
RNNLLADSGWKFDLEGETDNKNLDKVENLYYKSVNEFTYDLELIKNSLISTDLTCESVSTLLTQVHIFGFSLASLDIRQESTRHSDAIHELTNYLDLSVKYDQMSEEEKIKWLIDELNTKRPLIPSDVNWTKTTEETFSVFKMVKRLQQEFGSRICHSYVISMSHSASDLLEVLLLAKEMGLLDQNSQKSKLLVVPLFETVEDLKRAPEVMEKLFKLDFYRSLLPKVGESFKPLQELMLGYSDSNKDSGFVSSNWEIHRAQIALQNLSSRNNILL

SEQ ID NO: 148103 - protein, 240 aa, Unknown
  Bacterial polypetide isolated from the Sargasso Sea
PDFSTLSQTINILGSELGNVIKQQAGINNFELVEEIRVNSKKYRSTKNSKFLELIYKRLKTLDEIELLTLTKSFTLFFYLSNISEQVFREKFQYKIDKNDLDKNKDSLIFSPVFTAHPTESARQSTLKKLYKIAKIISKNNSTDLNEINNLITQLWYTREVRSTKPDPIDEVKTLLYYLNNLYTDVYDEIDQTFTSNNINQKDIIRLGTWIGGDRDGNPFVTLKVTEEALKIYSNQIIQI

SEQ ID NO: 148104 - protein, 284 aa, Unknown
  Bacterial polypetide isolated from the Sargasso Sea
LKRVRPSPFDEARWGLAIIEDSLWDTVPKVYRKLNSIFVKNMGKNLPKNFNPIVFGSWMGGDRDGNPNVTADVTRKVILLSRWEAAKLYEKALTKIIRSYSMKKCSKKIQKKVGKSFEPYRVFLRPLRDKIRLTHRSIEQHLVNKKPLNHKELISSREEILKPLRVVRESLEQNQNENIASGELLDLMRRAKCFGINLARLDIRQESSRHTQLINEFVKRKYNKDYLKFSEDKKIEFLKKHTLAKKNQINNLQITNKENKEVWSTFKILANEPSESLGALCYIN

SEQ ID NO: 148105 - protein, 295 aa, Unknown
  Bacterial polypetide isolated from the Sargasso Sea
MQEDVLKLAKKFKIDVTFFHGRGGSAGRGGGPIQATLRSQPPGSVNGKIRITDQGEVIQQKYGYEPLAKYNLCSYIGSVMQATLNPPPLPKTKWRSLIQKMSEISTSSYRKNITPNSEFIRYFKTVTPHMALGKLSIGSRPSKRKNVDSIKGLRAIPWVFAWTQIRLMLPAWLGTAEALRYSSIKTFKKTLTDMEKNWPYFNSTMDLLDMVLSKVDPEISKVYEDNLADASLKRVGKKLRFQFEAVKKLNHDITPIEILKQRKSFRSPAIVRNIYSEVLNVLSAVVMSKLSNKKL

SEQ ID NO: 148106 - protein, 322 aa, Unknown
  Bacterial polypetide isolated from the Sargasso Sea
NHDQLIRYIEKLDHKTLTNVIRSFSKYFALVNVAEEAYLHIHRVDRLKTGFESWEGSFDQTIKEFKDSDTDITSLQKMLDTLHYSPVFTAHPTEAKRRSKMEAMRRIFNTILELQRYKGESIIKEEIIDKLQAQILILWRTDEVRLKKPTVIDEVENGLYYFRTSLFKAIPEVYKDLEKAIKRIYRSNSVKIPSFIKFGSWIGGDRDGNPFVTPEITKEAVYMHAETAILEYIRRAQSLSTLLTHSIQLTNPSDDFIKSSHEDLKYLDGALEDSTQDFAKEPYRRKLKIVRYRLKQKLQHIRNLRNKIEKSVNHAYASEREL

SEQ ID NO: 148107 - protein, 244 aa, Unknown
  Bacterial polypetide isolated from the Sargasso Sea
MTIIWNTDDLKRVKPSPFDEARWGLAIIEDSLWDTIPKVYRRLNSIFVQNMDKGLPKNFNPIEFGSWMGGDRDGNPNVTADVTRQVILLSRWEAAKLYEKALTKIIRSYSMEKCSKKIKNKVGKSYEPYRVFLRPLRDKMRITHRTIEQHLVNKKPLDQKKLLSSREEILKPLRVVRESLEQNQNENIASGELLDLMRRAKCFGINLARLDIRQESSRHSQLISEFVKKKYNKNYLKMSEKEKI

SEQ ID NO: 148108 - protein, 207 aa, Unknown
  Bacterial polypetide isolated from the Sargasso Sea
MKELDALLRDKVRMLGNALGNTIRNDLGEDTLAQIETIRKQAKRARTGDENDRDKLLDLLKGLSDDSLVPVVRGFNQFLNLANLAEQQHGISWRREDVGEDSTDTMFPDLIKRLVEAGIEGEDLTSKVAAANVELVLTAHPTEVTRRTLIQKYDELSHLLQQRDDLHDEHPSLASIEHRISRLIDEIWHTDEIRKVRPTAVDEAKWG

SEQ ID NO: 148109 - protein, 234 aa, Unknown
  Bacterial polypetide isolated from the Sargasso Sea
  misc_feature (18)..(18): Xaa can be any naturally occurring amino acid
MQFQKYVQDLMSLLKIIXGKKLPIDFSPLIFGSWMGGDRDGNPNVTAQTTEQVILLSRWEAANLYEKEFTKIIQKLSMHECSKELKKKVGNSQEPYRTYLRPIRNKLKSTQKEIEIYLKDKKSLKESLLVQSVNEIINPLKVVYNSLCEVKCKAIANGSVLDLIRRAYSFGLNLARLDIRQESKRHSKLMKSICKHLDLGNFEEWTEEEKISFLSNEFKSKRPLISENISLDKD

SEQ ID NO: 148110 - protein, 256 aa, Unknown
  Bacterial polypetide isolated from the Sargasso Sea
MVTAEVTKKVLLFSRWQAAKLYEKELTKLIQDLSMEECSAKIKKATGNSFEPYRVFLRPIRDKLRLTHQLIENHLNNNSPLDEKKLIQNKNEITLPLREVRKSLKLNKGDHIANADLLDLMRRVRCFGINLARLDIRQEADRHSKLLNELFKKKYNIKYNSLTENEKIKLLNKSIKEKTFFVERINLTDKENKEVWNTFKQISKTPNECLGAYVISMTSTASDILSVYFLQKQAKIKNFLRVVPLFETLDDLKNAK

SEQ ID NO: 148111 - protein, 257 aa, Unknown
  Bacterial polypetide isolated from the Sargasso Sea
TEETFSVFKMVKRLQQEFGSRICHSYVISMSHSASDLLEVLLLAKEMGLLDQNSQKSKLLVIPLFETVEDLKRAPEVMEKLFKLDFYKSLLPKVGESFKPLQELMLGYSDSNKDSGFVSSNWEIHRAQIALQNLSSRNNILLRLFHGRGGSVGRGGGPAYQAILAQPSGTLKGRIKITEQGEVLASKYSLPELALYNLETVTTAVIQNSLVNNRLDATPEWNQLMSRLAETSRSHYRKLVHENPDLLNFFQEVTPIE

SEQ ID NO: 148112 - protein, 297 aa, Unknown
  Bacterial polypetide isolated from the Sargasso Sea
KFKLKLSFFHGRGGSAGRGGGPIQATLKSQPPGSVNGKIRITDQGEVIQQKYGYEPIAKYNLCSYISSVMLATLIPPPRPKVKWRSLIESMSDISKSSYRKNLTLSTEFIRYFKTVTPHLALGKLSIGSRPSKRKNLDNIKGLRAIPWVFAWTQIRLMLPAWLGTAEALRYSSIKKFKKILIDMEKNWPFFNSTMDLLDMVISKVDPEISKIYEENLADIDLKRVGKKLRFQFDALKKLNHSITPSEILKQRKPFRSPAIIRNVYSEVLNILQATVMMKLTKKNYNKINNDYLNDAL

SEQ ID NO: 148113 - protein, 310 aa, Unknown
  Bacterial polypetide isolated from the Sargasso Sea
GRLLGDVIRAYGGDSLYRQTEYIRSASVDRARGIQGADLVDTGLDALSLDDTLNFTRGFMLFSMLANLAEDRQGVAADPGADVASAIARLDSHGIDRDAVLGLLAHSLIVPVLTAHPTEVRRKSMIDHKNRIADLMLLKDAGRQETAHGENLDEAIFRQIALLWQTRPLRREKLFVADEIDNVLTYFRDIFLPVLPALYTRWERVLGARPQSFLRVGSWIGGDRDGNPFVQAPQLEFALKRGAQAALAYYLDALHALGAELSLSTELAHVPQAVLDIADASGDESPSRQDEPYRRAISGIYARLVATYVA

SEQ ID NO: 148114 - protein, 274 aa, Unknown
  Bacterial polypetide isolated from the Sargasso Sea
SFLQKEANIENKLRVVPLFETLEDLINAKEIMESLFSQTWYRKLIKKNQEVMIGYSDSSKDAGKICASWHQYKAQEEIIKLGKKFKINITFFHGRGGSAGRGGGPIQATLRSQPPNSVNGKIRITDQGEVIQQKYGYEPLAKYNLCSYIGAVTEATLNPPPIPKKNWRSLIEKMSEISKSSYRKHINQSSEFIKYFKTVTPHKALGKLSIGSRPSKRKNADNIKSLRAIPWVFAWTQIRLMLPAWLGIAEALRYSYIKKFRKTLYDMERNWPFF

SEQ ID NO: 148115 - protein, 283 aa, Unknown
  Bacterial polypetide isolated from the Sargasso Sea
ASDILSVSFLQKEAHIKNKLRVVPLFETLDDLINAKEVMRNLFSQNWYRKLIQNKQEIMIGYSDSSKDAGKICASWHQYKAQEDIIKLGKKYKIKITFFHGRGGSAGRGGGPIQATLRSQPPNSVNGKIRITDQGEVIQQKYGYEPMANYNLCSYIGAVTEATLNPPAHPKKNWRSLIEKMSDISKSSYRKNINQNSDFIKYFETVTPHKALGKLSIGSRPSKRKNVDNIKSLRAIPWVFAWTQIRLMLPAWLGSAEALRYAYIKEFRKTLYDMERKWPFFNS

SEQ ID NO: 148116 - protein, 254 aa, Unknown
  Bacterial polypetide isolated from the Sargasso Sea
KKSNFIKNFNFKNKENKEVWSTFKILSEEPPECLGAYVISMTSSASDILSVLYLQKEANIKNKLRVVPLFETLDDLINAKSIMASLFSLKWYRDLIKNKQEVMIGYSDSSKDAGKICASWHQYKAQEEIVKIAKKNKIDVTFFHGRGGSAGRGGGPIQATLKSQPPNTVNGKIRITDQGEVIQQKYGYQPLAIYNLCSYIGAVMEATLTPPPVPNKDWRNLIEKMSDISKSSYRKNINQSSDFIKYFKTRYATC

SEQ ID NO: 148117 - protein, 286 aa, Unknown
  Bacterial polypetide isolated from the Sargasso Sea
NKTVRGMIKITEQGEVLSYKYAVPQSASYELELAVSGLIKASQHLVVGDSVCTNNFEEIMSQMSVTGEKKYRDLTDDKEGIMDYFYEATPVQELAELNIGSRPSHRKKTQRSKYSIRAIPWVFGWSLSRHTLPAWYGLGTALNKMVEDSDENIDKLKSMYSEWPFFRVLLDNIQMALAKSDLGIARDYSMLVNNKNAAKDIINDIEKEFNSTVSTLLKIVDSEELLTENIKLSLSLSRRQPYLDPLNYIQVMLLKAHREIPDEDTVNLDPLLRTIHAIATGMRNTG

SEQ ID NO: 148118 - protein, 305 aa, Unknown
  Bacterial polypetide isolated from the Sargasso Sea
ADDHQNVWGAYVISMTSAASDVLEVYLMQIQANIKNKLRVVPLFETLQDLKNAKSIMEKLFSLSWYRKLIKNKQEIMIGYSDSSKDAGKLSASWHQYKLQEEILIIAKKYKIDLTFFHGRGGSAGRGGGPIQATMRSQPPNSVYGRIRITDQGEMIQQKYGYEPLAKYNLCSYIGSVMQATLNPPPQPKESWRKLIEEMTKISTSAYRKNINENSDFIRYFKTVTPHLALGKLSIGSRPSKRKNVDNIQSLRAIPWVFAWTQIRLMLPAWLGTGDALKYSSVKNHKTILTDMEKNWPFFNSTMDI

SEQ ID NO: 148119 - protein, 250 aa, Unknown
  Bacterial polypetide isolated from the Sargasso Sea
NNESCLSIILRKLKILDKKLYDEFTIIWNTDDLKRFRPSPTDEARWGLAVIEDSLWETIPKVYRRLNGIFLKNMGKNLPKNFNPIQFGSWMGGDRDGNPNVTSSITKEVILLSRWEAAKLYEKELTKLIRSFSMEKCSKKILKVTGKTFEPYRVFLRPLRDKMRLTHRAIENHLVRHKPLDKKKLLSSREEILKPLRVVRDSLEKNQNENIASGELLDLMRRAKCFGINLARLDIRQESSRHSQLLYEFI

SEQ ID NO: 148120 - protein, 247 aa, Unknown
  Bacterial polypetide isolated from the Sargasso Sea
PLREVRNSLKLNKGDHIANADLLDLMRRVRCFGINLARLDIRQEADRHSKLLNELFRKKYNIKYNSLSEKEKIKLLNKSIKEKKYFVDRIKITDKENKEVWNTFKQISKSPNECLGAYVISMTSKASDILSVYFLQIQAQIKNFLRVVPLFETLDDLKNANIVMKNLFKLSWYRKMTSAKQEVMIGYSDSSKDAGKLSASWHQYKLQEELRGLAKKYKFDLIFFHGRGGSPGRGGGPIQATLKSQPA

SEQ ID NO: 148121 - protein, 272 aa, Unknown
  Bacterial polypetide isolated from the Sargasso Sea
METLFSKKWYRNLIKNNQEVMIGYSDSSKDAGKICASWHQYTAQEEIIKLAKKYQINVTFFHGRGGSAGRGGGPIQATLRSQPPNSVNGKIRITDQGEVIQQKYGYEPLAKYNLCSYIGAVTEASLNPPPVPKKNWRYLIEKMSNISKNSYRKNINQSSEFIKYFKTVTPHIALGKLSIGSRPSKRKKTDNIKSLRAIPWVFAWTQIRLMLPAWLGTAEALRYSYIKKFRKTLFDMEKNWPFFNSMLDILDMVISKVDPNISKIYEYYLADE

SEQ ID NO: 148122 - protein, 213 aa, Unknown
  Bacterial polypetide isolated from the Sargasso Sea
SKLQISSRPARRKKGAKDLSSLRAIPWVFGWTQSRFLLPSWFGVGTALSSELNSDPQQIELLRVLHQRWPFFRMLISKVEMTLSKVDLEVARYYVDTLGSEENKDSFDDIFEVISKEYNLTKSLILEITGKNKLLESDRDLKSSVSLRNKTIIPLGFLQVSLLRRLRDQTRQPPISEFFIDKDEFRRAYSRSELLRGALLTINGIAAGMRNTG

SEQ ID NO: 148123 - protein, 286 aa, Unknown
  Bacterial polypetide isolated from the Sargasso Sea
SGVLDGEVKFTEQGEVIADKYGHPEIARRNLDLAFTAVLEASLAHRAPRHDEATIARWYSIMDGIANNAYAAYRRFVETPGLVEYFTTSTPVEELGEMNIGSRPARRKGATTGIADLRAIPWVFGWTQSRQIIPGWFGAGSGLASCRASGHSDELRYMYENWSFFRTYVSNVEMTLTKTDLPIARHYVERLVDPSLHHLLESVVDEYHRTVEEIQAVTGAELLAEKPLLRRTLAVRDAYLDPLNVLQVEMLHRSRSDAAAGRAADGELQRGLLLTINGIAAGMRNT

SEQ ID NO: 148124 - protein, 122 aa, Unknown
  Bacterial polypetide isolated from the Sargasso Sea
AQLTALDHSDLLPTERERIAQRLQRLIAEAWHTEEIRRSRPSPVDEAKWGFAVIEHSLWQAVPQFLRRADQSLQAATDLRLPLEAAPIRFASWMGGDRDGNPNVTARVTREVLLLARWMAAD

SEQ ID NO: 148125 - protein, 259 aa, Unknown
  Bacterial polypetide isolated from the Sargasso Sea
MEKCSKKILKTTGKTFEPYRVYLRPLRDKLRKTHRAIEGYLTSNKSLNEKDLLSEREEILKPLRVVRESLEQNQSENIASGDLLDLMRRAKCFGINLARLDIRQESSRHSQLLAEYIKKKLNQNYSTWDEDQKIKYLSNKMQNKNVLKKFQFTNKENKEVWSTFKVLASQPKECLGAYVISMTSSASDILSVMFFQKEANIKNRLRVVPLFETLDDLINAKPIMEKLFSLKWYRKDINNKQEIMIGYSDSSKDAGKLSA

SEQ ID NO: 148126 - protein, 280 aa, Unknown
  Bacterial polypetide isolated from the Sargasso Sea
EKKFQNIFIEEIFENFFKNKKISNNKIYNIAKSLNIGIVLTAHPTEVKRRTLIQKYHSLTEILEQRNLLKNYPSKLKILDRKVFDEITIIWNTDEIKRSKPTPAEEARWGLAIIEDSLWDTIPKVYRRLNQIFEKNMGKGLPKNFNPIEFGSWMGGDRDGNPFVTAEVTKRVILLSRWEAAKLYEKSMTKLIRSYSMEKCSKKILKTTGKTFEPYRVYLRPLRDKLRKTHRAIEGYLANNKPLNEKDLLSEREEILKPLRVVRESLEQNQSENIASGDLL

SEQ ID NO: 148127 - protein, 263 aa, Unknown
  Bacterial polypetide isolated from the Sargasso Sea
FGHNRLDATPEWNQLMSLLAETSRSHYRKLVHENPDLLNFFQEVTPIEEISKLQISSRPARRKKGAKDLSSLRAIPWVFGWTQSRFLLPSWFGVGTALSTELNSDPQQIELLRVLHQRWPFFRMLISKVEMTLSKVDLEVARYYVDTLGSKENKHSFDDIFEVISKEYNLTKSLILEITGKNVLLESDRDLKSSVSLRNKTIIPLGFLQVSLLRRLRDQTRQPPISEFVMDKEESSRAYSRSELLRGALLTINGIAAGMRNTG

SEQ ID NO: 148128 - protein, 280 aa, Unknown
  Bacterial polypetide isolated from the Sargasso Sea
FRISKLDDFVDYVKQFEFHGVTLDIRQNSSIINSKKGKIYKDFINLIKEIPELQHIYGQKVFNSIILSMTKSHQDMLNLFNLCNSLIPDKNIPTLTPLIEEIEDLQSSHLILNEILKDKKYYKFIKTFKSNNQEVMLGYSDSNKDGGIIASQWNVYKAQISLFNIAKKNNININFFHGRGGTISRGGGPTYDSIMSQPKGTISSQIRYTEQGEVISDKYSTRYLAFENLKLGSVAFINTSSSTLESNLKYENIFEELSHNSYSKYRSLVDRNNLINYFEN

SEQ ID NO: 148129 - protein, 53 aa, Unknown
  Bacterial polypetide isolated from the Sargasso Sea
LRNVYTDPLNVLQAELLHRSRQAEEQGHEPDPRVEQALMVTIAGVAAGMRNTG

SEQ ID NO: 148130 - protein, 298 aa, Unknown
  Bacterial polypetide isolated from the Sargasso Sea
GGPTYNAILAQPNKTFRGMIKITEQGEVLSYKYAVPQSASYELELAVSGLLKASQHLVSDDTACTNNFEELMSEMSTSGEKKYRDLTDDKPGIMDYFYEATPVQELAELNIGSRPSHRKKTQRSKYSIRAIPWVFGWSLSRHTLPAWYGLGTALNKMVSDDASNMNKLKNMYSEWPFFRVLLDNIQMALAKSDLGIARDYSLLVENKEAAREIINDIEIEFKSTVSTLLKIVDSDELLLENKKLSLSLSRRQPYLDPLNYIQVMLLKAHREIPDEDTINLDPLLRTIHAIATGMRNTG

SEQ ID NO: 148131 - protein, 250 aa, Unknown
  Bacterial polypetide isolated from the Sargasso Sea
EKELTKLIRSYSMKKCSKKIQKLTGKSFEPYRVFLRPLRDKMRFTHRAIEQFIVNKKPLDYKKLLNSKEEILKPLRIVRKSLEENQSKNIASGELLDLMRRAKCFGINLAKLDIRQESSRHSKLINELFKKKNKLDYLKWSEEEKIKFLSSKMKKKSNFIKNFNFKNKENKEVWSTFKILSEEPTECLGAYVISMTSSASDILSVLYLQKEANIKNKLRVVPLFETLDDLINAKSIMASLFSLKWYRDLI

SEQ ID NO: 148132 - protein, 265 aa, Unknown
  Bacterial polypetide isolated from the Sargasso Sea
FNKNFGTESLAEYTLGTYIGSVLEATLSPPMKPKENWRNLMNDMSVVASYAYRYNLRKDKNFLRYYYQVTPQKILENLFIGSRPAKRNKSQDIKNLRAIPWVFAWTQIRFILPAWLGTLEGLKLAERGKNNKILKDMLNNWPFFYAMMDMLDMVLTKTDQRVIQFYEECLADQELKNIGEKLRKQLLSLIYLNKKLIPTHILEQRKSYRESIRIRNTYAETLNLLQADIMRKLNKSSIKDKNRKILKDAMLLTIAGISAAMKNTG

SEQ ID NO: 148133 - protein, 305 aa, Unknown
  Bacterial polypetide isolated from the Sargasso Sea
YKRLNDIFRKNLNKDLPRDFNPIQFGSWMGGDRDGNPNVTAEVTKKVILFSRWQAAKLYERELTKLIQDLSMEECSTKIKKATGNSYEPYRVYLRPIRDKVRLTHQLIENHLNKNVFLDEKKLIQNKNEITLPLREVRNSLKANRGEHIANADLLDLMRRVRCFGINLARLDIRQEADRHEKLLNEIFKKKKNIKYSSLTEIEKIKLLNKSIKEKKFFIDKIKINDKENKEVWNTFKQLAKTPIECLGAYVISMTSKASDILSVYFLQMQTQNKNLLRVVPLFETLDDLKNAKWGNDKFNQTFMV

SEQ ID NO: 148134 - protein, 305 aa, Unknown
  Bacterial polypetide isolated from the Sargasso Sea
REEILKPLRVVRESLEQNQSENIASGDLLDLMRRAKCFGINLARLDIRQESSRHSQLLAEYIKKKLNQNYSTWDEDRKIKYLSNKMQSKNVLKKFQFKNKENKEVWSTFKVLASQPKECLGAYVISMTSSASDILSVMFFQKEAKIKNRLRVVPLFETLDDLINAKPIMEKLFSLKWYRKDINNKQEIMIGYSDSSKDAGKLSASWHQFKLQEEIIKLAKKYKIDVTFFHGRGGSAGRGGGPIQATLRSQPAGSVNGKIRITDQGEVIQQKYGYEPLAKYNLCSYIGSVMEATLNPPPKPKDSWR

SEQ ID NO: 148135 - protein, 267 aa, Unknown
  Bacterial polypetide isolated from the Sargasso Sea
DKETLTNVIRSFSKYFALVNVAEEAYLHIHRMDRLKTGFESWEGSFDQTLKEFKESEIDVDNLQKLLDTLHYSPVLTAHPTEAKRRSKMEAMRRIFNTILELQRYKGQSIIRDEIIDKLQAQILILWRTDEVRLKKPTVIDEVENGLYYFRTSLFKAIPDVYKDLEKAIKRIYRTDSVKIPSFIKFGSWIGGDRDGNPFVTPEITKEAVYMHAETAIHEYIRRAQNLSTLLTHSVQLTSPSKEFIESSQRDLKYLEGAFEDSTQEFC

SEQ ID NO: 148136 - protein, 222 aa, Unknown
  Bacterial polypetide isolated from the Sargasso Sea
SEVTPIEEISKLQISSRPARRKKGAKDLSSLRAIPWVFGWTQSRFLLPSWFGVGTALSSELSSDPQQIELLRVIHQRWPFFRMLISKVEMTLSKVDLEVARYYVDTLGSKENKNSFDDIFEVISKEYNLTKSLILEITGKNKLLESDKDLKSSVSLRNKTIIPLGFLQVSLLRRLRDQTRQPPISEFIIDKDESRRAYSRSELLRGALLTINGIAAGMRNTG

SEQ ID NO: 148137 - protein, 305 aa, Unknown
  Bacterial polypetide isolated from the Sargasso Sea
MNKNCPKNFNPIEFGSGMGGDRDGNPHVTAEVTKEVILLSRWEAAKLYEKELTKLIRSYSMAKCSKKIIKSTGKSFEPYRVYLRPLRDKMRNTHRSIEQHLINKQNLDKNKLLKSKEEILQPLRIVRDSLEQNDSINIANGDLLDLMRRAKCFGINLARLDIRQESSRHSKTISEFVKKKYKSNYLDWNEDKKLKFLISKIKKKQNILKNFNFKVKDNKEVWSTFKILADEPSECLGAYVISMTSSASDILSVSFLQKEAKIKEKLRVVPLFETLNDLINAKKIMEKLFSLKWYRKFINYKQEKL

SEQ ID NO: 148138 - protein, 223 aa, Unknown
  Bacterial polypetide isolated from the Sargasso Sea
MEKCSKKIQKKVGKSYEPYRVFLRPLRDKMRITHRSIEQHLVNKKPLDKNKLLSSREEILKPLRIVRESLEQNQNENIASGELLDLMRRAKCFGINLARLDIRQESSRHSQLISEFIKKRYKKNYLKMSEKEKIQFLKTLILSKKNQINKFKFKNKENKEVWSTFKILANEPAECLGAYVISMTTSASDILSVSFLQKEAQIKNKLRVVPLFETLDDLINAKE

SEQ ID NO: 148139 - protein, 471 aa, Unknown
  Bacterial polypetide isolated from the Sargasso Sea
IKKKLNQNYLSWNEDRKIKYLSTKMRSKNLLKNFKFKNKENKEVWSTFKVLATQPKECLGAYVISMTSSASDILSVMFFQKEANIENRLRVVPLFETLDDLINAKPIMEKLFSLKWYRKDINHKQEIMIGYSDSSKDAGKLSASWHQYKLQQEIIELAKKYKIDITFFHGRGGSAGRGGGPIQATLRSQPAGSVNGKIRITDQGEVIQQKYGYEPLAKYNLCSYIGSVMEATLNPPPKPKDSWVKLIQSMSEISTSSYRKNINQSSDFIRYFKTVTPHMALGKLSIGSRPSKRKNVDNINSLRAIPWVFAWTQIRLMLPAWLGTAEALRYSSIKKFKKTLIDMEKNWPYFNSTMDLLDTVLSKVDPEISKIYEKNLADDKLVRVGKKLRFQFEAVKKLNDQITPKEIYKQRKSFRGPAIIRNIYSEILNVLQAVVMNKLLQKNLNKKDKKNLNDAMMASIAGISAAIKNTG

SEQ ID NO: 148140 - protein, 710 aa, Unknown
  Bacterial polypetide isolated from the Sargasso Sea
MIKRDLYYERIPTKSLRDDVRYLGNILGRVIKKQEGESFFNLVERIRLLSKANIKNKNNKNRFNKITSEIQRLKPIKIFKLARAFNHFMNFINLSESIDASRKLDEFENSDLKDKHKNIFIEEIFEKLFKNKKIKSQKIYNIAKNLHIGIVLTAHPTEVKRRTLIQKYHKITEIMDQRNLLKDKPSRLKILDKKLYDEFTIIWNTDDLKRFKPTPAEEARWGLAVIEDSLWETIPKVYRRLNDIFVKHMGKGLPKNFNPIEFGSWMGGDRDGNPNVTASITKEVILLSRWEAAKLYEKELTKLIRGLSMEKCSKKILKTTGKTFEPYRVYLRPLRDQMRKTHRLIERHLVAKKPLDQKKLLSSKEEILKPLRVVRESLEQNQSENIASSDLLDLMRRAKCFGINLAKLDIRQESLRHSQLLAEYVKKKNNSNYLNWDENKKIKYLINEMKKNRKSFKNFNFKNKENSEVWSTFKILADEPSECLGAYVISMTSAASDVLEVYLMQMQANIKNKLRVVPLFETLQDLKNAKFIMEKLFSLSWYRKLIKNKQEIMIGYSDSSKDAGKLSASWHQYKLQEEVLIIAKKYKIDLTFFHGRGGSAGRGGGPIQATMRSQPPNSVYGRIRITDQGEMIQQKYGYEPLAKYNLCSYIGSVMQATLNPPPHPKDSWRKLIEEMTKISTLAYRKNINENSDFIRYFKTVTPHLALGNYQ

SEQ ID NO: 148141 - protein, 599 aa, Unknown
  Bacterial polypetide isolated from the Sargasso Sea
MIKRDLYYERIPTKSLRDDVRYLGNILGRVIKKQEGESFFNLVERIRLLSKANIKNKNNKNRFNKITSEIQRLKPIKIFKLARAFNHFMNFINLSESIDASRKLDEFENSDLKDKHKNIFIEEIFENLFKNKKIKPQKIYNIAKNLHIGIVLTAHPTEVKRRTLIQKYHKITEIMDQRNLLKDKPSRLKILDKKLYDEFTIIWNTDDLKRFKPTPAEEARWGLAVIEDSLWETIPKVYRRLNAIFVKHMGRDLPKNFNPIEFGSWMGGDRDGNPNVTASITKEVILLSRWEAAKLYEKELTKLIRGLSMEKCSKKILKATGKTFEPYRVYLRPLRDEMRKTHRLIERHLVAKKPLDKKKLLTSKEEILKPLRVVRESLEQNQSENIASGDLLDLMRRAKCFGINLAKLDIRQESSRHSQLLAEYIKKKNKSNYLNWDENKKIKYLINEMKKNRKSFKNFNFKKKENKEVWSTFKILADEPSECLGAYVISMTSAASDILEVYLMQMQANIKSKLRVVPLFETLQDLKNAKSIMEKLFSLNWYRKLIKNKQEIMIGYSDSSKDAGKLSASWHQYKLQEEVLTIAKKYKIEITFFHGRGGS

SEQ ID NO: 148142 - protein, 503 aa, Unknown
  Bacterial polypetide isolated from the Sargasso Sea
MQKESKIKPEFSTLSKTINILGSELGNVIKQQAGKSKYELVEEIRINSKKYRSSKNSKFLNLIYERLKTLDENELLILTKSFTLFFYLSNISEQVFREKFEYEIDKNDLDKNKESLTFSPVFTAHPTESARQSTLKKLYKIGNIISENKSSDLDEINNLITQLWYTREIRSTKPNPIDEVKTLLYYLNNLYTDVYDEINKTFTENNIVQKDIIRLGTWIGGDRDGNPFVTLKVTEEALKIYSNQIIQIYKEKIINLSESFSISTLYADEPQLLKSKIKEYSNVLNKEYRHYTKINFDEPFRIFLSLVFHRLDNFQKNKKGYNTFSEFQDDLNLFETEVNKCFKNNSPSLDLRTFIDYVNQFKFHGVEMDIRENADVLRYKDNFKKEYSEFTTLIKRIPEWKKIYGDTVISSIILSMTKNENDMLNLFKFCKKLIKNKSDIPMLVPLFEEIDDLEESHNIISNLFDNKEYKKHLINFNNSQEIMLGYSDSNKDGGIVSSLMVSI

SEQ ID NO: 148143 - protein, 439 aa, Unknown
  Bacterial polypetide isolated from the Sargasso Sea
FFHLVEKVRKLSKANKANPNSKKSNSNVINAIKKLDPKNTFKLTRAFSHFMNFMNLAELVDASRSINENENNKKKLGKKNLFIEEIFEDLFRKKNILDNKIYDLAKNLNIGIVLTAHPTEVKRRTLIQKYHKIIEILEERELFKNFPSKLKVLNKNLYDELTIIWNTDDLKRFKPSPFDEARWGLAIIEDSLWNTVPKVYRKLNSIFVKNMGKNLPKNFNPIVFGSWMGGDRDGNPNVTSDVTRKVILLSRWEAAKLYEKALTKIIRSYSMEKASKKILSKVGKSFEPYRVFLRPLRDRMRITHRSIEQHLVHNKPLDQKKLLSSKEEILKPLRVVRESLEQNQNENIASGELLDLMRRAKCFGINLARLDIRQESSRHKQLISEFVKTKYKKDYSNFVEKEKLNFLKKFITSKSNKIGNFQFKNRENKEVWATFNTLS

SEQ ID NO: 148144 - protein, 300 aa, Unknown
  Bacterial polypetide isolated from the Sargasso Sea
VGRGGGPTHNAILSQPPGTVNGKIKITEQGEVLSFKYGNMQTSCYEIEMAISGLLKASTSLIGIEKEYDSTYEDLMDQLSNLGEGSYRNLTEDTDGIMDYFYEGTPIQELSKLNIGSRPAHRSGARSKYSIRAIPWVFGWSLSRHTLPAWYGLGTAISSITNESEKLDTLKNMYQEWPYFRSLFDNIQMALSKADLVVSKDYADLVKNKKQSSVIYKKIFDEYQLSIESLLKVTENQDLLKDNEKLALSIYRRKPYLDPLNYIQVMLLEKNRLGAEHNEKLFNPLIRTIHAISTGLKNTG

SEQ ID NO: 148145 - protein, 306 aa, Unknown
  Bacterial polypetide isolated from the Sargasso Sea
MTKTVNDILGVYFLAKITGIFSGENEKEFSRLSIVPLFETIEDLRSAPKIVQELLAVPIISKTIKQKTGIQEIMIGYSDSNKDGGYFTANWELNRAQASLTRVGNEAGIPVSFFHGRGGSVSRGGAPTGIAVAAQPAGSVHGQMRITEQGEVVSSKYANEGTAQYQMELLSASVFQHTLRSLDEEQLKPNLDFDKAMESLSRLAFKKYRELAESNGLVDYYSAASPVEELAKMNIGSRPARRTGTKSLDDLRAIPWVFAWTQNRHLVPGWYGVGSAIKEFTDEHGNQGRKLIKIDVCRITLISFSC

SEQ ID NO: 148146 - protein, 544 aa, Unknown
  Bacterial polypetide isolated from the Sargasso Sea
KKSFIDRYQTEPIRLKILYIKEKLIGYERHINSEENPKYSSKLFIEDLNIIFQHLVKVVKNESLAKGHLKKLIFRSKIFGLHLFEMDIRQHSDVHCKVVSETISNINPNVDYLHLSESDKCSLLKKFIRSEQDVFKINNFKCSKLLLEVFETFKTIKELLEIDKKLISSYIISMTHSKSDVLEVLFLGKLFGLVSCNEGLLITDLNIVPLYETIPDLESAPELLSDLFQDELYDSYLNNKNRFQEIMLGYSDSNKDGGFGMANFSLNNCQIKISELMRENEIDFRIFHGRGGSISRGGGKSNKAILSLPDECQNGKIRFTEQGEVVNYRYGSSQIAKRHLEQIVSAQLITLEKSKKDNEQSSYNYIDQIMFDSQLNYKEKILGDPCWQFLLNATPMKQISKIPITSRPASRKKIKDSVIGFDELRAIPWVFSWTQVRYNLSGWFGMGIALSRALKNPASKKQLKAMSKKSKFFGQLLDNMSFEMARARLDVSGLYAKTKNEKNFHKVIEGEFSLALNAYKTISGYDYLLERNSIISNSIDSGIL

SEQ ID NO: 148147 - protein, 457 aa, Unknown
  Bacterial polypetide isolated from the Sargasso Sea
MGGDRDGNPNVTAEVTKKVILFSRWQAAKLYEKELTKLIQDLSMEECSTKIKRATGNSYEPYRVYLRPIRDKVRLTHQLIENHLNKNVPLDEKKLIQNKNEITLPLREVRNSLKVNRGEHIANADLLDLMRRVRCFGINLARLDIRQEADRHEKLLNEIFKKKKNVKYSSLTELEKIKLLNKSIKEKKSFVDKIKLKDKENKEVWNTFKQIAKTPIECLGAYVISMTSTASDILSVYFLQMQAQNKNLLRVVPLFETLDDLKNANSVMTNLFKLPWYRKMIKSKQEVMIGYSDSSKDAGKLSASWHQYKLQEELRNLAKKYKIDLVFFHGRGGSPGRGGGPIQATLKSQPSGTVNGKIRITDQGEVIQQKYGYKPLAEYNLCSYIGSVMDASLNPPPRSKTNWRELIQKMSEISTSSYRKYLNQSEDFIRYFKTVTPHKSLGKLAIGSRPTKRKKCR

SEQ ID NO: 148148 - protein, 350 aa, Unknown
  Bacterial polypetide isolated from the Sargasso Sea
MEADGATTATPDRVRPARNLKEISDTEQSASMETESEGVRLRTHIRMLGDLLGQTLARQEGGTLLEMVESVRLAVRSNPAVAATVLDSVDVATATTLARSFSIYFDLANVAEQVERAHDAQADRRVHSGPLHRVVDAAREANLDPVLVGQMASAMSVRPVFTAHPTEAARRSVLVKLRRIADVLLDQGLSDRERERRLAQVIDLLWQTDELRLEQPQVLDEARNALYYLDDLTRGPLAQVLEDLADSFRDLEVELPPDARPVSFGSWIGGDRDGNPFVTPDVTADVVRFQRDHAVLNLMPHIDRLLEDLSISERIAGASDKLRDSVESDLRFLPDLDPRFLRINAEEPVR

SEQ ID NO: 148149 - protein, 403 aa, Unknown
  Bacterial polypetide isolated from the Sargasso Sea
KLYEKSLTKLIRSLSMEKCSNTIIRKTGKTYEPYRVFLRPLRNKMRVTHRLIEQHLVRKKPLDQSKLLSSKEEILKPLRLVRESLEKNQSKNIASGDLLDLMRRTKCFGINLAKLDIRQESKRHSQLIYELVKKKYKSNYYLWSEEKKINFLSSKIKNKKNLINNFLFRNTENKEVWSTFKTLAEQPKECLGAYVISMTSSASDILSVLFLQKEANIKNKLRVVPLFETLDDLINAKAIMQKIFSLKWYKKLINFNQEIMIGYSDSSKDAGKLSASWHQYKLQEEIINLAKKYKIDNTFFHGRGGSAGRGGGPIQATLRSQPPNSVNGKIRITDQGEVIQQKYGYEPLAKYNLCSYIGAVVEATLNPPPKPKDKWRKLIEIMSNISTDSYRKNINENSDFIRY

SEQ ID NO: 148150 - protein, 388 aa, Unknown
  Bacterial polypetide isolated from the Sargasso Sea
GIKDTLRVVPLFETLEDLINAKPIMQKLFSLNWYRKSIKNKQEIMIGYSDSSKDAGKLSASWHQYKLQEEIIKLAKKYKIDITFFHGRGGSAGRGGGPIQATLRSQPPNSVNGKIRITDQGEVIQQKYGYEPLAKYNLCSYIGAVMQATLSPPPIPKKEWRDLIEKMSEISTKSYRKNINESSDFIRYFKTVTPHVSLGKLSIGSRPSKRKNVDNIQSLRAIPWVFAWTQIRLMLPAWLGSAEALKYSSAGKLNKILVEMEKNWPFFNSNMDILDMVISKADPEISKIYEENLADSKLKSVGKNLRFQFHVIKKLNKQITPKEIIKARKEFRTSVIVRNIYSEVLNIIQAATMNKLSQNKYNKQGKKYLNDALMTSIAGISAAMKNTG

SEQ ID NO: 148151 - protein, 509 aa, Unknown
  Bacterial polypetide isolated from the Sargasso Sea
KPSRLKILDKKLYDEFTIIWNTDDLKRFKPTPTEEARWGLAVIEDSLWETIPKVYRRLNTIFVKHMGRGLPKNFNPIEFGSWMGGDRDGNPNVTAAITKEVILLSRWEAAKLYEKELTKLIRGLSMEKCSKKILKATGKTFEPYRVYLRPLRDQVRKTHRLIERHLVAKKPLDQKKLLSSKEEILKPLRVVRESLEQNQSENIASSDLLDLMRRAKCFGINLAKLDIRQESSRHSQLLAEYVKKKNNSNYLNWDENKKIKYLINKMKKNRKSFKNFNFKNKENNEVWSTFKILADEPSECLGAYVISMTSAASDVLEVYLMQMQANIKSKLRVVPLFETLQDLKNAKSIMEKLFSLGWYRKLIKNKQEIMIGYSDSSKDAGKLSASWHQYKLQEEILIIAKKYKIDLTFFHGRGGSAGRGGGPIQATMRSQPPNSVYGRIRITDQGEMIQQKYGYEPLAKYNLCSYIGSVMQATLNPPPQPKESWRKLIEEMTKISTLAYRKNINENSG

SEQ ID NO: 148152 - protein, 420 aa, Unknown
  Bacterial polypetide isolated from the Sargasso Sea
MKKKDLYYERIPTKLLREDVRYLGNILGKVIKSQESEKFFILVEKIRKLSKANKKNPNEKKLNNKVLKAIKSLDPKNTFKLTRAFSHFMNFMNLAELVDASRSLNEYENNKKKISKKNLFIEEIFEDLFKKKNISNNKIYDLAKNLNIGIVLTAHPTEVKRRTLIQKYHKIIEILEQRELLKNFPSKLKLLNKQLFDELTIIWNTDDLKRTKPSPFDEARWGLAIIEDSLWDTVPKVYRKLNSIFVKNMNKNLPKNFNPIVFGSWMGGDRDGNPNVTAEVTRKVILLSRWEAAKLYEKALTKIIRSYSMEKCSKKILNKVGNSFEPYRVFLRPLRDKMRITHRLIEQHLVQKKPLDQKKLLSSREEILRPLRVVRESLEENQNENIASGDLLDLMRRAKCFGINLARLDIRQESSRHKQL

SEQ ID NO: 148153 - protein, 628 aa, Unknown
  Bacterial polypetide isolated from the Sargasso Sea
MRDDVRYLGNILGRVIKKQEGESFFNLVERIRLLSKANIKNKNNKKRFNKITSEIQRLKPIKIFKLARAFNHFMNFINLSESIDASRKLDEFENSNLKDKHNNIFIEEIFEKLFKNKKIKPQKIYNIAKNLQIGIVLTAHPTEVKRRTLIQKYHKITEIMDQRNLLKDKPSRLKILDKKLYDEFTIIWNTDDLKRFKPTPSEEARWGLAVIEDSLWETIPKVYRRLNAIFVKHMGKGLPKNFNPIEFGSWMGGDRDGNPNVTATITKEVILLSRWEAAKLYEKELTKLIRGLSMEKCSKRILKTTGKTFEPYRVYLRPLRDQIRKTHRLIERHLVAKKPLEQKKLLSSKEEILKPLRVVRESLEQNQSENIASSDLLDLMRRAKCFGINLAKLDIRQESSRHSQLLAEYVKKKNNSNYLNWNENKKIKYLISEMKKNRKSFKNFNFKNKENNEVWSTFKILANEPSECLGAYVISMTSAASDVLEVYLMQMQANIKNKLRVVPLFETLQDLKNAKSIMEKLFSLSWYRKLIKNKQEIMIGYSDSSKDAGKLSASWHQYKLQEEVLVIAKKYKIEVTFFHGRGGSAGRGGGPIQATMRSQPPNSVYGRIRITDQGEMIQQKYGLRTFSE

SEQ ID NO: 148154 - protein, 486 aa, Unknown
  Bacterial polypetide isolated from the Sargasso Sea
MIKRDLYYERIPTKSFREDVRYLGNILGQVIKKQEGISFFNLVEKVRKLSKANKPNKAEKRSHFKIVKTIKNLSPENTFKLTRAFSHFMNFINLAESIDASRRLNEYENSKKKSLSKNIFIEEIFEDLFKNKKISSNTIYNVAKNLNIGIVLTAHPTEVKRRTLIQKYHKITEILEQRELLKQFPSKLKTLDKKIYDEFTIIWNTDDLKRTRPSPFDEARWGLAIIEDSLWETIPKVYRRLNNIFLKNMNKNLPRNFNPIEFGSWMGGDRDGNPNVTAEVTKEVILLSRWEAAKLYEKELTKLIRSYSMAKCSKKIIKSTGKSFEPYRVYLRPLRDKMRNTHRSIERYLINNQTLDKNKILKSKEEILQPLRIVRESLEQNGSKNIANGDLLDLMRRAKCFGINLARLDIRQESSRHTEIISEFVKKKYKSNYLDWNEDKKIKFLISKIKKKQNSFKNFNFKIKKNKEVWSTFKILADEPSECLGA

SEQ ID NO: 148155 - protein, 384 aa, Unknown
  Bacterial polypetide isolated from the Sargasso Sea
IAESIDAARKLDEYENKNQIDANKNIFIEEIFEGFFKNRKISTNKIYEIAKNLNIGIVLTAHPTEVKRRTLILKYHKITEILEQRDLLKKFPSKLKILDKKLYDEFTVIWNTDELKRTRPTPSDEARWGLAIIEDSLWETIPKVYRRLNDIFVKNIGKGLPKNFNPIEFGSWMGGDRDGNPNVTAKVTKEVILLSRWEAAKLYEKELTKLIQSLSIDKCSRKILSKTGKTFEPYRVYLRPLRNKMRLTHKLIEQHLVEKVPLDQKKLLSNREEILKPLRVVRESLEENNSENIASGDLLDLMRRAKCFGINLARLDIRQESSRHSQLISEFLKRKYNMNYGDWNEDKKIKFLSSKIKSKKKFINNFSFKNKENKEVWSTFKILS

SEQ ID NO: 148156 - protein, 670 aa, Unknown
  Bacterial polypetide isolated from the Sargasso Sea
MRDDVRYLGNILGRVIKKQEGESFFNLVERIRLLSKANIKNKNNKNRFNKINSEIQRLKPIKIFKLGRAFNHFMNFINLAESIDASRKLDEFENSGLKDKHKNIFIEEIFENLFKNKKIKPQKIYNIAKNLYIGIVLTAHPTEVKRRTLIQKYHKITEIMDQRNLLKDKPSRLKILDKKLYDEFTIIWNTDDLKRFKPTPVEEARWGLAVIEDSLWETIPKVYRRLNAIFVKHMGRGLPKNFNPIEFGSWMGGDRDGNPNVTAAITKEVILLSRWEAAKLYEKELTKLIRGLSMEKCSKRILKTTGKTFEPYRVYLRPLRDEMRKTHRLIERHLVAKKPLDQKKLLSSKEEILKPLRVVRESLEQNQSENIASGELLDLMRRAKCFGINLAKLDIRQESSRHSQLLAEYVKKKNNSNYLNWDENKKIKYLMNQMKKKKKIFKNFNFKNKENKEVWSTFKLLADEPSECLGAYVISMTSAASDVLAVYLMQMQANIKNKLRVVPLFETLQDLKNAKSIMEKLFSLSWYRKLIKNKQEIMIGYSDSSKDAGKLSASWHQYKLQEEVLNIAKKYKIDLTFFHGRGGSHGRGGGPIQATMRSQPPNSVYGRIRITDQGEMIQQKYGYEPLAKYNLCSYIGSVMQATLNPPPNPKDSWRNLIEEMTKISTLAYRK

SEQ ID NO: 148157 - protein, 577 aa, Unknown
  Bacterial polypetide isolated from the Sargasso Sea
TGKTFEPYRVYLRPLRDQMRKTHRLIERHLVAKKSLDQKKLLSSKEEILKPLRVVRESLEQNQSENIASGDLLDLMRRAKCFGINLAKLDIRQESSRHSQLLKEYVKKKNNSNYLNWDEDKKIKYLISEMKKNRKIFKNFNFKNKENKEVWSTFKLLANEPSECLGAYVISMTSAASDILTVNLMQMQANIKNKLRVVPLFETLQDLKNAKSIMEKLFSLSWYRKLIKNKQEIMIGYSDSSKDAGKLSASWHQYKLQEEVLIIAKKYKIDLTFFHGRGGSHGRGGGPIQATMRSQPPNSVYGRIRITDQGEMIQQKYGYEPLAKYNLCSYIGSVMQATLDPPPHPKDSWRKLIEKMTKISTNAYRKNINENSDFIRYFKTVTPHLALGKLSIGSRPSKRKNIDNIQSLRAIPWVFAWTQIRLMLPAWLGTGDALKYSSVKNYKTILTDMEKNWPFFNSTMDILDMVISKVDPEISEVYENSLADKKLREVGNKLRSEFAIIKKLNRYITPREIINQRKKFRTTVIVRNIYSEVLNILQAVVMNKLSKKKLKSNDKKYLNDAMMTSIAGISAAMKNTG

SEQ ID NO: 148158 - protein, 455 aa, Unknown
  Bacterial polypetide isolated from the Sargasso Sea
EDLWESVLREECPDDQAERLIQLKELSYSKQIDGDSSKTFKNEIVDIVNSMDLAESIAAARAFSLYFQLVNILEQRVEEDRYIQSFTNKDVQKSPDNLDPFAPALARQNAPVTFRELFYRLRKLNVPPGKLEELLQEMDIRLVFTAHPTEIVRHTIRHKQTRVANLLKKIQIEQFLTKEEKISLKTQLKEEVRLWWRTDELHQFKPSVLDEVDYALHYFQQVLFNAMPQLRGRIAEALTENYPDVQLPPESFCNFGSWVGSDRDGNPSVTPEITWRTACYQRQLMLERYIIATSNLRDQLSVSMQWSQVSSSLLESLETDRVKFPEIYEARATRYRSEPYRLKLSYILEKLRLTQERNNLLADSGWKFDLEGEIDNKNIDKVENLYYKSVNEFTYDLELIKNSLISTDLTCDSVNNLLTQVHIFGFSLASLDIRQESTRHSDAIQELTNYLDLSV

SEQ ID NO: 148159 - protein, 630 aa, Unknown
  Bacterial polypetide isolated from the Sargasso Sea
GGDRDGNPNVTYKVTKEVILLSRWEAAKLYEKALTKLIRSYSMEKCSNKITRVIGKSHEPYRAYLRPLRNKMRYTHRAIENHLVRNKPLNRKKILSSKEEILKPLRIVRESLENNQSENIASGDLLDLMRRAKCFGINLAKLDIRQESFRHTQLINELLKTKLNKNYLKFTENEKIQFLSKSIRSKKNLIKNFIFKNKENSEVWSTFKVLADEPEECLGGYIISMTATASDILTVSFLQKEAKIKRKLRVIPLFETLQDLKNAKSIMENLFSLNWYRKMIKNKQEIMIGYSDSSKDAGKLSASWHQYKLQEEIIKLAKRFKIDVTFFHGRGGSAGRGGGPIQSTLRSQPPGSVNGKIRITDQGEMIQQKYGYEPIANYNLCSYIGAVMQATLNPPPQPKDKWRQLIENMTNISTLSYRKNIKENSDFIRYFKTVTPHLALGKLSIGSRPSKRKNVDNIKSLRAIPWVFAWTQIRLMLPAWLGTGDALKYSSQKNNKSILIDMEKNWPFFNSTMDILDMVISKVDPEISKVYENGLADNNLKNVGNKLRNEFNIVKKFNNLITPNEITYQRNKFRTNTFVRNIYSEVLNILQAAVMKKLLKKNISKNHKKNLEDAMMTSIAGIAAAMKNTG

SEQ ID NO: 148160 - protein, 392 aa, Unknown
  Bacterial polypetide isolated from the Sargasso Sea
ATGKTFEPYRVYLRPLRDKLRTTHREIEQHLNYGKPLNEKILLSEREEILKPLRVVRESLEQNQNENIASGDLLDLMRRAKCFGINLARLDIRQESSRHSQLLNEFIKRKSRRNYNSWSETEKIKYLSDKIRGKNSINKFIFKNKENKEVWSTFKALSSQPKECLGAYVISMTSSASDILSVMYLQKEANIKSKLRVVPLFETLDDLINGKKIMEKLFSLKWYRKYILNKQEIMIGYSDSSKDAGKLSASWHQYKLQEEIIKLAKKYKINVTFFHGRGGSAGRGGGPIQATLRSQPPYSVNGKIRITDQGEVIQQKYGYEPLAKYNLCSYIGSVMEATLNPPPNPKKEWRNLIQNMSNVSTSSYRKNINQTSDFIRYFKTVTPHMALGKLSI

SEQ ID NO: 148161 - protein, 368 aa, Unknown
  Bacterial polypetide isolated from the Sargasso Sea
YKEKIINLSESFSISTLYADEPRLLMSKIKEYSNLLNKEFRHYTKINFDEPFRIFLSLVFHRLDNFQKNKKGYNSFSEFQDDLNLFENEVNKCFKNNSSSLDLKYFIDYVNQFKFHGVEMDIRENADVFRFNEDFKKEYSEFTTLIKRIPEWKKIYGDTVISSIILSMTKNEKDILNLFKLCKKLIKNKCDIPMLVPLFEEIDDLEKSHIIISNLFANKDYKKHLTNFNNNQEIMLGYSDSNKDGGIVASQWSVYKSQIALFKTGQKHNIDISFFHGRGGTISRGGGPTYNSILSQPKGTIKNELRYTEQGEVISDKYSTTSLASENLKLGLFAFFKANKTKNREIKYEHNFLNELSKLSSKKYRNLD

SEQ ID NO: 148162 - protein, 265 aa, Unknown
  Bacterial polypetide isolated from the Sargasso Sea
MTKSRDGVYWFSNFGNGVWKYDPISIRNLTTNDSIPQSNMNSMIMDKDNNMWIATGNGLLKIKNEKVEKIYSMKDGLRDNTITDIDIDDYGTLWITTPRGLSTYNGRTFKNYTIKDGFPSNQMPSVTIDNNGLVWVLTTKGLCSFDGSNVEVYDEKNGIYNLNNGQSLSEISAHPDGSIYIGQYGGGLTVFKDGIGKRYGAEDGLVDQRIHHLDIDSEGNCWLATDGSGVVKFNGKDFFRYTTKDGLAAPETFYVYIDDYDKIFV

SEQ ID NO: 148163 - protein, 147 aa, Unknown
  Bacterial polypetide isolated from the Sargasso Sea
TARVWDMRSGECTHKFDVVGECNGCAFFPSGTAVAAGTQNGSVFLFDLRAQAALQKYSRKNNHVTAVDFSQSGRTMYVAYEDGHVCLWDPLASSESGYAKKVAAHVKNQNHDSRMRVISCMQMSPDGTCLATGAFDATICLWGPGKS

SEQ ID NO: 148164 - protein, 298 aa, Unknown
  Bacterial polypetide isolated from the Sargasso Sea
RVKSSSPSLESRRAAKIDWLNATFDHPAMSLHGLVQFISTLMDGMVTAQMDGGLFGFTERHRMTAHLPDGSRVEIGSIALGGESQKGRWLLQLNGKGCGLINDWPSLQELLQGLQAELSRVDLAVDFLEGEYTVDDAVTLYDQGAFINRGRNPQLDIQGAWHESGTKGRTMYVGKLKNGKTLCVYEKGRQQNMPDSNWTRFEVRLGNRDRVIPLDVLTDPDRYFTGAYPALSHMLEAAAEAIPTVQEETKGSLAHGLYHLERCYGKYMHQALEITGCTSAELIEEVRVIGMPKRVDPA

SEQ ID NO: 148165 - protein, 81 aa, Unknown
  Bacterial polypetide isolated from the Sargasso Sea
MSKKDLENWVTEVAKLTAPEKVHWCDGSEEEKKFLIAEMLKTGDLLKLNESTHPNCFLHRSDPNDVARVEQLTFICSRTKG

SEQ ID NO: 148166 - protein, 85 aa, Unknown
  Bacterial polypetide isolated from the Sargasso Sea
MIAPPAFVKHRKLIDWVSRIAALTEPERVVWCDGSQEENDALCQAMVDQGTLKRLNPAKRQNSYLAQSDPSDVARVEDRTFICKK

SEQ ID NO: 148167 - protein, 131 aa, Unknown
  Bacterial polypetide isolated from the Sargasso Sea
MSTSNTELQSWVEEVSEMTKPDNIYWCNGSKEEYEEFIQQMLGTGDLMQLNEETFPNCYLHRSDPSDVARVEHLTFICTEDSEDAGPNNNWMDPKEAHQKLDQLFENCMEGRTMYVIPYCMGPIGSELSRC

SEQ ID NO: 148168 - protein, 166 aa, Unknown
  Bacterial polypetide isolated from the Sargasso Sea
STMGSEATAAAINQASIRRDPFAMLPFCGYNMAQHWRHWLDLGHKYTQSSPKIFRVNWFRKDSNGNFIWPGFGENMRILKWIVDRVKGKVEAKSNSFGLVPYFEDIVWNGLEFDNEKFSSLIEVPKTEGLKEINEVKEHFDRFGDFIPNELESQRIELEQRLNKEL

SEQ ID NO: 148169 - protein, 149 aa, Unknown
  Bacterial polypetide isolated from the Sargasso Sea
NVERDPMAMKPFCGYNFGDYWAHWLSFSSRSDKLPPIFHVNWFRKGGDGKFLWPGFGENIRVLEWVLARSAGKVEGTKSAIGYLPKSGELNLDGLNLQPGATESLLSVDRDSWKKEIEDIKEYFSSFGARLPAALTDRAELIKNALGSV

SEQ ID NO: 148170 - protein, 149 aa, Unknown
  Bacterial polypetide isolated from the Sargasso Sea
MLPFCGYNMADYWRHWLKLGKGLAHPPKIFRVNWFRKDDKGKFIWPGFGENMRVLKWIVDRVNGTVDAAESPFGHMPRHQDLNWHGLDFHVDDFSDIMDIDRARGLEEAEAQTELFESFEDRLPPEMETQRQALKDRLAKSSDQWQVAG

SEQ ID NO: 148171 - protein, 116 aa, Unknown
  Bacterial polypetide isolated from the Sargasso Sea
MSTSNKELQSWIEEVSKMTKPESIYWCNGSKEEYEEFIQKMLETGDLMQLNEETFPNCYLHRSDPSDVARVEHLTFICTEDSEDAGPNNNWMDPKEAHEKLDDLFDNCMEGRTMYV

SEQ ID NO: 148172 - protein, 274 aa, Unknown
  Bacterial polypetide isolated from the Sargasso Sea
GSQSFTKRTIVGDFVGANTVYAIDLDRDGDIDVLGTAGGSDNDIAWFENNGSQSFTERTIEGNFSGAHSLYPIDMDSDGDIDVVGVGTVDDIAWFENNGSQSFTERTINSTISGPISVYAADIDSDGDIDVVAAASQSDDIAWFENNGSQSFTERVIEGNFDGAKSVYVKDIDGDGDMDIVAAADEDDDIAWFENNGAQDFTEHTIEGNFDAARSVYVADIDSDGDIDVVGAANFDDDIAWFENNGSQSFTERTIDGNFDGPYSVYPADIDGDG

SEQ ID NO: 148173 - protein, 128 aa, Unknown
  Bacterial polypetide isolated from the Sargasso Sea
WKHWIEMGKKIKNPPKIFHVNWFRKNDENKFLWPGFGENIRVLEWIINRTNGKATANTTPIGHTPNLSSLCTDGLDIDEKTLKELTQVTPEGWAQELENTSSYLEKFAPKVPQELKEELQKIKNSLLI

SEQ ID NO: 148174 - protein, 192 aa, Unknown
  Bacterial polypetide isolated from the Sargasso Sea
AIVFGGRRSELAPLVSESKDWNHGVLVGASVGSETTAAAIGEVGVIRRDPMAMKPFCGYNFADYWTHWLSFSERSDNLPKIFHVNWFRKNENGFIWPGFGDNLRVLEWIIKRCNNEIDAQETPIGFLPKSEDINTSGLTITDEAMEELVLVDNQKWIDEMAGIREYFEEYEERLPEKLLEEHAKVIEALNAE

SEQ ID NO: 148175 - protein, 152 aa, Unknown
  Bacterial polypetide isolated from the Sargasso Sea
MSTSNTELQSWVEEVSEMTKPDNIYWCNGSKEEYEEFIQQMLGTGDLMQLNEETFPNCYLHRSDPSDVARVEHLTFICTEDSEDAGPNNNWMDPKQAHQKLDQLFENCMEGRTMYVIPYCMGPIGSELSRCGVEITDSHLCSCEYVSDDKDG

SEQ ID NO: 148176 - protein, 126 aa, Unknown
  Bacterial polypetide isolated from the Sargasso Sea
HWLSFSERSDNLPKIFHVNWFRKNENGFIWPGFGDNLRVLEWIIKRCNNEIDAQETPIGFLPKSEDINTSGLAITDEAMEELVLVDNQKWIDEMAGIREYFEEYEERLPEKLLEEHAKVIEALNAE

SEQ ID NO: 148177 - protein, 168 aa, Unknown
  Bacterial polypetide isolated from the Sargasso Sea
VLVGASVGSETTAAAIGEVGVIRRDPMAMKPFCGYNFADYWTHWLSFSERSDNLPKIFHVNWFRKNENGFIWPGFGDNLRVLEWIIKRCNNEIDAQETPIGFLPKSEDINTSGLTITDEAMEELVLVDNQKWIDEMAGIREYFEEYEERLPEKLLEEHAKVIEALNAE

SEQ ID NO: 148178 - protein, 214 aa, Unknown
  Bacterial polypetide isolated from the Sargasso Sea
MAKNNPKYSNLADSPSGVPISAIVFGGRRSELAPLVYQSKDWNHGVLVGASVGSETTAAAAGEVGIVRRDPMAMKPFCGYNFADYWTHWLSFSSKSERLPKIFHVNWFRKNDQGFIWPGFGDNLRVLEWIIKRCQNEADAIDTPIGFLPKPEDIDTSGLDITRESMEELFYVNKDQWLKEMESIREYFLEYGDRMPEMLLNEHRKVVSKLEQSD

SEQ ID NO: 148179 - protein, 195 aa, Unknown
  Bacterial polypetide isolated from the Sargasso Sea
MSTSNKELQSWVEDVSKMTKPENIYWCNGSKEEYEEFIQKMLGTGDLMQLNEETFPNCYLHRSDPSDVARVEHLTFICTEDAEDAGPNNNWMDPKEAHEKLDDLFENCMEGRTMYVIPYCMGPIGSELSRCGVEITDSPYVVANMYLMTRMGDEALARIEREGGFVKGIHSTGDLDPEKRFIMHFPDGKNYQKYW

SEQ ID NO: 148180 - protein, 191 aa, Unknown
  Bacterial polypetide isolated from the Sargasso Sea
LVFGGRRSELAPLVYESKNWNHGVLVGASVGSETTAAAIGEVGVIRRDPMAMKPFCGYNFADYWTHWLSFSERSNNLPKIFHVNWFRKNESGFIWPGFGDNLRVLEWIIKRCNNEIDALETPIGYLPKSEDINTSGLTISDDAMEELVFVDNQKWLDEMAGIREYFGEYEERLPEKLLEEHAKVIEALNAE

SEQ ID NO: 148181 - protein, 176 aa, Unknown
  Bacterial polypetide isolated from the Sargasso Sea
AKDWTHGVFLGASMASETTAAATGKTGILRRDPMAMKPFCGYNFASYWEHWLSFSKQEAKLPRIFHVNWFRKDERGEFIWPGFGENMRVLEWILGRCQNKLAASETPIGFVPKLEDLNQKNLKMSEDSLKTLMQVEPKGWHNEIKELGSYLDSFGEKLPQAIKEKQKAIIKELENS

SEQ ID NO: 148182 - protein, 164 aa, Unknown
  Bacterial polypetide isolated from the Sargasso Sea
ASVGSETTAAAIGEVGIIRRDPMAMKPFCGYNFADYWTHWLSFSERSNNLPKIFHVNWFRKNENGFIWPGFGDNLRVLEWIIKRCNNEIDALETPIGYLPKSEDINTSGLTISDDAMEELVFVDNQKWLDEMAGIREYFGEYEERLPEKLLEEHTKVIEALNAE

SEQ ID NO: 148183 - protein, 85 aa, Unknown
  Bacterial polypetide isolated from the Sargasso Sea
MKPLNKIITNKDTSFNPIWIMRQAGRYLPEFREIRKNNPDFINLCLNDNLSSEITLQPLKRFDIDAAIIFSDILMLPYGLGQKVN

SEQ ID NO: 148184 - protein, 50 aa, Unknown
  Bacterial polypetide isolated from the Sargasso Sea
ERRSIKERIDNTFNKIKGRKYILNLGHGILPGTPEENAQTFFEHGKKLTY

SEQ ID NO: 148185 - protein, 120 aa, Unknown
  Bacterial polypetide isolated from the Sargasso Sea
IYEPTFNIVEYSKELGAPIICFPRGIKDYKKYCDIVKPDAVNIDYEVDPKKIIKDIQIPVQGGLDPKILLTDKINLKKEVEKYLITFNDHPYIFNLGHGILPETKIDLVEELIEIVKNYK

SEQ ID NO: 148186 - protein, 54 aa, Unknown
  Bacterial polypetide isolated from the Sargasso Sea
MSPIQECIKNRNTKVNSVWLMRQAGRYLPEFRDIRSKNTDFIKLCLNEKLSSEI

SEQ ID NO: 148187 - protein, 184 aa, Unknown
  Bacterial polypetide isolated from the Sargasso Sea
MKPIHKIIINKDTSFNPIWIMRQAGRYLPEFREIRKKNSNFINLCLNDKLSSEITLQPLKRFNLDAAIIFSDILMLPYGLGQTVEFEKNFGPKLGKINLDVISKIDEIDFVEKIHRVYKAIKKVSSDPILNNKNTIGFVGAPWTLLVYMINQQSPKKNLKKGFFEDEFLINRILLIIEKFLKVH

SEQ ID NO: 148188 - protein, 121 aa, Unknown
  Bacterial polypetide isolated from the Sargasso Sea
YIYSPTLNLVKYIKSLNVPVICFPRNIKNYTDYSKITKPDVINIDYNIDPEEIRKKIDIVVQGGLDPKILLSNKDQLKKSAKRYLDVFKDHPYIFNLGHGILPNTKPEMIDYLIKFVKSYR

SEQ ID NO: 148189 - protein, 151 aa, Unknown
  Bacterial polypetide isolated from the Sargasso Sea
VHIHNQFKSGATIIQIFDSWAGLVNKEDLEKFIYKPTISLVKFIKSLNIPVICFPRNVENYKEYVETVMPDAVNIDYNVDPQNILKNINIPVQGGLDPQILLTDKENLKKNALKYLEIFKDHPYIFNLGHGVLPATDPNMMDYLVKLVKDF

SEQ ID NO: 148190 - protein, 110 aa, Unknown
  Bacterial polypetide isolated from the Sargasso Sea
MSLLKDCINKKKISSIPIWFMRQAGRYLPEFRDIRSKNTDFIKLCLNPHLSKEITIQPLKRFKIDAAIIFSDILFIPYALGQSVEFEKNFGPKLGELDYDRVLNTPDARY

SEQ ID NO: 148191 - protein, 121 aa, Unknown
  Bacterial polypetide isolated from the Sargasso Sea
YIYKPTYNIVDYIKKLGVPVICFPRGIKNYKEFCKIVKPDMVNIDYNVDPKKIANEIDLPIQGGLDPKILLTDKDKVKNEVEKYLTIFKDHPYVFNLGHGILPETKIELVEQLIKIVKNFK

SEQ ID NO: 148192 - protein, 268 aa, Unknown
  Bacterial polypetide isolated from the Sargasso Sea
AAIIFSDILMLPYGLNQKVEFKKGIGPILGDLNLKNILNINESDFIDKLQPVYKLVNLIKNNDLTRNKNTIGFVGAPWTLLVYMINQKSPKSGLKSDFFKDKNFIDKVLKVIEKFLKLHIRNQIESGAQIIQIFDSWAGLLDEKDLPNYIYEPTIRLVEYTKSLNVPTICFPKGIKKYKDYCETVKPDAICIDYEADPKEILKDIKIPIQGGMDPKILLTDKDNLRKGAKKYLEIFKDHPYIFNLGHGVLPETDPKMMDYLVKMVKDY

SEQ ID NO: 148193 - protein, 99 aa, Unknown
  Bacterial polypetide isolated from the Sargasso Sea
FPRGIKDYTSFCEIVKPDAVNIDFDVDPKKIVNEIKIPIQGGLDPKILLTDQKTLKIEVEKYLGIFKDHPYIFNLGHGILPETKIEMVEELIKIVRNFK

SEQ ID NO: 148194 - protein, 269 aa, Unknown
  Bacterial polypetide isolated from the Sargasso Sea
AAIIFSDILMIPYGLGQKIEFKKGVGPILGDINLNNIINTTKIEFTKKLSPVYEGIKKVKSNLNQKALIGFVGAPWTLLLYMLNKGSPKNNFDFNKINKEVSINSLLKKIGEMICLHVDKQIKAGANIIQIFDSWAGLLPKEELSKYCYTPISKIVEHIKSKNTPVICFPKGIGESYIDFCSIVKPDCISIDYDIDPQWIRDKLNGLPIQGGLDPKILLSDKEKIKKSVEYYLNIFKDYPYIFNLGHGVLPEIKPETIEYIIQLVRNKK

SEQ ID NO: 148195 - protein, 240 aa, Unknown
  Bacterial polypetide isolated from the Sargasso Sea
MRNCIEKKTTSYTPIWFMRQAGRYLPEFREIRKKNPDFIKLCLNERLSAEISLQPIKRFDLDAVIIFSDILMIPYGLGQKIEFKKGIGPILGDLNFNVILNTKPNDFIEKLSPVYEAIKRVKKEAKDKNLIGFVGAPWTLLMYMLNKKSPKNNFDINKIIKNKSLMRDLIIKLEDIIFLHTKEQIKAGADIIQIFDSWAGLLPKNKLSEYCYIPTSKIVKNIKSLEIPVICFPKGMEKII

SEQ ID NO: 148196 - protein, 67 aa, Unknown
  Bacterial polypetide isolated from the Sargasso Sea
MKNSKFIKALNLQENSTPPVWFMRQAGRYLPEYQEIRKNYTNFLDMCKQPKTCAELALQPIDRFDLD

SEQ ID NO: 148197 - protein, 232 aa, Unknown
  Bacterial polypetide isolated from the Sargasso Sea
TIHWRPVYETVRILSKELPEETTLIGFAGAPWTVATYMIAGRGTPDQKPAHDLKNNNILAFENLIEILTKATIKYLSAQIDAGAEVVKIFDSWAGSLKGDDFYKYALEPTKKIVMELKAKYPTVPIIAFPRQAGDYYKGFLKSTGADCLAIDDSISSAWAAKYLQKDGCIQGNLNSSHMVSGGQNMIDEIETIVSDLSQGPHIFNLGHGITPEANPDNVALMIETIRNFKRS

SEQ ID NO: 148198 - protein, 107 aa, Unknown
  Bacterial polypetide isolated from the Sargasso Sea
MKPLNKIIINKDTSFNPIWIMRQAGRYLPEFREIRKENPNFINLCLNDDLSSEITLQPLKRFDLDAAIIFSDILMLPYGLGQKVEFEKNFGPKLGELNLNEIAKTDE

SEQ ID NO: 148199 - protein, 145 aa, Unknown
  Bacterial polypetide isolated from the Sargasso Sea
FNGASIIQIFDSWAGLASEDQLEKYIYRTTKELVEYTKNLGVEVICFPRGIKSYKKYCDLVKPSAINIDYEVDPFKIAKTINIPIQGGMDPKCLLLDKDEMLKNAKKYLDVFKDHNYIFNLGHGMIPETNPENVKILVNFVKDFR

SEQ ID NO: 148200 - protein, 175 aa, Unknown
  Bacterial polypetide isolated from the Sargasso Sea
MNENFFEDKYLIDKVLKILDKFLKIHIKNQIENGAQIIQIFDSWAGLLKEKDLPHYIYDPTLSLVNYTKSLNVPVICFPRGIKNYKNYCEIIKPDAICIDYEVDPVKINKEINIPVQGGMDPKLLLSDKENLKKETTKYLDIFKDHPYIFNLGHGVLPETDPNMMDYLVKTVKDY

SEQ ID NO: 148201 - protein, 118 aa, Unknown
  Bacterial polypetide isolated from the Sargasso Sea
MSNIKEVIINKETSIKPIWIMRQAGRYLPEFREIRSKNKDFIKLCLNEKLSTEITLQPLKRFELDAAIIFSDILMVPYGLNQKVEFKKNFGPLLGNLNINDISKITEKNFTEKIYRNL

SEQ ID NO: 148202 - protein, 217 aa, Unknown
  Bacterial polypetide isolated from the Sargasso Sea
IQENLNKQTALIGFAGAPFTVALYMIEGRGGTEGTKVRCMAAEHPEMFSKLIDILCDATSSYLIEQVNHGAEALQLFDSWAGLLPESQFRQWVIEPNRRIVEAVHAVHADVPIIGFPRNAGVLYKDFVRETGVQGISIDSTVPLSWAVETLQPMCTVQGNLDNHILRSGGVIMEKEVRSIVNALGNGPFIFNLGHGILPSTPPEHVGRVVDIIRGLV

SEQ ID NO: 148203 - protein, 223 aa, Unknown
  Bacterial polypetide isolated from the Sargasso Sea
MKKLSPVYDAIKITRKKLNKKKSLISFVGAPWTLFVYMSGLKKSKKKISTYNFKKNNKVIACLTDYICLHIEKQIQAGANVVQIFDSWAGLIPQQHLLEYCYLPNKKIVSFCKKKRIPVICFPKGIKRKYYDFNKIVKPDGLNIDYDIDPEWAKRNLKNTSLQGGMDPKILLGSKKKILKEAKRYMDVFKNVPYIFNLGHGLLPSTDPRKLKMLINFIRKYKC

SEQ ID NO: 148204 - protein, 84 aa, Unknown
  Bacterial polypetide isolated from the Sargasso Sea
MRQAGRYLPEFREIRKKNQDFIKLCLNETLSSEITLQPIKRFDFDAAIIFSDILMIPYALNQNVKFEKGFGPKLGNLNLDIIKE

SEQ ID NO: 148205 - protein, 230 aa, Unknown
  Bacterial polypetide isolated from the Sargasso Sea
MTPIQECIRNKNNKVSPIWIMRQAGRYLSEFREIRKKNPDFIKLCLNENIVPEITLQPLKRFNFDAAIIFSDILMVPYGLGQDVTFSKGFGPKLGKINIDEISKVKPIEFTNRVQTVYKAIQITSKNELLKNKDLIGFVGAPWTLLVYMINKISPKNNLIENFFEDKILIKELIQVVKNFIKIHIEQQIKNGSTIIQIFDSWAGLLNEKDLNEYVYEPTKEIVNYVKSLD

SEQ ID NO: 148206 - protein, 55 aa, Unknown
  Bacterial polypetide isolated from the Sargasso Sea
PKILLTDKKTLKTEVEKYLNIFKDHPYIFNLGHGILPETKIEMVEELIKTVKNFK

SEQ ID NO: 148207 - protein, 81 aa, Unknown
  Bacterial polypetide isolated from the Sargasso Sea
MVNIDYDVDPKKIANELDLPIQGGLDPKILLTEIDKVKQEAEKYLTIFKNHPYVFNLGHGILPETKIDLVKELFKTVKNFK

SEQ ID NO: 148208 - protein, 74 aa, Unknown
  Bacterial polypetide isolated from the Sargasso Sea
SRSKKIIKDIQIPVQGGLDPKILLTDKINLKKEVEKYLITFNDHPYIFNLGHGILPETKIDLVEELIEIVKNYK

SEQ ID NO: 148209 - protein, 79 aa, Unknown
  Bacterial polypetide isolated from the Sargasso Sea
MKDTLTECIINKNTSYIPIWFMRQAGRYLPEFREIRQNNQNFIKLCLNSELVNEITLQPLKRFDLDAAIIFSDILMIPY

SEQ ID NO: 148210 - protein, 160 aa, Unknown
  Bacterial polypetide isolated from the Sargasso Sea
FLIIEKFLKIHIKNQVNSGAEVIQIFDSWAGLLNNKDIPSYIFEPTLNLVDFTKSLKIPVICFPRGIKNYKEYCDIVNPDAICIDYEVDPTLIKKEIKIPVQGGMDPKVLLTDKENLKKEAKKYLDIFKDHPYIFNLGHGVLPETEPNMMDYLVKMVKDY

SEQ ID NO: 148211 - protein, 155 aa, Unknown
  Bacterial polypetide isolated from the Sargasso Sea
MKPLNKVIINKDTSFNPIWIMRQAGRYLPEFREIRKENPNFINLCLDDDLSSEITLQPLKRFDLDAAIIFSDILMLPYGLGQKVEFEKNFGPKLGELNLNEIAKIDEIDFVEKIHRVYKALKKVSSDISLKEKNTIGFAGAPWTLLVYMINQQSP

SEQ ID NO: 148212 - protein, 247 aa, Unknown
  Bacterial polypetide isolated from the Sargasso Sea
KNFGPLLDDIDLDIFKKIEEVNFTKKLNSIYESLKLTSRNSLLNNKDLIGFIGAPWTILVYMLNKQSPKKKITSSLFNNEKLINELLILIKKFLKIHIKNQVENGASIIQIFDSWAGLVEEKKISKYIYDPTSEIVEYVKSLNVPAICFPREIKDYKEFCEATKPDAVNIDYNVNPKEITKNIKIPVQGGLDPKILLTDKETLKKETLKYLEIFKNHPYIFNLGHGVLPETNPEMVEYLVKTVKEYK

SEQ ID NO: 148213 - protein, 120 aa, Unknown
  Bacterial polypetide isolated from the Sargasso Sea
MRQAGRYLPEFREIRKKNPNFIKLCLNSNLVKDITIQPLKRFDLDAAIIFSDILMIPYGLGQEVEFKKGYGPELGDPDPEKILSIGSEDFIKKITPVYEGIKQVKKEIKEKNLIGFVGAP

SEQ ID NO: 148214 - protein, 235 aa, Unknown
  Bacterial polypetide isolated from the Sargasso Sea
MFLDVNEREFTQKLNPVYKAIELTRKNLDKEKSLIAFIGAPWTLIFYMLSIKDKKNEINLKKLNEKNIVINKILNKLINFLCTHIDNQINAGADVVQIFDSWAGKIPDKNIKDYCFIPNAKIVEFCKEKKISNICFPKGIKKKYEDFNKIVKPDGINLDYKIDPMWAKNNLKDVVLQGGLDPKILLKSEKEMLEGATKYIQIFKDIPYVFNLGHGLLPETDPDRVKKLIEFYRNY

SEQ ID NO: 148215 - protein, 115 aa, Unknown
  Bacterial polypetide isolated from the Sargasso Sea
MPNKKFINAIERKPQACPPIWLMRQAGRYHDHYQNLKKDHSFEELCKKPKLAAETAMGPINEFDFDVAILFSDILFPLEALGMDLSYNPGPQFDLHLNEDNAESLIINQNPINFM

SEQ ID NO: 148216 - protein, 237 aa, Unknown
  Bacterial polypetide isolated from the Sargasso Sea
QPVTRYKFDAAIIFSDILMVPWALNQKVRFQPNAGPLLDPLDIPRSINQKLINKLPIKLAPVAKAIRLTKENLSPKTALIGFAGAPWTIMTYMAEGGTSRDFTKARGWAWQYRKGTDALLDSLIESTVCFLTLQAEAGADVLMLFDSWASAVPAAQRRWLVIDPIRKIVDGLRKNGHKQPVIGFPKGIGEGLLSYVEQADVNAVGLDQGVDPVWVDKNLPKNFPVQGNLDPLSLVQA

SEQ ID NO: 148217 - protein, 199 aa, Unknown
  Bacterial polypetide isolated from the Sargasso Sea
MSPLREVIINKRTAINPIWIMRQAGRYLPEFRKIRKQNPDFIKLCLNEALSSEITLQPLKRFDLDAAIIFSDILMVPYGLNQNVEFKKNFGPTLGDLNLENIVKINEIDFIEKVNPVYKAINLVSKSQTTKNKSTIGFIGAPWTLLVYMINQKSPKLKLKQDFFEDALLINKVLVILEKFLKIHIKNQIDNGAEIIQIF

SEQ ID NO: 148218 - protein, 67 aa, Unknown
  Bacterial polypetide isolated from the Sargasso Sea
SKSIKIPVQGGLDPKILFSDQENLKKEVLRYLDIFRDHPYIFNLGHGILPETDPLMVEYLVNTVRDY

SEQ ID NO: 148219 - protein, 70 aa, Unknown
  Bacterial polypetide isolated from the Sargasso Sea
MTPLHEVIINNKTTINPVWIMRQAGRYLPEFKEIRKKNPNFIELCLNHKLSSEITLQPIKRFDLDAAIIF

SEQ ID NO: 148220 - protein, 261 aa, Unknown
  Bacterial polypetide isolated from the Sargasso Sea
ILIPPYGLGQKVEFKKNFGPLLGDLELDKISSIKEDQFTNKLMAVYNSIKIVSQNKLLKDKDTIGFVGAPWTVLVYMLNKQSPKKDFNISIFENQNQIDKIFNILDKFLKIHIKNQIDNGATIIQIFDSWAGLVDEKNINKYIYNPTSSLVKFTNSLKVPVICFPRNIKNYKNYVDNVKPDVVNIDYEVDPKKIASEINIPIQGGLDPKILLTDKKKIRNSALNYLNIFKDHTYIFNLGHGVLPETDPINVEYLVKTVKEF

SEQ ID NO: 148221 - protein, 305 aa, Unknown
  Bacterial polypetide isolated from the Sargasso Sea
PEFRDIRAKNPDFIKLCLNEKLSTEISLQPLRRFDLDAGIIFSDILMLPYGLGQSVEFKKNFGPELGEVQIENLSNQSEAQFIKKLLPVYNLINNMSKSEIIKEKDLFGFVGAPWTLLVYMINRMSPKKKLNKNFFNNKDLIDKLLKVIVKFTKIHLKHQVRAGATIIQIFDSWAGLVDEKDLEYFIYKPTREIVNFSKSLNVPVICFPREIKDYKKFVETINPDVVSIDYNIDPKDISDTIQIPIQGGLDPKILLSNKENLKIEAKRYLDIFKDHPYIFNLGHGVLPETDPNMVDYLVKMVKDY

SEQ ID NO: 148222 - protein, 158 aa, Unknown
  Bacterial polypetide isolated from the Sargasso Sea
YLCTHIKNQINAGADVVQIFDSWAGLIPEEDVKNFCYIPNKRIVDFCKSKKIVTICFPKGLKENYEAFNDFVKPDGINLDADLDPQWARDKLKNVVLQGGLDPKVLLKTDEDILKGVAKYVKIFKDIPYVFNLGHGLLPETDPDKVKMLINFYRNYNE

SEQ ID NO: 148223 - protein, 188 aa, Unknown
  Bacterial polypetide isolated from the Sargasso Sea
MRPLHKIIINKDTSFNPIWIMRQAGRYLPEFREIRKENPNFINLCLNDNLSSEITLQPLKRFNLDAAIIFSDILMLPYGLGQKVEFEKNFGPKLGKLNLNEIAKTDEIDFVERIHRVYKAIKKVSSNTSLNNKNTIGFVGAPWTLLVYMINQQSPKKNLKKDFFKDKFLINRILLIIEKFLKIHIKNQ

SEQ ID NO: 148224 - protein, 135 aa, Unknown
  Bacterial polypetide isolated from the Sargasso Sea
FDSWAGLVNKDLSKYLYEPTTSLVEYTKSLGVPVICFPRGISDYNKFCDEVRPNMINIDYNIEPKDLLNKIKIPIQGGLDPKILLTNRENLNLEVNKYLRVFKDHPYVFNLGHGILPETKIEMVHELIKIVRDFT

SEQ ID NO: 148225 - protein, 135 aa, Unknown
  Bacterial polypetide isolated from the Sargasso Sea
MIVGQGLVDQNLDKYIYNPTSDIVEYVKNLGVPVICFPRCIKDYKIYCEIVKPDMVNIDYNVDPKKIIKEIKIPIQGGLDPNVLLTDKENLKKHAEKYLNIFKDHPYVFNLGHGILPETKIELVEELISIVRNYK

SEQ ID NO: 148226 - protein, 72 aa, Unknown
  Bacterial polypetide isolated from the Sargasso Sea
MKPLNKVIINKDTSFNPIWIMRQAGRYLPEFREIRKENPNFINLCLNDHLSSKITLQPLKRFDLDAAIIFSD

SEQ ID NO: 148227 - protein, 84 aa, Unknown
  Bacterial polypetide isolated from the Sargasso Sea
KHNMVNIDYNVDPKKIINEIQIPIQGGLDPKVLLTDKENLHREAIKYLQIFKDHPYVFNLGHGILPETKIEMVEELVKTIRGFK

SEQ ID NO: 148228 - protein, 135 aa, Unknown
  Bacterial polypetide isolated from the Sargasso Sea
MKPLNKVITNKDASLNPIWIMRQAGRYLPEFREIRKENPDFINLCLNHNLSSKITLQPLKRFDLDAAIIFSDILMLPYGLGQKVEFEKNFGPRLGELNLNKIVKIDEVDFVEKIHPVYKAIQKVSSDTNLNNKNM

SEQ ID NO: 148229 - protein, 236 aa, Unknown
  Bacterial polypetide isolated from the Sargasso Sea
ITLQPLKRFKLDAAIIFSDILMLPFGLGQKVEFKKNYGPSLEDLDLNKLLNVKDEDFSNKLKPVYEAINIVSKDKLLNEKDLFGFVGAPWTIFVYMLNKKSPKLAKDLKNSIFNKIQNKEMQNLLHIIVKFLKTHIKNQVESGASIIQIFDSWAGLLEEKSYEDYIYNPTIELVNYTKKLGVPVICFPRNIKNYKKFCEIVNPDAVNIDYEIDPNIILKEIKIPVQGGLDPKILLG

SEQ ID NO: 148230 - protein, 162 aa, Unknown
  Bacterial polypetide isolated from the Sargasso Sea
INKYLSSHIQNQIRSGANVIQIFDSWAGLVSDNNLEEYIYKPTKTLIKVTKSFKVPCICFPRNIKNYKEYTQIIKPDVINIDYNANPNEIIKNIEIPIQGGMNPKVLLSSKKNLEKFTNYYLRVFENHPYIFNLGHGVLPQTDPTMIQYLIKLVRRFNERSS

SEQ ID NO: 148231 - protein, 243 aa, Unknown
  Bacterial polypetide isolated from the Sargasso Sea
MRQAGRYLPEFRRIRKKNPNFIKLCLNKNLSSIITLQPLKRFDLSAAIIFSDILMIPYGLEQEVTFKKDFGPQLNSLDLEKISKVSKRKFKTKLQPIYNSIRKVKTNNLIKNKNLIGFVGAPWTLLVYMINKKSPKNKINSNLFENKLFINKVLKIIEKFLFLHIENQINSGADVIQIFDSWAGIIKKKDIPKYIYEPTARIVKFIKSKKIPVICFPRNIRNYKEYVKFVKPDAISIDYFVDP

SEQ ID NO: 148232 - protein, 118 aa, Unknown
  Bacterial polypetide isolated from the Sargasso Sea
KNLVSFCKDNEIPVICFPKGLKDNYKKFAEKVKPNAINIDQEIDPLWVKNNLNEVCIQGGMDPKFLLRSEKEILDETDRYLDIFKNNPYIFNLGHGILPETNPDIVKKIVDKVNLVVR

SEQ ID NO: 148233 - protein, 243 aa, Unknown
  Bacterial polypetide isolated from the Sargasso Sea
LQLQCPSPIKQLTDKIFDSPETIQIGTIKPAKTVSHHLYPINEKMKKDALLKILNSTATGQILIFTRTKFRTKKVFAELDKNNFRVVALQGNMSQNKRMQSMNGFKQGKYDILVATDIASRGIDVSNVTHVINYDMPTTVDTYIHRIGRTGRASKEGEAYTFMLPEDSGMVKRIEKVLGENIEKRFLEDFNYGDMKVFDSPKQLHKSNRFKRQTNFKKTSTKQSRTRNQSKNYRPSSKKQSNV

SEQ ID NO: 148234 - protein, 257 aa, Unknown
  Bacterial polypetide isolated from the Sargasso Sea
GQNVEFRKNFGPFLGPISIEEIKDFDKKSFNKKLDPVYKSIRKVKEEEILKNKDLIGFVGGPWTILVYMLNRYSPKNKLRKIFSDKLLIKDMLKYINRYISLHIQNQIKSGANIIQIFDSWAGLVEDKNLDEYIYQPTKILTKVIKSFKIPCICFPRNIKNYKDYIQTIKPDAINIDYNVDPNKIIKNIKIPIQGGMDPKILLSSKKNLEKLTNYYLSVFENHPYIFNLGHGVLPQTDPNMIQYLINLVRKFNERSS

SEQ ID NO: 148235 - protein, 113 aa, Unknown
  Bacterial polypetide isolated from the Sargasso Sea
MTPLHEVIINKKTIINPVWIMRQAGRYLPEFKEIRKKNPNFIELCLNHKLSSEITLQPIKRFDLDAAIIFSDILMLPYGLNQKVDFKKDFGPVLGNLDIGTMSKIDEIDFVEK

SEQ ID NO: 148236 - protein, 200 aa, Unknown
  Bacterial polypetide isolated from the Sargasso Sea
TTFLFMFRGNEIDRSFHSAIKYFYSNKKDSLKIMDSITEASIEYLNNQVNSGIDCFQLFETYCGIIPSELYIKDIMPYSKKILEKSKELNQPTIFFPKNFNEGLKVINKDLCDFVGIDANVSLDFARKIVDNNVGLQGNMDPKTFYLSYDEIDDYLDSLINFGSKNQNWIFNLGRGFMPDIDHRKVKYVVDQIKTINWNR

SEQ ID NO: 148237 - protein, 62 aa, Unknown
  Bacterial polypetide isolated from the Sargasso Sea
MSKLLNCLINKDNSCVPVWFMRQAGRYLPEFKEIRSKNQNFLELCFNSDLAYEITLQPIKRF

SEQ ID NO: 148238 - protein, 102 aa, Unknown
  Bacterial polypetide isolated from the Sargasso Sea
GFPRNTNLACYKKYSNIDKLDCITLDYNFPLDEINELNDKIVFQGNLDPKHLLKDSQNLSQKIEEILFAFRERPHIFNLGHGVLPETSIEKVEKMLLQIRST

SEQ ID NO: 148239 - protein, 164 aa, Unknown
  Bacterial polypetide isolated from the Sargasso Sea
DLLNIIDKFTKLHIKNQIKNGATLIQIFDSWAGLLKNDNEISELIYSPTKSLVDYVRSLNVPVICFPRNIKNYELYCKIVSPDIISIDYEIDPKNILKKINIPIQGGLDPKVLLAEKDILKKEAIKYLNIFKDHPYIFNLGHGVLPETKPDTIEYLVNLVKDFK

SEQ ID NO: 148240 - protein, 248 aa, Unknown
  Bacterial polypetide isolated from the Sargasso Sea
KDFGPILNEIDIKKILKTNEIEFTKNLLPVYDSMKIISSNEIVKNKDTIGFVGAPWTLLVYMLNKKSPKKEISKEILDNNSLVKSLLNIIVRFTKLHIKNQIDNGATLIQIFDSWAGLLKEKHEISELIYNPTLSLVDYVKSLNTPVICFPRGIKSYELYCKIVSPDAINIDYAVDPKNIEKKIKIPVQGGLDPKILLSDKENLKKETLKYLNIFKDHPYIFNLGHGVLPETKPEMVEYLVNLVKDFK

SEQ ID NO: 148241 - protein, 197 aa, Unknown
  Bacterial polypetide isolated from the Sargasso Sea
MNKLLDCINNKNISVTPIWFMRQAGRYLPEFREIRKKNIDFIKLCLNSDLVKEITIQPLKRFEIDAAIIFSDILIIPYGLGQEVNFKKGYGPILGELKLENIIKTKDINFIEKINPVYDGIKKVKKELKNKDLIGFVGAPWTLLLYMINKQSPKKNFIFKDIIKDKILTSKLITKLEEIICLHAEKQIEAGANIIQI

SEQ ID NO: 148242 - protein, 129 aa, Unknown
  Bacterial polypetide isolated from the Sargasso Sea
NPSNLNEYCFQPNLDLVNFCKKNKIASICFPKGIKNRYYDFVNVVKPDGISIDSQIDPFWASEKLKNVSIQGGMNPELLLMEDSIVLDEVEKYLDSFKDNAYIFNLGHGILPKTNPEIIKKIVNRVQKK

SEQ ID NO: 148243 - protein, 64 aa, Unknown
  Bacterial polypetide isolated from the Sargasso Sea
MTPIKNCILNKDTSFNPIWLMRQAGRYLPEFREIRKKNTNFIELCLDSKLSEEITLQPIDRFDF

SEQ ID NO: 148244 - protein, 189 aa, Unknown
  Bacterial polypetide isolated from the Sargasso Sea
MKKINKCLVNKDCSSLPIWFMRQAGRYLPEFREIRSKNQNFIELCLNSELSSEITLQPLKRFDLDAAIIFSDILMVPYGLGQNVNFVKNEGPEMSKFNLSVFLKSSKESFTKKLNPIYQAISKTRKRLNNEKSLICFIGAPWTLLFYMFNGKKNPNFIKDKSVDFKIILERLNEYLILHVENQFNAGAD

SEQ ID NO: 148245 - protein, 81 aa, Unknown
  Bacterial polypetide isolated from the Sargasso Sea
MTPIQDCIINKNTKSKPLWIMRQAGRYLPEFREIRAKNTDFIKLCLNESLSSEITIQPIKRFNFDAAIIFSDILMLPYGLG

SEQ ID NO: 148246 - protein, 56 aa, Unknown
  Bacterial polypetide isolated from the Sargasso Sea
MNRLLNCINGKSPGDTPVWFMRQAGRYLPEFMEIRKQNTDFVKLCLNSDLAKEITI

SEQ ID NO: 148247 - protein, 54 aa, Unknown
  Bacterial polypetide isolated from the Sargasso Sea
MKDSKFLRALDLKSNTIPPVWFMRQAGRYLPEYQKIRKNYSNFLDMCKEPKTCA

SEQ ID NO: 148248 - protein, 183 aa, Unknown
  Bacterial polypetide isolated from the Sargasso Sea
NKKSPKQDLNENFFDNKLLISEVLKILDKFLKIHIKNQIDNGAQLIQIFDSWAGLLNEKDLPYFIYEPTLNLVNYIKSLNVPVICFPRGIKNYKEFCEIIKPDTICIDYEVDPVKINKEIKIPVQGGMNPKILLSDKENLKKETIKYLNIFKDHPYIFNLGHGVLPETDPNMMDYLIKTVKDY

SEQ ID NO: 148249 - protein, 162 aa, Unknown
  Bacterial polypetide isolated from the Sargasso Sea
NKLNEYLCEHIDKQFEAGSDVVQIFDSWAGLIPENEISNYCFDPNKKLVDFCKERKLPVICFPKGINQKYKDFLNKVKPDGLNIDYDIKPEWAKQNLTNVCLQGGMDPKILFQEEEKVFSEVDKYLNMFKDSPYIFNLGHGLLPETNPDVLDKIIKRVNSYK

SEQ ID NO: 148250 - protein, 271 aa, Unknown
  Bacterial polypetide isolated from the Sargasso Sea
NQDFIKLCLNENLSSEITLQPIKRFGFDAAIIFSDILMLPYAINQEVKFEKGFGPKLGNLDIEKISETSEEDFTKRLRPVYKAISQVSQNNLLNNRDMIGFVGAPWTILVYMLNKSSPKNGLSKNFFDDHSIIKILLENIEKFLKLHIENQVNAGANVIQIFDSWAGLLGDKITEYIYNPTFNIVEYVKKLGVPVICFPRGIKDYKKYCEIVKPDAVNIDYEVDPKTIIKNIKIPVQGGLDPKVLLTDKINLKKEVEKYLITFNDHPYIFN

SEQ ID NO: 148251 - protein, 91 aa, Unknown
  Bacterial polypetide isolated from the Sargasso Sea
KNFCEIVKPDAVNIDYDVNPKKIVNEIKIPIQGGLDPKILLTDQKTLKTEVEKYLNIFKDHPYIFNLGHGILPETKIEMVEELIKIVRNFK

SEQ ID NO: 148252 - protein, 211 aa, Unknown
  Bacterial polypetide isolated from the Sargasso Sea
TKKKLNEKKKDTIGFVGAPWTLLLYMLNRKSPKDGNFNVFSKNRDVVNILNILDKFLKIHIEAQIESGASIIQIFDSWAGLVPEKDLDYYVYKPTKSLVDFIKNKKVVSICFPRNIGNYKKFVENVNPDIINIDYNVDPSIIRDTIDIPVQGGFDPQILLQNKDIVRDEVTKYLKTFDQKRYIFNLGHGVLPETNPDMVKYLVEIVRSFNG

SEQ ID NO: 148253 - protein, 102 aa, Unknown
  Bacterial polypetide isolated from the Sargasso Sea
VICFPRGIKDYKNFCNIVKPDAINIDYDVDPNKIIKEINIPVQGGLDPKILLSDKENLKKEVEKYLSIFKDHPYVFNLGHGILPETKIEMVEDLIKIVRNFK

SEQ ID NO: 148254 - protein, 190 aa, Unknown
  Bacterial polypetide isolated from the Sargasso Sea
MSDIKRVIENKKTDLNPIWIMRQAGRYLPEFREIRKKNTDFIKLCLNSSLAAEITLQPLKRFNLDAAIIFSDILILPYGLKQKVEFKKNVGPILGDLNLDQAFEVTENDFIQRVDPVYKAINLVRNNNLTENKSTIGFVGAPWTLLVYILNKQSPKIKLKEKFFKDFSIIENTLKIIDKFLKIHIKNQID

SEQ ID NO: 148255 - protein, 294 aa, Unknown
  Bacterial polypetide isolated from the Sargasso Sea
MSNLKKILNEKINCKSVWFMRQAGRYLPEFREIRSKNTNFIELCLNSELSSEITLQPIKRFNLDSAIIFSDILMVPYALGQKVVFNKNHGPKLSSFDMESFMNNDEKEFTKKLKPIYKAIQITKKKLNREKSLIGFIGAPWTLLVYMLDLKKSKNKIDLATLESKKLDLPQIINQLIKYLCLHIQNQINAGADVIQIFDSWAGLIPDEYLNSYCFIPNAKITEFCKEKEIPNISFPRGIKEKYKSFNDFVKPDGINLDPLIEPQWAKKNLKNVVLQRGLDPSVMLKSEKEIIRG

SEQ ID NO: 148256 - protein, 177 aa, Unknown
  Bacterial polypetide isolated from the Sargasso Sea
LIKLFENEDLVGRLLNKLVDTICLHIKKQVEAGANIIQIFDSWAGLLPKDKLSTYCYDPTFKIVEYTKSLKVPTICFPKGIGENYENFCSIVKPDCISIDYNIDPNWIKDKSGGITIQGGMDPKILLTDRTEIKKNVEKFIKIFSGYPYIFNLGHGVLPETKPEDINYITQIIKKNK

SEQ ID NO: 148257 - protein, 156 aa, Unknown
  Bacterial polypetide isolated from the Sargasso Sea
MPNKKFKNALERKPQDCPPIWLMRQAGRYHDHYQSLKKDYTFEDLCKTPKLAAETAMGPINEFDFDVAILFSDILFPLEALGMDLSYNPGPQFGLHLNEDNAESLLINQNPISFMEFQGEAIERTIERLPTEKSLIGFVGGPWTLIAYACNISKDS

SEQ ID NO: 148258 - protein, 119 aa, Unknown
  Bacterial polypetide isolated from the Sargasso Sea
MRPLNQIIINKDTSFNPIWIMRQAGRYLPEFRKIREENPNFINLCLNDDLSSKITLQPLKRFNLDAAIIFSDILMLPYGLGQKVEFEKNFGPKLGEFNLNEVAKIDEIDFVEKFIVYIG

SEQ ID NO: 148259 - protein, 196 aa, Unknown
  Bacterial polypetide isolated from the Sargasso Sea
PWTLMIYMLKLKKRDNTINLKVLEEKKLEINIILNKLDDYLKIHIENQYKAGADVVQIFDSWAGLIPKKYLNYYCYMPNKKLVEFCKKINLPVICFPKGIKKNYLEFLKIVKPNGLNIDYDVNPLWAKTNLKNVCLQGGMNPKILLKDKRKIFDEVDKYLRIFKKKPYIFNLGHGLLPKTDPNILKDVIYRVKSFK

SEQ ID NO: 148260 - protein, 56 aa, Unknown
  Bacterial polypetide isolated from the Sargasso Sea
DPKILLTDKETLKKEASKYLEIFKDHPYIFNLGHGILPETNPEMLENLIKIVKNFK

SEQ ID NO: 148261 - protein, 199 aa, Unknown
  Bacterial polypetide isolated from the Sargasso Sea
MFTWSKVKVIETVHFVRNYAYQCRSAFSELIDLITEATTKYLLGQIKHGAEVIQIFDSWAGVLSDEEFEAWVIEPTRKIVKRIKKEAPDVAIIGFPRLSGTKYVDFVKGTDVDGVNLDETVPLEWAAENIQPLATVQGNLDNNLLLAGGGRLIDRVEKILDTFKEKPYIFNLGHGVLPKTPVNNLQTVIDLIKRQRIKE

SEQ ID NO: 148262 - protein, 127 aa, Unknown
  Bacterial polypetide isolated from the Sargasso Sea
CIYPIEKIVAGVKSVFPNIPIIIFPRLAGHRYIAIADIEGVTAVSVDHTLSTDWISKNLQNKVVVQGNLDPVFLLTGGAAMKDEVKRILEGLSGRPFIFNLGHGVLPNTPTDNVSELCEMVSVYRRS

SEQ ID NO: 148263 - protein, 256 aa, Unknown
  Bacterial polypetide isolated from the Sargasso Sea
PLGQEVNFIKERGPHFSEFDQKTFFNNTEKTFSNKLKPVYKAIEITRRRLNKKKSLISFIGAPWTLLIYMFDIKIDNEVNLIKLNNKRNQLEEVINELIKYLCLHIQNQINAGADVIQIFDSWAGLIPVKNLNDYCYLPNARIIEFCKKKGIPNICFPKGLNKNYKDFNKLVKPSGINLDPLIDPSWAKENLKDVVLQGGLNPNILLKPEYEMFKEATKYVQTLKDIPYIFNLGHGLLPETDPDKVDKLVKFYRNF

SEQ ID NO: 148264 - protein, 148 aa, Unknown
  Bacterial polypetide isolated from the Sargasso Sea
KNQIDNGAEVIQIFDSWAGLLNEKDLPNFVFIPTLNLVEYIKSLKVPVICFPRGIKNYKNFCEIVKPDCICIDYEVDPIKISKEVKIPIQGGLDPKILLTNKVNLKKNIHKYLDAFKDHPYIFNLGHGVLPETDPNIMDYLVKTVKDY

SEQ ID NO: 148265 - protein, 109 aa, Unknown
  Bacterial polypetide isolated from the Sargasso Sea
IKDIPIIGFPRNTNLVCYKKYSNIDKLDCITLDYNFPLDKINELNDKIVFQGNLDPKHLLKDSQNLSQKIEEILFAFRERPHIFNLGHGVLPETSIEKVEQMLLQIRST

SEQ ID NO: 148266 - protein, 88 aa, Unknown
  Bacterial polypetide isolated from the Sargasso Sea
GRTPLDIARMRLGSEAVLQGNLDPAICFASEKVISNEVSDILARNKNHPGHIFNLGHGVLPETNPEVLEKVVEQVHSYPLNFGERNGS

SEQ ID NO: 148267 - protein, 260 aa, Unknown
  Bacterial polypetide isolated from the Sargasso Sea
CYPYGLNQKVEFQKGFGPKLEKLDLNKIAKIDEIDFLKKIHQIYKIIKKVSLDPITKYKNTIGFIGAPWTLLVYMINQQSPKKQLKENFFKDKFLINRVLLIIEKYLKIHIKHQIENGANIIQIFDSWAGLLEEKDLPNYVYTPTLNLVNYVKSLDVPVICFPREIKNYKEFCDIVKPDAVNIDYNVNPKQIIKDITIPIQGGLDPNILLTDKEKIKKETTKYLEIFKDHPYIFNLGHGVLPETNPEMVKYMVQIVREYK

SEQ ID NO: 148268 - protein, 269 aa, Unknown
  Bacterial polypetide isolated from the Sargasso Sea
KQLRSKNQNFLKLCLNSDLASEITLQPMKRFNLDAAIIFSDILVIPYALGQPIDFGKAEGPRNSNININKLLETSEKNFLSILQPIYKAINKTKISLNKDKSLIAFVGAPWTLMIYLYNLKEKKESNKKISINNKSEIKLVLKKLDEFLKIHIVNQKEAGADVIQIFDSWAGLIKDEDLNEYCYKPNKSLIDFCKEIKIPSICFPKGLKENYKNFLKEVGPDAINIDYNIDPTWAKNSFGDICIQGGMNPEILFRDEKIVLEEVEKYWK

SEQ ID NO: 148269 - protein, 78 aa, Unknown
  Bacterial polypetide isolated from the Sargasso Sea
QEIDPIWARENLREICIQGGLDPKLLLKSEKLVIEETDKYLEIFKNNPYIFNLGHGILPKTNPDIIKKIVDKVNLIKR

SEQ ID NO: 148270 - protein, 105 aa, Unknown
  Bacterial polypetide isolated from the Sargasso Sea
MNKLSECIINKESSFMPIWFMRQAGRYLPEFREIRKSNQNFINLCLNTKLVTEITMQPLNRFDLDAAIIFSDILMIPYGLGQHVEFKKGYGPNLGNLDSDKILST

SEQ ID NO: 148271 - protein, 155 aa, Unknown
  Bacterial polypetide isolated from the Sargasso Sea
TQKLHIKNQVSKGASVIQIFDSWAGLLNQDKYEDYIYKPTKELVEFIKSLGVEAICFPRNIKSYKEFCQTVKPNAICIDYEVDPIEIAEKIEIPIQGGMNPNFLLLEKNEMLKNARKYLEIFKNHKYIFNLGHGVIPQTNPENVKILVDYVKEFK

SEQ ID NO: 148272 - protein, 142 aa, Unknown
  Bacterial polypetide isolated from the Sargasso Sea
MRQAGRYLPEFREIRKENKDFIKLCLNEKISEVITLQPIERFNFDAAIIFSDILMTPYGMGQEVKFKKNFGPELGEIDLKYIINLGEDEFTSKLSPIYKLLRNLKNNEKLNGKDLIGFVGAPWTLLVYMVNKVFSPKIGLSY

SEQ ID NO: 148273 - protein, 262 aa, Unknown
  Bacterial polypetide isolated from the Sargasso Sea
ILMLPFGLNQNVNFIKNFGPELGEFKMEEMLKISENNFKEKLLPIYNSINITSKNELIKNKDLIGFVGAPWTLLLYMINKKSPKNKIKNNFFSDNLLINQLLEIIQKFLKIHIKNQIENGATIIQIFDSWAGLLEKKKFSKFIYDPTENLVNYTKSLGVPVICFPKGIKNYKEYCEIVKPDVISIDYEVDPKLIRNQINIPVQGGLDPKILLTEKENIKKNVLNYLNIFKDHPYIFNLGHGVLPETNPKDMSYLVEIVNNFK

SEQ ID NO: 148274 - protein, 97 aa, Unknown
  Bacterial polypetide isolated from the Sargasso Sea
MLLDTLIKKNRSYTPIWFMRQSGRHLTEYKKLRNKEQNFINFCLNEKLVIESSLLPLKYYDLDAAILFSDILIIPWLLGQKVDFKQNHGPLLAPNKF

SEQ ID NO: 148275 - protein, 74 aa, Unknown
  Bacterial polypetide isolated from the Sargasso Sea
MTPLHEVIIKKNTKINPIWIMRQAGRYLPEFREIRSKNTDFIKLCLNPILSTEITLQPLKRFDLDAAIIFSDIL

SEQ ID NO: 148276 - protein, 135 aa, Unknown
  Bacterial polypetide isolated from the Sargasso Sea
MSNIKKVIKEKKANLNPVWIMRQAGRYLPEFREIRKKNTDFIKLCLNSSLSAEITLQPLKRFDLDAAIIFSDILILPYGLKQKVEFKKNVGPVLGDLNFDQALEVTEKDFIERVDPVYKAINLVRNNNLTENKST

SEQ ID NO: 148277 - protein, 138 aa, Unknown
  Bacterial polypetide isolated from the Sargasso Sea
MSIFIETLNKKQTDSNPIWLMRQAGRHLPEYRKIRSNYPNLMDMFLNPDEVANITLQPVKRYNLDAAIIFSDILMVPYTLQGSVVFNEGGKGPIINIEFNKEQKIEKAEPVFNAIKKVKEKSTTPLIGFAGRPWTTIF

SEQ ID NO: 148278 - protein, 156 aa, Unknown
  Bacterial polypetide isolated from the Sargasso Sea
MNTLIQNCINNKSSKTPIWLMRQAGRYLPEFRSIRKENQDFIKLCLNSKLASEITIQPIIRFDFDAAIVFSDILLVPHVLGQKVNFKKDFGPDLQKINLNTLNEAKKEDFLKNLNPVYETIKETKNKLSSNSKDIIGFVGAPWTLLLYMLNRKSPK

SEQ ID NO: 148279 - protein, 84 aa, Unknown
  Bacterial polypetide isolated from the Sargasso Sea
MTPINEVIINKKTDLNPIWIMRQAGRYLPEFREIRSKNTDFINLCLNDKLASEITLQPLKRFELDAAIIFSDILMLPYGLNQKV

SEQ ID NO: 148280 - protein, 56 aa, Unknown
  Bacterial polypetide isolated from the Sargasso Sea
DPKILLTDKETLKRESKKYLNIFKDHPYIFNLGHGILPETKIEMVEELIKIVRNFK

SEQ ID NO: 148281 - protein, 270 aa, Unknown
  Bacterial polypetide isolated from the Sargasso Sea
IIFSDILMVPYALGQDVKFTKGLGPQLGDFDLNVFLKNKKNNFTTKLSPIYKAIDITRRNLLKSKSLISFIGAPWTLIVYMFKIKESKEKINLQKFHDNKNLLDQIIETLISFLCTHIKNQINAGADVIQIFDSWAGLIPKHNLNDYCYIPNAKILNFCRKQKIPVICFPKGIKEKYEDFNKIVKPNGINLDSEIDPLWAREKLKNVVIQGGLNPSILLKADENIIKGATKYIQTFKDTPYVFNLGHGLLPETDPDKVSRLIKFYRNFDG

SEQ ID NO: 148282 - protein, 95 aa, Unknown
  Bacterial polypetide isolated from the Sargasso Sea
IKDYKNFCEIVKPDAVNIDYDVDPKKILNKIKIPIQGGLDPKILLTDQKTLKIEAEKYLSIFKDHPYIFNLGHGILPETKIEMVEELIKIVRNFK

SEQ ID NO: 148283 - protein, 145 aa, Unknown
  Bacterial polypetide isolated from the Sargasso Sea
KSGASIIQIFDSWAGLVKKRDLERNIYDPTKKVVKFIRSLKIPVICFPRNIDNYKEFTDETKPDAINIDYRIDPIKIIKDIKIPVQGGLDPQILLTNRKNIKIQAQRYLDIFKNHPYIFNLGHGVLPQTNPDMLEYLINLVKNVK

SEQ ID NO: 148284 - protein, 121 aa, Unknown
  Bacterial polypetide isolated from the Sargasso Sea
YLYDPTSSLVNYTKSLGVPVICFPRGITDYNQFCKIVKPSMINIDYDVDPKNLIKNIDLPIQGGLHPEALLTNKAHLKKEVIKYLEIFKDHPYVFNLGHGILPETKIEMVEELVKIVRDFK

SEQ ID NO: 148285 - protein, 66 aa, Unknown
  Bacterial polypetide isolated from the Sargasso Sea
EIKIPIQGGLDPKILLTDQKTLKTEVEKYLSIFKDHPYIFNLGHGILPETKIEMVEELIKIVRNFK

SEQ ID NO: 148286 - protein, 141 aa, Unknown
  Bacterial polypetide isolated from the Sargasso Sea
IQIFDSWAGLLPKNKLSNYCYIPILKIVEHIKSKNIPVICFPKGIGNSYVDFCNTVKPDCISIDYDVDPLLIKENVNGITVQGGLDPKILLKEKEVIKKNAEKYLNIFKDYPYIFNLGHGVLPEIKPETIEYIIRLVRDKK

SEQ ID NO: 148287 - protein, 206 aa, Unknown
  Bacterial polypetide isolated from the Sargasso Sea
IGFSGAFWTLLSYLIEGRGSKTYHNAKIFTYNEPDKFEKVKNIICKAIAIHLKNQIKAGCDVIKIFDSWAGILTPDQIDNLVIEPYKVILNELREVNAKKICFPRGIGDKYKEFCKLDFDIYALDYTSEISIAADIHKNYGKITQGNLDPAILYAKDKNVIAKEIDKILNATKEIPHIFNLGHGIMPETPIDNVEYMIDYIRKERG

SEQ ID NO: 148288 - protein, 47 aa, Unknown
  Bacterial polypetide isolated from the Sargasso Sea
MRPISNCIKNQDTKSNPIWLMRQAGRYLPEFRESRKKNQDFIKLCLK

SEQ ID NO: 148289 - protein, 183 aa, Unknown
  Bacterial polypetide isolated from the Sargasso Sea
INKQTDLNPIWIMRQAGRYLPEFREIRSKNADFIKLCLNENLSSEITLQPLKRFDLDAAIIFSDILMVPYGLNQKVEFKKNFGPLLGDLDLDEINKLDEIDFVEKIYPVYKAIKQVSNNDITKDKSTIGFVGAPWTLMVYMINKQSPKLNLRDDFFKDVFLINRILVILEKFLKVHIKNQVDN

SEQ ID NO: 148290 - protein, 319 aa, Unknown
  Bacterial polypetide isolated from the Sargasso Sea
MIRENVTENLFLKTIKGHKQHRTPVWMMRQAGRYLEEYRTVRNTQKDFISFCLNPEQASAVTLQPISRYGFNAAIIFSDILMVPWALEQNVRFKPNIGPLLDPLDIPGSIDKKLIDELPNKLAPVGDAIRITKANLSRETALIGFAGAPWTIMTYMAEGGSSRDFSKTRGWAWQYRKEVDALLDSLIESTISFLILQAEAGVDALMLFDSWASVVPATQRHWLVIEPTRKIVGGLRKKGYKQPVIGFPKGIGEGLISYVEQSSVDVIGLDHGVDPAWVDRNLPKNFPVQGNLDPLSLLPAGPEMVRDIEHILDAFASRP

SEQ ID NO: 148291 - protein, 71 aa, Unknown
  Bacterial polypetide isolated from the Sargasso Sea
MKPLNKVIINKDTSFNPIWIMRQAGRYLPEFREIRKENPNFINLCLNDDLSSEITLQPLKRFDLDAAIIFQ

SEQ ID NO: 148292 - protein, 137 aa, Unknown
  Bacterial polypetide isolated from the Sargasso Sea
QIFDSWAGLVEEKKLSKYIYDPTLDIVEYVKTLNTPVICFPRNIKNYKEYVRIVKPDALNIDYNVEPEKIREEVDIVVQGGLDPKFLLGDKETLKKEALKYLNIFKDHPYIFNLGHGVLPETDPNSIEYLVKLVKNF

SEQ ID NO: 148293 - protein, 262 aa, Unknown
  Bacterial polypetide isolated from the Sargasso Sea
LMVPYALGQKVSFIKNQGPILETFNTQKFLSNDKTNFTQNLQPVYKAIKITREKLDKKKSLISFIGAPWTLLVYMLRAKQDKDEINLNKIKERDFEVNLIIDKLHDYLCVHIENQINAGADIVQIFDSWAGFLSPKDLPRFCYTPNLKIVEFCKKKKIPVICFPRGIKENYKEFNNVVKPNGLNIDYHIDPKWAEINLKDTVIQGGLNPNALLLPEQDMIKNAKKYLDAFDGLPYIFNLGHGMLPKTDPKKVETLIKFYREY

SEQ ID NO: 148294 - protein, 113 aa, Unknown
  Bacterial polypetide isolated from the Sargasso Sea
MTPINKVIKNKDVKVNPIWIMRQAGRYLPEFREIRSKNTDFIKLCLNEELSSEITLQPLKRFDLDAAIIFSDILMLPHGLGQKVEFEKNFGPKLNKIDLNEIVKIDEIDFVKK

SEQ ID NO: 148295 - protein, 81 aa, Unknown
  Bacterial polypetide isolated from the Sargasso Sea
MVNIDYNVDPKKAVKEIKIPIQGGLDPKVLLSDKENLHKEVIKYLQIFKDHPYVFNLGHGILPETKIEMVEELVKIVREFK

SEQ ID NO: 148296 - protein, 261 aa, Unknown
  Bacterial polypetide isolated from the Sargasso Sea
PPVWFMRQAGRYHDHYQALKKDHTFEELCKNPLLAAETAMGPINEFDFDVAILFSDILFPLEALGMDLSYNPGPQFGLHLNEENANSLLVNQNPISFMNFQGEAIERTIERLPKEKSLIGFVGGPWTLISYACNINKDSRQINLNNFQIGLLDNVILPLLKENIKLQLNAGAEVVMIFDSAAHQLDEEDFSIYLDKTFNSLAKEFPNKVGYYAKDGINYETIIAKQDDHEIDLAGMGLDSNIDIRDYFKKTTKWFCSGQFQ

SEQ ID NO: 148297 - protein, 233 aa, Unknown
  Bacterial polypetide isolated from the Sargasso Sea
YLPEFRKIRSQNQNFIKLCLNSNLSSEITLQPIKRFNLDAAIIFSDILIIPHALNQKVTFIENYGPKLDEFNKEKFLDVSEEEFIKKLDPVYKAIEITRKSLDKSKSLIGFIGAPWTLLFYMFNYKKDTNGIEINKIENYININLVLDKLNKFLCLHINNQIDAGADIIQIFDSWAGLIPEKYINDFCYIPNAKIIEFCRNKKIINICFPKGIKKKYEKFNQVVKPNMYKLRF

SEQ ID NO: 148298 - protein, 234 aa, Unknown
  Bacterial polypetide isolated from the Sargasso Sea
DILKVTENQFTNKLDPVYKLINISSRDNLLQEKDLFGFVGAPWTILVYMINQLSPKKELKKDFFDDQILIEKLLTIIVKFLKLHIKNQISSGATIIQIFDSWAGLVEEKKLDFLIYKPTLDLVNFVKSLNVPVICFPREIKDYKKFVNNVKPDVVNIDYSVDPKEIVKNIEIPVQGGLDPKVLLTDKDNIKKNAIKYMEIFKDHPYIFNLGHGVLPETNPDMVKYLVNTVKDFK

SEQ ID NO: 148299 - protein, 98 aa, Unknown
  Bacterial polypetide isolated from the Sargasso Sea
MSNIKKVIKDKKTDLNPIWIMRQAGRYLPEFREIRKKNTDFIKLCLNSNLAAEITLQPLKRFDLDAAIIFSDILILPYGLNQQVEFKKNFGPILGDFN

SEQ ID NO: 148300 - protein, 178 aa, Unknown
  Bacterial polypetide isolated from the Sargasso Sea
MKPLNKVIINKDTSFNPIWIMRQAGRYLPEFREIRKKNPNFINLCLNDNLSSEITLQPLKRFDLDAAIIFSDILMLPYGLGQKVEFEKNFGPKLGELNLNEIARTDEIDFVEKIHRVYKALKKVSADSSLKNKNTIGFIGAPWTLLVYMINQQSPKKKLKKDFFKDEFLINRILLIIE

SEQ ID NO: 148301 - protein, 179 aa, Unknown
  Bacterial polypetide isolated from the Sargasso Sea
EINSNLLNEKKVNIKKILDKLIKFLCIHIQNQTNAGADIVQIFDSWAGLIPDNYINDYCFIPNAKIVEFCKKEKIPNICFPKGIKEKYNNFNQIVKPDGINLDYDIDPLWAKKKLTNTVIQGGLDPKILLKSDKEMFEGATKYIEMFKDIPYVFNLGHGLLPETDPDRVKKLIEFYRNY

SEQ ID NO: 148302 - protein, 197 aa, Unknown
  Bacterial polypetide isolated from the Sargasso Sea
MSPLANCIKNQDTRSNPIWLMRQAGRYLPEFREIRKENQDFIKLCLNSDLASEITLQPIKRFGFDGAVIFSDILMLPYGLGQKVEFEKNFGPRLGDIDLETIKNVDEISFTEKIYKVYKAIEKTSKDPLMINRDMIGFVGAPWTILVYMINKSSPKKGLSGEFFKDDFLINRLLGIIEKFLKLHIKNQIEAGAQVIQ

SEQ ID NO: 148303 - protein, 230 aa, Unknown
  Bacterial polypetide isolated from the Sargasso Sea
KIFLETLNPVYQAIDITRKKLNKKKSLISFIGAPWTLLVYMLNLKTEQSYINLDKLKKNEKKILQIIDILIKYLCSHIEKQVDSGADVVQIFDSWAGMIPKGKLQDFCYKPNAQIVEFCRNKKIPNICFPRGIKQNYEKFNNLVKPDGINLDPEIDPSWAKKKLKKVVIQGGLDPKILLKSNREIISAATKYINTFKGIPYVFNLGHGLLPETDPDKVKNLINFYRNYNG

SEQ ID NO: 148304 - protein, 43 aa, Unknown
  Bacterial polypetide isolated from the Sargasso Sea
MNYNNKKLLKTLQGDKFNSPPVWLMRQAGRYLPEYREVRKTSR

SEQ ID NO: 148305 - protein, 184 aa, Unknown
  Bacterial polypetide isolated from the Sargasso Sea
MPNKKFINAIIRKPQACPPIWLMRQAGRYHDHYQSLKKDHTFEELCKKPILAAETAMGPINEFDFDVAILFSDILFPLEALGMDLSYNPGPQFGLHLDEDNAESLLVNQNPINFMEFQGEAIERTIERLPSDKSLIGFVGGPWTLIAYACNISKDSRELNFNNFQIGLLDNVILPLLKENVELQ

SEQ ID NO: 148306 - protein, 188 aa, Unknown
  Bacterial polypetide isolated from the Sargasso Sea
KSLIGFVGAPWTILIYMLNRQSPKKKLSNDLHNIDKKKSLSKIITKYLKIHIKEQVKSGATVIQIFDSWAGLATKDDIKSIIYNCSPDLVEFTKSLGVPAICFPREIENYKEYVSEVNPSAVNIDYNIDINYISKNIDIPVQGGLDPKFLLSDKETLKSEALKILDIFKDYPYIFNLGHGVLPKTDPN

SEQ ID NO: 148307 - protein, 40 aa, Unknown
  Bacterial polypetide isolated from the Sargasso Sea
MTKKILKALAGEKQKIPPIWMMRQAGRYLPEYRETRAQAG

SEQ ID NO: 148308 - protein, 223 aa, Unknown
  Bacterial polypetide isolated from the Sargasso Sea
VDRVKQVYEAIKNVSNNDILKNKNTIGFVGAPWTILVYMINQQSPKKELKKDFFENRDLINNVLLIIEKFLKIHIKNQIDSGANVIQIFDSWAGLLENKDLPYYVYNPTLNLVEFVQSLNIPVICFPRNIKDYKKYCDFVKPDAICIDYEVDPLLIRKEIKIPVQGGMDPKVLLTDRETLKKETKKYLDIFKDHPYIFNLGHGVLPETEPGMMEYLVKMVKDY

SEQ ID NO: 148309 - protein, 91 aa, Unknown
  Bacterial polypetide isolated from the Sargasso Sea
YKEFVEIVKPDAINIDYNVDPLMICKNIKIPVQGGLDPKILLTDKENLKKETLKYLDIFKDHPYIFNLGHGILPETNPDMVEYLIKTVKDY

SEQ ID NO: 148310 - protein, 75 aa, Unknown
  Bacterial polypetide isolated from the Sargasso Sea
MGAIKDCIKGNKIGSIPVWFMRQAGRYLPEFREIRSKNTNFINLCLNPKLSKEISIQPLKRFNLDALIIFSDIFL

SEQ ID NO: 148311 - protein, 147 aa, Unknown
  Bacterial polypetide isolated from the Sargasso Sea
NQVDAGASIIQIFDSWAGLIEKKDLDKYLYSTNEELVEYTKSLGVSVICFPRNIKDYKKFVSSVKPSAINIDYNVNPKDIVKDIDLPIQGGLDPKILLTDRENLKKEAKKYLEVFREHPYIFNLGHGVLPDTDPLMVKSLIDIVKDA

SEQ ID NO: 148312 - protein, 135 aa, Unknown
  Bacterial polypetide isolated from the Sargasso Sea
MRQAGRYLPEFREIRSKNQDFIKLCLSENLASEITLQPLVRFNFDAAIIFSDILMLPYGLNQKVEFEKNFGPKLGNLNLDELKNIDEVDFSFKLNSVYKAINITSNMINKDEKDLIGFVGAPWTILVYMINKISP

SEQ ID NO: 148313 - protein, 117 aa, Unknown
  Bacterial polypetide isolated from the Sargasso Sea
MTPLHEVITNNKTTINPVWIMRQAGRYLPEFKEIRKKNPNFIELCLNHKLSSEITLQPIKRFDLDAAIIFSDILMLPYGLNQKVDFKKNFGPVLGNLDIGTMSKIDEIDFVEKIYPV

SEQ ID NO: 148314 - protein, 267 aa, Unknown
  Bacterial polypetide isolated from the Sargasso Sea
IRKDNPNFINLCLNPQLVNEITLQPLKRFDLDAAIIFSDILMTPYGLGQNVEFKKGVGPILGDLNIDSLLKTNTADFIKKLLPVYEGIKKVNDNLKGKDLIGFVGAPWTLLVYMLNKKSPKKDFNFNIINEDKNLINKLLKKIEEMLCLHIDKQIEAGANIIQIFDSWAGLLPKKELAKFCYIPTKKIVEHVRPSKVPVICFPKGIGEDGYIDFCAEVKPNCISIDSEVDAKLIKEKLNGLPIQGGLDPKILLGDKEKIKKNIKIIL

SEQ ID NO: 148315 - protein, 219 aa, Unknown
  Bacterial polypetide isolated from the Sargasso Sea
DEIDFVEKIHLVYKAIKKVSSDETLENKNTIGFVGAPWTLLVYMINQQSPKKNLKRDFFKDEFLINRILLIIEKFLKIHIKNQIDNGANIIQIFDSWAGLLDEKDLPNYVYSPTLNLVNYVKSLNVPVICFPREVKNYKEFCEIVKPDAISIDYNVDPKKILRDIKIPIQGGLDPKILLTDKETLKKEASKYLDIFKDHPYIFNLGHGVLPETDPNMFE

SEQ ID NO: 148316 - protein, 134 aa, Unknown
  Bacterial polypetide isolated from the Sargasso Sea
SRQDFEQFVRPHLKRLLENLSGRVPIIYFGTGNQHLLASLSDLSIDVYAFDWRTPMRATWDELACRSVQGNLDPIVLCSDQNTIKNQSQQLLDSVGGRPGHIFNLGHGIIPETPVDNVKYLVDWVHQTTESSTG

SEQ ID NO: 148317 - protein, 297 aa, Unknown
  Bacterial polypetide isolated from the Sargasso Sea
KICKSVWFMRQAGRYLPEFREIRSQNQNFMDLCLNSELSSEITLQPIKRFNLDSAIIFSDILTVPYALNQKVEFIENRGPILEEFNFKKFLNNDNISFTQKLHPVYKAIQKTRENLDKKKSLIGFIGAPWTLLIYMLGAKESKKIDYKKIKIKEFEVNLILNKLHDYLCAHIENQVDAGADVIQIFDSWAGLILPEDLPNYCYIPNSKIVNFCKEKKIPVMCFPKGLNKNYKEFNNVVKPDAISLDYDIDPLWVKQNLTDVVLQGGLDPKLLLSSENEILDGAKKYLDIFKKFAFIF

SEQ ID NO: 148318 - protein, 82 aa, Unknown
  Bacterial polypetide isolated from the Sargasso Sea
FDWRTPLVTTWELLGCKAVQGNLDPIILCAEQRAIGQQAGQLLHEVAGRGGHIFNLGHGIIPETPVDNVKFLVDFVHQNSAR

SEQ ID NO: 148319 - protein, 284 aa, Unknown
  Bacterial polypetide isolated from the Sargasso Sea
YLPEFREIRKKNTDFIKLCLNENLASEITLQPLKRYDFDAAIIFSDILMVPFGLNQKVEFKKNFGPLLGEINLNEISGLNEIDFIKNIQPVYKAIKLVSNNDLTKNKSTIGFVGAPWTLLVYMINKKSPKLKLTDNFFNDDLLINNILKVLDKFLKVHIKHQINSGAEVIQIFDSWAGLLEKERLSKYIYNPTLSLVEFIKSLNVPVICFPRGIKDYKNYCEIIKPDVICIDYDVDPIMIEKEIKIPVQGGMNPKILLTDKETLKKEAKKYLDIFKDHPYIFNL

SEQ ID NO: 148320 - protein, 145 aa, Unknown
  Bacterial polypetide isolated from the Sargasso Sea
RLAIFDSWADLLSAQELEIFSLQYTKKITQKLKSDPITKNIPIILFEKDPKQKITDLIFDDLSCISLHWKNDIEAISKSVKNNIAIQGNLNPMILSKSDEIIHQEVQRICSIMCEYPGFIFNLGHGITPDINPQKVQTMIKAARE

SEQ ID NO: 148321 - protein, 88 aa, Unknown
  Bacterial polypetide isolated from the Sargasso Sea
MSPITNCIEKQDTKSNPIWLMRQAGRYLPEFRKIRKENQDFIKLCLNSDLASEITLQPIKRFGFDGAVIFSDILMLPYGLGQPGRIKK

SEQ ID NO: 148322 - protein, 176 aa, Unknown
  Bacterial polypetide isolated from the Sargasso Sea
DDEKRLSILFDTLIASTVTYLKNQIEAGAEIIQLFDSWAGVLDDDQFKKWSIEPTRKIVAELKSTYPNIPIIGFPRDVTVHNALLYTKKTGVDCISLDYNIKVNEMKNIQKTIPVQGNLHPDILIEGGTKMRDSSLEIMGNMDNGSHIFNLGHGILPQTPIQNVIDLIDIVKNYKK

SEQ ID NO: 148323 - protein, 199 aa, Unknown
  Bacterial polypetide isolated from the Sargasso Sea
MKPLNKVIINKDTSFNPIWIMRQAGRYLPEFREIRKENPNFINLCLNDDLSSQITLQPLKRFDLDAAIIFSDILMLPYGLGQKVEFEKNFGPKLEELNLNEIAKTDEIDFVEKIHRVYKALKKVSSDISLKEKNTIGFVGAPWTLLVYMINQQSPKKNLKKDFFKDEFLINRILLIIEKFLKVHVKNQIDNGANVIQIF

SEQ ID NO: 148324 - protein, 71 aa, Unknown
  Bacterial polypetide isolated from the Sargasso Sea
MTPIQDCIQNRNTKIKPIWIMRQAGRYLPEFREIRSKNTDFIKLCLNENLVGEITLQPIKRFNFDAAIIFF

SEQ ID NO: 148325 - protein, 41 aa, Unknown
  Bacterial polypetide isolated from the Sargasso Sea
MTDKKLIKTLHGQTNKAPPIWFMRQAGRYLPEYRATRQKAG

SEQ ID NO: 148326 - protein, 246 aa, Unknown
  Bacterial polypetide isolated from the Sargasso Sea
KNFGPELGPINLENIFNINEKDFLNKLYPIYKSIKKVKENELTKNKDVIGFVGAPWTLLVYMINKHSPKKELIKDFFKDKFLINKILIILEKFIKIHIEHQVKNGATIIQIFDSWAGLLDEKDLPNYVYTPTLNLVNYVKSLSVPVICFPRGIKNYKKFCEFVKPDVISIDYDIDPISISKEIQIPVQGGLNPKTLLADKESLKKEALKYLDIFKDHPYIFNLGHGVMPETNPMQVDYLVKLVKDY

SEQ ID NO: 148327 - protein, 48 aa, Unknown
  Bacterial polypetide isolated from the Sargasso Sea
MSLIAKCIKNKDKTIKPIWLMRQAGRYLPEFRDIRIKNPDFIKLCLNK

SEQ ID NO: 148328 - protein, 150 aa, Unknown
  Bacterial polypetide isolated from the Sargasso Sea
MTPIQDCIKNKNTNLNPIWIMRQAGRYLPEFREIRIKNPDFVKLCLDENLSSEITLQPITRFNFDAAIIFSDILMLPHGLGQVVKFEKGLGPKLGELDLDKLENINEDEFSRKLNPVYKAISKTSANPVLKNKDLIGFVGAPMDNFSLYD

SEQ ID NO: 148329 - protein, 208 aa, Unknown
  Bacterial polypetide isolated from the Sargasso Sea
KKDLIGFVGGPWTLLIYMLNKNSPKKKLKKILSDKPLILDMIKYISVFLEQHIKYQVKSGVDIIQIFDSWAGLVEENDLEDFIYNPTIKLVKFIKSINKPCICFPRNIKNYYEYTKIVKPNVISIDYNVNPEKIAEKISIPVQGGMDPKVLLTNKKNLEKAANYYLNVFKNHPYIFNLGHGVLPQTDPDMVDYLIKIIKKFNGKSSKN

SEQ ID NO: 148330 - protein, 103 aa, Unknown
  Bacterial polypetide isolated from the Sargasso Sea
MSPLTNCIKNKDTKTNPIWLMRQAGRYLPEFREIRKQNQDFIKLCLNTDLASEITLQPIKRFGFDGAVIFSDILMLPYGLGQKVEFEKNFGPRLGKNKFRKDK

SEQ ID NO: 148331 - protein, 185 aa, Unknown
  Bacterial polypetide isolated from the Sargasso Sea
MINKQSPKLKLKNDFFKDNFLINRILIILEKFLKVHIKNQIESGAQIIQIFDSWAGLLNEIDLPNYVYIPTYNLVNYVKSLNVPVICFPRGIKNYKDYCEVVKPDAICIDYEVDPIKIIKEIKIPVQGGLDPKVLLTDKDNIKKEATKYLEIFKDHPYIFNLGHGVLPETNPDMMDYLIKTVKDY

SEQ ID NO: 148332 - protein, 91 aa, Unknown
  Bacterial polypetide isolated from the Sargasso Sea
FVEEVKPDAINIDQDIDPLWARDNLNKICIQGGMNPNLLLKSQEEVLKETERYIDIFKNDPYIFNLGHGILPQTNPNVIKTIVDKVNLIKR

SEQ ID NO: 148333 - protein, 257 aa, Unknown
  Bacterial polypetide isolated from the Sargasso Sea
SKNPDFIKLCLNSDLSSEITLQPIKRFNLDAAIIFSDILMVPFGLGQEVKFIKGKGPKLSEFNLKNFMNNNRNDFTNKLSPVYEAIKKTRKKLNKEKSLISFIGAPWTLIVYMMGLRQDKKNLNLNKIKNSDFDKNLILDKLNEYLCFHIENQLNAGADVVQIFDSWAGLIPSEELDSYCYKPNLKIVEFCKKIGLPVICFPKGINKKYKEFLDIVKPDGLNIDYDIDPLWAKENLKNVCLQGGMDPKILFEDEKKI

SEQ ID NO: 148334 - protein, 200 aa, Unknown
  Bacterial polypetide isolated from the Sargasso Sea
MSPLIDCIKKKKTRNSPIWIMRQAGRYLPEFREIRKNNPDFIKLCLNSRLSSEITLQPLKRFNLDAAIIFSDILMIPLGVKQDVKFKKNFGPQLGDINLKTIKNVSEEEFSNILSPVYDAINITSQNDILKNKDLFGFVGAPWTILVYMLNKKSPKKKLNNNFFNNKELIYNLIKIITKFTKLHLKNQIDSGATIVQIFD

SEQ ID NO: 148335 - protein, 107 aa, Unknown
  Bacterial polypetide isolated from the Sargasso Sea
KSLNVPVICFPREIRNYKEFVEIVKPDAINIDYNVDPLMICKNIKIPVQGGLDPKILLTDKENLKKETLKYLDIFKDHPYVFNLGHGILPETNPDMVEYLIKTVKDY

SEQ ID NO: 148336 - protein, 213 aa, Unknown
  Bacterial polypetide isolated from the Sargasso Sea
AISKTTISLKGKNKSLIGFVGAPWTILVYMINKQSPKKELSKSLSNEKVKLDLLKIILNYTKIHIREQIKHGADLIQIFDSWAGLASNGDIKKYIYESTTELVEFTKSLNVPVICFPREIKNYREYVDVVRPSVVNIDYNVNIKEILKQISIPIQGGLDPKYLLDDTDILRSESLKILNMFKDHPYIFNLGHGVLPQTDPNMVEYLVNLVKDY

SEQ ID NO: 148337 - protein, 308 aa, Unknown
  Bacterial polypetide isolated from the Sargasso Sea
  misc_feature (282)..(282): Xaa can be any naturally occurring amino acid
  misc_feature (304)..(304): Xaa can be any naturally occurring amino acid
IINKKTDINPVWIMRQSGRYLPEFREIRKKNSDFIKLCLNENLASEITLQPLKRFDLDAAIIFSDILMLPYGLNQKVEFKKNFGPILGDFKLDEASRLDEIDFVQKIYPIYKAIKFINNSSLTNNKSTIGFVGAPWTLLVYMINKQSPKLNLKKDFFKDNFLINRILSLLDKFLKIHIKNQIDNGAEVIQIFDSWAGLLDEKDLPNYVYIPTLELVNYTKSLNVPVICFPRNIKNYKNFCEIVDPDVICIDYEINPKQVIKEIKIPIQGGLDPKTLLTDKEXLKKEATKYLDIFKNHPYIFNLXHGVL

SEQ ID NO: 148338 - protein, 240 aa, Unknown
  Bacterial polypetide isolated from the Sargasso Sea
TKILKNINISQKLEPLKTSISILRKELPQSTSLIGFAGAPWTLACYMIEGQTSKDFINTRKALWDSNKWFMELIDILSIYIAEKLEMQANAGADVLMLFDSWSHMIPSNFFRKCAIDPTANIISMLKSKNVTKPIIGLPFKAGSSLIDYSYESNVNCIALDWTVNLNWAIKNLNSSIAIQGNLDPASLIPFNSGHLENIVLSILNIMKDNKFIFSVGHGLTPDCKIKNVRRVIDIVRNYK

SEQ ID NO: 148339 - protein, 98 aa, Unknown
  Bacterial polypetide isolated from the Sargasso Sea
MKPLNKIITSKDTSINPIWIMRQAGRYLPEFREIRKENPNFVNLCLNDNLSSEITLQPLKRFDLDAAIIFSDILMLPYGLGQKVEFEKNFGPKLGELN

SEQ ID NO: 148340 - protein, 185 aa, Unknown
  Bacterial polypetide isolated from the Sargasso Sea
MRQAGRYLPEFREIRSKNQDFIKLCLNSELSSEITLQPIKRFDLDSAIIFSDILIVPYALGQKINFRKDHGPKLDDFLLENLLDNNEESFTKKLEPVYKAIGITRNKLDKKKSLISFVGAPWTLLIYMIGVKNKERVNLEKLNNKDLDIDKILGELIKYLCIHIKNQISAGADVVQIFDSWAGLV

SEQ ID NO: 148341 - protein, 301 aa, Unknown
  Bacterial polypetide isolated from the Sargasso Sea
MHETFCSALEQDRGLTEAQRISCESGPRTAREPRFVQEFTVSELKYKMPFYDSEFPPCDGRPGPDGLDPTDPLTAENWTVGCVPRELRAGEAFCGRVHPYPPGCGPHMAEFIATSLARSERRRFQMTSPFGYDYYLSLATLRDADNDTLVDAYLAGMAPVAGMLAETLRNLTDLNETLRASRETHLHARRALAHARGAHRVATEALYDAEYRLKSLRDAVSSAFVEAGSFVSQKRLSPADAVRDAAILFPPIPPTLRGSRKALEEAIDDTNRADELLHAGDLLLDDAQILHGHARPQADHL

SEQ ID NO: 148342 - protein, 145 aa, Unknown
  Bacterial polypetide isolated from the Sargasso Sea
MKPLNKVIIEKDTSFNPIWIMRQAGRYLPEFREIRKENPDFINLCLNDDLSSEITLQPLKRFDLDAAIIFSDILMLPYGLGQKIEFEKNFGPKLGKLNLNEIAKIDEIDFVEKIHRVYKAIKKINLNPILKTKILLALSVLHGHY

SEQ ID NO: 148343 - protein, 121 aa, Unknown
  Bacterial polypetide isolated from the Sargasso Sea
YIYIPTLNIVEYVKELGVPVICFPRGIKDYKNFCEIVKPDAVNIDYDVDPKKIVNEIKIPIQGGLDPKILLTDQKTLKIEVEKYLGIFKDHPYIFNLGHGILPETKIEMVKELIKIVRNFK

SEQ ID NO: 148344 - protein, 197 aa, Unknown
  Bacterial polypetide isolated from the Sargasso Sea
MGLHGPSYYTCLTENLPKEGNFNIFPKDKYINNILIKLDEFLKIHIEAQIKSGASIIQIFDSWAGLLPEKDLNYFVYKPIKSLVDFIRQKKTISICFPRNINSYKKFVDNVNPDIISIDYNVDPLIIRDTVDIPIQGGLDPKILLQNKEIVRNEVTKYLKTFDKKRYIFNLGHGVLPETNPDIVRYLVDEVRSFNGQ

SEQ ID NO: 148345 - protein, 93 aa, Unknown
  Bacterial polypetide isolated from the Sargasso Sea
MSPLTNCIKNKDTKINPIWLMRQAGRYLPEFREIRKENTDFIKLCLNSDLASEITLQPIKRFGFDGAVIFSDILMLPYGLGQKVEFEKNFGQS

SEQ ID NO: 148346 - protein, 63 aa, Unknown
  Bacterial polypetide isolated from the Sargasso Sea
MTLIKDCISKGNTTTVPIWLMRQAGRYLPEFRKIRKKNPNFINLCLNKKLSSIITLQPLKRLI

SEQ ID NO: 148347 - protein, 82 aa, Unknown
  Bacterial polypetide isolated from the Sargasso Sea
MNKLSDCIINRNSSYIPIWFMRQAGRYLPEFREIRKQNQNFIKLCLNTKLVKEITLQPIKRFDLDAAIIFSDILMIPYGLGQ

SEQ ID NO: 148348 - protein, 228 aa, Unknown
  Bacterial polypetide isolated from the Sargasso Sea
MSLDNHLLLRAIRKEPVERTPVWIMRQAGRYLPEYIKLKNQAGGFMNLIKNPELACEITLQPLERFNLDSAIIFSDILVITELFGIELEFIEKVGPVLSKTLRTEDDLKKINTDFDFEKVGYVYKTTKLLKNELNNKVPLIGFIGSPWTVATYIIEGNSTKNFSKVLNILKNDKIFLKSLLDMITKASINHLERQIKSGVDVTMIFDTWGGLLEGGLYEEFSLQYINT

SEQ ID NO: 148349 - protein, 168 aa, Unknown
  Bacterial polypetide isolated from the Sargasso Sea
LSIEKVIEKLIKFLCVHIKNQIDSGADVLQIFDSWAGSIPSDSIKKYCYLPNAKIVEFCKKRKIPSICFPKGLKEKYREFTNTVKPDGINIDPEVDPSWARKELLDVVIQGGLDPQVLLKSDEEIFREASKYLYTFKDKPYVFNLGHGLLPETDPDKVDKLIKFYRNY

SEQ ID NO: 148350 - protein, 204 aa, Unknown
  Bacterial polypetide isolated from the Sargasso Sea
MPNKKFINAIERKPQACPPIWLMRQAGRYHDHYQSLKKDHTFEELCKKPILAAETAMGPINEFDFDVAILFSDILFPLEALGMDLSYNPGPQFGLHLSEDNAESLLINQNPISFMEFQGEAIERTIERLPIEKSLIGFVGGPWTLIAYACNISKDSRNINFNNFQIGLLDNVILPLLKENVELQLNAGAEVVMIFDSTAHQLAE

SEQ ID NO: 148351 - protein, 89 aa, Unknown
  Bacterial polypetide isolated from the Sargasso Sea
MPNTKFTNSLNRTPQKGPPVWFMRQAGRYHDHYQALKKDHTFEELCKNPLLAAETAMGPINEFDFDVAILFSDILFPLEALGMDLSYNP

SEQ ID NO: 148352 - protein, 350 aa, Unknown
  Bacterial polypetide isolated from the Sargasso Sea
MSLDNHLLLRAIRKEPVERTPVWIMRQAGRYLPEYIKLKNQAGGFMNLIKNPELACEITLQPLERFNLDSAIIFSDILVITELFGIELEFIEKVGPVLSKTLRTEDDLKKINTDFDFEKVDYVYKTAKLLKTELNNKVPLIGFIGSPWTVATYIIEGNSTKNFSKVLNILKNDKIFLKSLLDTITKASINHLERQIKSGVDVTMVFDTWGGLLEGDLYEEFSLQYINAIHSSLKSYKKPMIYYIRNPYTKLVNIQKLDVDVVGIDSSITISEFNKGTGDKFCVQGNLDVEILKLSNNKIEEEVIKILSNINNTTGHIFNLGTGITPDIDPAKLKTLIDVLAKVSPRYTIK

SEQ ID NO: 148353 - protein, 170 aa, Unknown
  Bacterial polypetide isolated from the Sargasso Sea
ENININQILNNLIKFLCIHIDNQINAGADVVQIFDSWAGLVPDKNIKDYCFIPNAKIVEYCRKNKIANVCFPKGIKKKYEEFNRIVEPDGINLDYDVDPLWAKKKLKNVVLQGGLDPKKLLISEKEMLEGATKYIQIFKDIPYVFNLGHGLLPETDPDRVKKLIEFYRNY

SEQ ID NO: 148354 - protein, 165 aa, Unknown
  Bacterial polypetide isolated from the Sargasso Sea
MTPIRNTIINKNTTISPIWFMRQAGRYLPEFRSIRKKNKNFIKLCLDSDLASEITLQPLNRFNLDAAIIFSDILMVPYGLNQKVEFKKNFGPTLGNLDINNLSKISENDFKKKLNPIYKLIQKTKLNNITKNKDIIGFIGAPWTLALYMINKVSPKKNEINNVLN

SEQ ID NO: 148355 - protein, 326 aa, Unknown
  Bacterial polypetide isolated from the Sargasso Sea
QKIPPIWLMRQAGRYHSHYQNLKKSYTFEELCKSPKLAAETAMGPIEDFDFDVAILFSDILFPLESLGMNLKYDPGPKFSELLTSENYKKLFNQQLPIQSLSFQAEAIERTIEKLPNDKSMIGFIGGPWTLVSYAMGKNKKNAIDVLTEFDWNIINDQIIPLLRENISIQIKAGAEVVMIFDSAANQLNKLDFAKYIKIVFEELVMNFNNKVGYYAKDGVDYSLIEKIKKESLIPLAGLGIDSNHSLGNYFSNSREGFIQGNFDEKVMTQPQNIMEKKLDKFIEEASSFSSEQRVGWVCGLGHGVLKTTPEDNVRLFVKKIRESFA

SEQ ID NO: 148356 - protein, 190 aa, Unknown
  Bacterial polypetide isolated from the Sargasso Sea
MSIFIKTLRGQRTNPTPVWLMRQAGRHLPEYISIRKQFANLMDMFLDPSTILEVSLQPVNRYGMDACIVFSDILIIPFASGSSVSFIDGQGPVIKFNENMSYNLEKTLPLAKGIKKIKESTRVPLIGFAGGAWTTLFYCLYEKNERQNLKFEDVVKKASQIDNLIEQMTLAIIQHAEMQIDSGIDAFQNI

SEQ ID NO: 148357 - protein, 55 aa, Unknown
  Bacterial polypetide isolated from the Sargasso Sea
MTPIKNCIVNKDTTTNPIWLMRQAGRYLPEFREIRKENQDFIKLCLNSDLASEIL

SEQ ID NO: 148358 - protein, 168 aa, Unknown
  Bacterial polypetide isolated from the Sargasso Sea
MTPLHEVIVNKKTTTNPIWVMRQAGRYLPEFREIRKENSDFIKLCLNEKLSSEITLQPIKRFNLDAAIIFSDILMLPYGLNQKVEFKKNFGPILEELQLDVSLKVSEENFVNKIKPVYKAINYISKNELIENKNTIGFVGAPWTLLVYMINLQSPKKGLKENFSRTMI

SEQ ID NO: 148359 - protein, 101 aa, Unknown
  Bacterial polypetide isolated from the Sargasso Sea
MSPIEEVIINKKSNVNPIWIMRQAGRYLPEFREIRKQNPDFIKLCLNEKLSSEITLQPLKRFDLDAAIIFSDILMLPYGLNQSVEFKKNMGPLLGEIDLKK

SEQ ID NO: 148360 - protein, 185 aa, Unknown
  Bacterial polypetide isolated from the Sargasso Sea
MSNLTEILTKKNICKSVWFMRQAGRYLPEFRKIRSQNQNFINLCLNSSLSSEITLQPIKRFDLDAAIIFSDILMVPYALNQKVKFEKDHGPILSKFDINIFLKNDNSSFIEKLNPIYEAIKLTRENLDKRKSLISFVGAPWTLLVYIIGAKKGNNVIDFNIIKKRKKEIKIILDKLNDYLCLHMK

SEQ ID NO: 148361 - protein, 139 aa, Unknown
  Bacterial polypetide isolated from the Sargasso Sea
MSPISKVIINKDTNITPIWIMRQAGRYLPEFREIRKKNTDFIKLCLNEKLSAEITLQPLKRFNLDAAIIFSDILMLPYGLNQKVEFKKNFGPLLGELNLDEVSKLNEFDFVKKINSVYKAISLVSKNEIIKNKSVIGFV

SEQ ID NO: 148362 - protein, 224 aa, Unknown
  Bacterial polypetide isolated from the Sargasso Sea
MIRAARGERVERTPVWLFRQAGRHLPEYNEYKATTGKNFLELLADPKDVAEVTMQPIRRYNLDAAILFSDILVIAEALNIEVEMPGGKGILVPNPLKGPEDMSRVPESIDVNEKLSHVLASVKEINEQIEKEDLGVPLIGFSAAPWTLMYYMVGGSSRKNTDVGMKWLNEHPKEAQKLLDILTDVVIDYLDAQVKAGVHMVQVFEAMCEHITEDSFYEFAMPCM

SEQ ID NO: 148363 - protein, 159 aa, Unknown
  Bacterial polypetide isolated from the Sargasso Sea
MSPLTNCIKNKDTKTNPIWLMRQAGRYLPEFREIRKKNTDFIKLCLNSDLASEITLQPIKRFGFDGAVIFSDILMLPYGLGQKVEFKKNFGPKLGEIELDNIKNVDEINFTEKVYKVYKAISKTSQDSLMSNKDMIGFVGAPWTILVYMINRSSPKKGL

SEQ ID NO: 148364 - protein, 217 aa, Unknown
  Bacterial polypetide isolated from the Sargasso Sea
LSKELPRETTLIGFAGAPWTVATYMVAGRGTPDQAPAHLLKNENPELFDNLINLLVEGTVEYLSHQINAGAEVIKIFDSWAGSLKGNDFDKYALEPCKKIISALKVKHPNIPIIAFPRQAGDRYVGFAKQARADCVALDESVSAEWISQNIQVDGCVQGNLASSHMVSGGSALIEETKRIVKALSNGPHIFNLGHGITPDADPRNVQIMIDTIRNAE

SEQ ID NO: 148365 - protein, 339 aa, Unknown
  Bacterial polypetide isolated from the Sargasso Sea
MPNKKFINAIERKPQACPPIWLMRQAGRYHAHYQNLKKDHTFEELCKKPKLAAETAMGPINEFDFDVAILFSDILFPLEALGMDLSYNPGPQFGLHLNEDNAESLIINQNPINFMEFQGEAIERTIERLPNEKSLIGFVGGPWTLIAYACNISKELRNIHLNDFQIGLLDNVILPLLKENVELQLNAGAEVVMIFDSTAHQLAEEDLNIYLGKTFNMLVKEFPSRVGYYAKDGVNYETIIANQDEPQILLAGMGIDSNVDLRDYFKKTSNGFVQGNFSEHFLTLPHDQFLTKLDIFIEQMSVLSPEERSGWVCGLGHGVLKTTPQENVKEFVQRIRASF

SEQ ID NO: 148366 - protein, 217 aa, Unknown
  Bacterial polypetide isolated from the Sargasso Sea
MPNTKFLNSLNRTPQKGPPVWFMRQAGRYHDHYQALKKDHTFEELCKNPLLAAETAMGPINEFDFDVAILFSDILFPLEALGMDLSYNPGPQFGLHLNEENANSLLVNQNPISFMNFQGEAIERTIERLPKEKSLIGFVGGPWTLISYACNINKDSRQINLNNFQIGLLDNVILPLLKENIKLQLNAGAEVVMIFDSAAHQLDEEDFSIYLDKTFNS

SEQ ID NO: 148367 - protein, 42 aa, Unknown
  Bacterial polypetide isolated from the Sargasso Sea
ETYKILSKYKDYPGYIFNLGHGITPDINPDNVKYLTDIVREF

SEQ ID NO: 148368 - protein, 228 aa, Unknown
  Bacterial polypetide isolated from the Sargasso Sea
MTPIKNCIVNKDTKTNPIWLMRQAGRYLPEFKEIRKVNQDFIKLCLNEKLSSEITLQPIKRFGFDAAIIFSDILMLPYGLGQKVEFKKNFGPNLGDLNINKLKGISEEDFSNSLNTVYKSIHITSKNELMKNRDMIGFVGAPWTILVYMINKISPKKNLSSNFYSDDSLINNLLVIIEKFLKIHIKNQVEAGANIIQIFDSWAGLLEYKIPEYIYNPTLRIVEYTKEL

SEQ ID NO: 148369 - protein, 152 aa, Unknown
  Bacterial polypetide isolated from the Sargasso Sea
KTHIKNQVDAGATIIQIFDSWAGMVKSDFDKYLYNPTLSLVNYTKSLGVPVICFPRGITDYSQFCKIVKPSMINIDYDVDPKNLLKNVDIPIQGGLHPEALLTDKANLKKEVNKYLEIFKDHPYVFNLGHGILPQTKIEMVEELVKIVRDFK

SEQ ID NO: 148370 - protein, 202 aa, Unknown
  Bacterial polypetide isolated from the Sargasso Sea
MHEVITNNKTTINPVWIMRQAGRYLPEFKEIRKKNPDFIELCLNHKLSSEITLQPIKRFDLDAAIIFSDILMLPYGLNQKVDFRKNFGPVLGNLDIGTMSKIDEIDFVEKIYPVYKAIKSVSSEMTSKNKNTIGFVGAPWTLLVYMINQQSPKKNVKKNFFEDDFLINRILLLIEKFLKIHIKNQSENGADVIQIFDSWAGC

SEQ ID NO: 148371 - protein, 108 aa, Unknown
  Bacterial polypetide isolated from the Sargasso Sea
MGQDLPLLLSAALGKKVNRPPVWMMRQAGRYMKIYRDLRERYPSFRERSENPELSYEISMQPFHAFKPDGVILFSDILTPLPGMGINFEIIESKGPIIEDPIKTLNQV

SEQ ID NO: 148372 - protein, 121 aa, Unknown
  Bacterial polypetide isolated from the Sargasso Sea
MGQDLPLLLSAALGKKVNRPPVWMMRQAGRYMKIYRDLRERYPSFRERSENPELSYEISMQPFHAFKPDGVILFSDILTPLPGMGINFEIIESKGPIIEDPIRTLNQVEKLKELNPSESLG

SEQ ID NO: 148373 - protein, 305 aa, Unknown
  Bacterial polypetide isolated from the Sargasso Sea
MRQAGRYLPEFRKIRKLNPDFIKLCLNANLSTEITLQPLKRFNLDAAIIFSDILMLPYGLNQKVEFKKNFGPLLGDLNLETFSKLNEKDFTQNIKQVYKAIKLVSNNQLTKEKNTIGFIGAPWTLLVYMINKRSPKLKLKDNFFTNDLLINETLKILEKFLKIHIKNQINSGADIIQIFDSWAGLLNKKNLPKYIYDPTSKLVDYVKSLNVPVICFPRGIKDYKNYCEIVKPDAICIDYDVDPLRIRKEVQIPVQGGLDPKILLTDKETLKKETQKYLDIFKDHPYIFNLGHGVLPETDPNMMDY

SEQ ID NO: 148374 - protein, 138 aa, Unknown
  Bacterial polypetide isolated from the Sargasso Sea
IQIFDSWAGLLEERDYPNYIYTPTLNLVDYVKSLNVPVICFPREIRNYKEFAEIVKPDAINIDYNVDPLMISKNIKIPVQGGLDPKILLTDKENLKKETLKYLDIFKDHPYIFNLGHGILPETNPDMVEFLIKTVKDY

SEQ ID NO: 148375 - protein, 227 aa, Unknown
  Bacterial polypetide isolated from the Sargasso Sea
MSPIKECIKKKKVNISPIWIMRQAGRYLPEFRKIRKKNPDFIKLCLNKSIVPEITLQPLQRFDFDAAIIFSDILMLPYGMGQSVKFTKGFGPSLNRTSIELMKSVNKDDFIKKLNPVYKSLNIVSKKKILKNKDLIGFIGAPWTIFVYMQNRQSPKKTKALNNFPFKKTFTQAEEIKAIKIITSFLKLHIKKQVENGATLIQIFDSWAELLKTEKAREKFIYKPNKE

SEQ ID NO: 148376 - protein, 134 aa, Unknown
  Bacterial polypetide isolated from the Sargasso Sea
LSPQDYDIFAGPYQKKVVDIVKEEFPDTPIILYISGSAGVLERMAKTGVDIISLDWTVDIEEACKRIPTGIGIQGNVDPGILFGNKDSIKERIDNTFNKVKERKYILNLGHGILPGTPEENAQTFFEHGKKLTY

SEQ ID NO: 148377 - protein, 307 aa, Unknown
  Bacterial polypetide isolated from the Sargasso Sea
RKLKESHNFYDMMKDPELSSEVTLLPINDLGVDSAILFSDILVIPDALGLDLIFTKNGPKFTNALNSESFNHLNFDPQKLEYIYTNIEKTVENKNTTPLIGFCGGPLTTFMFMFRGDETQKSFKDAIKFFYNNRKESMKIIEQITKASIVYVENQIKSGIQCFQLFETYCGSIPYDLYKECILPYSKKILNSAKELGCPTIFFPKDFSLGLKYINKDICDFVSIDWTMKLEDARNLVDKNVGLQGNMDPRIFYYDELKIESYLESLSSFGKNNHDWIFNLGHGFLPDIDYKKVQNVVNWIKNKNWNR

SEQ ID NO: 148378 - protein, 310 aa, Unknown
  Bacterial polypetide isolated from the Sargasso Sea
FRKIRQKNPDFIKLCLNKSIVPEITLQPLKRFDFDAAIIFSDILMLPYGLGQNVKFTKGFGPSLDKTSIELMKSVNKDDFIKKLNPVYKSLNIVSKNKILKNKDLIGFIGAPWTILVYMQNRQSPKKTKALDNFLFKKTFTRAEEVKAIKIITSFLKLHIKKQVENGATVIQIFDSWAELLRTEKAREKFIYNPNKELVDYTKKLGVPVICFPRGVENYKRFCNIVKPDAVSIDYNVSPKKIIKQINIPIQGGLDPKVLLGDKNKIKKEALKYLEIFKDHPYIFNLGHGILPETDPEKVKYLVNLVKDFK

SEQ ID NO: 148379 - protein, 176 aa, Unknown
  Bacterial polypetide isolated from the Sargasso Sea
MKKDFFKDEFLINRILLIIEKFLKVHIKNQIDNGANIIQIFDSWAGLLEEKELPNYVYSPTLNLVNYVKSLNVPVICFPREIKNYKEFCDIVKPDAVSIDYKVDPKNILRDIKIPIQGGLDPKILLTDKETLKKEASKYLEIFRDHPYIFNLGHGILPETNPEMVENLIKIIKDFK

SEQ ID NO: 148380 - protein, 285 aa, Unknown
  Bacterial polypetide isolated from the Sargasso Sea
INLCLNEDLSSEITLQPLKRFDFDAAIIFSDILMLPYGLGQKVEFEKNFGPRLGELNLNEIAKIDEIDFVEKIHRVYRAIKKVSSDINLKNKNTIGFIGAPWTLLVYMINQQSPKKNLKKDFFKDDFLINRILLIIEKFLKVHIKHQIDNGANIIQIFDSWAGLLEEKDLPNYVYAPTLNLVNYVKSLNVPVICFPREIKNYKEFCDIVKPDAVSIDYNVDPKKILRNIKIPIQGGLDPKILLTDKETLKKETSNYLEIFKDHPYIFNLGHGILPETNLDMVENL

SEQ ID NO: 148381 - protein, 260 aa, Unknown
  Bacterial polypetide isolated from the Sargasso Sea
ILAFKQGEGPQLEAIRDASGLGKLSLEGIHDTLGPIYETVSKLSSAIPSSTALIGFAGAPWTVATYMVEGKGSKDFPNIRRFAYGDPEGFAKLIDIVVEATTQYLLKQVEAGAECIQLFETWGGVLSETGFNRWVIEPTKQIVANLRAVHPDLPIIGFPRGCGLHLVDFKQKTGVTAVGLDSGVKLDWVAENLQKLGPVQGNLDPMLLITGGDPMFDEAKRILDTLGKGPFIFNLGHGITPETPPEHVGQLVDFIRNYKG

SEQ ID NO: 148382 - protein, 250 aa, Unknown
  Bacterial polypetide isolated from the Sargasso Sea
MNLKKILGPILGNLDITSVSKIDEIDFVQKIHPVYKAIKSVSSEMNLKNKNTIGFVGAPWTLLVYMINQQSPKKNVKKDFFEDQYLINRILLIIEKFLKIHIRNQIENGANVIQIFDSWAGLLEERDYPNYIYTPTLNLVDYVKSLGVPVICFPREIKNYKEFCEIVKPDVVNIDYNVDPLMISKNIKIPVQGGLDPKILLTDQENLKKEILKYLDIFKDHPYIFNLGHGILPETDPVMVEHLINTVRDY

SEQ ID NO: 148383 - protein, 158 aa, Unknown
  Bacterial polypetide isolated from the Sargasso Sea
MITKFLKIHIKNQIKAGAKIIQIFDSWAGLVDQNLDKYIYSPTLDIVEYVKNLGVPVICFPRGIKNYKIYCEIVKPDMVNIDYNVDPKKIIKEIKIPIQGGLDPNVLLTDKENLKKHAEKYLNIFKDHPYVFNLGHGILPETKIELVEELISIVRNYK

SEQ ID NO: 148384 - protein, 148 aa, Unknown
  Bacterial polypetide isolated from the Sargasso Sea
IKAGANIIQIFDSWAGLIPEKDLHDFCYNPNKKLVKFCKDKKIPVICFPKGINKKYVEFEKIVKPTCLSLDHDVDPEWISKNIKNTCFQGGMNPKALLKDEKKIFYEVDKYLNIFQDTPYIFNLGHGILPETNPEILTKVIKRVKNFK

SEQ ID NO: 148385 - protein, 322 aa, Unknown
  Bacterial polypetide isolated from the Sargasso Sea
MVSDTLINQVFKNKNSSIPIWFLRQAGRHIPEYFQIRENEKNFINFCLNEDLIIRSTTLPLKYYDLDAAIIFSDILMIPWAMDRNVKFTKNFGPSLKPMIPNETKFLKNISLSSKLEPLKNSISFLRDNLPKSLSLIGFAGAPWTLACYMIEGTGSKDFINTRKALWGSFKWFMELIETLIIYVADKLEMQARAGADILMIFDSWSHMIPNNFFDDCAINPTAKIVDILRSRKIFVPVIGFPFKAGASIVKYSFESKVDCIALDWSVNLSWAIKNLNKEVALQGNLDPASLIPSESDYLRENVLTILDKMKDRKFIFNVGHG

SEQ ID NO: 148386 - protein, 130 aa, Unknown
  Bacterial polypetide isolated from the Sargasso Sea
MTPIQECIKNKNTRITPIWLMRQAGRYLPEFREIRSKNPDFIKLCLNENLSSKITLQPIDRFKFDAAIIFSDILMLPYGLGQEVKFEKNFGPKLGDLNIDTILKTNEDDFSNKLNSIYKLISKVSKDPNL

SEQ ID NO: 148387 - protein, 281 aa, Unknown
  Bacterial polypetide isolated from the Sargasso Sea
PIFIKLCLNEKLSSEITLQPLKRFDLDAAIIFSDILMLPYGLNQIVEFKKNVGPLLGNLDLKEISNIEEVEFVEKLSPVYELIKLVSNSQFTKNKTTIGFVGAPWTLLVYMINKKSPKLSLNENFFEDKFLIDKILKILDKFLKIHIKNQIDNGAQIIQIFDSWAGLLKEKDLPYYIYDPTLSLVNYIKSLNVPVICFPRGIRNYKDYCEIIKPDTICIDYEVDPVKINKEINIPVQGGMDPKVLLSNKENLKKETTKYLDIFKDHPYIFNLGHGVFQKRT

SEQ ID NO: 148388 - protein, 265 aa, Unknown
  Bacterial polypetide isolated from the Sargasso Sea
MCKEPMTCAELVLQPIERYELDASILFSDILTVPDAFNLGLYFAEGEGPRFQNPISSKKQVDDLNEFDVNDLSYVFKTVEETKKILPHNLPLIGFCGSPWTLVAYSIEGSGSKTFQKTKKFMIENEASIFRLLEVYTNACFEYLKQQVMSGVNALQIFDSWADLLDASQLRKFSFSYTQKLIDLLKHDETTKDIPLIVFEKSPVLPFSDNPFKNVQCLSLHFTENLKKSRDKLLNKYAIQGNLDPRILLLGENEIITEVRKICNI

SEQ ID NO: 148389 - protein, 139 aa, Unknown
  Bacterial polypetide isolated from the Sargasso Sea
VIQIFDSWAGLLDDKIPEYIYIPTLNIVEYVKQLGVPVICFPRGIKDYKNFCEIVKPDAVNIDYDVDPEKIVKEIKIPIQGGLDPKILLTDKEILKKEVEKYLHIFKDHPYIFNLGHGILPETKIEMVEDLIKIVRNFK

SEQ ID NO: 148390 - protein, 298 aa, Unknown
  Bacterial polypetide isolated from the Sargasso Sea
IVNNNTDINPIWLMRQAGRYLPEFRKIRKKNKDFIELCLNRKIVPEITLQPLKRFNFDAAIIFSDILMIPYALGQNVTFSKGLGPKLGDINLSKISKIKADKFSNILKPVYESLEIISKDKLLKNKDLIGFVGAPWTLLVYMINKISPKKSLKKNFFDDKKTIHKLIKIINNFIKIHISNQINYGATIIQIFDSWAGLVKEEDIENYIYKPTKEIVDYTKKLNVPVICFPRGIKNYKKFVNFVNPNAISIDYDIDPKQILKDIKIPVQGGPNPKILLGDKNQLKKEASKYLKIFKDHP

SEQ ID NO: 148391 - protein, 276 aa, Unknown
  Bacterial polypetide isolated from the Sargasso Sea
IKRFNLDAAIIFSDILMVPFGLNQTVEFKKNYGPILGDFVLDKTLKVEENDFECSLSPVYKAMKNISKDKSLGNKDIIGFVGAPWTLLVYILNKSSPKNGIDHKIIEDEKYINQILNILIKFLKLHIKNQINNGATVIQIFDSWAGLVEDKGLENLVYSPTHELTKYIKTFNVPVICFPRNIKNYRNFVANVKPDAVNIDYSVNPDEIADKIDIPIQGGMDPKILLTDRENLKKEAEKYLNVFKDHPYIFNLGHGILPETKIEMVEELIKIVRDFK

SEQ ID NO: 148392 - protein, 247 aa, Unknown
  Bacterial polypetide isolated from the Sargasso Sea
MNRLIDCITHKKSSGIPIWFMRQAGRYLPEFQEIRKKNQNFIKLCLNSNLVKDITIQPLKRFDIDAAIIFSDILIIPYGLGQEVEFKKGFGPILGNINLEKIINTNPKDFINKINPVYDGLKKVKEEIKEKALIGFVGAPWTLLLYMINGKSPKKNFNFNEINKDKSLVIKLMKKIEETICLHVEKQIEAGANVIQIFDSWAGLLPERELQNYCYMPTRRIVDHIKSLNIPVICFPKGIGKNYINFN

SEQ ID NO: 148393 - protein, 251 aa, Unknown
  Bacterial polypetide isolated from the Sargasso Sea
MKNVLKDCIEGKKTSYTPIWFMRQAGRYLPEFREIRKKNPDFIKLCLNPDLVNEITLQPLKRFDLDAAIIFSDILMIPYGLGQKVEFKKGIGPILGEINLDKIINTDPANFIKKLLPVYKGIEKVKNNLKEKELIGFVGAPWTLLLYMLNKGSPKNNFDFNKIIKDKSVINILLNKIEEMVCLHIDKQIEAGASVIQIFDSWAGLLPKKELSKYCYTPITKVVEHTKRKKIPVICFPKGIGENYVDFCSVV

SEQ ID NO: 148394 - protein, 214 aa, Unknown
  Bacterial polypetide isolated from the Sargasso Sea
MSPLANCIKNQDTKSNPIWLMRQAGRYLPEFREIRKENQDFIKLCLNSDLASEITLQPIRRFGFDGAVIFSDILMLPYGLGQKVEFEKNFGPKLGNIDLEIIKNVDEISFTEKIYKVYKAIEKTSKDPLMSNRDMIGFVGAPWTILVYMINKSSPKKGLSNEFFRDDFLINRLLGIIEKFLKVHIKNQIEAGAQVIQIFDSWAGLLEDKIPEYI

SEQ ID NO: 148395 - protein, 164 aa, Unknown
  Bacterial polypetide isolated from the Sargasso Sea
MGSIKNCIINKDTKYKPIWLMRQAGRYLPEFREIRKNNTDFIKLCLNKELSTEITIQPLKRFNFDAAIIFSDILMLPYGLGQNVTFQKNLGPRLGNVELDKILQISDESFTKSLENVYALVNNVSKHQILKNKDLIGFAGAPWTILLYMLNKISPKKGLSEKFL

SEQ ID NO: 148396 - protein, 210 aa, Unknown
  Bacterial polypetide isolated from the Sargasso Sea
MTPIKNCILNKDTSFNPIWLMRQAGRYLPEFREIRKKNTNFIKLCLNSKLSEEITLQPIDRFGFDAAIIFSDILMLPYGLGQKVEFKKNFGPSLGKINLDKFVKLNDEFLTNKLSPIYDLLKNLRRNEKIKNKDLIGFVGAPWTLLVYMINKVSPKNGLSNTFFEDAFLINNLLSILDKFIKIHIKNQVNAGATIIQIFDSWAGLIKTGF

SEQ ID NO: 148397 - protein, 124 aa, Unknown
  Bacterial polypetide isolated from the Sargasso Sea
MSPLKECILNKNTKIKPIWLMRQAGRYLPEFREIRAKNPDFIKLCLNSTLSSEITLQPLRRFDFDAGIIFSDILMLPYGLGQDVKFKKNFGPELGEIEIESFSNQTEENFIKKLNPIYNLLNIT

SEQ ID NO: 148398 - protein, 186 aa, Unknown
  Bacterial polypetide isolated from the Sargasso Sea
KDFEKTLGFLESNQKDVHDLLTKYTDACFLYLRKQVQSGADVIQIFDSWANLLTKEDLIEFSFNYINSLISALKLDPITKNIPVIIFARNPKCNIEELINTSADCISLFWSMNDLNFEVAKNKVAIQGNLDPKILLESDETIKRETYKILERFKEYPGYIFNLGHGITPDISPDKIKYLTNIVREY

SEQ ID NO: 148399 - protein, 273 aa, Unknown
  Bacterial polypetide isolated from the Sargasso Sea
KINLDAAIIFSDILMVPYGLGQKVEFKKDFGPMLGDLDLNYVDKLNEEMFTSKLSPVYKMINNLSTNEVLNKKDLFGFVGAPWTLLIYILNKKSPKKQIENKDIENQKIVNNLLKIIDKYLKIHIKNQIKAGASVIQIFDSWAGIVEDKNLKNYIYEPTKSLVDFTKSLSVPVICFPRNIKNYKEYVDFVLPDGVNIDYTIDPEVIAKDINITIQGGIKPELLLNDKQMLKNEILKYHEIFKDHSYIFNLGHGVLPETNPEIVRYFVETIKEL

SEQ ID NO: 148400 - protein, 237 aa, Unknown
  Bacterial polypetide isolated from the Sargasso Sea
MSSISNCIKNKDTESNPIWLMRQAGRYLPEFRDIRKKNQDFIKLCLNSDLASEITLQPIKRFGFDGAVIFSDILILPYGLGQNVKFEKNFGPKLGNIDLEKIKNIDEVNFTEKVYKVYKAISKTSKDPLMKKRDMIGFVGAPWTILVYMINKSSPKKGLSNEFFKDDFLINRLLGIIEKFLKLHIKNQIEAGAQVIQIFDSWAGLLEDKIPEYIYIPTLNIVEYIKKLGVPVICFPR

SEQ ID NO: 148401 - protein, 174 aa, Unknown
  Bacterial polypetide isolated from the Sargasso Sea
MTELNRNFIAALNRETQKTPPIWIMRQAGRYLPEYRKVRSNFKNFLDMCKTPEICCELVLQPIERYDFDAAIIFSDILTIPDALGLGVSFVEGKGPVFSNPIKRPEDISNMINFNPDSLDYVYKTAELTRKELNPSIPLIGFAGSPWTLAAYSIEGSSSKNFNLTKSFIENHSD

SEQ ID NO: 148402 - protein, 162 aa, Unknown
  Bacterial polypetide isolated from the Sargasso Sea
RLLGIIEKFLKIHIKNQVDAGAKVIQIFDSWAGLLNDKIPEYIYIPTFNIVEYVKQLGVPVICFPRGIKDYKNFCEIVKPDAINIDYDVDPEKIVKEIKIPIQGGLDPKILLTNKEILKKEVEKYLHIFKDHPYIFNLGHGILPETKIEMVEDLIKIVRNFK

SEQ ID NO: 148403 - protein, 178 aa, Unknown
  Bacterial polypetide isolated from the Sargasso Sea
MSDTLPLLLRAARGEAVERPPVWMMRQAGRYMKIYRDLRDKYPSFRERSENPDLSYEISMQPFHAFKPDGVILFSDILTPLPGMGIDFDIIESKGPQIGDPIRSMDQVNALRPLNPSESMPFVGEVLGRLRESVGNEAAVLGFVGAPWTLAAYVVEGKSSKNYAVIKAMAFREPELLH

SEQ ID NO: 148404 - protein, 252 aa, Unknown
  Bacterial polypetide isolated from the Sargasso Sea
MTPIHRVIKNKTTSISPIWFMRQAGRYLPEFREIRKSNPNFINLCLNEKITPEITLQPLNRFNLDAAIIFSDILMVPHGLNQKVEFKKNYGPSLGDLELKKILEIKEDEFNNKLLPVYKAIDIVSKNEITKNKDVIGFVGAPWTILVYMLNKKSPKLEIDINKTIFDKFKEAELEMILKTVIKFLKIHIKNQIDNGASLIQIFDSWAGLLNEKLYSKYIFNPTIELVEFTKSLNVPVICFPRNIKDYKRFCE

SEQ ID NO: 148405 - protein, 293 aa, Unknown
  Bacterial polypetide isolated from the Sargasso Sea
PDFIKLCLNEKLSSEITLQPLKRFDLDAAIIFSDILMLPYGLNQNVEFKKNVGPLLGELDLRKISKVEEINFVEKLSPVYELIKLVSNSQFTNNKTTIGFVGAPWTLLVYMMNKKSPKLNLNENFFEDKFLIDKVLKILDKFLKIHIKNQIDNGAQIIQIFDSWAGLLKEKDLRYYIYDPTLSLVNYIKSLNVPVICFPRGIKNYKDFCEIVKPDTICIDYEIDPIKISKEIKIPVQGGMDPKFLLSNKESLKKEATKYLDIFKDHPYIFNLGHGVLPETDPNMMDYLVKTVK

SEQ ID NO: 148406 - protein, 166 aa, Unknown
  Bacterial polypetide isolated from the Sargasso Sea
FLIDELLEIIEKFLKIHIKNQVQSGAGVIQIFDSWAGLLEDKLPEYIYRPTSNVVEYVKQLGVPVICFPRGIKNYKYFCEMVKPDAVNIDYDVNPKKIVKDINIPIQGGMDPKILLTDQRTLKNEVEKYLSIFKDHPYIFNLGHGILPETRIEMVEDLIKIVRNFK

SEQ ID NO: 148407 - protein, 181 aa, Unknown
  Bacterial polypetide isolated from the Sargasso Sea
MSPKKSLSNEIFNDKLFIKKLLSAIEKFLKIHIENQIKAGATIIQIFDSWAGLLEDNISKFIYEPTFNLVNHVKKLNVPVICFPRGIKDYKNFCEAVKPDMVNIDYNIDPKKIVNEIQIPVQGGLDPKVLLSDKENLHIEVIKYLQIFKDHPYVFNLGHGILPETKIDMVEELVKTVRDFK

SEQ ID NO: 148408 - protein, 282 aa, Unknown
  Bacterial polypetide isolated from the Sargasso Sea
SEITLQPIKRFDFDGAVIFSDILMLPYGLGQKVEFKKNFGPKLGELELEKIKNIDEINFTEKVYKVYKAISKTSKDPLMVNKDLIGFVGAPWTILVYMINKSSPKKGLSEFFFKDDFLINRLLSIIEKFLKLHIKNQVDAGAKVIQIFDSWAGLLNDKIPEYIYIPTLNIVDYVKQLGIPVICFPRGIKDYKNFCDIVKPDAVNIDYSVDPKSIVNEIKIPVQGGLDPKILLTDQDTLKREVEKYLNIFKDHPYIFNLGHGILPETKIEMVEDLIKIVRNFK

SEQ ID NO: 148409 - protein, 261 aa, Unknown
  Bacterial polypetide isolated from the Sargasso Sea
PIKRFGFDGAIIFSDILMLPYGIGQKVEFEKNFGPKLGDLNLEELESINEVEFTKKLQPVYKAINITSRDKLLEKRDMIGFVGAPWTILVYMINRMSPKKNLSENFFDDEILINKLLNIIEKFLKIHIKNQVDAGANIIQIFDSWAGLLDNKLLDYIYKPTYNIVNFTKKLGVPVICFPRGIKNYKEFCEYVKPDMVNIDYDVDPKKIKNELDLPIQGGLDPKILLTDKEKIKNEVEKYLTIFKDHPYVFNLGHGILPETK

SEQ ID NO: 148410 - protein, 263 aa, Unknown
  Bacterial polypetide isolated from the Sargasso Sea
SDILMLPYGLGQKVEFEKNFGPRLGEIELDNIKNVDEINFTEKVYKVYKAISKTSQDPLMDNKDMIGFVGAPWTILVYMINRSSPKKGLTDEFFEDEFLINRLLGIIEKFLKVHIKNQVEAGAKVIQIFDSWAGLLNDKIPEYIYIPTLNIVKYIKQLGVPVICFPRGIKDYKNFCEIVKPDAINIDYDVDPEKIVKEIKIPIQGGLDPKILLTDKEILKKEVEKYLHIFKDHPYIFNLGHGILPETKIEMVENLIKIVRNFK

SEQ ID NO: 148411 - protein, 293 aa, Unknown
  Bacterial polypetide isolated from the Sargasso Sea
SIPVWFMRQAGRYLPEFRKIRSKNTDFINLCLNPELSKEITLQPLKRFNIDAAIIFSDILLIPYALNQSVEFKKNFGPNLGFLNFEELLKITEEEIIKKLNPIYELIKLTSKDEIIKNKDLIGFVGATWTILVYMLNRQSPKIINKEVLEHPNGKTLMRKIIDTQKLHIKKQVESGASIIQIFDSWAGLLNEDKLEEYIYKPTFEIVEFTKNLGVKTICFPRSIKSYKKYCDIVKPDAISIDYEVNPTKIAEKIDIPIQGGMDPKYLLLEEKDMLKNAKKYLEIFSNHKYIST

SEQ ID NO: 148412 - protein, 155 aa, Unknown
  Bacterial polypetide isolated from the Sargasso Sea
MLKNDLLIRALKGEIVSRPPVWMMRQAGRYLPDFMKLKNKYDFFTRCQTPELATEITLMPIKQLGPDAAILFSDILVVLQAMNVNVEMKDGIGPWISKPITNKRDLSNIIVPNIQEKLGYVLEAIKMTQKELNNSVPLIGFAGSPWTLLCYAVQG

SEQ ID NO: 148413 - protein, 109 aa, Unknown
  Bacterial polypetide isolated from the Sargasso Sea
KNVPKIVFAKGGGLWLDSLAKLEINGLGLDWSIDLARARAIVGEKIALQGNLDPAVMLTDPQTVKLEARKVLKSIGNRRGFIFNLGHGITPEVDPRHVEVLVDTVHSYR

SEQ ID NO: 148414 - protein, 131 aa, Unknown
  Bacterial polypetide isolated from the Sargasso Sea
MKPIEQVIIENNTSIKPVWFMRQAGRYLPEFRNIRLKNKDFIKLCLNADLVPEITLQPLKRFEIDAAIIFSDILMIPYAIGQPVRFQKDFGPILGSLDNVKNNDLTEHKFINKLNPVYKAISKTTISLKGK

SEQ ID NO: 148415 - protein, 214 aa, Unknown
  Bacterial polypetide isolated from the Sargasso Sea
AISKTSQDPLMGNKDMIGFVGAPWTILVYMINRSSPKKGLTSEFFKDDFLINRLLQIIEKFLKVHIKNQVEAGAKVIQIFDSWAGLLDDKIPEYIYIPTLNIVEYVKQLGIPVICFPRGIKNYKNFCEIVKPDAVNIDYDVDPEKIIKEIKIPIQGGLDPKILLTDKEILKKEVEKYLHIFKDHPYIFNLGHGILPETKIEMVEDLIKIVRDFK

SEQ ID NO: 148416 - protein, 103 aa, Unknown
  Bacterial polypetide isolated from the Sargasso Sea
MTPLNKVIVNKDTSINPIWIMRQAGRYLPEFREIRSKNTDFIKLCLNPTLSTEITLQPLRRFDFDAAIIFSDILMLPYGLKQKVEFKKNFGPILGKLNLEEIS

SEQ ID NO: 148417 - protein, 240 aa, Unknown
  Bacterial polypetide isolated from the Sargasso Sea
FIAALNREIQKTPPIWIMRQAGRYLPEYRKVRSNFKNFLDMCKTPEICCELVLQPIERYDFDAAIIFSDILTIPDALGLGVSFVEGKGPVFSNPIKRPEDISNMINFNPDSLDYVYKTAELTRKELNPSIPLIGFAGSPWTLAAYSIEGSSSKNFDLTKSFIESHSDDAHKFLEILADACFEYLKRQIVSGVDAIQIFDSWANLLSEEQYLEYSLKYIKKILKKLSEDPETNQTPTIVFA

SEQ ID NO: 148418 - protein, 97 aa, Unknown
  Bacterial polypetide isolated from the Sargasso Sea
FGDGLIQYAEESGVNAIGIDHGVDPRWADKNLPKNMAIQGNLDPLSLISGGEAMLRNIDYILESFHDRPHIFNLGHGITPPTPVENVQIMINHIRAS

SEQ ID NO: 148419 - protein, 140 aa, Unknown
  Bacterial polypetide isolated from the Sargasso Sea
NIIQIFDSWAGLLNDKLSDYIYKPTYNLVEYTKKLGVPVICFPRGIKNYKEFCKIVKPDMVNIDYDVDPKKIASEIELPIQGGLDPKILLTDKDKVKNEVEKYLTIFKDHPYVFNLGHGILPETKIELVQQLINIVKNFK

SEQ ID NO: 148420 - protein, 165 aa, Unknown
  Bacterial polypetide isolated from the Sargasso Sea
MGQDLPLLLSAALGKKVNRPPVWMMRQAGRYMKIYRDLRERYPSFRERSENPELSYEISMQPFHAFKPDGVILFSDILTPLPGMGINFEIIESKGPIIEDPIRTLNQIENLKELNPSESLAFVGQVLASLKKDVKNEATVLGFVGAPWTLAAYVVEGKSSKNYSL

SEQ ID NO: 148421 - protein, 289 aa, Unknown
  Bacterial polypetide isolated from the Sargasso Sea
ERKNSSYTPIWFMRQAGRYLPEFREIRKKNTDFIKLCLNPDLVNEITIQPLKRFDLDAAIIFSDILMIPFGLGQKVEFKKGIGPILGEINLENIINTDPAEFVKKLSPVYKGIEKVKDSLKEKELIGFAGAPWTLLLYMLNKGSPKNSFEFSKINKDKSLVEKLLKKIEEMICLHVDKQIEAGANIIQIFDSWAGLLPPKELSKFCTIPNSKIVEHIKSKKIPVICFPKGIGENYIDFCKEVKPDCISIDYEVDPRWIKEKINGVPVQGGLDPKILLTDKENIKKNTDK

SEQ ID NO: 148422 - protein, 205 aa, Unknown
  Bacterial polypetide isolated from the Sargasso Sea
MRQAGRYLPEFREIRSRNTDFIKLCLNSILSTEITLQPLKRFNFDAAIIFSDILMLPYGLNQTVEFKKDFGPILGKLDLYEISKVKEIDFVGRVKKIYEAIKNVSNNDILKNKNTIGFVGAPWTILVYMINQQSPKKYLKKDFFENKDLINNVLLIIEKFLKIHIKNQVDSGANVIQIFDSWAGLLEEKDLPYYIYNPTLNLVKL

SEQ ID NO: 148423 - protein, 255 aa, Unknown
  Bacterial polypetide isolated from the Sargasso Sea
GLGQKVEFKKNFGPNLEDLDIDKLLEIDEEKFTKNLSPIYQLLTNLKKSEDLKNKDIIGFVGAPWTLLVYMINKVSPKNGLITNFFSDIGLINHSLKILDKFIKIHIKNQVNAGATIIQIFDSWSGLIKSDFDKLLYNPTLSLVNYTKSLGVPVICFPRGITDYSQFCKIVKPSMINIDYDVDPKNLLKNIDIPIQGGLHPGTLLTDKVQLKKEVNKYLEIFKDHPYVFNLGHGILPETKIEMVEELVKIVRDFT

SEQ ID NO: 148424 - protein, 208 aa, Unknown
  Bacterial polypetide isolated from the Sargasso Sea
MSPLTNCIKNKDTKSNPIWLMRQAGRYLPEFREIRKENQDFIRLCLNSDLASEITLQPIKRFGFDGAVIFSDILMLPYGLGQKVEFEKNFGPKLGDIDLERIKNVDEVSFTEKIYKVYKAIEKTSKDPLMSNRDMIGFVGAPWTILVYMINKSSPKKGLSGEFFKDDFLINRLLGIIEKFLKLHIKNQIEAGAQVIQIFDSWAGLLQD

SEQ ID NO: 148425 - protein, 164 aa, Unknown
  Bacterial polypetide isolated from the Sargasso Sea
MSDALPLLLRAARGEQVERPPVWMMRQAGRYMKIYRDLRDKYPSFRERSENPDLSYEISMQPFNAFQPDGVILFSDILTPLPGMGIDFDIIESKGPQINDPIRSLAQVEALRPLVPTETMPFVGEVLGRLRSSVGNQAAVLGFVGAPWTLAAYVVEGKSSKNYA

SEQ ID NO: 148426 - protein, 167 aa, Unknown
  Bacterial polypetide isolated from the Sargasso Sea
PNKIKNLIQILNKYLKIHIFNQVKSGASTIQIFDSWAGLLDNKYLNDFVYLPTSELVEFTKSLNVPVICFPKGIKDYKNYCKEVNPNVINIDYEVNPSKIKSDINICVQGGFNPKILLTDKENIKKEAKKYLDIFADGSYIFNLGHGILPETNPDMVEYLVNFVKNY

SEQ ID NO: 148427 - protein, 227 aa, Unknown
  Bacterial polypetide isolated from the Sargasso Sea
MSPIINCIKNKDIKTNPIWLMRQAGRYLPEFREIRKKNTDFIKLCLNSDLASEITLQPIKRFDFDGAVIFSDILMLPYGLGQKVEFKKNFGPKLGEIELDNIKNVDEINFTEKVYKVYKAISKTSQDPLMDNKDMIGFVGAPWTILVYMINRSSPKKGLTGEFFKDEFLINRLLGIIEKFLKVHIKNQVEAGARVIQIFDSWAGLLDDKIPEYIYIPTLNIVEYVKQ

SEQ ID NO: 148428 - protein, 132 aa, Unknown
  Bacterial polypetide isolated from the Sargasso Sea
MSDTLPLLLRAARGKAVERPPVWMMRQAGRYMKIYRDLRDKYPSFRERSENPDLSYEISMQPFHAFKPDGVILFSDILTPLPGMGIDFDIIESKGPQIGDPIRSMDQVNALRPLNPSESMPFVGEVLGRLRQ

SEQ ID NO: 148429 - protein, 301 aa, Unknown
  Bacterial polypetide isolated from the Sargasso Sea
KVTFLELCKNPELSAEVMLATVDRLGVDAAIIFSDLLPLLQPMGLDLEFTPGEGPVIHNPLRTRTDLDRFHELVDVDSLSFVFETVRTTRAGLQKELPVIGFAGAPFTLAGYAIEGGTSRNWLHTKRFMLTDPDGWHELMERLARTIGRYLHAQFDAGANAVQVFDSWVGCLSPEHYREFVLPHSRTVFESIAGRGPIIHFAAGNPALLPLAAEAGGTVMGIDWRTELDHAWQQVGYDRGVQGNLDPAVLHTTPDVVRRRTEDILARVAGRPGHIMNLGHGILPETPVENVLEFISTVKQK

SEQ ID NO: 148430 - protein, 235 aa, Unknown
  Bacterial polypetide isolated from the Sargasso Sea
LTQWAKIDEIDFVQKIYPVYKAIKSVSLEMNSKNKSTIGFVGAPWTLLVYMINQQSPKNNVKKDFFKDNFLINRLLLIIEKFLKIHIKNQIENGANVIQIFDSWAGLLEERDYPNYIYTPTLNLVEYVKSLKVPVICFPREIKNYKEFCEVVKPNAVNIDYKVDPLMISKNIKIPVQGGLDPKILLTDKENLKKEVLRYLDIFKDHPYIFNLGHGILPETNPDMVEFLIKTVKDN

SEQ ID NO: 148431 - protein, 238 aa, Unknown
  Bacterial polypetide isolated from the Sargasso Sea
MKPIDKVIVDKDTSFNPIWIMRQAGRYLPEFRKIRKENPNFINLCLNDNLSSEITLQPLKRFNLDAAIIFSDILILPYGLGQEVEFKKNFGPRLGELNLNKIAKIDEIDFIEKIHRVYRAIKKVSSDQVLNDKNTIGFVGAPWTLLVYMINQQSPKKNLKKDFFKDEFLINRILLIIEKFLKVHIKNQIDNGANIIQIFDSWAGLLDEKDLPNYVYSPTLNLVNYVKSLNVPVICFPR

SEQ ID NO: 148432 - protein, 138 aa, Unknown
  Bacterial polypetide isolated from the Sargasso Sea
MGENLPLLLSAALGKKVNRPPVWMMRQAGRYMKIYRDLRERYPSFRERSENPELSYEISMQPFLAFKPDGVILFSDILTPLPGMGINFEIIESKGPIIEDPIRNIHQIENLKELIPNESLSFVGEVLSSLRKDVKNEA

SEQ ID NO: 148433 - protein, 176 aa, Unknown
  Bacterial polypetide isolated from the Sargasso Sea
MTPIQKTIINKKTSNKPIWLMRQAGRYLPEFKKIRKLNPDFIKLCLNENLSSKITLQPLERFELDAAIIFSDILMVPWGLNQKIEFKKNFGPNLGPINLEKISNVNEKDFLKKLYPIYKSIIKVKENVLTKNKDVIGFVGAPWTLLVYMINKHSPKKKLIKDFFEDKLLINKILII

SEQ ID NO: 148434 - protein, 171 aa, Unknown
  Bacterial polypetide isolated from the Sargasso Sea
MTEFNRNFIAALNRKTQKTPPIWIMRQAGRYLPEYRKVRSNFKNFLDMCKTPEICCELVLQPIERYDFDAAIIFSDILTIPDALGLGVSFVEGKGPVFSNPIKKPEDISKMINFNPDSLDYVYKTAELTRKELNPSTPLIGFAGSPWTLAAYSIEGSSSKNFDLTKSFIES

SEQ ID NO: 148435 - protein, 238 aa, Unknown
  Bacterial polypetide isolated from the Sargasso Sea
NLNLDKIKATTNEEFTNRLKPVYNAITRTSQSNLLNDKDLIGFAGAPWTILVYMINKMSPKNGLPEIFFDDPNLINDLLNTIEKFVKLHIKNQINAGANVIQIFDSWAGLLEDRISEYIYQPTFNIVEYVKKLGVPIICFPRGIKDYKEFCEIVKPDMISIDYAVDPHEIVKNIKIPVQGGLDPKFLLSDKDNLKKEVEKYLTIFKDHPYTFNLGHGILPEAKIDLVTTLINTVRKFK

SEQ ID NO: 148436 - protein, 260 aa, Unknown
  Bacterial polypetide isolated from the Sargasso Sea
IAALNRKTQKTPPIWIMRQAGRYLPEYRKVRSNFKNFLDMCKTPEICCELVLQPIERYDFDAAIIFSDILTIPDALGLGVSFVEGKGPVFSNPIKKPEDISKMINFNPDSLDYVYKTAELTRKELNPSTPLIGFAGSPWTLAAYSIEGSSSKNFDLTKSFIESHSDDAHKFLEILADACFEYLKRQIVSGVDVIQIFDSWANLLSEEQYLEYSLKYIKRILKKLSEDPVTSKTPTIVFARDPKCNLNENKLDGLSCYGMF

SEQ ID NO: 148437 - protein, 139 aa, Unknown
  Bacterial polypetide isolated from the Sargasso Sea
MLEEQHISRYEKAAHNQATDRPPIWFMRQAGRYLPEYQTLRKKHGFQTMIRTPEIATEITLQPIDRFGVDAAILFSDILVTAEAMGLHLEYIEKKGPVFKDPVRTQKDIDSLSIDASSLQYVSEAIHCLLPELQKREVP

SEQ ID NO: 148438 - protein, 175 aa, Unknown
  Bacterial polypetide isolated from the Sargasso Sea
HRLLSHFAESIASYLRYQIDSGAQVVQMFDSWAGQLSPADYDTFAAPYQRRVVELVKQTHPDTPFILYISGSAGVIERMAQTGVDIISLDWTVDMAEACARLPQHIGVQGNVDPGLLFGTPEAIRDRIDDTVRKARGRRHILNLGHGILPGTPEANGRAFFEAGKSVMDRIGAAA

SEQ ID NO: 148439 - protein, 253 aa, Unknown
  Bacterial polypetide isolated from the Sargasso Sea
SQISLQPINRFDFDFIILFSDILVIPHCLGQNVQFKENIGPILKPIKFRELSSSIENSMAKLSPVFDTLKILKKKKKEKKIIGFCGGPFTVLNYMIEGGTSKKHKKILEFIKEEDKAKCYIEKILEFSIEYLKRQIKSGADMLQIFDSWAGLLEPKEFEKFIIKPSIEISKEIKKSYPEIPLIFFPRGSKRKITKFIDEVKCDVISLDEITNDDIQNCKKKKIIIQGNLSPTILLKGGKPLIEEVKKIWKGKR

SEQ ID NO: 148440 - protein, 122 aa, Unknown
  Bacterial polypetide isolated from the Sargasso Sea
FFQSLIKEVPVIHFGTGNPALLRLMAAAGGDVMALDWRAPLNESWNDLGCKSIQGNLDPVALFGSEKSVIKAAKEILDDVAGKPGHIFNLGHGILPQTPLENVKTLVRVVKDYSSEVKTRHQ

SEQ ID NO: 148441 - protein, 168 aa, Unknown
  Bacterial polypetide isolated from the Sargasso Sea
MTPINNCIKNKDTKVKPIWLMRQAGRYLPEFREIRKNNQDFVKLCLNEKLSSEITLQPIKRFGFDAAIIFSDILMVPYGLGQQVVFEKNFGPRLGQLNIKLIENTAEEIFTGKLEPIYNLISNISKNELLKNRDLIGFVGAPWTILIYMINKMSPKKKLSEDFFKDDD

SEQ ID NO: 148442 - protein, 174 aa, Unknown
  Bacterial polypetide isolated from the Sargasso Sea
KDFFKDEFLINRILLIIEKFLKVHIKNQIDNGANVIQIFDSWAGLLEEKDLPNYVYAPTLNLVNFVKSLNVPVICFPREIKNYKEFCDIVKPDAISIDYNVDPKKILRDIKIPIQGGLDPKILLTDKETLKKEASNYLEIFKDHPYIFNLGHGILPETNSEMVENLIKIVRDFK

SEQ ID NO: 148443 - protein, 195 aa, Unknown
  Bacterial polypetide isolated from the Sargasso Sea
MNDSKFLNALELKPNSTPPIWFMRQAGRYLPEYQEIRKNYSNFLDMCKEPKTCAKLALQPIERFDLDASILFSDILTIPDALDLGLAFHEGEGPKFSNPISKPEDINTLISFDENTLSYVFNAVEETKKLLPADLPLIGFCGSPWTLAAYSIEGGGSKDFKKTKNFMQDHPSALHDFLEILCDACYRYLRQQVLS

SEQ ID NO: 148444 - protein, 220 aa, Unknown
  Bacterial polypetide isolated from the Sargasso Sea
MNRLLNCINDKKTRDIPVWFMRQAGRYLPEFMEIRKQNTDFVKLCLNSDLAKEITIQPIKRFDLDAAIIFSDILMIPYGLGQNVNFKKGYGPQLDELQIDILTKVDNKIFTNNLKPIYEAIKKVKKEIEKRSLIGFVGAPWTLFLYMVNKQSPKKNFNFNELIKNNALTKRLYKKLEEIICVHIKNQVDAGANIIQIFDSWAGLLPENHLKDYCYEPTKK

SEQ ID NO: 148445 - protein, 142 aa, Unknown
  Bacterial polypetide isolated from the Sargasso Sea
MSPLKKCILEKATKPTPIWLMRQAGRYLPEFREIRLKNPNFINLCLNDNLSSEITLQPLKRFDFDAAIIFSDILMLPFGIGQNVEFIKNFGPVLGELNLEESLNVTDIHFTKKLYPVYKAIRKVSEDRILHNKDLIGFVGAP

SEQ ID NO: 148446 - protein, 231 aa, Unknown
  Bacterial polypetide isolated from the Sargasso Sea
MSPIKECIKKKKVNTNPIWIMRQAGRYLPEFRKIRKKNPDFIKLCLNKNIVPEITLQPLKRFNFDAAIIFSDILMLPYGLGQNVKFTKGFGPSLDKTSIKLMKSVNKVEFSKKLSPVYKSLNIVSKDKILKNKDLIGFVGAPWTILVYMQNRQSPKKTKALNNFSFKKTFTQTEEIKAIKIITNFLKLHIKKQVDNGATVIQIFDSWAELLRTEKTREKFIYKPNKELVDY

SEQ ID NO: 148447 - protein, 297 aa, Unknown
  Bacterial polypetide isolated from the Sargasso Sea
KKNTNFIELCLNEELSEIITLQPLDRFKFDAAIIFSDILMIPFGMGQKVEFQKNFGPRLGEINKEEMFNLTETYFSDKLQPIYKLINNVKRNEKLKNKDVIGFVGAPWTLLVYMINKVSPKNGLSKFFFKDTSLIIDILEILDKFIKLHIKNQVEAGATIIQIFDSWAGLIENDFDKYLYKPTSSLVDYTKKLGVPVICFPRGISDYKAFCKVVKPSMVNIDYNVNLKNIISDIEIPIQGGLDPQILLTNKDMLNLEVNKYLEAFRDRPYVFNLGHGILPETKIEMVEELVKIVRNF

SEQ ID NO: 148448 - protein, 181 aa, Unknown
  Bacterial polypetide isolated from the Sargasso Sea
SSPKKGLTGAFFKDEFLINRLLGIIEKFLKVHIKNQIEAGAKVIQIFDSWAGLLEDKIPEYIYIPTLNIVEYTKQLGVPVICFPRGIKDYKNFCEIVKPDAVNIDYDVDPEKIVKEIKIPIQGGLNPKILLSDKETLKKEVERYLNIFKDHPYIFNLGHGILPETKIEMVEELIKIVRNYK

SEQ ID NO: 148449 - protein, 139 aa, Unknown
  Bacterial polypetide isolated from the Sargasso Sea
MTPIQESILNKSNKLVPIWIMRQAGRYLPEFREIRSKNPNFIKLCLNESLSSEITLQPIKRFDFDAAIIFSDILMLPYGLGQEVKFEKGLGPKLGKLDLDLIANVTKDEFTRKLKPIYNSISNIASNPLCKNKDTNWLC

SEQ ID NO: 148450 - protein, 140 aa, Unknown
  Bacterial polypetide isolated from the Sargasso Sea
MTKIRDCIINKETTYKPIWLMRQAGRYLPEFREIRKKNQNFINLCLNDKLSSEITLQPLRRFNFDAAIIFSDILMLPYGLGQSVEFKKNFGPLLGDLNLEKLSKVNESKFINKLNPIYKTISIVKKNEVLRNKDLIGFVG

SEQ ID NO: 148451 - protein, 269 aa, Unknown
  Bacterial polypetide isolated from the Sargasso Sea
NSDLASEITLQPIRRFGFDGAVIFSDILMLPYGLGQKVQFEKNFGPKLGEINLEKIKNVDEISFTEKVYKVYKAISKTSKDPLMKNRDMIGFVGAPWTILVYMINQSSPKKGLSSDFFKDDFLINRLLGIIEKFLKLHIKNQVEAGAQVIQIFDSWAGLLEDKIPEYIYIPTLNVVEYVKKLGVPVICFPRGIKDYKNFCEIVKPDAVNIDYDVDPKKIVNEIKIPIQGGLDPKILLTDKKSLKIEVEKYLDVFKDHPYIFNLGHGILP

SEQ ID NO: 148452 - protein, 274 aa, Unknown
  Bacterial polypetide isolated from the Sargasso Sea
MSPIEEVIINKKSNINPIWIMRQAGRYLPEFREIRKQNPDFIKLCLNQKLSSEITLQPLKRFDLDAAIIFSDILMLPYGLNQNVVFKKNMGPLLDELDLDKISSVEEVNFVKKLSPIYDLIKLVSSSEFTNNKTTIGFVGAPWTLLVYMINKKSPKLDLNQNFFENKLLIGEVLKILDKFLKIHVKNQINNGAQLIQIFDSWAGLLKEKDLPYYVYEPTLSLVNYIKSLNVPVICFPRGIKNYKDFCEFIKPDTICIDYEVDPVKINKEIKIPV

SEQ ID NO: 148453 - protein, 206 aa, Unknown
  Bacterial polypetide isolated from the Sargasso Sea
KFTDKKSTIGFVGAPWTILVYMLNKQSPKQHLKIHFFNDKPLIIKLLTLIEKFLKLHIKKQIENGADVIQIFDSWAGLVDKKDLSFYIYNPTLNLVNFTKSFNVPVICFPRGIKDYKKFCDSVKPDVISIDYNVDPKKICEAINIPVQGGLDPKVLLTDYDNLKKESSKYLDVFKDHPYIFNLGHGILPETKPSMVEDLVKIVKDY

SEQ ID NO: 148454 - protein, 123 aa, Unknown
  Bacterial polypetide isolated from the Sargasso Sea
MEKIKQVIENRDVKIKPIWLMRQAGRYLPEFRKIRSKNQNFIELCLNETLVPEITLQPLKRFDLDAAIIFSDILMLHYGLGQSVKFKKDFGSMLGDINEVDLKYVTEKDFIKNLEPCYKSMNN

SEQ ID NO: 148455 - protein, 270 aa, Unknown
  Bacterial polypetide isolated from the Sargasso Sea
DAAIIFSDILLVPFALGQSVKFKKDFGPLLGKIDFNKMSKTNEIQFIDKLKPVYNAIKKTKNKEELKNKDLIGFVGAPWTILIYMLNQKSPKNEDIDYKLKDGKFIDDLLKIIVRFLKVHINNQIENGATIIQIFDSWAGLLNKKDYEKYIYNPTKDLVSFVKSKNIPVICFPKGISDYENYVNLVKPDVISIDYEVDPKIISERIDITVQGGLNPNFLISDREELKTNVKKYLDIFKDKPYIFNLGHGVLPNTDPSMVDYLVKLVKNYS

SEQ ID NO: 148456 - protein, 274 aa, Unknown
  Bacterial polypetide isolated from the Sargasso Sea
AAKGLPVDRPPAWMMRQAGRYMKEYRDLAVKVPSFRERSENTDLIVEITLQPFRAFKPDGVILFSDILTPLPAIGIPFEIDDYKGPILDQPIRNAEGLKMMHDLDLDMLPFVGEALTTLRKEVGDEAAVLGFVGAPWTLATYIVEGGSSSTYKTIKSMTMTEPEVLRSILSKVADAVGDYVGYQIDAGAQCVQIFDSWGGQLPPHMWEQWSKPYIQQVVDKVRATHPGTPLTLYANGSGGLLERMATTGVDCIGLDWTIDMEDGRRRVGDKAVQ

SEQ ID NO: 148457 - protein, 180 aa, Unknown
  Bacterial polypetide isolated from the Sargasso Sea
SPKKNLSENFFDDPSLINSLLDLIVKFLKVHIKNQVEAGANVIQIFDSWAGLLDNKIEDLIYLPTTNLVEYTKKLGASVICFPRGIKDYKKFCYEVKPDMINIDYEVSPKKIIDEIDLPVQGGLDPKILLTEKENVEKEVKRYLLIFKDHPYVFNLGHGILPETKIDLVNVLINTVRNYK

SEQ ID NO: 148458 - protein, 73 aa, Unknown
  Bacterial polypetide isolated from the Sargasso Sea
YLVDNNVGIQGNMDPRILYYDLDKIEKYLQSCVEFGSNNNDWIFNLGHGFLPDIDYKKAQFVVEWIKKTNWNR

SEQ ID NO: 148459 - protein, 309 aa, Unknown
  Bacterial polypetide isolated from the Sargasso Sea
YLPEFREIRKKNQNFIELCLNSDLSSEITLQPLKRFNLDAAIIFSDILMLPFGLGQKIEFKKNYGPLLEDFNFKNIENLNEEKFTSKLLPIYKILNKVKSDKILKNKDLFGFVGAPWTLLVYMLNKQSPKKEIDSKIFNDKSVINDLLNLIEKYLKIHIKNQVENGASIIQIFDSWAGLVKTKELEKFIYKPTKSIVAFTKSLGVPVICFPRNIKDYKEYVDSVSPDGINIDYNIDPEIIAKDINIAIQGGIDPQFLLKEKDLLKEEILKYYKIFKNHSYIFNLGHGVLPETNPDNVKYFVKQLEHYKC

SEQ ID NO: 148460 - protein, 204 aa, Unknown
  Bacterial polypetide isolated from the Sargasso Sea
MSPLTNCIKNKDTKINPIWLMRQAGRYLPEFREIRKKNTDFIKLCLNSDLASEITLQPIKRFGFDGAVIFSDILMIPYGLGQKVEFEKNFGPKLGELELDNIKNVDEINFTEKVYKVYKAISKTSKDPLMNNKDMIGFVGAPWTILVYMINRSSPKKGLASEFFEDQFLINRLLQIIEKFLKVHIKNQVEAGAKVIQIFDSWAG

SEQ ID NO: 148461 - protein, 227 aa, Unknown
  Bacterial polypetide isolated from the Sargasso Sea
MNSDSSFLKALNKESLPTPPIWYMRQAGRYMPEYQNVRKKFKNFLDMCKEPDICCELALQPINAFELDAAILFSDILTIPDSFGLGVEFIEKEGPAFKNPINNSTDIKNLNHFDPESLDYVYMAVNNIKNSLPENIPLIGFCGSPWTLAAYSIEGRSSKNFQKTLSFLESNQKDVHDLLIKYTDACFLYLRKQVQSGADVIQIFDSWANLLTKEDLIKFSFNYINSL

SEQ ID NO: 148462 - protein, 248 aa, Unknown
  Bacterial polypetide isolated from the Sargasso Sea
MRQAGRYLPEFREIRKNNQDFIKLCLSPKLVEEITLQPTNRFDLDAAIIFSDILMIPYGLGQQVKFEKGKGPILGKLDINSTLNIKDDEFIKKMYPVYEAIRNVKRKVKNKSVIGFVGAPWTLLVYMLNQQSPKRDFNFKTVIKDNSIVIKLLKKIEETVCLHIDKQTQAGADIIQIFDSWAGLLPKDKLSQFCFAPNQKIMKHTNNKKIPTICFPRGIGKSYRDFCHSVKPDCINIDYDVDPNWAKA

SEQ ID NO: 148463 - protein, 131 aa, Unknown
  Bacterial polypetide isolated from the Sargasso Sea
MHQKYSTIQVKKIAKAVREKYPNIPIIYYSKNFQFLDKEANKYLNCLSLNSNISLKEQKKHFGGDICLQGNLDPYLLVEGGEYMVKEVTNILSEMENDFFIFNLGHGILPQTPVENVFKLVEIVKNFKKKV

SEQ ID NO: 148464 - protein, 257 aa, Unknown
  Bacterial polypetide isolated from the Sargasso Sea
MNTLIQDCINNKSSKTPIWLMRQAGRYLPEFRSIREKNQDFIKLCLNTKLSSQITIQPINRFDFDAAIIFSDILLVPHALGQQVKFKKNFGPDLNKFNLNILNDVKKEDFLKKLNPVYKTVQETKKKLSISNKDIIGFVGAPWTLLVYMLNRKSPKEGNFNVFPKDEYIDNILIKLDEFLKIHIEAQIKSGASIIQIFDSWAGLVSEKDLDYFVYKPIKSLVDFIRQKKIISICFPRNINSYEKFVDNVNPDIINID

SEQ ID NO: 148465 - protein, 228 aa, Unknown
  Bacterial polypetide isolated from the Sargasso Sea
MSPIQKCIKNKDTKINTIWLMRQAGRYLPEFREIRSKNPDFIKLCLNERLSSEITLQPLKRFNLDAAIIFSDILMLPYGLGQNVKFEKNFGPRLDKLNVDDISKVTDNQFTNKLGPVYKLIDISSKNNLLKKKDLFGFVGAPWTILVYMINQLSPKKELKKDFFNDQTLIEKLLTTIVKFLKLHIKNQINSGATIIQIFDSWAGLVEEKKLDLLIYKPTLDLVNFVKS

SEQ ID NO: 148466 - protein, 118 aa, Unknown
  Bacterial polypetide isolated from the Sargasso Sea
MGVLKDCLKNKKVSSTPVWFMRQAGRYLPEFRDIRSKNQNFIELCLNSNLSKEITLQPLKRFSLDAAIIFSDILLIPYALGQNLEVEKNFGPKLGNLDLEKVLSVTDKEILERLNPVY

SEQ ID NO: 148467 - protein, 219 aa, Unknown
  Bacterial polypetide isolated from the Sargasso Sea
MNTLIQDCIDNKFSRTPIWLMRQAGRYLPEFRSIREKNQDFIKLCLNTKLSSEITIQPITRFDFDAAIIFSDILLVPYALGQQVNFKKNFGPDLKKLDLKVLNNVKKKDFLKKLNPVYETVKETKKKLSISNKDTIGFVGAPWTLLLYMLNRKSPKKGSFSVFPKDEYINKILMKLDEFLKIHIEAQIKSGASIIQIFDSWAGLLPEKDLEYYVYKPIK

SEQ ID NO: 148468 - protein, 126 aa, Unknown
  Bacterial polypetide isolated from the Sargasso Sea
SLKPIKKIVSEIKKKHPNIPFIVFPRSVNTTYSNFSNQECFDVLAVDQFLDRKWIAENIQPKKIIQGNLDPLFLTQKKDTLIKELKKVTEDFKTYPYVFNLGHGITPDAKVENVELVVNYIKGIKF

SEQ ID NO: 148469 - protein, 192 aa, Unknown
  Bacterial polypetide isolated from the Sargasso Sea
MSPLQKCIFNKDKSIKPIWLMRQAGRYLPEFRKIRQKNKNFVSLCLNKKLVPKITLQPIKRFNFDAAIIFSDILMVPYGLGQKLKFTKGYGPELGDFNKDLIFSNNKNDFKNKLNPIYESIKITSNNNLLKNKDLIGFVGAPWTLLVYIINKKSPKKNIKNNFFLKANNLDGILDLLIEFLKIHIINQVKSG

SEQ ID NO: 148470 - protein, 138 aa, Unknown
  Bacterial polypetide isolated from the Sargasso Sea
MTPIKECLINKSTKINPVWLMRQAGRYLPEFKKIRKANPDFIKLCLDHILAEEITLQPIKRFGFDAAIIFSDILMIPHGMGQTVEFKKNFGPSLGALELNKLASVSKKDLTEKLSPVYQLLSNLKNSNDLKTKIYLVS

SEQ ID NO: 148471 - protein, 148 aa, Unknown
  Bacterial polypetide isolated from the Sargasso Sea
MTPIQRCIVEKKSNLNPIWLMRQAGRYLPEFREIRSRNQDFIKLCLSENLASEITLQPLERFNFDAAIIFSDILMLPYGLNQKVEFEKNFGPRLGNLNLDDLKNIDEVDFSFKLNSVYKAINITSNKINKDEKDLIGFVGAPWTILKK

SEQ ID NO: 148472 - protein, 242 aa, Unknown
  Bacterial polypetide isolated from the Sargasso Sea
MDQIIINKDTSFNPIWIMRQAGRYLPEFREIRKENPNFINLCLNDDLSSKITLQPLKRFSLDAAIIFSDILMLPYGLGQKVEFEKNFGPKLGELNLNEVAKIDEIDFVEKIHRVYKTIKRVSSDPSLNDKNTIGFVGAPWTLLVYMINQQSPKKNLKKDFFKDEFLINRILLIIEKFLKVHIKNQIDNGANVIQIFDSWAGLLDEKDLPNYVYSPTLNLVNYVKSLNVPVICFPREVKNYKE

SEQ ID NO: 148473 - protein, 261 aa, Unknown
  Bacterial polypetide isolated from the Sargasso Sea
FDFDAAIIFSDILMLPYGLGQDVKFEKNFGPKLNPMKIEEMIKVTEKEFVDKLNPIYKLINITSKNNLLHNKDLFGFVGAPWTVLVYMINQISPKKDLKKDFYNDKSLINNLMNLILKFLKIHIKKQIESGASIIQIFDSWAGLVEEKNLEYFIYKPTLELVNFIKSLNVPVVCFPREIKDYKKFVNVVKPDVVNIDYSVDPKSILKDIKIPIQGGLDPKVLLTQKENIKKKVEEYLNIFKDHPYIFNLGHGILPDTNPEI

SEQ ID NO: 148474 - protein, 235 aa, Unknown
  Bacterial polypetide isolated from the Sargasso Sea
MSLFLKCISGQPIERPPVWFMRQAGRYLTEYRNTRKRAGSFLNLCYNSDLATEVTLQPIDRFGFDAAILFADILLILDALGVKVQFVEGQGPLLDPIKNKRDIEKISNIELIHEKLFPVYETVRKLKRQLPSFIPLIGFAGAPWTLATYLINGKGEHGSLTAKRFSIENNEEFEEIMKLITNATIEYLLMQIKAGADVIKIFDSWAGALNADMVLRYSLNPIRKIVREIKSKHPE

SEQ ID NO: 148475 - protein, 225 aa, Unknown
  Bacterial polypetide isolated from the Sargasso Sea
MRQAGRYLPEFREIRKKNPNFIDLCLNEDLSSEITLQPLKRFDFDAAIIFSDILMLPYGLGQKVEFEKNFGPRLGELNLNEIAKTDEIDFVEKIYRVYRAIKKVSSDINLKNKNTIGFIGAPWTLLVYMINQQSPKKNLKKDFFKDEFLINRILLIIEKFLKVHIKNQIDNGANVIQIFDSWAGLLEEKDLPNYVYAPTLNLVNYVKSLNVPVICFPREIKNYKE

SEQ ID NO: 148476 - protein, 271 aa, Unknown
  Bacterial polypetide isolated from the Sargasso Sea
MDMFLDPSTILEVSLQPVSRYGMDACIVFSDILITPFAAGSSVSFIDGQGPVIKFNENMSYNLEKTLPLAIGIKKIKENTDVPLIGFAGGVWTTLFYCLYEKIERQKLKPEDITKKTSQIDNLIEQMTRAIIQHAEMQIDCGVDAFQIFESAAEHLDDEQFNKWCIQPTNKIIESIKKIKDIPIIGFPRNTNLACYKKYSNIDKLDCITLDYNFPLDKINELNDKIVFQGNLDPKHLLKDSQNLSQKIEEILFAFRERPHIFNLGHGVLPE

SEQ ID NO: 148477 - protein, 216 aa, Unknown
  Bacterial polypetide isolated from the Sargasso Sea
AIQKTRKKLDKNKSLIAFVGAPWTLLIYLLGLKKNNRLDKKLLQSKEDEIKKIFLKLDEFLKYHIFAQKEAGADIIQIFDSWAGLIDKEKLRDYCISPNKSLVEFCKKKEIPVICFPKGLKEDYKSFVDIVKPNCISIDYEVDPKWAKENLKDICIQGGMDPHLLLKNEKEALEEVDKYLNIFENNSYIFNLGHGILPQTDPEIIRRIVNKIRKKK

SEQ ID NO: 148478 - protein, 260 aa, Unknown
  Bacterial polypetide isolated from the Sargasso Sea
RKKFKNFLDMCKDADVCCELALQPLNAFKLDAAILFSDILTIPDAMGIEVTFEENKGPIFKNPIESVDDINKIKPFNPDELSYVYQAVTNIKNAIPGNIPLIGFCGSPWTLAAYSIEGKSSQEFNKTMNFISNNKDETHLFLTKLTDACFLYLRKQVQAGADIIQIFDSWANLLNKEDLEIFSINYIKSLIYALKQDPVTSDIPIILFSRNPKCDDNTLIETSADCISLYWSMENFNLDHAKGKIAIQGNLNPKILLESK

SEQ ID NO: 148479 - protein, 252 aa, Unknown
  Bacterial polypetide isolated from the Sargasso Sea
QEVKFEKGLGPKLGKLDLDLISNVNKDEFSRKLNPVYKSILNISSNPICKNKDIIGFVGAPWTILVYMVNKMSPKKNLSKEIFNDKLFINKLLFIIEKFLKIHIENQIKAGASIIQIFDSWAGLLEDNISEFIYKPTLNLVNHVKKLDIPVICFPRGIKDYKNFCEVVKPDSINIDYSVDPKKIIKDIKIPIQGGLDPKTLLTDKENLRKEVTKYLQIFKEHPYVFNLGHGILPETKIEMVEELVKIVRDFK

SEQ ID NO: 148480 - protein, 196 aa, Unknown
  Bacterial polypetide isolated from the Sargasso Sea
VGAPWTLLVYMINQQSPKKNLKKNFFKDEFIINRILLIIEKFLKVHIKNQIDSGADIIQIFDSWAGLLEEKDLPNYVYTPTLNLVNYVKSLNVPVICFPREIKNYKEFCDIVKPDAVSIDYNVDLKKILRDVKIPIQGGLDPKILLTDNENLKKEASNYLEIFKDHPYIFNLGHGILPETNPEMVKNLIKIVKDFK

SEQ ID NO: 148481 - protein, 159 aa, Unknown
  Bacterial polypetide isolated from the Sargasso Sea
MNETTPLLLRAARGESVERPPVWMMRQAGRYMKVYRDLRDNHPSFRERSENPDLSYEISMQPFKAFQPDGVILFSDILTPLPGMGINFDIVESKGPLINDPIRTLKQVKDLNPLQPEQSMSFVGEVLGRLRESVGNKAAVLGFVGAPMDSCCICCRGEK

SEQ ID NO: 148482 - protein, 261 aa, Unknown
  Bacterial polypetide isolated from the Sargasso Sea
KLKNKYDFFTRCRTPELVSEITLLPIDQIGTDAAIIFSDILVVLQAMNIEVEMKPNFGPFIPNPIDSKEKVKNLITPNVRDKLGYVFEAIKITKRDLNDRVPLIGFAGSPWTLFCYLVQGSGSKTFDKSKGFAFANPKETEIILEKITLTTIEYLKGQIDAGADVVQIFDSWGGLLSPSDYSEFSLKYINRIVSAIKNYAPVIIFGKGCWFALNEMVKTGASGLGIDWSCSARNARYLSGGNITLQGNYDPAKLLSPIQKS

SEQ ID NO: 148483 - protein, 120 aa, Unknown
  Bacterial polypetide isolated from the Sargasso Sea
MRQAGRYLPEYRKIRQNSTFLDMVYNPEIACEITMQPIRRFGFDAAILFSDILVTPQALGMELTFTSGIGPQFPTPIRSQQDVDNFVDNFDCLNPIYETIRMLRKELPDTTTLIWLCRGA

SEQ ID NO: 148484 - protein, 262 aa, Unknown
  Bacterial polypetide isolated from the Sargasso Sea
MNPITNCIKNKDTTFNPIWLMRQAGRYLPEFREIRKENQDFIKLCLNNDLASEITLQPIRRFGFDGAVIFSDILMLPYGLGQKVEFEKNFGPKLGDIDLETIKSIDEISFTEKIYKVYKAIEKTSKDPLMTNRDMIGFVGAPWTILVYMINKSSPKKGLSDKFFKDDFLINRLLVVIEKFLKLHIKNQIEAGAQVIQIFDSWAGLLEEKIPEYIYIPTLNIVEYVKKLGVPVICFPRGIKDYKNFCEIVKPDAVNIDYDVDP

SEQ ID NO: 148485 - protein, 167 aa, Unknown
  Bacterial polypetide isolated from the Sargasso Sea
FLNILTSACFLYLKEQIISGADAVQIFDSWANLLKGEAYDQFSLNYIKKLLSMLKKDPITKNTPIILFARDPSCDLNNFLIPELDCLSLFTSADINDAMNTFNGKMAIQGNLNPKILLESDAILVDAVKQLSDSFQDYPGYIFNLGHGITPDINPEKVAVMLDALRS

SEQ ID NO: 148486 - protein, 102 aa, Unknown
  Bacterial polypetide isolated from the Sargasso Sea
GGQWLSRISQIGCDALGCDWTTSLREARRLVQDRVALQGNLDPAVLNASPEKIRSPVRDVLEDYGTGPGHVFNLGHGITPGIDPENVKVLVDSVHELSRTPI

SEQ ID NO: 148487 - protein, 256 aa, Unknown
  Bacterial polypetide isolated from the Sargasso Sea
MDLVKKLNLKKILGPKLGDINLEKIKNIDEVNFTEKVYKVYKAISKTSKDPLMHNRDMIGFVGAPWTILVYMINKSSPKKGLSSDFFKDDFLINRLLGIIERFLKLHIKNQVEAGAKVIQIFDSWAGLLEEKIPEYIYIPTLNIVEYVKKLGVPVICFPRGIKDYKNFCEIVKPDAVNIDYDVNPKKIVNEIRIPIQGGLDPKLLLTDQKTLKIEVEKYLNIFKDHPYIFNLGHGILPETKVEMVEELIKIVRNFK

SEQ ID NO: 148488 - protein, 239 aa, Unknown
  Bacterial polypetide isolated from the Sargasso Sea
MSTESLYLNAAKCKKTERPPIWMMRQAGRYLPEYRELRKKYSFMEMMHTPELAAEVTIQPITRFGMDAAIMFSDILITAQALGSDLDFVEGKGPVLSNPITSEESFNTLLKKKDVSIFSSVETEIKILKKELGNTALIGFAGAPFTVASYMIEGGSSKDLKKTKQCMLNNPTLFNSIISELESITIDYLNKQIAAGVDALQLFDSWTNTLSWNDFNEISSKPLQRIIQSLDNPKNIPIT

SEQ ID NO: 148489 - protein, 114 aa, Unknown
  Bacterial polypetide isolated from the Sargasso Sea
MPVTRCESGDVVPLMVRAARNEKVERAPAWMMRQAGRYMKEYRDVAVKHPGFRERSETTDLICEITLQPFRAFQPDGVILFSDILTPFPAFGIDFEIDDYKGPMLEKTIRSAED

SEQ ID NO: 148490 - protein, 277 aa, Unknown
  Bacterial polypetide isolated from the Sargasso Sea
QPIKRFGFDGAVIFSDILMLPYGLGQKVEFEKNFGPKLGEIELENIKNVDEINFTEKIYKVYKAISKTSQDPLMDNKDMIGFVGAPWTILVYMINRSSPKKGLTDGFFKDEFLINRLLGIIEKFLKVHIKNQVEAGAKVIQIFDSWAGLLDDKIPEYIYIPTLNIVEYVKQLGVPVICFPRGIKDYKNFCEIVKPDAINIDYNVDPEKIIKEIKIPIQGGLDPKILLTDKEILKKEVEKYLHIFKDHPYIFNLGHGILPETKIEMVEDLIKIVRNFK

SEQ ID NO: 148491 - protein, 227 aa, Unknown
  Bacterial polypetide isolated from the Sargasso Sea
MDNIFLNTLNGKLEERPPVWFMRQAGRILPSYRRLKEAHKFYDMMKDAQLTSKVTMLPIDDLGVDAAILFSDILVIPDALGLDLVFTDNGPKFVNAIEEGIRPNLNFNPEKLEYIYNNIRQTVKDKQKTPLIGFCGGPLTTFLFMFRGNQNQKSFKNAVKYFYKNRKESIKIIEQITQASIEYVENQIKSGIQCFQLFETYCGSIPYDLYTELILPYSKKILNSAKK

SEQ ID NO: 148492 - protein, 265 aa, Unknown
  Bacterial polypetide isolated from the Sargasso Sea
IFSDILMVPYGLGQKVEFEKNFGPKLGELNLENIYKKDDNSFTKELDKVYKTISKTSTNPLMKNKDMIGFVGAPWTILVYMVNRSSPKNGLKNNFFNDKSLLNKLLEIIVKFLKLHIKNQVDAGAEVIQIFDSWAGLLEDNMSDYIYMPTFNIVEYVKELGIPVICFPRGIKNYKIFCDTVKPDAVNIDYDVDPRKIVKEINIPIQGGLDPKILLTDKVNLKNSVQTYLNIFKDHPYIFNLGHGILPETKIELVENLIEIVRDFK

SEQ ID NO: 148493 - protein, 226 aa, Unknown
  Bacterial polypetide isolated from the Sargasso Sea
TYETVRLCRDKLSPDKALIGFAGSPWTVATYMIEGGASKNYAKVKSWAYKDEQSFNTLINIITTATIDHLSAQIDNGADAVKLFDSWAGVLSPSQFAKWVVKPTRDIVEAIKWKHPTVKVIGFPKGAGHQYIDYVNKTGVDAVAIDTSIDLSWAAKELDERVVIQGNMDPISLIVGGEPMLYQASSIVTDMKDRPHIFNLGHGVLPETPPENVEALAIFLRNLGEG

SEQ ID NO: 148494 - protein, 167 aa, Unknown
  Bacterial polypetide isolated from the Sargasso Sea
KLFIKKLLSLIEKFLKIHIENQIKSGATIIQIFDSWAGLLEDNISKFIYEPTLNLVNHVKKLDVPVICFPRGIKDYKNFCEAVKPDMVNIDYNVDPKKIINEIQIPVQGGLDPKVLLTDKENLHIEVIKYLQIFKDHPYVFNLGHGILPETKIEMVEELVKTVRDFK

SEQ ID NO: 148495 - protein, 101 aa, Unknown
  Bacterial polypetide isolated from the Sargasso Sea
MTPIINCIVNMDTRSNPIWLMRQAGRYLPEFREIRKNNQDFIKLCLNENLSSEITLQPIKRFDFDAAIIFSDILMIPFAINQDVKFEKGFGPQLGKLNIDA

SEQ ID NO: 148496 - protein, 84 aa, Unknown
  Bacterial polypetide isolated from the Sargasso Sea
YGMFTSIDPSSAISVFEGTHALQGNLDPKILLEEDSVIKESALKMLSEFKDFPGYIFNLGHGITPDINPDKVKVLLEAIRESES

SEQ ID NO: 148497 - protein, 287 aa, Unknown
  Bacterial polypetide isolated from the Sargasso Sea
NENLSSEITLQPIKRFDFDAAIIFSDILMLPYGLGQEVKFEKGLGPKLGELDLDLIANVNKDEFSKKLNPIYKSISNISSNSICKNKDIIGFVGAPWTILVYMINKMSPKKSLSKEIFNDKLFVKELLSVIEKFLKIHIENQIKAGATLIQIFDSWAGLLEDNISKFIYEPTLNLVNHVKKFDVPVICFPRGVKDYKIFCEIVKPDMVNIDYNIDPKKIINEIQIPVQGGLDPKILLTDKENLNTEAIKYLQIFKDHPYVFNLGHGILPETKIEMVQELVKTVRDFK

SEQ ID NO: 148498 - protein, 216 aa, Unknown
  Bacterial polypetide isolated from the Sargasso Sea
MRQAGRYLPEFREIRKKNTDFIKLCLNSNLSAEITLQPLKRFDLDAAIIFSDILTLPYGLKQKVEFKKNIGPILGDLNIDQAFEVTESDFIERLDPVYKAINLVRNNNLTDNKSTIGFVGAPWTLLVYILNKQSPKIKLKENFFKDFSIIEKTLKIIDKFLKVHIKNQIDSGAEIIQIFDSWAGLLEDKDYDFYIFNPTCSLVEFTKSLNVPVICF

SEQ ID NO: 148499 - protein, 208 aa, Unknown
  Bacterial polypetide isolated from the Sargasso Sea
MRQAGRYLPEFREIRKENPNFINLCLNEDLSSEITLQPLRRFDFDAAIIFSDILMLPYGLGQKVEFEKNFGPRLGELNLNEITKIDEIDFVEKIHRVYRAIKKVSSEINLKNKNTIGFIGAPWTLLVYMINQQSPKKNLKKDFFKDEFLINRILLIIEKFLKVHIKNQIDNGANIIQIFDSWSGLLEEKDLPNYVYAPTLNLVNYVKS

SEQ ID NO: 148500 - protein, 302 aa, Unknown
  Bacterial polypetide isolated from the Sargasso Sea
EFREIRKKNQDFIKLCLNNDLASEITLQPIRRFGFDGAVIFSDILMLPYGLGQKVEFEKNFGPKLGDIDLETIKNVDEISFTEKIYKVYKAIEKTSKDPLMSNRDMIGFVGAPWTILVYMINKSSPKKGLSGEFFKDDFLINRLLGIIEKFLKLHIKNQIEAGAQVIQIFDSWAGLLEDKIPEYIYVPTLNIVDYVKKLGVPVICFPRGIKDYKNFCEIVKPDAVNIDYDVDPKKIINEIKIPIQGGLDPKILLTDQKTLKIEVEKYLGFFKDHPYIFNLGHGILPETKIEMVEELIKIVRN

SEQ ID NO: 148501 - protein, 179 aa, Unknown
  Bacterial polypetide isolated from the Sargasso Sea
MSDSLPLLLRAARGESVERPPVWMMRQAGRYMKVYRDLRDRHPSFRERSENPDLSYEISMQPFEAFQPDGVILFSDILTPLPGMGIDFDIVESKGPQINDPIRNLSQVEALKPLIPGESMPFVGEVLGRLRESVGNRAAVLGFVGAPWTLAAYVVEGKSSKNYAVIKAMAFQEPALLHR

SEQ ID NO: 148502 - protein, 199 aa, Unknown
  Bacterial polypetide isolated from the Sargasso Sea
MIGFVGAPWTILVYMINCSSPKNGLNKNFFNDELLIKETMKIIEKFLKLHIKNQVDAGANIIQIFDSWAGLIDSKIDDYILNPTFNLVEYTKKLGVPVICFPRGIKNYKNFCDIVKPDAVNIDYDVDPINIVKEIQIPVQGGLDPKILLSDRENLTKSVKHYLNIFKDHPYIFNLGHGILPETKIEMVEVMVKTVREFK

SEQ ID NO: 148503 - protein, 141 aa, Unknown
  Bacterial polypetide isolated from the Sargasso Sea
NVIQIFDSWAGLLEEKDLPNYVYSPTLNLVDYVKSLNVPVICFPREIKNYKKFCEIVKPDAISIDYNVDPKNILRDIKIPIQGGLDPKILLTDKEILKKEASKYLEIFQDHPYIFNLGHGILPETNPEMVESLIKIVKDFK

SEQ ID NO: 148504 - protein, 307 aa, Unknown
  Bacterial polypetide isolated from the Sargasso Sea
MGILKDCIENKEINSIPVWFMRQAGRYLPEFREIRKNNTNFIDLCLNSALSKEITLQPLKRFPLDAAIIFSDILLIPYALGQKVEFEKNFGPKLNKLDLDNLFNITDKEIISKLKPVYELIKITSKDDALNNKDLIGFIGATWTLLVYMINGQSPKKNIDQNIYKISIHKELIKKIIHAQKLHIKNQIDSGASVIQIFDSWAGLLNKDKYEDYIYKPTKELVEYTNSLGVNVICFPRNIDSYKKYCDIVKPNAISIDYKTDPTKIADNIEIPIQGGMDPKCLLVDKNEMLENARSYLDIFKKYKYIF

SEQ ID NO: 148505 - protein, 223 aa, Unknown
  Bacterial polypetide isolated from the Sargasso Sea
MNDTLRKCIKEKKTTYTPIWFMRQAGRYLPEFREIRKNNQDFIKLCLNPDLVSEITLQPLKRFDLDAAIIFSDILMVPYGLGQKVEFKKGFGPVLEEINLDKIINTDPRDFVQKLLPVYKGIEKVKKTLKKKELIGFVGAPWTLLLYMLNKESPKNNFNFNKINKDKFLINKLLKKIEEMICLHIDKQVDAGANIIQIFDSWAGLLPEKELPNYCYIPTLKIV

SEQ ID NO: 148506 - protein, 223 aa, Unknown
  Bacterial polypetide isolated from the Sargasso Sea
MDKVFLKACRGEATPYTPIWLNRQAGRYMPEYHVVKGKMTSLEFFKNPEKAAIATLDAQRILNTDAAIMFADLLPIMEPMGLELDYVEKVGPVFSNPVRSQKDVEKLRVVEAEVGTPYIEHTVKNILSELPKEIALIGFAGAPFTLASYAIEGGSSRNYIFVKKMMYQKPELWDLLISKLVDQVSSYLNLQISAGVEAVQLFDTWVGNLSRQDFKQFVRPHLK

SEQ ID NO: 148507 - protein, 85 aa, Unknown
  Bacterial polypetide isolated from the Sargasso Sea
MNKLKDCIVNKNTSNTPVWFMRQAGRYLPEFQKIRKENPDFIKLCLNSDLVKEITIQPLDRFDLDAAIIFSDILIIPYGLGQKVE

SEQ ID NO: 148508 - protein, 142 aa, Unknown
  Bacterial polypetide isolated from the Sargasso Sea
IFDSWADLLDASQLGKFSFTYTQKLIDLLKHDEITKDIPLIVFEKNPILPFSDNPFKNIQCLSLHFTENLKDSRDKLLNKYAIQGNLDPRILLLGENEIITEVRKICNTMKDYPGYIFNLGHGITPDIDPENIKLMIEAIRD

SEQ ID NO: 148509 - protein, 271 aa, Unknown
  Bacterial polypetide isolated from the Sargasso Sea
MRQAGRYLPEFRKIRSKNSNFINLCLDVDLSSEITIQPIKRFDLDAAIIFSDILLVPYAMNQEVKFKEDIGPVLSDFSLKKFNLIKTSDFKEKLSPVYKSLTKTRKNLNSEKSLIAFSGAPWTLLVYMLNLKSSENRLNETFFSKKKLLNQTINKLTEFICLHLDNQINAGADIIQIFDSWAGLIPYESLDEYCIKPNMKIVNYFKKKGVPVICFPKGLKNNYKKFNDVVSPDGLNIDYEIDPIWARENLFNTCLQGGMHPEILLGDEKVI

SEQ ID NO: 148510 - protein, 239 aa, Unknown
  Bacterial polypetide isolated from the Sargasso Sea
FNINKFIGTKKEDFIFKLNPVYEAIKKTKKKLKKEVSLISFIGAPWTLIIYLLNLKKGGLLNKTKFNDKKEIINSIFKKLMEFLKIHILYQKEAGADILQIFDSWAGLIPRKSLKEYCYDPNKELVDFCKEIKIPSICFPKGLQKNYIDFNRIVKPNAINIDQDIDPEWAKKNLKKVIIQGGMSPKILLNEENEVMKEVDKFLKIFKDSPYIFNLGHGILPNTNPEIINKIIERVKIVK

SEQ ID NO: 148511 - protein, 221 aa, Unknown
  Bacterial polypetide isolated from the Sargasso Sea
MTPIQKCIIEKKINLNPMWLMRQAGRYLPEFREIRSKNQDFVKLCLSENLASEITLQPLERFNFDAAIIFSDILMLPYGLNQKVEFEKNFGPKLGNLNLDDLKNIDEVDFSFKLNSVYKAIKITSSKINKKEKDLIGFVGAPWTILVYMINKISPKKKLKEDFFKDEFLINRLLSIIDKFLKIHIKNQVEAGATIIQIFDSWAGLLESNIPEYIYIPTLSL

SEQ ID NO: 148512 - protein, 151 aa, Unknown
  Bacterial polypetide isolated from the Sargasso Sea
MTPIKECLINKSTKINPIWLMRQAGRYLPEFREIRKKNPNFIELCLNPHLSEEITLQPIKRFNFDAAIIFSDILMVPYGMGQSVEFKKNLGPNLGNFRMTDIQKTTENDFKNNLLPIYKLLSNLKKSKDLNNKDLIGFVGAPWTLLVYMFE

SEQ ID NO: 148513 - protein, 242 aa, Unknown
  Bacterial polypetide isolated from the Sargasso Sea
MDSVKNVEFKKNFGPNLEDLEIDKLLEIDEENFTKNLSPIYQLLIDLKKSEDLKNKDIIGFVGAPWTLLVYMINKVSPKNGLINNFFSDTSLINNLLKILDKFTKTHIKNQVKAGATIIQIFDSWSGLIKSDFDKYLYNPTLSLVNYTKSLGVPVICFPRGIRDYSQFCKIVEPSMVNIDYDVDPKNLLKNIDIPIQGGLHPEVLLTNKAHLKKEVNKYLEIFKDHPYVFNLGHGILPETKN

SEQ ID NO: 148514 - protein, 153 aa, Unknown
  Bacterial polypetide isolated from the Sargasso Sea
VSGVDAIQIFDSWAFLLSEEQYLEYSLKYIKKILKKLSEDPITSKTPTIVFARDPECNLNEFKLDNLSCFGMFTSIDPSSAISVFEGTHALQGNLNPKILLEEDSVIKESALKMLSEFKDFPGYIFNLGHGITPDINPDKVKVLVEAIRESGS

SEQ ID NO: 148515 - protein, 110 aa, Unknown
  Bacterial polypetide isolated from the Sargasso Sea
IILFTKNGGQWLSQIADAGAHAIGLDWTIEIGAAKKLVGTKCALQGNMDPSILFSSPKTIREEVGRILSDFGKQNGHVFNLGHGIAPGVNPDHVKVFVDSVHEISAQYHI

SEQ ID NO: 148516 - protein, 206 aa, Unknown
  Bacterial polypetide isolated from the Sargasso Sea
SAALGKKVNRPPVWMMRQAGRYMKIYRDLRERYPSFRERSENPELSYEISMQPFHAFKPDGVILFSDILTPLPGMGINFEIIESKGPIIEDPIRTLSQIENLKELNPSESLSFVGQVLSSLKKDVNNEATVLGFVGAPWTLAAYVVEGKSSKNYSLIKSMAFKEPDLLHKLLDHFAKSIGEYLKYQIKSGAQVVQKFDSWAGQLSP

SEQ ID NO: 148517 - protein, 257 aa, Unknown
  Bacterial polypetide isolated from the Sargasso Sea
MSKDRLILRTIRREPTERRPLWIMRQAGRYLPEYRKLRETYSFKALSQSPELSTEVTLLPLERYPLDAAIVFADIMSPLPALGIEFDFDPGPVVANPIRNQKDVDLLIPPDPEKLASEVITTLHQTRSAISEDIALLGFCGAPWTLAAYLVEGRGVKDFPTLRAFAAAQPDALDSLLKKLSDAMATYLINQASAGADAVQIFDSWAGILSLHDWERLIRPHLHSLLQKVGDAGIPRILFLQNAPHLVDAYASLSCRG

SEQ ID NO: 148518 - protein, 295 aa, Unknown
  Bacterial polypetide isolated from the Sargasso Sea
EKKNQNFISLCLNTKLVLEITLQPIKRFDLDAAIIFSDILMIPYGFGQNVVFNKGLGPELGIIDKSNLSNINEKDFKRKLNPIYNSIKITSRNEILKNKDFIGFVGAPWTLLVYIINRASPKKNLKKNFFADKSFIDELLKLLIKYIKIHILNQIKSGATIIQIFDSWAGLLEEEDLEKYIYAPTKEVVDFIRTLNVPSICFPRNIKNYKKFVNMVNPDVISIDYNVDPEKISEEIDIPVQGGLNPEKLLEDKATLKQEVKKYLKVFKNHPYIFNLGHGVLPETNPNMGRIFNKV

SEQ ID NO: 148519 - protein, 269 aa, Unknown
  Bacterial polypetide isolated from the Sargasso Sea
MRQAGRYLPEFREIRKKNTDFIKLCLNEELSSEITLQPLRRFNFDAAIIFSDILMLPYGLNQKVEFKKNFGPLLGDLNLNEIFKLNEDNFIKKLSSVYKAINLVSKNELTKNKSIIGFVGAPWTLLVYMINKQSPKLKLKNDFFKDNVLIEKVLNILEKFLKIHIKNQINNGAQIIQIFDSWAGLLKDADLTKYIYNPTFSLVEFTKSLNVPVICFPRGIKNYKNYCEIVKPDAICIDYEIDPLQIKKDIKIPVQGGMDPKILLTNKEN

SEQ ID NO: 148520 - protein, 331 aa, Unknown
  Bacterial polypetide isolated from the Sargasso Sea
LENILKKRLSCKSVWFMRQAGRYLPEFQEIREKNKNFIDLCFNSKLSSEITLQPISRFNLDSAIIFSDILLVPYALGQKVSFIENLGPELTKLNINKFLQISESNFYKVLKPVYKAIEITRKKLEREKSLISFVGAPWTLLVYMLDLKKGKKEIDTSKLESSDIKIDAILDKLTNFLCLHIKNQIDAGANVVQIFDSWAGFIPEKKINEYCFAPNKKIVEFCKKEKIPNICFPKGLQKKYLEFNNIVQPDGINIDYEIEPLWAKENLKNVVIQGGLHPEALLKTEEEMFKEATRYIQVFKDTPYVFNLGHGLLPETDPDRVKRLIKFYRNF

SEQ ID NO: 148521 - protein, 315 aa, Unknown
  Bacterial polypetide isolated from the Sargasso Sea
MRQAGRYLPEFRKIRSQNQNFINLCLDSELSSEITLQPITRFDLDSAIIFSDILIVPYALNQKVEFLKNQGPLLEEFNFKKFLKNDTNSFTQKLQPVYKAIQKTREKLDKKKSLIGFVGAPWTLLIYMLGAKESKKEINYSKIKIKESEINLILDKLHDYLCAHIESQINAGADVIQIFDSWAGLILPDDLSNYCYTPNLKIVEFCKEKRIPVICFPRGINKNYKEFNSVVKPDGINLDYDVDPYWAKQNLLNVVLQGGLDPKILLLDENEIFDATKKYLDIFKDLPYIFNLGHGLLPETDPNKVSKLVKFYREY

SEQ ID NO: 148522 - protein, 324 aa, Unknown
  Bacterial polypetide isolated from the Sargasso Sea
MTPIEEIIINKKTSLNPIWIMRQAGRYLSEFREIRKSNPDFIKLCLNSKLAAEITLQPLKRFNLDAAIIFSDILILPYGCNQKVEFKKNFGPMLGDLNLDDLSKVTESDFTSKISPVYEAINLVKNDKLTENKSTIGFVGAPWTLLVYMINKQSPKLSLNNDFFKDKALIQQTLKIIEKFLMVHIKNQINNGAEIIQIFDSWAGLLSDKDLDFYVYNPTYSLVSFVKSLKIPVICFPRNIKNYKKYCEIVKPDVICIDYNVDPLGIEKEISIPVQGGMDPKILLTDKENLKKEAEKYLDIFKNHPYIFNLGHGVLPETDPNLMD

SEQ ID NO: 148523 - protein, 313 aa, Unknown
  Bacterial polypetide isolated from the Sargasso Sea
MRQAGRYLPEFRDIRKSNPNFIKLCLNSKLSIEITLQPLKRFDLDAAIIFSDILMLPYGLNQKVEFKKNFGPSLGDLNLEDISNTDEKNFTEKLSPVYKAINLVKKNDLTKNKSTIGFVGAPWTLLVYMINKQSPKLNLSNDFYKDSFLIKKILNVLDKFLKIHIKNQIDNGAEIIQIFDSWAGLLEEKDLPNYVYTPTLNLVSYVKSLNVPVICFPREIKNYKEFCDIVKPDVVSIDYNVDPKKILKNIKIPIQGGLDPKILLTDKETLKKEASKYLNIFKDHPYIFNLGHGVLPETKPEMVEYLVNVVKNY

SEQ ID NO: 148524 - protein, 97 aa, Unknown
  Bacterial polypetide isolated from the Sargasso Sea
MNTLIQDCINNKSSKTPIWLMRQAGRYLPEFRSIREKNQDFIKLCLNTKLSSEITIQPIDRFDFDAAIIFSDILLVPYALGQQVKFKKNFGPDLKEG

SEQ ID NO: 148525 - protein, 290 aa, Unknown
  Bacterial polypetide isolated from the Sargasso Sea
MSEFNRNFIAALNRKTQKTPPIWIMRQAGRYLPEYRKVRSNFRNFLDMCKTPEICCELVLQPIERYDFDAAIIFSDILTIPDALGLGVSFVEGKGPIFSNPIKRPEDISNMANFNPDSLDYVYKTAELTRKELNPSIPLIGFAGSPWTLAAYSIEGSSSKNFDLTKSFIENHSDDAHKFLDILADACFEYLKRQIISGVDAIQIFDSWANLLSEEQYLEYSLKYIKKILKKLSEDPITSKTPTIVFARDPKCNLNEFKLDDLSCYGMFTSIDPSSATSVFEGTHALQGNL

SEQ ID NO: 148526 - protein, 124 aa, Unknown
  Bacterial polypetide isolated from the Sargasso Sea
GPYQKKVVDIVKAEYPETPVILYISGSAGVIERMAKTGVDIISLDWTVDIEEACKRIPSGIGIQGNVDPGILFGNKESIKERIDNTFNKIKDRKYILNLGHGILPGTPEENAQTFFEHGKKLTY

SEQ ID NO: 148527 - protein, 313 aa, Unknown
  Bacterial polypetide isolated from the Sargasso Sea
MNADPDSPEKKEPAAGSVEDSLFMRACRLEPVSRPPVWLMRQAGRYLPEYQAIRNKVTFLELCKNPELSAEVMLATVDRLGVDAAIIFSDLLPLLQPMGLDLEFATGEGPVIHNPLRNRTDLDRFHELVDVGPLSFVFETVRATRAGLQKDIPVIGFAGAPFTLAGYAIEGGTSRNWLHTKRFMLTDPDGWHELMERLARTIGRYLHAQFDAGANAVQVFDSWVGCLSPEHYREFVLPHSRTVFESLAGRGPIIHFAAGNPVLLPLAAEAGGTVMGIDWRTELDHAWQQVGYDRGVQGNLDPAVLHTTPDVVR

SEQ ID NO: 148528 - protein, 272 aa, Unknown
  Bacterial polypetide isolated from the Sargasso Sea
MDAAIIFSDILMIPYGLGQKVEFKKGFGPILGDINIDKIINTSPEDFIRKLSPVYEGIKKVKSNLKGKNLIGFAGAPWTLILYMLNKTSPKNNFNFDKISENKSINIELIKKIEEMICLHVSKQIEAGANVIQIFDSWAGLLPKEELSNYCYSPTLKIVEYIKSKNIPVICFPKGIKENYLDFCSIVKPDCISIDYEVDPKWVREKFHGIPVQGGLDPKILLMDKEKIKKSTENYLNIFNDYPYIFNLGHGVLPEIKPETIEYIVGLVRNKK

SEQ ID NO: 148529 - protein, 229 aa, Unknown
  Bacterial polypetide isolated from the Sargasso Sea
MTPIKNCIVNKDTTKNPIWLMRQAGRYLPEFRKIRKENQDFIKLCLNSNLASEITLQPIKRFGFDGAVIFSDILMLPYGLGQKVEFKKNFGPKLGEIDLENIESLDDINFSKKIHKVYEAISKTSIDPIMNNKDMIGFVGAPWTILVYMINKSSPKKGLTDNFHKDNVFISRLLAIIEKFLKLHIKNQVEAGAKIIQIFDSWAGLLEDKLPEYIYNPTYNIVEYVKKLG

SEQ ID NO: 148530 - protein, 328 aa, Unknown
  Bacterial polypetide isolated from the Sargasso Sea
MSIFIDTLKGQKIKPTPVWLMRQAGRHLPEYISIRKQFTNLMDMFLDPLTIFEVSLQPVNRYGMDACIVFSDILITPFAAGSSVSFIDGQGPVIKFNENMSYNLEKTLPLATGIKKIKENTSVPLIGFAGGAWTTLYYCLYEKNERQNLKFEDVVKKTSQIDNLIEQMTLAIIQHAEMQIDCGIDAFQIFESAAEHLNDEQFYKWCIQPTKKIIESIKKIKDIPIIGFPRNTNLACYKKYSNIDKLDCITLDHNFPLDKINKLNDKIVFQGNLDPKHLLKDSQNLSQKIEEILFAFRERPHIFNLGHGVLPETSIEKVEQMLLQIRST

SEQ ID NO: 148531 - protein, 336 aa, Unknown
  Bacterial polypetide isolated from the Sargasso Sea
MNNNYYLKALHQKNEALNVPVWLLRQAGRYLPEYMEIRSKFPDFFEMIKTPKICKELTLQPLRRFPLDAAITFTDILTIPEAMGVDIEFIKGQGPVFADSINNNPKLTLNESNYLEKLDYVFEATQLIKGEIDVPLIGFSGSPWTLFVYLFYGRSPRNYEIIKSYISNEPENTHAILKALTNAIKEYISAQIKSGADCIQIFDSWGGILSDQYNEFSLNYINEVRASLSKDIPMILYAKGTSVNGLLPDTKIDCFNLDCDENIDDYIDMPLTVQGNFDPKDFHKEDAELIDLADYIFEKYHTKQNYIFNVGSGITPDIDPDKVSLFLERLRLFNSK

SEQ ID NO: 148532 - protein, 262 aa, Unknown
  Bacterial polypetide isolated from the Sargasso Sea
LGQEVNFIKGKGPKLMPIREMSDIHELSIEKIEDNLTPVFEAIAGVRAKLKSDKTLIGFSGAPWTLACYMVEGGGSKDFERTRIWAKTSPEEFNTLIDLLTNSISRYLVQKIKHGCDVIQIFDSWASVLDSEGFDKWVIRPTSKIIKNVREIYPDYPIIGFPRGAGVNYLRYHAETGVSGVSFDSGVPLTWIRDNIQANTTVQGNLDNTVLLAGGRQLDEQVSKIHKILGKGPFIFNLGHGVLPKTPIGNIERVINILREKK

SEQ ID NO: 148533 - protein, 156 aa, Unknown
  Bacterial polypetide isolated from the Sargasso Sea
MNNPDPLFLRALNKNKLSTPPIWYMRQAGRYMPEYRKVRKKFKNFLDMCKNPDVCCELAMQPLNAFELDAAILFSDILTIPDAFGLGVKFIEKEGPVFTNPIESTSDINNLIPFDPESLDYVYKAVSNIRNALPEDIPLIGFSGSPWTLAAYSIEG

SEQ ID NO: 148534 - protein, 171 aa, Unknown
  Bacterial polypetide isolated from the Sargasso Sea
LEKLLDLYTDACFKYLKQQVISGINAIQIFDSWADLLDEDQFKKFSVKPTKNLVKMLKNDNVTKTIPIILFEKAPPIKPHDIVFDGIAGMSLHHTDSLKNTKLRFLNNFAIQGNLNPSILTESDEDIDKHTCEILSEMKGYPGFIFNLGHGITPNIHPEKIQVMIDSIRNF

SEQ ID NO: 148535 - protein, 99 aa, Unknown
  Bacterial polypetide isolated from the Sargasso Sea
MQNTYNKKFHNALNKEEQKVPPIWLMRQAGRYHKHYRTLKEKYSFEQLCKEPELACEVTLGPIAEFDFDAAILFSDILFPLDYLGMGLKFKPGPILKEI

SEQ ID NO: 148536 - protein, 190 aa, Unknown
  Bacterial polypetide isolated from the Sargasso Sea
SKNFDLTKSFIESHSDDAHKFLEILADACFEYLKRQIVSGVDAIQIFDSWANLLSEEQYLEYSLKYIKKILKKLSEDPVTSKTPTIVFARDPKCNLNEFKLDDISCYGMFTSVDPSSAIRVFEGSHALQGNLDPKILLEEDSVIKESALKMLSEFKDFPGYIFNLGHGITPDINPDKVKVLVEAIRESGT

SEQ ID NO: 148537 - protein, 180 aa, Unknown
  Bacterial polypetide isolated from the Sargasso Sea
MNESTPLLLKALNKEKLPIPPIWYMRQAGRYMPEYRKIRSKFKNFLDMCKNPEVCCELALQPIKAFNLDAAILFSDILTIPDALGLDVEFIENEGPVFKKSIKSVKDIKNLKPFDPDDLSYVYKAVNNIKSVLPNDIPLIGFSGSPWTLAAYSIEGRSSKDFKKTINFIKKNKDESHLFL

SEQ ID NO: 148538 - protein, 145 aa, Unknown
  Bacterial polypetide isolated from the Sargasso Sea
IKAGASIIQIFDSWAGLLEENISDYIYEPTSNLVNHTRKLGVPVICFPRGIENYNNFCEVVKPDMINIDYNLDPKKAVKEIKIPIQGGLDPKVLLTDKENLHKEAIKYLQIFKDHPYVFNLGHGILPETKIEMVEELVKLVRDFK

SEQ ID NO: 148539 - protein, 333 aa, Unknown
  Bacterial polypetide isolated from the Sargasso Sea
MQNTYNKNFFNALNKVEQKIPPIWFMRQAGRYHQHYRKLKEKYSFEQLCKEPELACEVTLGPIVEFDFDAAILFSDILFPLDYLGMSLKFNPGPIFEKNLSSKMISEFNIDEFESFIDFQNISLKHIRNELSNDKSLIGFTGGPVTLYYFATRNNPVSQTLFQQTLPVLEMLIQKNIQIQLQNHIDLLMIFDTEANKLNDKDFDEFVIPFLVKISNSYPNKIGYFTKEISQTKFNKLQNLKNLKLTVLGTNLEVFTELPKTHLSLQGNFSNDLLAMEDTKYFSDYIDKYIEKCLQSEPSHRSGWIASLDHGVKKTTPEANVHLFIEKIRTKLS

SEQ ID NO: 148540 - protein, 206 aa, Unknown
  Bacterial polypetide isolated from the Sargasso Sea
AGSPWTLAAYSIEGSSSKNFDLTKSFIESHSDDAHKFLEILADACFEYLKRQIISGVDAIQIFDSWANLLSEEQYLEYSLKYIKKILKKLSEDPITSKTPTIVFARDPKCNLSEFKLDDLSCYGMFTSINPSSAIRVFEGSHALQGNLDPKILLQEDSVIKDSVIKMLSEFNDFPGYIFNLGHGITPDINPDKVKVLVEAIRESGS

SEQ ID NO: 148541 - protein, 345 aa, Unknown
  Bacterial polypetide isolated from the Sargasso Sea
MNESTPLLLKALNKEKLSTPPIWFMRQAGRYMPEYRKVRSKFKNFMDMCKDPDVCCELAMQPINAFSLDAAILFSDILTIPDAFGLGVEFIENKGPVFKSPIKSKDDIHNLIRFNPENLSYVYQAVANIKRALPENIPLIGFCGSPWTLAAYSIEGHSSKDFKNTINFITKNTEASHLLLSKLTDACFLYLRKQVQAGADVIQIFDSWANILDAQQLNEFSFNYIRPLITALKNDPVTSNTPVILFARNPKCNSKSILQTSADCISLYWSMNDFDHSLAIGKTALQGNLNPEILLESKDIIKKETYKILDKFKDFPGYIFNLGHGLTPDICPDKVKYLTEIVREY

SEQ ID NO: 148542 - protein, 213 aa, Unknown
  Bacterial polypetide isolated from the Sargasso Sea
MNRNFIAALNREIQKTPPIWIMRQAGRYLPEYRKVRSNFKNFLDMCKTPEICCELVLQPIERYNFDAAIIFSDILTIPDALGLGVSFVEGKGPVFSNPIKRPEDISNMINFNPDSLDYVYKTAELTRKELNPSIPLIGFAGSPWTLAAYSIEGSSSKNFDLTKSFIESHSDDAHKFLEILADACFEYLKRQIVSGVDAIQIFDSWANLLSEEQ

SEQ ID NO: 148543 - protein, 199 aa, Unknown
  Bacterial polypetide isolated from the Sargasso Sea
MIGFVGAPWTILVYMINKSSPKKGLSDKFYKDNLLISRLLVIIEKFLKLHIKNQVEAGAKVIQIFDSWAGLLEDKLPEYIYNPTFNIVEYVKKLGVPVICFPRGIKDYKNFCQIVKPDAVNIDYNVDPKKIVKEIKIPVQGGLDPKILLTNKETLKQEVEKYLNIFKDHPYIFNLGHGILPETKIEMVEDLINIVRNFK

SEQ ID NO: 148544 - protein, 193 aa, Unknown
  Bacterial polypetide isolated from the Sargasso Sea
MNPITNCIKNKDATYNPIWLMRQAGRYLPEFREVRKENQDFIKLCLSSDLASEITLQPIRRFGFDGAVIFSDILMLPYGLGQKVEFEKNFGPKLGDIDLETIKNNDEISFTEKIYKVYKAIEKTSKDPLMTNRDMIGFVGAPWTILVYMINKSSPKKGLSNEFFKDNFLINRLLGKREKFLKLHIKNQIEAGA

SEQ ID NO: 148545 - protein, 334 aa, Unknown
  Bacterial polypetide isolated from the Sargasso Sea
MTPINEVILNKKTSINPIWIMRQAGRYLPEFREIRSKNTNFIELCLNEKLSTEITLQPLKRFDLDAAIIFSDILMLPYGLGQKVEFKKNFGPILEKINLDQISKIDEIDFVEKIHKIYKILKNVSENNLLVNKNTIGFVGAPWTLLVYMINQQSPKNKLKKDFFKDKFLINRVLLIIEKFLKIHIKNQIDNGANIIQIFDSWAGLLEEKDLPNYVYSPTLNLVNYVKSLNVPVICFPREIKNYKEFCEIVKPDVVNIDYNVDPKEIASNIKIPIQGGLDPKILLTNKETLKKETTKYLEIFKNHPYIFNLGHGVLPETNPEMVEYLVKIVKDYK

SEQ ID NO: 148546 - protein, 149 aa, Unknown
  Bacterial polypetide isolated from the Sargasso Sea
MNNIFLNTLNGEVEKRPPVWFMRQAGRILPSYRKLKESHKFYDMMKNAEMTSKVTLLPIEDLDVDAAILFSDILVIPDALGMDLIFTENGPKFANAIQDGVKPRLNFKPEKLEYIYKNIKQTINDKKNTPLIGFCGGPLTTFLFMFRGN

SEQ ID NO: 148547 - protein, 199 aa, Unknown
  Bacterial polypetide isolated from the Sargasso Sea
MNETTPLLLRAARGENVERPPVWMMRQAGRYMKVYRDLRDNHPSFRERSENPDLSYEISMQPFTAFQPDGVILFSDILTPLPGMGINFDIVESKGPLINDPIRSLKQVKDLKPLQPEESMSFVGEVLGRLRESVGNKAAVLGFVGAPWTLAAYVVEGKSSKNYAVIKAMAFQEPELLHQLLNHFAESIANYLSYQIQSG

SEQ ID NO: 148548 - protein, 261 aa, Unknown
  Bacterial polypetide isolated from the Sargasso Sea
MSDIREVIINKKTNLNPIWIMRQAGRYLPEFREIRKENPDFINLCLNKELSAEITLQPLKRFNLDAAIIFSDILMLPYGLNQEVEFKKDFGPLLGKLDLNKISKIDEIDFIQKILPVYKAIDIVSNHQLTKNKSTIGFVGAPWTLLVYMINQQSPKKKLKENFFKDEFLINRILLIIEKFLKIHIKNQIDSGANIIQIFDSWAGLLNEKDLPNYIYTPTLNLVNYIKSLNTPVICFPRGIKNYKEFCEIIKPDAISIDYNV

SEQ ID NO: 148549 - protein, 53 aa, Unknown
  Bacterial polypetide isolated from the Sargasso Sea
AIETRIDDCVRKARGRKHILNLGHGILPGTPEENGAAFFRSGKSVMDRIGAVA

SEQ ID NO: 148550 - protein, 93 aa, Unknown
  Bacterial polypetide isolated from the Sargasso Sea
MKPIENCIVNKDTSKNPIWLMRQAGRYLPEFRELRANNQDFIKLCLNESLSSEITLQPIKRFGFDAAIIFSDILMIPFAINQEVKLRKVWTKV

SEQ ID NO: 148551 - protein, 273 aa, Unknown
  Bacterial polypetide isolated from the Sargasso Sea
RFGFDGAVIFSDILMLPYGLGQKVEFEKNFGPKLGDIDLETIKNVDEISFTEKIYKVYKAIEKTSKDSLMANRDMIGFVGAPWTILVYMINKSSPKKGLSNEFFKDHFLINRLLVVIEKFLKLHIKNQIEAGAQVIQIFDSWAGLLEDKIPEYIYIPTLNIVEYIKKLGVPVICFPRGIKDYKNFCEIVKPDAINIDYDVNPKKILNEIKIPIQGGLDPKILLTDQKTLKIEVEKYLGIFKDHPYIFNLGHGILPETKIEMVEELIKIVRNFK

SEQ ID NO: 148552 - protein, 132 aa, Unknown
  Bacterial polypetide isolated from the Sargasso Sea
MSETLPLLLRAARGEQVERPPVWMMRQAGRYMKVYRDLRDRYPSFRERSENPDLSYEISMQPFEAFQPDGVILFSDILTPLPGIGIDFDIVESKGPQINDPIRTMAQVEALRPLQPAESMPFVGAVLGRLRQ

SEQ ID NO: 148553 - protein, 161 aa, Unknown
  Bacterial polypetide isolated from the Sargasso Sea
KITETTISYLKEQVNSGVNAIQIFDSWGGLLSPIDYEVFSWKYIDQIIKELSPLIPVIVFGKGCWFHLNKISKSKVSAIGIDWTCSARNARYLTGGKITLQGNLDPSKLLSPINEIKKSVKNMIDEFGKDNYIVNLGHGILPNTPVDNAKAFIDSVKEYNS

SEQ ID NO: 148554 - protein, 336 aa, Unknown
  Bacterial polypetide isolated from the Sargasso Sea
MKNNHYLNALHQKNEALNVPVWLLRQAGRYLPEYMEIRSKFPDFFAMIKTPEICKELTLQPLRRFPLDAAITFTDILTIPEAMGVDIEFIKGQGPIFADSIRNNSKLKLNESNFLERLDYVFEATQLIKSEIDVPLIGFSGSPWTLFVYLFYGKSPRDYEIINSYIENEPENTHAILSVLSNAIKEYISAQIESGADCIQIFDSWGGILEEQYNEYSLKYINDIRNSLSKDIPMILYAKGTKVSNLLPHTEVNCFNLDCEENIDNYIDMPLTIQGNFDPKDFHKDDSELIDLADSIFEKYHTKKNYIFNVGSGITPDIDPDKVGLFLERLRLFNSK

SEQ ID NO: 148555 - protein, 228 aa, Unknown
  Bacterial polypetide isolated from the Sargasso Sea
MNRLIDCITKNNSGNTPVWFMRQAGRYLPEFMKIRKQNSDFIKLCLDSELAKEITIQPVKRFDIDAAIIFSDILMVPYGLGQNVKFKKGHGPLLEEMNPKKIMEVDDIEFTKKLKPVYVAIQKVKKEIKGKSLIGFVGAPWTLLLYMFNLESPKRSFNFDKITNNKDLNDDLIEKLINIICLHIKNQVEAGANVIQIFDSWAGLLPQEQLEKFCYKPTKKIVNFTKSL

SEQ ID NO: 148556 - protein, 121 aa, Unknown
  Bacterial polypetide isolated from the Sargasso Sea
MSGVSASSHLAPRARLRDARDRAHARGLPSRAASRRVVARAGGDASGVDPLMLRAIRGESVERPPIWMMRQAGRYMKVYQDLCKKHTTFRERSETVDLAVEISLQPYRAFKPDGVILFSDI

SEQ ID NO: 148557 - protein, 163 aa, Unknown
  Bacterial polypetide isolated from the Sargasso Sea
NLLNIMKKFLKLHIKNQIESGATIIQIFDSWAGLVEEKHLSEYIYNPTLNLVNYIKSFNTPVICFPREIKNYKEFCSTVNPDVISIDYNVNPEEILKNINIPIQGGLDPRILLEDKETVKKHALKYLQIFKDVPYIFNLGHGILPETKPETVDYLVKFVKDAK

SEQ ID NO: 148558 - protein, 338 aa, Unknown
  Bacterial polypetide isolated from the Sargasso Sea
MTPIQSCIVNKNNTKNPIWFMRQAGRYLPEFREIRKENQNFIELCLNKNLTPEITLQPLKRFELDAAIIFSDILMLPYGLGQNVEFKKNYGPSLEDLDLNKLLNVKDEDFSNKLKPVYEAINIVSKDKLINKKDLFGFIGAPWTIFVYMLNKKSPKLAKDLKNSIFNKIQNKDIQKLLQIIVKFLKIHIKNQVENGATIIQIFDSWAGLLEEDSYEDYIYNPTIELVNYTKKLGVPAICFPRNIKNYKKFCEVVNPNAVNIDYEVDPKIIFKEIKIPIQGGLDPKILLGDKEQLKKEANKYLEIFKDHPYIFNLGHGVLPETDPNRVDYLVKLIKDFK

SEQ ID NO: 148559 - protein, 333 aa, Unknown
  Bacterial polypetide isolated from the Sargasso Sea
MKPLHKVIINKDTSFKPIWIMRQAGRYLPEFREIRKENTNFINLCLNDDLSSEITLQPLKRFDLDAAIIFSDILMLPYGLGQKVEFEKNFGPKLGTLNLDEIAKIDEIDFVEKIHRVYKAIKKVSTDPILNNKNTIGFVGAPWTLLVYMINQQSPKKNLKKDFFKDEFLINRILLIIEKFLKIHIKNQIDNGANVIQIFDSWAGLLEEKDLPNYVYAPTLNLVNYVKSLNIPVICFPREIKNYKEFCDIVKPDAVNIDYNVDPKKILRDIKIPIQGGLDPKILLTDKETLKKEASKYLNIFKDHPYIFNLGHGVLPETDPNMFDYLIKTVKNY

SEQ ID NO: 148560 - protein, 303 aa, Unknown
  Bacterial polypetide isolated from the Sargasso Sea
FREIRKQNPDFIKLCLNEKLSSEITLQPLKRFNLDAAIIFSDILMLPYGLNQNVEFKKNIGPLLGNLDLEKISNIEEIDFVEKLSAVYKLIELVSNSQHTKNKTTIGFIGAPWTLLVYMINKKSPKLSLNDNFYEDKYLIDKVLKILDKFLKIHIKNQIDSGAQIIQIFDSWAGLLKEKDLSYYIYNPTLSLVNYVKSLNVPVICFPRGIKNYKDYCEIVKPDTICIDYEVDPIKINKEIKIPVQGGMDPKVLLSDKENLKKEAIKYLDIFKDHPYIFNLGHGILPETDPNMMDYLVKTVKDY

SEQ ID NO: 148561 - protein, 225 aa, Unknown
  Bacterial polypetide isolated from the Sargasso Sea
MPDGKTLFEKAARGIRTERTPVWVMRQAGRYLPEYRALRKTVDFLTATKTPEIAAQITLQPIDRFELDAAILFADIMTPLEGMGVPIRFAPGPIIESPIRSQKDVDGLRPLDPDEGVPFVLDALSIVRSELPKDRSLIAFAGAPFTLFCYLVQGGGSKDFMDARSFLRGDPEASDALLNLLGTSMIHYLRAQARAGADALMLFDSWVGLLDEKLYRARIQPVMKN

SEQ ID NO: 148562 - protein, 299 aa, Unknown
  Bacterial polypetide isolated from the Sargasso Sea
MSPITNCIKNKDTKTNPIWLMRQAGRYLPEFRKIRKENQDFIKLCLNSDLASEITLQPIKRFDFDGAVIFSDILMLPYGLGQKVNFEKNFGPKLGELELEKIKNIDEINFTEKVYKVYKAISKTSKDPLMVNKDMIGFVGAPWTILVYMINKSSPKKGLSEFFFKDDFLINRLLSIIDKFLKLHIKNQVDAGAKVIQIFDSWAGLLNDKIPEYIYIPTLNIVNYVKQLGIPVICFPRGIKDYKNYCDIVKPDAVNIDYDVDPKSIINKIKIPVQGGLDPKILLTDQDTLKREVEKYLNI

SEQ ID NO: 148563 - protein, 286 aa, Unknown
  Bacterial polypetide isolated from the Sargasso Sea
DGVIMFSDILTPLPALGIEFDVVKGKGPVVEPVRTMADVNAMKQLDDPDSQLPFVREILSTLRKEIDGQSTMLGFVGSPWTLAAYAMEGSSDRHLMTTKQIMTQDPETLHAFLSKLADALGVYVCHQIDSGAQVVQIFDSWAHHLSPQQFLEFSHPYNERIIAYVKERHPETPLIFHANGGVGKLHELKKSTADVIGLDWNTSMSEARAILGPDRVLQGNMDPMYLFASPDRIREEVAKNVKDAGNGKHILNVGHGVAQGTPEENVGHFCDAARASLYAEVGAPAR

SEQ ID NO: 148564 - protein, 253 aa, Unknown
  Bacterial polypetide isolated from the Sargasso Sea
GPKFSNPISSTDDINNIDTFDVNSLDYVFRAVEETKNLIPANLPLIGFCGSPWTLAAYSIEGGGSKDFQKTKTFMAENPNALHDFLEILSDACYQYLKQQVLSGINAIQIFDSWADLLSEDELDLFSLSYTKKITQKLKNDPITKHIPIILFEKNPNKDITDLIFKDLSCISLYWNSDIRILSESLKNDIAIQGNLDPKVLGKSDETIQEEVRKICSIMKGYPGFIFNLGHGITPDIEPAKVEVMIKTIREDI

SEQ ID NO: 148565 - protein, 303 aa, Unknown
  Bacterial polypetide isolated from the Sargasso Sea
MTPLHKVLINKDTTINPIWIMRQAGRYLPEFREIRKKNTDFIKLCLNEKLSSEITLQPLKRFDFDAAIIFSDILMLPYALDQKVEFKKNFGPLLGDLNLNEISKLNENDFIKKLSPVYKAINLVSKNNLTKNKSTIGFVGAPWTLLVYMINKQSPKVKLKDNFYQDKSLINKILSTLDKFLKIHIKNQVKNGAEIIQIFDSWAGLLNEENLPNYVYNPTLTLVDYVKTLNVPVICFPRGVKNYKNYCDIVKPDGICIDYETDPNKILKEIKIPVQGGMDPKILLTDKEILKKETKKYLDIFKD

SEQ ID NO: 148566 - protein, 336 aa, Unknown
  Bacterial polypetide isolated from the Sargasso Sea
MKNNHYLNALHQKNEALNVPVWLLRQAGRYLPEYMEIRSKFPDFFAMIKTPEICKELTLQPLRRFPLDAAITFTDILTIPEAMGVDIEFIKGQGPIFADSISNNSKLKLNESNFLERLDYVFEATQLIKSEIDVPLIGFSGSPWTLFVYLFYGRSPRNYEIINSYIENEPENTHAILSILSNAIKEYISAQIKSGADCIQIFDSWGGILEEQYNEYSLKYINDIRNSLSKDIPMILYAKGTKVSTLLPHTEINCFNLDCEENIDNYINKPLTIQGNFDPKDFHKDDSELIDLADSIFEKYHTKKNYVFNVGSGITPDIDPDKVGLFLERLRLFNSE

SEQ ID NO: 148567 - protein, 199 aa, Unknown
  Bacterial polypetide isolated from the Sargasso Sea
MIGFVGAPWTILVYMINKSSPKKGLSGEFFKDDFLINRLLGIIEKFLKLHIKNQIEAGAQVIQIFDSWAGLLEDKIPEYIYIPTLNIVDYVKKLGVPVICFPRGIKDYKNFCEIVKPDAVNIDYDVDPKKILNEIKIPIQGGLDPKILLTDQKTLKIEVEKYLGIFKDHPYIFNLGHGILPETKIEMVEELIKIVRNFK

SEQ ID NO: 148568 - protein, 114 aa, Unknown
  Bacterial polypetide isolated from the Sargasso Sea
NKPIILFTKGGGIWLNQISKSGCNAIGLDWTTDISYARKIVGENISLQGNLDPCALHGSEESIKEASSKILDDYGFGHKHIFNLGHGIDQYVNPDNLKILIDHVKEYSKKYHKN

SEQ ID NO: 148569 - protein, 275 aa, Unknown
  Bacterial polypetide isolated from the Sargasso Sea
KRFNLDAAIIFSDILMLPYGLGQNVKFEKNFGPKLDKLNIDDILKVTENEFTNKLNPVYKLINISSQNNLLQKKDLFGFVGAPWTILVYMINQISPKKELKKDFFDNQILIEKLLTIIIKFLKIHIKNQINSGATIIQIFDSWAGLVEEKKLDLLIYKPTLDLVNFVKSLNVPVICFPREIKDYKKFINNVKPDVVNIDYSVDPKKIAKDIEIPVQGGLDPKVLLTDKDNVKRNAIKYMEIFRDHPYIFNLGHGVLPETNPDMVKYLVNTVKNFK

SEQ ID NO: 148570 - protein, 160 aa, Unknown
  Bacterial polypetide isolated from the Sargasso Sea
MSQTKHLLIESIYQRTIDRTPVWIMRQAGRYLPEYIKTKNQAGGFMKLIRNPELACEVTMQPLRRYSLDSAILFSDILVVADMFNMNLRFEDKIGPIFDEPLRTESDFEKLPSELDVSNLEYVNETIKNIKGELNDSLPLIGFIGSPWTVATYLIEGNST

SEQ ID NO: 148571 - protein, 240 aa, Unknown
  Bacterial polypetide isolated from the Sargasso Sea
MEKIELDNIKNVDEINFTEKVYKVYKAISKTSQDPLMDNKDMIGFVGAPWTILVYMINRSSPKKGLSGQFFKDEFLINRLLGIIEKFLKVHIKNQVEAGAKVIQIFDSWAGLLDDKIPEYIYIPTLNIVEYVKQLGVPVICFPRGIKDYKNFCEIVKPDAVNIDYDVDPEIIIKEIKIPIQGGLDPKILLTNKEVLKKEVEKYLHIFKDHPYIFNLGHGILPETKIEMVEDLIKIVRNFK

SEQ ID NO: 148572 - protein, 280 aa, Unknown
  Bacterial polypetide isolated from the Sargasso Sea
MTPLHKVIKNNDTSINPIWIMRQAGRYLPEFREIRIKNTNFINLCLNENLSTKITLQPLKRFDLDAAIIFSDILMLPYGLGQKVEFKKNFGPQLGDLNLDEICKVNEGDFVERINQVYKAIKKVSLDPIVKNKNTIGFVGAPWTLLVYMINQQSPKKNLKDNFFKDISFINRILLIIEKFLKIHIKHQIKNGANIIQIFDSWAGLLEEKDLPDYVYNPTLNLVDYVKSLNVPVICFPREIRNYKEFCNIVKPDAVNIDYNIDPKKIIKEITIPVQGGLDP

SEQ ID NO: 148573 - protein, 80 aa, Unknown
  Bacterial polypetide isolated from the Sargasso Sea
MSNARDMTNHRVALQGNMNPKILTLPSEEIISEAKRILQDYGSSDGHIFNLGHGITPDIDPEKVAVLVDTVHKESEIYHQ

SEQ ID NO: 148574 - protein, 127 aa, Unknown
  Bacterial polypetide isolated from the Sargasso Sea
MKYIKKILKKLSEDPATSKTPTIVFARDPKCNLSEFKLDDLSCYGMFTSINPSNAIRVFEGSHALQGNLDPKILLEEDSVIKESVMRMLSEFKDFPGYIFNLGHGITPDINPDKVKVLIETIRESGS

SEQ ID NO: 148575 - protein, 242 aa, Unknown
  Bacterial polypetide isolated from the Sargasso Sea
TGHEKRDEPLGIGMMFLPRNDYAALEKCRTIIESELLDHGYYIYGWRQVPINNSVIGEKANSTRPEIEQVMFVNNIERESNFDYSKELYLVRRRLEKRIAKQQINGFYVCSLSFESIIYKGLFLAEQLSIFYPDLANNNFVSSYAVFHQRYSTNTFPSWGLAQPFRMLAHNGEINTISGNTNWMRNHQTRITSEIFGDDSEQVKPIIEKNVSDSAALDAAFELYVRAGRSVPLVKTLLIPEA

SEQ ID NO: 148576 - protein, 62 aa, Unknown
  Bacterial polypetide isolated from the Sargasso Sea
MSQAVESRTRIKSERYESGVIPYAKMGYWDPDYAIKETDLLALFRCTPQPGVDPVEAAAALA

SEQ ID NO: 148577 - protein, 249 aa, Unknown
  Bacterial polypetide isolated from the Sargasso Sea
ATEIFGDDSEQVKPIIEKNVSDSAALDAAFELYVRAGRSVPLVKTLLMPEAWSKRSELMPIEHRNMYEFSNAIVEPWDGPAAIAAVDGNWIIGGMDRNGLRPMRYSISSENIIYVGSETGMVRVDESKIIEKGRLGPGDIIGVNLKDGKIYRDNDLKNYLASESPYEDYVKKIIRLDKRVTVSRESTVIKADKLRKKMIAAGYTMEELELILHPMVSDAKESTGSMGDDTPIAVLSDKYRPLSHFFRQK

SEQ ID NO: 148578 - protein, 66 aa, Unknown
  Bacterial polypetide isolated from the Sargasso Sea
MSKKYDAGVKEYRDTYWTPDYVPLDTDLLACFKCTGQEGVPKEEVAAAVAAESSTGTWSTVWSELL

SEQ ID NO: 148579 - protein, 55 aa, Unknown
  Bacterial polypetide isolated from the Sargasso Sea
MRITQGTFSFLPDFTDQQIHEQVQYCIDNGWAVSIEYTDDPHPRNTYWEMWGHPM

SEQ ID NO: 148580 - protein, 199 aa, Unknown
  Bacterial polypetide isolated from the Sargasso Sea
IYNSIKKSIKNHKVLIRKKDLSFTAIKKINPDFILYYGWSNIIKKKIYENYFCLMLHPSDLPKFRGGSPIQNQIINSVEKSAVTIFKINKDIDGGPILKKHSLSLKDNISDIFLRLEIIGFKLTKEIIKGNYKLKKQNLKNTKVYKRLKPHQSEIKIEDFLKKDGRYIFNKIRMLGDPYPNAFIRTKDRKKIYLKKVSL

SEQ ID NO: 148581 - protein, 233 aa, Unknown
  Bacterial polypetide isolated from the Sargasso Sea
PITFFDDEIAKTGHEKRDEPLGIGMMFLPRNDYAALEKCRTIIESELLDHGYYIYGWRQVPINNSVIGEKANSTRPEIEQVMFVNNIERESNFDYSKELYLVRRRLEKRIAKQQINGFYVCSLSFESIIYKGLFLAEQLSIFYPDLANKNFVSSYAVFHQRYSTNTFPSWGLAQPFRMLAHNGEINTISGNTNWMRNHQTRITSEIFGDDSEQVKPIIEKNVSDSAALDAAFE

SEQ ID NO: 148582 - protein, 347 aa, Unknown
  Bacterial polypetide isolated from the Sargasso Sea
EAAAAVAAGVPAGVLQAAVAEVNQETAQANVEAQVEMQSQVSDAQADLAAADGAEGSLAEAQGNVDEAQTAAQEQILENNLAGQEAAIEASQEATAEIMAEMIEMNPDAAAEIIAGAAASNPEAAAEMVQEMMASDPEVAVELCADIAEANPAAAAMATEAIIEAAPDQAVEATAAMAEVAPAAAGAAAEVMAELAPEQAGEAAMAMQEAAPEAAAAVAAGVAEGNPEVAQEVASEMAAADPEAAADIATGMAAGAQANAAAAVAEVQAEAAAEIAEVQAGLADTVADAQANLASDDPNVVAEAQATLAGVQETIADAQAAAQETIADAQGAASEAAQDLAGDIAGA

SEQ ID NO: 148583 - protein, 139 aa, Unknown
  Bacterial polypetide isolated from the Sargasso Sea
MKLTQGCFSFLPDLTDEQITKQIQYAIDKSWAVSIEFTDDPHPRNNYWEMWGLPLFDIKDAAAILFEINMCRKAKPNFYVKVAAFDNTRGTESCCSSFIVQRPAYEPGFRLVRQEVAGRKLVYTIEAYAPALKPEGERY

SEQ ID NO: 148584 - protein, 44 aa, Unknown
  Bacterial polypetide isolated from the Sargasso Sea
PQILRDAAKTCGPLQTALDLWKDITFNYASTDTADFAETPTANV

SEQ ID NO: 148585 - protein, 66 aa, Unknown; identical to SEQ ID NO: 148578
  Bacterial polypetide isolated from the Sargasso Sea

SEQ ID NO: 148586 - protein, 299 aa, Unknown
  Bacterial polypetide isolated from the Sargasso Sea
FFDDEIAKTGHEKRDEPLGIGMMFLPRNDYAALEKCRTIIESELLDHGYYIYGWRQVPINNSVIGEKANSTRPEIEQVMFVNNIERESNFDYSKELYLVRRRLEKRIAKQQINGFYVCSLSFESIIYKGLFLAEQLSIFYPDLANNNFISSYAVFHQRYSTNTFPSWGLAQPFRMLAHNGEINTISGNTNWMRNHQTRITSEIFGDDSEQVKPIIEKNVSDSAALDAAFELYVRAGRSVPLVKTLLIPEAWSKRSELMPIEHRNMYEFSNAIVEPWDGPAAIAAVDGNWIIGGMDRNGL

SEQ ID NO: 148587 - protein, 322 aa, Unknown
  Bacterial polypetide isolated from the Sargasso Sea
FRMLAHNGEINTISGNTNWMRNHQTRITSEIFGDDSEQVKPIIEKNVSDSAALDAAFELYVRAGRSVPLVKTLLIPEAWSKRSELMPIEHRNMYEFSNAIVEPWDGPAAIAAVDGNWIIGGMDRNGLRPMRYSVSNDNIIYVGSETGMVRVDESKIVEKGRLGPGDIIGINLKEGKIYRNSDLKDYLAQEAPYEEYVKKIIRLDKRVTVSRESTVIEAEKLRKRMIAAGFTMEELELILHPMVSDAKESTGSMGDDTPVAVLSDKYRPLSHFFRQKFSQVTNPPIDSLREQSRMSLKTRFGNLQDILSPQSLMKKDVFVIDS

SEQ ID NO: 148588 - protein, 125 aa, Unknown
  Bacterial polypetide isolated from the Sargasso Sea
VAFLSHLSIPSAIEVFSNNVYGLLSRLNVSHDLNNESQIGYNLGYNKFKKMDGQFIYTVVYGRSLDSFGIFFEIFGDDSKNRSNINFDSGITYLLDNKKQLDLSIGKGINNDMFFISGGISINID

SEQ ID NO: 148589 - protein, 1049 aa, Unknown
  Bacterial polypetide isolated from the Sargasso Sea
MEEGHLYSPKQEHDACGVGFVASVDGKQRREVVEGGIDALKAVWHRGAVDADGKTGDGAGILTQIPINFFDDEIAKTGHEKRDEPLGIGMMFLPRNDYAALEKCRTIIESELLDHGYYIYGWRQVPINNSVIGEKANSTRPEIEQVMFVNNIERDSNFDYSKELYLVRRRLEKRIAKQQINGFYVCSLSFESIIYKGLFLAEQLSIFYPDLANNNFVSSYAVFHQRYSTNTFPSWGLAQPFRMLAHNGEINTISGNTNWMRNHQTRITSEIFGDDSEQVKPIIEKNVSDSAALDAAFELYVRAGRSVPLVKTLLIPEAWSKRSELMPIEHRNMYEFSNAIVEPWDGPAAIAAVDGNWIIGGMDRNGLRPMRYSVSNDNIIYVGSETGMVRVDESKIVEKGRLGPGDIIGINLKEGKIYRNSDLKDYLAKEAPYEEYVKKIIRLDKRVTVSRESTVIETEKLRKRMIAAGFTMEELELILHPMVSDAKESTGSMGDDTPVAVLSDKYRPLSHFFRQKFSQVTNPPIDSLREQSRMSLKTRFGNLQDILSPNPYEENVFVIDSPFITNGLFKKISARGQESTTVIDCTVHKDNFNLKEEIKRIQFESETAVLSGKSHIVLSDISADHDKLSLPMILITAAVHTDLTRKGIRSFVSLHVRSAECLDTHYFAVLIGVGATTVNPYLALDCIYERQQKGLFGNLSYEECVERYKKAVDQGLLKVMSKLGISVISAYRGGFNFEAVGLSRSMVNEYFLGVQSRMSGIGLSGIEKKLTDLHNYAYSDSVQTLPIGGIYRYRNGGETHAYEGKLIHLLQTAVADDSYEMFKKYSNSMSNFAPINIRDLLEFKESESSIELSEVESITSIRKRFGTGSMSHGALSKEAHETLAIAMNRIGGASCSGEGGESIERSKPLNNGDSANSRVKQVASARFGVTTEYLNNCEEIEIKIAQGAKPGEGGQLPGFKVTAEIAKLRHSTEGVTLISPPPHHDIYSIEDLAQLIYDLKQANPDARVCVKLVASSGIGTIAAGVAKAKADVILISGHNGGTGASPQTS

SEQ ID NO: 148590 - protein, 48 aa, Unknown
  Bacterial polypetide isolated from the Sargasso Sea
MKLRQGTFSFLPDLTDAEIHTQVQYCIDNGWAVSVEYTDDPHPRNTYW

SEQ ID NO: 148591 - protein, 597 aa, Unknown
  Bacterial polypetide isolated from the Sargasso Sea
VPGSTSQDYPSTTPSSTEPGSTSTVPGSTSTVPGSTSPEPGSTSTVPGSTSQYYPSSNNEPGSTSTVPGSTSQYYPSSNNEPGSTSTVPGSTSQYYPSSNNEPGSTSTVPGSTSQYYPSSNNEPGSTSTVPGSTSQYYPSSNNEPGSTSTVPGSTSQYYPSSNNEPGSTSTVPGSTSQYYPSSNNEPGSTSTVPGSTSQYYPSSNNEPGSTSTVPGSTSQYYPSSNNEPTSTKPSSSTHYPFTPSSGPEETQEPVPGEESTEPSPTPTEHYPFTPSSGPEETQEPVPGEESTEPSPTPTEHYPFTPSSGPEETPDDIGPEETSEVIPGDSTTPTPTISPSDDSNATMLHEVRAGVRLFGYVATSFNSEERGFFRRGMSTFLGIAPKQVTINHVEDVNTRSTRRLLQASAVDVYYIVSTTTPQVASAVVDETNRALNATGSGALLNNLQSAGLVVSQVVIISRPNVTVVPMPPTPAPTPAPSNTPSATPFNLSDININLNVDVTVHMDESNLSPSANATERSTTNDPGTNASPTPTPTPTPGYPTPTPGYPTPTPAYPAPTPDCVPLGTETEESQYERAGSLQHEALQQARDSARDND

SEQ ID NO: 148592 - protein, 433 aa, Unknown
  Bacterial polypetide isolated from the Sargasso Sea
KCRTIIESELLDHGYYIYGWRQVPINNSVIGEKANSTRPEIEQVMFVNNIERESNFDYSKELYLVRRRLEKRIAKQQINGFYVCSLSFESIIYKGLFLAEQLSIFYPDLANNNFVSSYAVFHQRYSTNTFPSWGLAQPFRMLAHNGEINTISGNTNWMRNHQTRITSEIFGDDSEQVKPIIEKNVSDSAALDAAFELYVRAGRSVPLVKTLLIPEAWSKRSELMPIEHRNMYEFSNAIVEPWDGPAAIAAVDGNWIIGGMDRNGLRPMRYSVSNDNIIYVGSETGMVRVDESKIVEKGRLGPGDIIGINLKEGKIYRNSDLKDYLANEAPYEEYVKKIIRLDKRVTVSRESTVIETEKLRKRMIAAGFTMEELELILHPMVSDAKESTGSMGDDTPVAVLSDKYRPLSHFFRQKFSQVTNPPIDSLREQSRMS

SEQ ID NO: 148593 - protein, 235 aa, Unknown
  Bacterial polypetide isolated from the Sargasso Sea
MKKRFLIFLFLLFNCSLVFSQITTDRPDQTESAVVLSSGQIQVESGILIENSQSNINTLFRIGIIEGIEIRINSNYLINDELSFMKKSSFSDFEVGAKFRIFDKTSNNTKVAFLSHLSIPTAIEVFSNNVYGLLSRLNVSHDLNNESQIAYNLGYNKFKKMDGQFIYTIVYGRSLDSFGIFFEIFGDDSKNSSNINFDSGITYLLDNKKQLDLSIGKGINNDMFFISGGISINID

SEQ ID NO: 148594 - protein, 311 aa, Unknown
  Bacterial polypetide isolated from the Sargasso Sea
CCWTPVHRAGHGGPREAPAHAARGPGAVRGLLHAVQHDLALSSGGRRSGGGRAQECCPARHCCAREEHGAAAAGQPVHRAGHGGPREAPARAAREPGAVRVLLHAVQHDLALSSGGGGGGRRSGAGRAQECCRARHCCAREEHGAAAAGQPVHRAGHGGPREAPARAARGPGAVRGLLHAVQHDLALSSGGGRRSGAGRAQECYPARHCCAREEHGAAAAGQPVHRAGHGGPREAPARAAREPGAVRGLLHAVQHDLALSSGGGGVVAPAGRRSATPPGTAARARNMGQLLLDNRSIAQAMADRGRHQRVL

SEQ ID NO: 148595 - protein, 132 aa, Unknown
  Bacterial polypetide isolated from the Sargasso Sea
MRLTQGAFSFLPDLTDEQIVKQIQYAISKGWALNVEFTDDPHPRNSYWDLWGLPLFGVKDPAAVMFEINSCRKAKPAYYVKVNAFDNSRGVESCCLSFIVQRPTSNEPGFQLQRQESDSRNIRYTIQSYAST

SEQ ID NO: 148596 - protein, 79 aa, Unknown
  Bacterial polypetide isolated from the Sargasso Sea
MAKKYDAGVKEYRDTYFTPDYVPLDTDLLACFKCTGQEGVPKEEVAAAVAAESSTGTWSTVWSELLVDLEFYKGRCYRM

SEQ ID NO: 148597 - protein, 138 aa, Unknown
  Bacterial polypetide isolated from the Sargasso Sea
MKIRQGAFSFLPDLTDAEIHTQVQYCIDNGWAVSVEYTDDPHPRNTYWEMWGHPMFDNPDAAAVVFEVNECRKQFGDYYIRVIAFDSTHGWESIKLSFIVNRPKDEPGFHVSREEVKGRSIRYSIKSYATDKPEGKRY

SEQ ID NO: 148598 - protein, 86 aa, Unknown
  Bacterial polypetide isolated from the Sargasso Sea
LLACFKCTGQEGVPREEVAAAVAAESSTGTWSTVWSELLTDLEFYKGRCYRIEDVPGDPEAFYAFIAYPLDLFEEGSITNVLTSLV

SEQ ID NO: 148599 - protein, 139 aa, Unknown
  Bacterial polypetide isolated from the Sargasso Sea
MRITQGTFSFLPDFTDQQIHEQVQYCIDNGWAVSIEYTDDPHPRNTYWEMWGHPMFDNPDAAAVVFELNECRKVYGSYYIRIIAFDSSPGWESIRLSFIVNRPSQEPGFRLNRTETKGRNIQYSMSPYSSDNPQGSRYK

SEQ ID NO: 148600 - protein, 76 aa, Unknown
  Bacterial polypetide isolated from the Sargasso Sea
EETHGHPWGSAAGAAANRVALEACVKARNAGREIEKESRDILMEAAKHSPELAIALETWKEIKFEFDTVDKLDVQG

SEQ ID NO: 148601 - protein, 131 aa, Unknown
  Bacterial polypetide isolated from the Sargasso Sea
SFLPDLTDDQIHTQVQYCIDNGWAVSLEFTDDPHPRNTYWEMWGHPMFDNPDAAALIFELNECRKIHGDKYIRVMAFDSTHGWESVRLSFIVNRPKEEKGFKLSREDTHGRMMRYSITPYSTDMPEGERYK

SEQ ID NO: 148602 - protein, 116 aa, Unknown
  Bacterial polypetide isolated from the Sargasso Sea
MYLLIASILNDEELKNFSEIAERLKLDYIIEVHDEEELQRVQHFSNAIIGVNNRNLKTFDVDINNSVALKKIFEGENIFIAESGIKSKKDIEYLQQNNINVFLIGESLMKGDFFET

SEQ ID NO: 148603 - protein, 106 aa, Unknown
  Bacterial polypetide isolated from the Sargasso Sea
DEELKNFSETADRLKLDYIIEVHDDEELQRVQHFSNAIIGVNNRNLKTFDVDINNSVELKKIFEGENIFIAESGIKSKKDIEYLKRHNINVFLIGESLMKGDFFET

SEQ ID NO: 148604 - protein, 212 aa, Unknown
  Bacterial polypetide isolated from the Sargasso Sea
MDILTKIISKKIDELNQLKRVISTSDLESSEFFERNNKSIVSGLIGNEISIIAEHKRKSPSRSEINFQTSTEKIINGYQKAGAVALSILTEKNFFNGSNYDITNVRKITELPILRKDFIIDEFQVLESKSIGADGILLIAACLDKKQIIKLSRLAKSLDLEVLIEIHDLSELDNCCIDSVDIIGVNNRNLMTFNVDIETSISLSSKIPRNYV

SEQ ID NO: 148605 - protein, 214 aa, Unknown
  Bacterial polypetide isolated from the Sargasso Sea
MKEIYEYKIDFVNKQKKLHTQSDIQNKIKNTHSHDFSFSKKLKNEKTQTSIIGELKRASPSLGNFVNEEIDLSKIAKTYEDYGVSCLSILTDEKYFKGSVKDLADIRKISTLPILRKDFIVDEYQIYESKLVGANCILIILAMLDQKKADRLEAIALNMGLDVIIEIHNKKELERALNMKSELIGINNRNLNNFETSIETTIELSNYIADLKKI

SEQ ID NO: 148606 - protein, 152 aa, Unknown
  Bacterial polypetide isolated from the Sargasso Sea
MSILKEIYEYKIDFVNKQKKLHTQNDILNKLKNITSHDFSFSKKLKDEMSQTSIIGELKRASPSLGNFVNEKINLSNIAQIYEECGVSCLSILTDEKYFKGGIEDIIEIRKISTLPILRKDFIVDEYQVYESKLVGASCILIILAMLDQKKA

SEQ ID NO: 148607 - protein, 206 aa, Unknown
  Bacterial polypetide isolated from the Sargasso Sea
KKKRPLASLLEYPSDTMVYYNFKEAIEKRISNGKISLIAESKKASPSAGIIIKDYDPVEIAKIYQSKKATCLSILTEEDFFLGNLSHIYKIKLNSKTMENTGITLPILCKDFFIDTYQVHLSKHYGADAILIILAGVSDKLADDLYNEALKLDMSVIVEVHTVEEAKRSLRFKDALIGVNNRNLKTLKTNINTTFDIHDVLLNHPG

SEQ ID NO: 148608 - protein, 219 aa, Unknown
  Bacterial polypetide isolated from the Sargasso Sea
ERIAVIAEIKRRSPSKGDLFANLDPGVLAAEYESGGAAAISVLTDKENFGGSDKDLIEASKSVKIPVLRKDFTVDQRDICDARIMGADAVLLIVSALDRYELKDFIELSIELDMDPLVEVHDEKELEQALSVEAKLIGVNQRDLKSFEVDPLKATALMSKIPESVTAVAESGIDGGESARNLMRVGYSALLVGELLVKSNDRMKTLSELNNKFDEKSYE

SEQ ID NO: 148609 - protein, 241 aa, Unknown
  Bacterial polypetide isolated from the Sargasso Sea
MPGMVNGHTHLFQTLFRGLADDKSLLDWLRDCIWPVAGEIDAEAARAAATLGLIENLRSGSSTVIDHQYVHADPDIDDAICQVAADLGIRFELARGWADRNYHPPLTESVETVLERVEPLRQTWHGSCDGRITIGLAPLIPWGCSDEAMVATTAAARSWGGHIHTHCAEAEIEVVMNLEERGLRHVAWLDSLGVLGPDVQLAHSVWLDETEIQLIAERGASVVHCPVSNMYLASGIAPIRA

SEQ ID NO: 148610 - protein, 148 aa, Unknown
  Bacterial polypetide isolated from the Sargasso Sea
RKDFMYDTYQVTEARALNADCILIIMASVSDQQAEELEHAAVSWNMDVLIEVHNEIELERAMNLKSPMIGVNNRDLKTFETSLETTKRLSKLLPSDRLIVSESGLFNTEDLRSMAELDVRSFLIGESLMRQPDVKTATQKILSNPLRP

SEQ ID NO: 148611 - protein, 258 aa, Unknown
  Bacterial polypetide isolated from the Sargasso Sea
WEKHLEVEIARKKVSLEDLKKKIRDLPKTKNFIDALINSNSKPALIAEIKKASPSRGIIREDFDARMIGKMYQDGGANCISVLTDKKFFQGGFDVLVEVRKEIVIPILCKDFILYPYQLYQARAAGADAALLIAAILTDSDLKYLSKVAKHLGLTILVEVHDSEELERVLNINIFNLIGINNRNLKSFKTDLEVTKKLANNYANQIKKSSINLVSESGLFTREDLDLVKSYGADAVLVGESLMSQEDILGGVKKLIGQ

SEQ ID NO: 148612 - protein, 127 aa, Unknown
  Bacterial polypetide isolated from the Sargasso Sea
MEIRRRPPNPTVRVENLEYAVPHREAQAKNILEEIVWHKDIEIKNFKKIVSLEDLIKKIEKLPTPKDFYKNILESKIKPGVIAEIKKASPSKGVIRKDFNPENIAICYEGLGASCISVLTDKRFFPR

SEQ ID NO: 148613 - protein, 173 aa, Unknown
  Bacterial polypetide isolated from the Sargasso Sea
LTDNNFFGGQLDFINLVKSVVSIPVLRKDFIISEYQVWESFYIGADAILLIADAIEYELLSSLNSLATELGMHVLIETHDIKNINKMRLLNPNIIGINCRNLKTMETHLDWFNDAINDLPSNIIKVAESGIHLNSHLKAIEKLGYDAALIGSSLMKTKTPGHALAKLLNRSPK

SEQ ID NO: 148614 - protein, 116 aa, Unknown
  Bacterial polypetide isolated from the Sargasso Sea
MEIRRRPPNPTVRVENLEYAVPHREAQAKNILEEIVWHKDIEIKNFKKIVSLEDLIKKIENLPAPKDFYKNILESKIKPGVIAEIKKASPSKGVIRKDFNPKNIAICYEGLGVSCI

SEQ ID NO: 148615 - protein, 151 aa, Unknown
  Bacterial polypetide isolated from the Sargasso Sea
MDIRRRPPNPTVRVENLEYAVPHREAQAKNILEEIVWHKDIEIKNFKKIVSLEDLVKKIEKLPTPKDFYKNILESKIKPGVIAEIKKASPSKGVIRKDFNPEKIAICYEGLGASCISVLTDKRFFQGSYEILKTVRRSTNLPLLCKDFIIS

SEQ ID NO: 148616 - protein, 164 aa, Unknown
  Bacterial polypetide isolated from the Sargasso Sea
LKAGSTRFILECKKASPSKGLIRDDFSPEAIADIYGKYATAISVLTDEKFFQGDFAFLPRVRSRVTQPVLCKDFMIDPYQVYLARHYQADAILLMLSVLTDEGYRALFAVAKELGLGVLTEVSNEEELTRAIALGAPVIGINNRDLRDLSVDLARTKQLAKDIP

SEQ ID NO: 148617 - protein, 153 aa, Unknown
  Bacterial polypetide isolated from the Sargasso Sea
MLDEIIKNKLKEVSQLKSSFDISKIDTSAPKKPFYETLLLRQGNKKNSIIAEIKKRSPSKGILDSNLNVSEKAAQYEAGGASCLSVLTERDYFNGSIDDLLVAKRSVNLPILRKDFIIDALQVYQSKMIGADCILLIVSALSHKSFEELYSLA

SEQ ID NO: 148618 - protein, 195 aa, Unknown
  Bacterial polypetide isolated from the Sargasso Sea
IIREDFNPVEIPLSYEKGGGSCISVLTDKENFLGSNSHLKEVKRNTRLPILRKDFIVDPLQVLESKKLGADCILIIIGMNSVDDNKKIESLAIDIGLECILEVHSLEELEKTKSFSSNMIGINNRNLNTFETKISTTLDLIPKIPSNKTIISESGFSEKKDLEELAMLGVSSFLIGESLMRQADIENATKKLLRG

SEQ ID NO: 148619 - protein, 170 aa, Unknown
  Bacterial polypetide isolated from the Sargasso Sea
MSVLKEICEKKILDIQSLKSKTSESKLLELIKNKDKTKGFKKAINKKISKNKFALIAEIKRASPSKGIIKEDFVPINIATSYKNGGATCLSILTEENWFKGKNSYLIEVRNEIDLPILRKDFILDPWQVLETRYIGADCILIILSAVNDQLANELKVTAKNVGLDILVEV

SEQ ID NO: 148620 - protein, 183 aa, Unknown
  Bacterial polypetide isolated from the Sargasso Sea
MQLIVSAKKRAIAKQKSKISREDIERLAKDFPELPRKFLSSLKANSQKKRTAIIAEIKRASPSKGIISQNFDPKAIAKSYEEAGATCISVLTETDFFLGSPRYIRTVKDACSLPVLRKDFIMDEYQIFESKLIGSDCILLIAAILDISDLHRLYELAISLGMDVLVEVHNPEELDKALTLSPK

SEQ ID NO: 148621 - protein, 231 aa, Unknown
  Bacterial polypetide isolated from the Sargasso Sea
APDTLGFKKILSESVIDRGVGLIAEIKKSSPSRGIIRDDFDPVDLALQYETGGASCISVLTERNYFSGHNEHLIDVRKAVKLPILRKDFILDPYQVYETRAIGADCILLIMAAIDDYLASDLSKEARRLGLCVLVEVHDERELERTCDLDVDLIGINNRNLKTLEINLNTTERLMSLVPKGIDVVSESGIYSNEDIVRMLHSKVGRFLVGESLMKQNDLVQATRQLLGNKN

SEQ ID NO: 148622 - protein, 190 aa, Unknown
  Bacterial polypetide isolated from the Sargasso Sea
MSILNEIYEYKIDFVNFQKNLHTQNDILNKIKNLPSHDFSFSKKLKNEMSRTSIIGELKRASPSLGNFVNEEISLSNIAQIYEECGVSCLSILTDEKYFKGRIEDLIEIRKVSNLPILRKDFIVDEYQIYESKLVGASCILIILAMLDQKKADELEAIALNMGLDVIVEIHNKAELERAINMKSELIGIK

SEQ ID NO: 148623 - protein, 95 aa, Unknown
  Bacterial polypetide isolated from the Sargasso Sea
MSSKGTILEEIIDHKKRAVSIAKQELSLEDIESQLKDCPSPRPFISPLRSALANQEPAVIAEIKKASPSKGLIRSDFNPREHAKDYEVSGATCLS

SEQ ID NO: 148624 - protein, 162 aa, Unknown
  Bacterial polypetide isolated from the Sargasso Sea
MSNVLEKIVIDKKDSIIKSKNSYTISDLENKISSYNNYLNFKNKLTENKISIVAELKKASPSAGLIIKNYNPIEISKQYLNSGASCLSILTEEKYFLGKLDHITDVKKEIKLPVLCKDFIIDPYQVYLAKSFGADAILIILSAVEKKMAKEIYDVANKLNVS

SEQ ID NO: 148625 - protein, 167 aa, Unknown
  Bacterial polypetide isolated from the Sargasso Sea
KYFEGDIDHISLIKKTTNLPVLRKDFIIDEYQILESKIYNADAILLILSILTDRQVKQFIKKANEINLDCIVEAHSNDEIKRAIKIGYPIIGINNRNLSNLSVNINNTINLVKKIDKNFTIIGESGIKSKKEIKKYNEINIYNFLIGETLLKAINKEKKIKEFLINE

SEQ ID NO: 148626 - protein, 243 aa, Unknown
  Bacterial polypetide isolated from the Sargasso Sea
MNHLEKILAGQQSRINILKHTYPINLLKEKIKSYNNFINFKEKLIKEKNKVSIITEMKKASPSAGIIINDYKPSEIAENYFSNGASCLSILTEENFFQGKLEHIDEVKKKVKLPVLMKDFFTDDYQVYLAKASGADCILIILSALNGSAADKIYQKANELNLTTIVEVHNEEEAKEALKYKEAIIGINNRDLTTLKTDINTTYKLYETLANHRQPIVCESGIKSEKEVEEIVKKTKINNFSYW

SEQ ID NO: 148627 - protein, 149 aa, Unknown
  Bacterial polypetide isolated from the Sargasso Sea
LRKDFMYDTYQVIEARALNADCILIIMASVSDQQAKELEDAAISWNMDVLIEVHDEIELERAMNLNSPMIGINNRNLKTFETSTDTTQRLSQLLPSERLIISESGLFSNDDLRSMARVGVRSFLIGESLMRQDDVTEATQRILQNPLRP

SEQ ID NO: 148628 - protein, 167 aa, Unknown
  Bacterial polypetide isolated from the Sargasso Sea
MSILETIVANTKAGLIAKKAELPLEQIKRSLENFDLPRGRFKDNISNKDEAIIAEIKKASPSAGVIAEEFDPVKKAIEYEAFGASALSILTEEDFFMGSVEYIKEIKKITALPILRKDFMIDKYQIYESKLIGADCILLIASILSDQQIEDFVNIAKKLELDYLIEV

SEQ ID NO: 148629 - protein, 252 aa, Unknown
  Bacterial polypetide isolated from the Sargasso Sea
MNILEEIVNRKKLDLKKIKELISIDQFLKQIDINQKGDFFKTLTNNDDQYHIIPETKKSSPSAGIIVKEYDPLKKASAYKNDGHKVISVLTEEHYFNGSIEHIKSIKSELDLKILRKDFIIDEWQIYESKAYGADCILLIAESLSKKDIAHFSNIANELNLDVLLEFHNEEQIDKVLSSGLDLIGINNRNLSTVETNISHCENLLNRHHQVLKPQNIIAESGFTLKSQLDDYVNIGVNKFLIGEGLLRNTLL

SEQ ID NO: 148630 - protein, 249 aa, Unknown
  Bacterial polypetide isolated from the Sargasso Sea
MNILDEIVANTKAKVSIAKEKVSLDDLVSTIHSNKIVKSKFKTSLRDKDQAIIAEIKKASPSAGIISENFDPVTKAQEYEAFGASALSILTEEDYFLGSTQYLKDVKKISKLPILRKDFIVDIYQIYESKLIGSDCILLIASILSDDELNDFTQLADTLGLDYIIEVHNEDELKRVQDFSEAIIGVNNRDLKSFTVDIENSIRLKQLFNQDNLFVAESGIKGQSDINKLLQHGINIFLIGESLMKGDFA

SEQ ID NO: 148631 - protein, 206 aa, Unknown
  Bacterial polypetide isolated from the Sargasso Sea
MPENILEKIIEKKIIKIDNLKKTLALESLKDIIDKNNTFLNFKEKIENNLKAQKFSIIAEIKKASPSAGVIINNYDPVQIANIYDQNKATCLSVLTEEDFFLGNSLHISKIKEKINLPILCKDFFIDKYQVPLAKSYGADAILIIMAGVSDNLASEIYDEALKHNMSVIVEVHTVEEAKRALRFNEALIGVNNRNLKTLKTDINTT

SEQ ID NO: 148632 - protein, 469 aa, Unknown
  Bacterial polypetide isolated from the Sargasso Sea
MQTSTAKANVLTRIVDTKAAHIAALKLRFPEDSLTPKISDRSLFAALKAPKAGYILECKKASPSKGLIRRDFDVEAIASIYAKYAAGISVLTDEQFFQGDMGYIPKVRAKVSQPILCKDFFVDEYQIKLAAHQGADAILLMLSVLDDKRYQQLASEAAKYQLDVLTEVSNEEELRRAIALNAPIIGINNRNLRDLSTDLATTEALAPHIGSDRVVISESGIYTNDQVRRLSPLVDGFLVGSSIMAEEDIDLACRKLIFGHNKVCGLTRLEDIQAAATAGAVYAGLIFAEKSPRALTKDAAKQLVEQYRAANLPAIEFVGVCVNSTPEFMVSIAQECGLAALQLHGSETELEIAELSQLLQQAGLNTQIWKAISVDAQSCELAAMPRGVQRYLFDSKNDAGFGGTGQVFDWQLPIAHKAEAMLAGGLNADNAARANAQGFYGLDFNSGLETAPGIKSAEKIQAAFSQLRL

SEQ ID NO: 148633 - protein, 482 aa, Unknown
  Bacterial polypetide isolated from the Sargasso Sea
MSDLIAPHAFLNMASISQTILGKIVATKQEWVAARKLAQPLESFQSTLTPSDRDFVGALKAGSTRFILECKKASPSKGLIRDDFSPEAIADIYGKYATAISVLTDEKFFQGDFAFLPRVRSRVSQPVLCKDFMIDPYQVYLARHYQADAILLMLSVLTDEGYRALFAVAKALGLGVLTEVSNEEELTRAIALGAPVIGINNRDLRDLSVDLARTKQLAKDIPSDRVVISESGINHRAQVADLRHHAKGFLVGSSLMAEPDLEAAVRKLVLGQNKVCGLTRAEDAAAAHQAGAVFGGLIFVAKSPRYVDIPAARAVMAGAPLAYVGVFRNAQPATLVKTVEALGLSAVQLHGDEDAAYIEGLRALLPAGCQIWKAVGVTSGEPLPALDYPADRLLLDTKVGSQSGGTGQAFDWALLANLDKAKLMLAGGLNPDNALQAAQVGCLGLDFNSGVESAPGQKDAHKLAAAFAALRPTVSAPCEAAH

SEQ ID NO: 148634 - protein, 260 aa, Unknown
  Bacterial polypetide isolated from the Sargasso Sea
KMLDDIIKNKIKEIDLLRESQKLSFDEACDLKYSKRSFIGALQSKINDGKNAIIAEIKRCSPSKGYLNKNLNIENMADIYEKSDASCISVLTDSKFFKGSIDDLIVIKQKTNLPVLRKDFILDESQLIQSCMIGSDCILLIIACLSENQFSNLLEKSKILGLDVLVEVHDENELKLALKYKCNLIGINNRNLATFEVNLDTSKKLARLVDTHNTLIVSESGIDNKGTIDDLNKNGIKTFLIGESLIVSPAPGDLLKSLVG

SEQ ID NO: 148635 - protein, 469 aa, Unknown
  Bacterial polypetide isolated from the Sargasso Sea
MQTSTAKANVLTRIVDTKAAHIAALKLRFPEDSLTPKISDRSLFAALKAPKAGYILECKKASPSKGLIRKDFDVEAIASIYTQYAAGISVLTDEQFFQGDMDYIPKVRAKVSQPILCKDFFVDEYQIKLAAHQGADAILLMLSVLDDERYQQLASEAAKYQLDVLTEVSNEEELKRAIALNAPIIGINNRNLRDLSTDLATTEALAPHIGSDRVVISESGIYTNEQVRRLSPLVDGFLVGSSIMAEEDIDLACRKLIFGHNKVCGLTRLEDIQAAATAGAVYAGLIFAEKSPRALSKDAAKQLVHQYRAANLPAIEFVGVFVNSTPEFMASIAQECGLAALQLHGSETELEIAELSQLLQQAELNTQIWKAVSVDAQSGELAAMPRGVQRYLLDSKNDAGFGGTGQAFDWQLPIAHKAEAMLAGGLNADNAARANAQGFYGLDFNSGLETAPGIKSAEKIQAAFSQLRL

SEQ ID NO: 148636 - protein, 159 aa, Unknown
  Bacterial polypetide isolated from the Sargasso Sea
KIKKIVDLPILRKDFIIDEFQIFESRFIGADCILLIVACLNDTELNNFYNISKSLKMDALIEVHNEDELQRALKLNPKMIGINNRNLKNMTVTLDTSIKLVKKIPKNILVISESGFKNHSDLKLMEQYGIKSFLIGETFMKSKNIQSSVKNILFGRNNA

SEQ ID NO: 148637 - protein, 156 aa, Unknown
  Bacterial polypetide isolated from the Sargasso Sea
TAIKSVVSIPLLRKDFIIDEYQVYQSKFYGADAILLIGKALGFSELKDLSSIANEQDLDILYEVHDEDDLEKGIKLGFNIFGVNNRNLNTFTVDNDNVIKFSKLIPEGSILVSESGILSKEDLDNIVLNGVRNFLIGEYLMKSEDRVGLLQVLLNA

SEQ ID NO: 148638 - protein, 72 aa, Unknown
  Bacterial polypetide isolated from the Sargasso Sea
NFPNAIIGVNNRNLKTFNVDIQNSIKMRNLFKKDNIFIAESGIKNQKDIDTLVSNGIHVFLIGESLMKGDFF

SEQ ID NO: 148639 - protein, 258 aa, Unknown
  Bacterial polypetide isolated from the Sargasso Sea
KIIKKKKEELEYLKKNVSISKLEKSIYFNSKTNSLVNSIKDKDISIIAEHKRKSPSKSDINHLTSTKDIVHGYEYGGAVGISFLTEKNFFDGSVEDFKEARKITKLPLLRKDFIIDEYQIIESKSIGADAILLIAACLNDADILKLSNLAKSIGLEVLIEIHEIEELKKSSISTIDIIGINNRDLKTFDVNIETSLNLINKIPSSFTKISESGLNSSVEINKLKNHGFDGFLIGERFMKSQYPGKELSNFISKIKDES

SEQ ID NO: 148640 - protein, 182 aa, Unknown
  Bacterial polypetide isolated from the Sargasso Sea
LPGLSILTEPDFFLGSLDYLLEVRKVCHLPILRKDFIIDEIQILESKAFGADCILLIASILDKNKIKEFYQIAKENELDVLIEVHDEKEAEIAMAVSPELLGINNRDLKTFDVDINNSIKIKKMLPKDQLIISESGIYSKDDINDLNEAKIYNFLVGEFFMRKKEPYKAVQDLIALSPISSR

SEQ ID NO: 148641 - protein, 132 aa, Unknown
  Bacterial polypetide isolated from the Sargasso Sea
IESKNLGADCILIIIGMNSIKENKLIESTALDIGLECILEVHSLEELEATKHFSSNIIGINNRDLNTFITDTDTTIKLLPHIPKNKTIISESGLSKKGELERLAELGVSSFLVGESLMKQNNVEKATKSLLE

SEQ ID NO: 148642 - protein, 196 aa, Unknown
  Bacterial polypetide isolated from the Sargasso Sea
MKILDKIVKDKKEEIIKLSLKNPISSLENEKLFSRKCISLKDSLLRSSSGIICEFKRKSPSNNNINYKSTISEVVRGYQKAGAAGLSILTNKKYFDGNIEDIIEIRNFAEIPILRKEFIISEYQIFEAKSIGADAILLIASILTSEDILNFSSLAKSLGLEVLVEIHLYEELKKISGNNIDIIGVNNRNLDTLEID

SEQ ID NO: 148643 - protein, 174 aa, Unknown
  Bacterial polypetide isolated from the Sargasso Sea
MEIRRRPPNPTVRVENLEYAVPHREAQAKNILEEIVWHKDIEIKNFKKIVSLEDLIKKIEKLPTPKDFYKNILESKIKPGVIAEIKKASPSKGVIRKDFNPEKIAICYEGLGASCISVLTDKRFFQGSYEILETVRKSTNLPLLCKDFIISAYQIYKARVSGADAILLNRCDFK

SEQ ID NO: 148644 - protein, 92 aa, Unknown
  Bacterial polypetide isolated from the Sargasso Sea
MASYLDKILSTKVQEVEQQKSVLNLDEIKLRIEDCSPRRGFIKAIKERNEKGLISVIAEIKKASPSKGIIREDFSPTEIAQQYENNGATCLS

SEQ ID NO: 148645 - protein, 161 aa, Unknown
  Bacterial polypetide isolated from the Sargasso Sea
ILARKLTNLPILRKDFIVDEYQIFESKYLGADAILLIATCLNKNEIIKFSHLAKQLNLDVLVEIHSKDELEKVCIDSVDIIGVNNRNLKDFSVNIENSIDIGKEIPDSFVKISESGLYNSEELKRLIEFGYDGFLIGELFMRESDPGDELSKLINQIKGED

SEQ ID NO: 148646 - protein, 248 aa, Unknown
  Bacterial polypetide isolated from the Sargasso Sea
MEIRRRPPNPTVRVENLEYAVPHREAQAKNILEEIVWHKDIEIKNFKKIVSLEDLIKKIEKLPTPKDFYKNILESKIKPGVIAEIKKASPSKGVIRKDFNPENIAICYEGLGASCISVLTDKRFFQGSYEILETVRRSTNLPILCKDFIISAYQIYKARVSGADAILLIAAILSDDDLIYLKKIADNLKMSVLVEVHNTNELERILKLKSFNLIGINNRDLKTFKTDLKTSIELMHTYADIFLKQNII

SEQ ID NO: 148647 - protein, 295 aa, Unknown
  Bacterial polypetide isolated from the Sargasso Sea
MEIRRRPPNPTVRVENLEYAVPHREAQAKNILEEIVWHKDIEIKNFKKIVSLEDLIKKIESLPATKDFYKNILESKIKPGVIAEIKKASPSKGIIRKDFNPEDIAICYEGLGASCISVLTDKRFFQGSYEILEIVRKSTNLPLLCKDFIISAYQIYKARVSGADAILLIAAILSDDDLIYLKKIADNLKMSVLVEVHNSNELERILKLKSFNLIGINNRDLKTFKTDLKTSIELMHTFADIFLKQNIIPISESGINSAEDLESLRSIGMKGVLIGETFMRETDIEQSFKKLFNSI

SEQ ID NO: 148648 - protein, 221 aa, Unknown
  Bacterial polypetide isolated from the Sargasso Sea
IDFENLRETNFKKSLQNKAEAIIAEIKKASPSAGIISDNFDPVSKSKEYESFGASALSILTEEDYFLGNIQYLKDVKATTSLPILRKDFIVDEYQIYESKLIGADCILLIASILNNKELKNFSETAERLKLDYIIEVHNEEELQRAQHFSNAIIGVNNRNLKTFDVDINNSVELKKIFEGENIFIAESGIKSKKDIEYLQQHNINVFLIGESLMKGDFFET

SEQ ID NO: 148649 - protein, 132 aa, Unknown
  Bacterial polypetide isolated from the Sargasso Sea
MEIRRRPPNPKVRVAHLEYAVPHDDDEPRHILEKIVWEKDREIDAAREKVPLDNLKQQIAKLPPTKDFLGALQAAATKPAVIAEVKKASPSKGVIREDFDPVAIAKAYAAGGASCLSVLTDKTFFQGGFDVL

SEQ ID NO: 148650 - protein, 249 aa, Unknown
  Bacterial polypetide isolated from the Sargasso Sea
MNSYLDKIIEQTTSTVEIDKKRIPLQELRSYLSDLTETKGFLKSIKSRHDDGLVSVIAEIKKASPSQGLIRENFNPEDIAKSYQASQATCLSVLTDAPYFKGSLEDLAAVREVVELPLLRKDFIVDEYQIYQSRFYGADCILLIASFLSDAQLKEFYEIAKELSLDVLIEVHDKSEMDRALKLEFPLIGINNRDLKTFKVNLETTINLSKGLQDKIIVSESGIKTKEDVKEIMSSGTKTFLVGESFMRA

SEQ ID NO: 148651 - protein, 179 aa, Unknown
  Bacterial polypetide isolated from the Sargasso Sea
MKINSLDKIINKKKEKLNLLKNKFKIKDLKYKIDKFDKYLDFKEKLYSNFSKGKYSIIAEIKKASPSAGVIIEDYNPVDIAKIYEKNNATCLSVLTEEDFFSGSLNHISKIKEQINLPILCKDFFIDKFQIPLAKSFGADAILLIVAALNQDQLEELYNTALEYKMSVIIEVHTMKRQK

SEQ ID NO: 148652 - protein, 153 aa, Unknown
  Bacterial polypetide isolated from the Sargasso Sea
SIQYLIDVKAITNLPILRKDFIIDEYQIYESKLIGADCILFIASILTDNKLKIFAEIADNLELDYIIEVHNKDELSRVKSYSKAIIGVNNRNLKTFEVDIENSIKLRKEFKQDNIFVAESGIKSQKDINKLIQNNINVFLIGESFMKGDFFEA

SEQ ID NO: 148653 - protein, 168 aa, Unknown
  Bacterial polypetide isolated from the Sargasso Sea
MEYNSLDKIINKKKEKLNLLKNKFKIEDLNYKINKFDKFLDFKQKIYSNYLSGKFSLIAEIKKASPSAGVIIQDYNPVNIAKIYEKNKATCLSVLTEEDFFNGSLDHIYKIKEKVNLPILCKDFFIDKFQIPLAKSFGADAILLIVAALSQNQLEELYNTALEYKMSV

SEQ ID NO: 148654 - protein, 175 aa, Unknown
  Bacterial polypetide isolated from the Sargasso Sea
KEYESFGASALSILTEEDYFLGNIQYLKDVKAITSLPILRKDFIVDEYQIYESKLIGADCILLIASILNDEELKNFSEIAERLKLDYIIEVHDEEELQRVQHFSNAIIGVNNRNLKTFDVDINNSVELKKIFEGENIFIAESGIKSKKDIEYLKQHNINVFLIGESLMKGDFFET

SEQ ID NO: 148655 - protein, 145 aa, Unknown
  Bacterial polypetide isolated from the Sargasso Sea
MNNMSILKEICNNKKLEIKSLKEKFSQSNLLEISKYQEKPRGFKTALTSKVNNNQYALIAEVKKASPSRGIIKEDFNPKDIAASYYKGGATCLSVLTEIKWFKGSIDYLIEISKNISLPILRKDFIIDPWQIYESRSIGADCILI

SEQ ID NO: 148656 - protein, 208 aa, Unknown
  Bacterial polypetide isolated from the Sargasso Sea
MGNNNYTLITEIKRASPSKGIIREDFNPTELAISYEKGGASCLSVLTDVTYFKGSNDYISQIKNVVSLPVLRKDFMIDPLQVIESKNLGADCILIIIGMNSIEDNKIIESMALDIGLECILEVHSLEELEATKHFSSNIIGINNRDLNTFHTDIETTVKLLPNVPKNKTVISESGLSRKSDLERLAKLGVSSFLVGEKFNEATRFLKK

SEQ ID NO: 148657 - protein, 259 aa, Unknown
  Bacterial polypetide isolated from the Sargasso Sea
MLDRIIQDKKEEVKILKSNQKHTIADVLDMEFEKREFYSSLRTKIESGKNAIIAELKKHSPSKGMLNQNLDIAEFSKIYEDSGAACISVLTDRIHFHGKIDDLITAKKSVKLPILRKDFIIDESQIIQSKLIGADCILLIVACLSKTQLHDLLTISKKLNMEVLLEVHDRNELDIALESECKIIGINNRNLKTFNVSINTSLELCEAINDDDIIVISESGIKDIETIEKLNSKNIKSFLVGESLIMNSDPKLLLKTLVG

SEQ ID NO: 148658 - protein, 102 aa, Unknown
  Bacterial polypetide isolated from the Sargasso Sea
RLKIMYLKQKPINLDVLIEVHDEEELARISRFKNALIGVNNRNLKTFEVDLTNAVRLRKNYNGNQIFIAESGIKSNEDIEYLVSNDINVFLIGESLMRGNLF

SEQ ID NO: 148659 - protein, 160 aa, Unknown
  Bacterial polypetide isolated from the Sargasso Sea
MNPTVLDKIKAYKLVEIENDKKVRSLLDIESIAKSAPKVRSFSKALSNTKNSVYSLIAEIKKASPSKGLIREDFNPSKIAKAYQAGGAACLSVLTDTPSFQGAKHYLEEAKSVTSLPALRKDFMYDIYQVAEARALNADCILIIMASVSDMQAQELKTPH

SEQ ID NO: 148660 - protein, 193 aa, Unknown
  Bacterial polypetide isolated from the Sargasso Sea
MSILDKIVATKQQELAALPVTAVTVDSLRAQVATRGGVRDFTAALAEPRTGDVGLIAEVKKASPSAGIIRPDFDPVQIAQEYETAGASCLSVLTDEQYFQGSPEYLRQIREAVDVPLLRKDFVIDARQIAEAIEWGADAVLLIVAILDDDRLREFHELAVGAGLSALVEVHDAEELARAKALEAPLIGVNTAI

SEQ ID NO: 148661 - protein, 181 aa, Unknown
  Bacterial polypetide isolated from the Sargasso Sea
GYFNGGASAISILTDEKFFQGKIDYITAIRAIIDIPILRKDFIIDDYQIYQSKFYGADAILLIGKALSLEKLISLFEISQELNLDVIYEVHDEDDFNKGIKAGVKIFGVNNRNLENFDVDNANVLNFINKIPNDSILISESGISSKNDLDMLVNSGVKNFLIGEYLMISPNKELTLNNLLK

SEQ ID NO: 148662 - protein, 148 aa, Unknown
  Bacterial polypetide isolated from the Sargasso Sea
DYLKNVKKITALPILRKDFMIDEYQIYESKLIGADCILLIASILSDQQIEDFVNIAKKLQLDYLIEVHDENELRRVEHFQDALIGINNRNLKTFEVDLDNSVRLRNAFKQKNIFIAESGIKSREDIDYLKLHNIKVFLIGESLMRGSF

SEQ ID NO: 148663 - protein, 255 aa, Unknown
  Bacterial polypetide isolated from the Sargasso Sea
MSSYLDRIIKTKVEVVEQQKALLTLSEMQHKLENIFPTRDFIKTIESRNIEGQISVIAEVKKASPSKGVIRKDFSPKQIAKQYESSGATCLSILTDEEYFQGSIDYLMDIRSEVELPLLRKDFIIDEYQIYQSRLFGADCILLIVSILSDDQLGNFKNLAESLNLDVLVEIHDLNELDRIRPFDFPLVGINNRNLSTFEVDLETTKIIAEKIPHRLVVSESGIKTKSDINQIVSYDVRNFLVGESFMRAQDPGQE

SEQ ID NO: 148664 - protein, 251 aa, Unknown
  Bacterial polypetide isolated from the Sargasso Sea
MNILDEIVAKTKSKLEEKKQGLSLEELSSKIDFENLKETNFKKSLQNKAEAIIAEIKKASPSASIISENFDPVLKSKEYESFGASALSILTEEDYFLGNIQHLMDVKAITSLPILRKDFIVDEYQIYESKLIGADCILLIASILNDEELKNFSEIAERLKLDYIIEVHDEEELQRVKHFSNAIIGVNNRNLKTFDVDINNSVELKKIFEGENIFIAESGIKSKKDIEYLQQHNINVFLIGESLMKGDFFET

SEQ ID NO: 148665 - protein, 259 aa, Unknown
  Bacterial polypetide isolated from the Sargasso Sea
MSILNEIYKYKLDFVAHRKKTLPQKKIEKKIITNSDTNFTFKNKLNCQSNKFSIIGELKKASPSLGKFVKSNVNLIELAQIYEKCGVSCLSILTDEKYFNGKLIDLKQIKKNTSIPILRKDFIVDEYQIYESKLVGADCILIILSMLNQKDAVRFTDLANELGLDTIIEVHNTEELKRSDKISSEIIGINNRNLNNFITDINTTIKLSKEIKQSEKILVSESGFQSKQDLDKIYDETGINKFLIGEYLMKSNNLSSLIK

SEQ ID NO: 148666 - protein, 229 aa, Unknown
  Bacterial polypetide isolated from the Sargasso Sea
SLGELSSKIDFENLKETNFKKSLQNKAEAIIAEIKKASPSAGIISDNFDPVLKSKEYESFGASALSILTEEDYFLGNIEYLKDVKATTSLPILRKDFIVDEYQIYESKLIGADCILLIASILNDEELKNFSETAERLKLDYIIEVHDEEELQRVQHFSNAIIGVNNRNLKTFDVDINNSVELKKIFEGENIFIAESGIKSKKDIEYLQQHNINVFLIGESLMKGDFFET

SEQ ID NO: 148667 - protein, 172 aa, Unknown
  Bacterial polypetide isolated from the Sargasso Sea
MKTLQDIIEYKKKEIIGEKSLFSFSEINDLILKNNPPRGFLHSLITNKNKFGIISEVKKASPSKGIIRKDFDHIKIAQSYEKSGATCLSVLTDSNFFQGKKSYIKDIKMKIDLPILRKDFIIDSWQIKQSRMIDADCILLILSCLSFNQAKEYEDEAMDLGMDVIIETHTEK

SEQ ID NO: 148668 - protein, 262 aa, Unknown
  Bacterial polypetide isolated from the Sargasso Sea
MNSYLDKIIEQTTSTVEIDKQRIPLQELRSYLSDLNETKGFLKSIKSRHDDGLVSVIAEIKKASPSQGLIRENFNPEDIAKSYQASQATCLSVLTDAPYFKGSLEDLAAVREVVELPLLRKDFIVDEYQIYQSRFYGADCILLIASFLSDAQLKEFYEIAKELSLDVLIEVHDKSEMDRALKLEFPLIGINNRDLKTFKVNLETTINLSKGLQDKIIVSESGIKTKEDVKEIMSSGTKTFLVGESFMRASDPGEELQKLFFS

SEQ ID NO: 148669 - protein, 174 aa, Unknown
  Bacterial polypetide isolated from the Sargasso Sea
MKTNILDKIRDYKINEVKERKINFPQNDIIDLIKDDKKTLGFRDKLIEKNDKGFPGIIAEVKKASPSKGIIKQNFNHIDIAKDYETGNAACISVLTDFPSFQGKLEFLKDIRDNVNLPLLRKDFMIDPYQVYEAKLYGADCILIIMKMVEQDKANEIYKTAKKINMDVIFEVNN

SEQ ID NO: 148670 - protein, 185 aa, Unknown
  Bacterial polypetide isolated from the Sargasso Sea
MNILDEIVLNTKTKLEEKKLHLPFNELLSKINLEDIEQSNFKKNLENKPKAIIAEIKKASPSAGLIRENFDAISKAKEYESFGASALSILTEEDYFLGSIEHLKQVKAITNLPILRKDFIIDEYQIYESKFIGADCILLIASILNENELFTFSETAEKLGLDYIIEVHDENETFRVEQFSNALIG

SEQ ID NO: 148671 - protein, 235 aa, Unknown
  Bacterial polypetide isolated from the Sargasso Sea
MNVLNDILDGVREDVAQRMQRVPLEQVKERASMTSAPRDPRPTLTDEDVCVIAEVKRESPSRGPLAEIADPAALARDYEAGGAHCISVLTEERRFGGSLDDLASVRAAVDVPVLRKDFIIGSYQLWEARAYGADLVLLIVAALGQDALVSLVERSRTLGLTPLVEVHDENEIARALDAGADIIGVNARDLTTLEVDRGVFARVAHLIPDSCIKIAESGVREPHDLIAYAEAGADG

SEQ ID NO: 148672 - protein, 168 aa, Unknown
  Bacterial polypetide isolated from the Sargasso Sea
AAAISVLTEEDFFQGSPEDLQQVKTAVDLPILRKDFIIDSYQIYASKAMGAECILLIASILDDSQLQEFSQLAELLKLDYIIEVHTIEELKRAEQFSKAIIGVNNRDLRTFTVDLENSVNLKAACSTNNIFVAESGIKTLDDMHYLASKGINNFLIGESLMRGSFHAT

SEQ ID NO: 148673 - protein, 235 aa, Unknown
  Bacterial polypetide isolated from the Sargasso Sea
KKISLREVKSYISDLNKTQGFFESIKNRCDKGLVSVIAEIKRASPSKGLIRENFNPRDIAISYQEHHATCLSVLTDTPFFKGSLEDLSSVREAVDLPLLRKDFIVDEYQIYQSRFYGADCILLIASVLTDNQLKEFREIAEELSLDTLVEVHDKSEMDRVRKLDFKLIGINNRDLKTFKVNLDTTINLSHNLKDTIIISESGIQSREDIEKILTSGTKTFLVGKSFMRASDPGQA

SEQ ID NO: 148674 - protein, 269 aa, Unknown
  Bacterial polypetide isolated from the Sargasso Sea
MQGILKEIYDYKVDLINHLKAKENQKSLESKILSSKKSRGFFNKINNNIKSKKPSIIAEIKKASPSKGVIKENFIPEKIAKIYQLGKASCISVLTDSKFFLGSNDDLIKVKNVTNIPILRKDFIVSEYQIYESKIIGADCILLISEILSENQIDEYINLAKSIDLDVLIEVHSEENFIKFINKKKVLLGVNNRNLKNMVVDINHALKVVKTNNKNYIICESGIKSFQQYQNLISQGFKNFLIGEYFMKSKDTKKELLKFTNEPLKIESY

SEQ ID NO: 148675 - protein, 290 aa, Unknown
  Bacterial polypetide isolated from the Sargasso Sea
LECKKASPSKGLIRSPFDLDEISAAYAQYADCISVLTDEKFFQGNYDYLAKVRAKVNQPLLHKDFIIDPYQIYLGRLQGSDAVLLMLSVLNDLEYLELAKVAKSLNLTILTEVSNEAETLRAVALGAELIGINNRDLRTLDTNLETSFKLARLIPKGITIVSESGIYSSQQVRQLAKVADAYLVGSSLMAQADLADACRSLIRGEHKVCGLTRAQDSKAVYDNGAYFGGLIFYPKSPRCVTVEQAKAVQQGAPALHYVGVFVDEAVETVAEMAKDLKLAAVQLHGDESDL

SEQ ID NO: 148676 - protein, 177 aa, Unknown
  Bacterial polypetide isolated from the Sargasso Sea
DRNWFHGEPEFLVAARAAVTLPVLRKDFMIDPLQIIESRSLGADCILLIMAALEDDAAAELESCAFEYDMDVLIECHDNAEIERAKKLKSRLIGINNRNLKTMEISLDVGEAMLPHLPADRIAVAESGLFYPADLARMAVIGARCFLIGESLMRADDVAGATAAILANPVGVPARAG

SEQ ID NO: 148677 - protein, 115 aa, Unknown
  Bacterial polypetide isolated from the Sargasso Sea
MSDILKKITDYKKSEVLKLKKKQSIKDFEKEIINIENPRKFFDTLISASNDKFGLIAEVKKASPSKGIIRKDFNPEKIAIDYEKAGAACLSVLTDQNFFHGKKEYLEKIKKIVDL

SEQ ID NO: 148678 - protein, 121 aa, Unknown
  Bacterial polypetide isolated from the Sargasso Sea
PTKRDFEGALAATGTQFILECKKASPSKGLIREPFNLEEITSVYKKYATCMSVLTDEKYFQGSYQYLEYVRSQVEQPLICKDFFIDEYQVYLARLSGGDAILLMLSVLDDEQYLALHKVAD

SEQ ID NO: 148679 - protein, 180 aa, Unknown
  Bacterial polypetide isolated from the Sargasso Sea
MNILDEIVANTRSKLEDKKLKESLDDLLSKIDMDNLGKNIFKKGLEGKSESIIAEIKKASPSAGLISKDFDPVSKAKEYELFGASALSILTEEDYFQGDVQYLIDVKNASNLPILRKDFIIDEYQIYESKLIGADCILLIASILNDEELKIFSQIADKLCLDYIIEVHDKDELLRVKISP

SEQ ID NO: 148680 - protein, 266 aa, Unknown
  Bacterial polypetide isolated from the Sargasso Sea
KYSGRIVWHKDIEIKNFKKIVSLEDLIKKIEKLPTPKDFYKNILESKIKPGVIAEIKKASPSKGVIREDFNPENIAICYEELGASCISVLTDKRFFQGSYEILETVRRSTNLPLLCKDFIISAYQIYKARVSGADAILLIAAILSDDDLIYLKKIADNLKMSVLIEVHNSDELERILKLKSFNLIGINNRDLKTFKTDLKTSIELMHTYSDIFLKQNIIPISESGINCAKDLELLRSIGIKGVLIGETFMKETDIEQSFKKLFNSI

SEQ ID NO: 148681 - protein, 123 aa, Unknown
  Bacterial polypetide isolated from the Sargasso Sea
IYESKLIGADCILLIASILSDQQIEDFINVAQQLELDYLIEVHDENELRRVEHFEDALIGINNRNLKTFEVDLENSVRLRNVFKQKNVFIAESGIKSRKDINYLKLNNIKVFLIGESLMRGSF

SEQ ID NO: 148682 - protein, 282 aa, Unknown
  Bacterial polypetide isolated from the Sargasso Sea
MEIRRRPPNPTVRVENLEYAVPHREAQAKNILEEIVWHKDIEIKNFKKIVSLEDLIKKIEKLPTPKDFYKNILESKIKPGVIAEIKKASPSKGVIRKDFNPEKIAICYEGLGASCISVLTDKRFFQGSYEILETVRRSTNLPLLCKDFIISAYQIYKARVSGADAILLIAAILSDDDLIYLKKIADNLKMSVLVEVHNTNELERILKLKSFNLIGINNRDLKTFKTDLKTSIELMHTYADIFLKQNIIPISESGINCAEDLESLRSIGIKGVLIGETFMRET

SEQ ID NO: 148683 - protein, 175 aa, Unknown
  Bacterial polypetide isolated from the Sargasso Sea
MGKIAGVGVLYRCIQRGECRVSIPTVLEKILARKAEEVAARRAVVSLAELEQQARAADPVRGFAEALISQAKRKQPAVIAEIKKASPSKGVLREQFVPAEIAESYQAGGATCLSVLTDIDFFQGADRYLQEARGACSLPVIRKDFMIDPYQIVEARALGADCVLLIVSGLDDAQM

SEQ ID NO: 148684 - protein, 171 aa, Unknown
  Bacterial polypetide isolated from the Sargasso Sea
MEIRRRPPNPKVRVAHLEYAVPHDDEEPRHILEKIVWEKDREIDAARDKVPLDNLKQQIAKLPPTKDFLGALQAAATKPAVIAEVKKASPSKGVIREDFDPVAIARAYAAGGASCLSVLTDKTFFQGGFDVLVQVRQAVDLPLLCQEFVLSPYQLFQARAAGADAVLLIAA

SEQ ID NO: 148685 - protein, 197 aa, Unknown
  Bacterial polypetide isolated from the Sargasso Sea
MNILDEIVLKKRTRVTEAKSIVSIEDIQNQLAKSSSLKSNFKNNLENQAQAIIAEIKKASPSAGIIAEDFNPILKAQEYEKMGARALSILTEEDFFQGSNKVLQDVKKVTNLPILRKDFIIDDYQIYESKLIGADCILLITSILSDSQIEEYVSKAEAINLDVLIEVHDEEELARVSRFHNALIGVNNRNLKTLKLI

SEQ ID NO: 148686 - protein, 216 aa, Unknown
  Bacterial polypetide isolated from the Sargasso Sea
MAIPEYLYKIINSKKKEVEHLVSHFGISYFKEEISKESPFKSIFYAVLAKPGLQLIAEVKKASPSKGIINNDFEPLSIAQNYVTKGASLLSVLTEKKYFLGHPTYIKHIKKSVSIPIIRKDFIFEPIQVYESRVLGADAILLILSILDDDKAQELLSLATSIGLDVIVEVHSEEELKRALKYKDIKIIGINNRNLNTFVVNTDISINLFESYLKEK

SEQ ID NO: 148687 - protein, 266 aa, Unknown
  Bacterial polypetide isolated from the Sargasso Sea
MTDVLERIAAYKREDVAARKAARSQDAIETLALAASAPRGFRDALDRKVEETGRPALIAEIKKASPSRGLIRADFDPPALALAYQAGGAACLSVLTDGPSFQGDDAFLGQARAAVSLPCLRKDFLVDPWQVAESRALGADCILIILAMVDDALAAELLAEAGRFGMDALIETHDEAEMARACALGGDLVGVNNRSLRTFEVDLETTERLSMLSPVKALLVAESGIFTPEDVERVSAAHAQAILVGESLMRQADVKPPPGRCWPPDV

SEQ ID NO: 148688 - protein, 143 aa, Unknown
  Bacterial polypetide isolated from the Sargasso Sea
PYQLFQARAAGADAVLLIAAILTDQDLRYLRKAAASLGLDVLVEVHDAGELERVLTLGEFPLIGINNRDLTSFETDLTTTERLTEDFRPRLQQQQVLLVSESGLFSRSDLDRVQAAGAGAVLVGEALMRQQDVQMALTTLIGG

SEQ ID NO: 148689 - protein, 126 aa, Unknown
  Bacterial polypetide isolated from the Sargasso Sea
MGATENILDEILAQKEQEVVTAKQRLSLEEIESQIKGFPSPRPFIGSLRSVISNREPAVIAEIKKASPSKGLIRPEFHPSEHAKDYETNGATCLSVLTDVEYFMGSDDYLSEVKQASSLPVLRKDF

SEQ ID NO: 148690 - protein, 197 aa, Unknown
  Bacterial polypetide isolated from the Sargasso Sea
MEIRRRPPNPKVRVAYLEYAVPHDDEKPRHILEEIVWEKDREIDVARQKVPLEKLRSQIQDLPPTRDFIAALRSSTRKPAVIAEVKKASPSKGVIREDFDPVAIARAYASGGASCLSVLTDKTFFQGGFEVLVDVRQAVDLPLLCKEFILSPYQLYQARAAGADAVLLIAAILTDQDLNYLRKAAKALSLDVLVEGH

SEQ ID NO: 148691 - protein, 148 aa, Unknown
  Bacterial polypetide isolated from the Sargasso Sea
MDVKAITSLPILRKDFIVDEYQIYESKLIGADCILLIASILNDEELKNFSEIAERLKLDYIIEVHDEEELQRVQHFSNAIIGVNNRNLKTFDVDINNSVALKKIFEGENIFIAESGIKSKKDIEYLQQNNINVFLIGESLMKGDFFET

SEQ ID NO: 148692 - protein, 286 aa, Unknown
  Bacterial polypetide isolated from the Sargasso Sea
PPVRVENLEYAVPHREAQAKNILEEIVWHKDIEIKNFKKIVSLEDLIKKIEKLPTPKDFYKNILESKIKPGVIAEIKKASPSKGVIRKDFNPEKIAICYEGLGASCISVLTDKRFFQGSYEILETVRKSTNLPLLCKDFIISAYQIYKARVSGADAILLIAAILSDDDLIYLKKIADNLKMSVLVEVHNSNELERILKLKSFNLIGINNRDLKTFKTDLKTSKELMHTYADIFLKQNIIPISESGINSAEDLESLRSIGIMGVLIGETFMRETDIEQSFKKLFNSI

SEQ ID NO: 148693 - protein, 159 aa, Unknown
  Bacterial polypetide isolated from the Sargasso Sea
MSDALTKICADKRDHVAAAKTAQSLADTETAARQASPVRGFYNALKLMADSGRYGLIAEVKKASPSKGLIRENFDPPAIASAYEKGGATCMSVLTDIPYFQGADEHLVTASSAVSLPVIRKDFMIDPYQVPEARALGADCILLILAALDDGLAAELEAA

SEQ ID NO: 148694 - protein, 178 aa, Unknown
  Bacterial polypetide isolated from the Sargasso Sea
MEIRRRPPNPTVRVENLEYAVPHRESQAKNILEEIVWHKDIEIKNFKKIFSLEDLIKKIEKLPAPKDFYKNILESKIKPGVIAEIKKASPSKGVIRKDFNPEEIAICYEGLGASCISVLTDKRFFQGSYEILETVRKSTNLPLLCKDFIISAYQIYKARVYGADAILLIAAILSDDDL

SEQ ID NO: 148695 - protein, 262 aa, Unknown
  Bacterial polypetide isolated from the Sargasso Sea
MSILKEIYEYKIDFVSNQKEITPQSKIESKLNINNINFPFFEKLNHEKGQISIIGEIKKASPSLGKFTEENINLIDFAKAYEDNNISCISVLTDEKYFNGKIDDLIEIKKEVQLPILRKDFIVDDYQIYESKLIGADCILIILSMLSQDDANRFAELASELKMDSIIEVHDYDELQRAKSMNSNMIGINNRNLNNFVTNLDTTINLSQHLDNCNKLIISESGFHSKSDISKIYTTTGISNYLIGEFLMKSDNLPDHIAELLN

SEQ ID NO: 148696 - protein, 260 aa, Unknown
  Bacterial polypetide isolated from the Sargasso Sea
MSILDNIKLTKLEEVSKLDKKKLEYDKLNFLKSSQNNGRFENSLKKLGSNDYTLITEIKRASPSKGIIRKEFNPTQLAISYEKGGASCLSVLTDVTYFKGSIDYIAQIKDIVSLPILRKDFMIDPLQVIESKNLGADCILIIIGMNSIEDNKIIESMALDIGLECILEVHSLEELEATKHFSSNIIGINNRDLNTFNTDIETTVKLLPNVPKHKTVISESGLSKKSDLERLAKLGVSSFLVGESLMRQEDPEKATKLLMN

SEQ ID NO: 148697 - protein, 269 aa, Unknown
  Bacterial polypetide isolated from the Sargasso Sea
MSLTVLDKIKAYKLVEIENDKKVRSLLDIESLAKSAPKVRSFSKALSNTKSSVYSLIAEIKKASPSKGLIREDFNPSKIAKAYQAGGAACLSILTDTPSFQGAKHYLEEAKSVTSLPALRKDFMYDIYQVAEARALNADCILIIMASVSDMQAQELEDAALFWNMDVLLEVHDEIELERALNLKSKLIGINNRNLKTFKTDINTTRNLAKLIPENRFLISESGLNSSEDLRELKSHGASAFLIGESLMRQNDVEVATRDLISKPASEYN

SEQ ID NO: 148698 - protein, 264 aa, Unknown
  Bacterial polypetide isolated from the Sargasso Sea
MASYLDEIIKDKHSVVAEEERRESLEDIKSKILDLPPRRGFIQSIQQRNNKGLVSVIAEIKKASPSKGVIRENFSPETIAKQYEENNATCLSILTDKKFFHGSLEYLKKIRSKVEIPLLRKDFIINEYQIYQSKLYGADCILLIVSALSDSQLKEFKNIAESLDLDVLVEIHNQAELERIQPIDFPFIGINNRNLSTFEVDLKTTKELSLNLKDKLIVSESGIKTREDIDQILNYDVLNFLVGESFMRAENPGTELRKLFFSPE

SEQ ID NO: 148699 - protein, 237 aa, Unknown
  Bacterial polypetide isolated from the Sargasso Sea
MENCKSLNADESNKFSSKLINENNKKISIIGELKRSSPSAGTIIDNNVDIINIAKQYEENGISCISILTDEKYFKGSINDLIEVKKHISLPILRKDFIVDEYQIYESKVIGADCILLILSILDHKQACLFENISSEIGLDVLIEVHNEEEMKRAELMKSKLVGINNRDLNDFSIDINNSIKISNITKSNKLIVAESGINTRQDIDHIKNNSSIDTFLIGESLMRSPNLSQNVKNLIN

SEQ ID NO: 148700 - protein, 263 aa, Unknown
  Bacterial polypetide isolated from the Sargasso Sea
MNSYLDKIIDQTILTVEADKKKISLGEVKSYISDLNNTKGFFESIKDRYDQGLVSVIAEIKRASPSQGLIRENFNPRDIAISYQEHHATCLSVLTDTTFFKGSLEDLSSVREVVDLPLLRKDFIVDEYQIYQSRFYGADCILLIASVLPDNQLIEFKEIAEELNLDTLVEVHDKSEMDRVRKLDFKLIGINNRDLKTFKVNLDTTINLSHNLTDRIIISESGIQSREDIEKILISGTKTFLVGESFMRASDPGQALEQLFYSS

SEQ ID NO: 148701 - protein, 251 aa, Unknown
  Bacterial polypetide isolated from the Sargasso Sea
MNILDEIVAKTKSKLEEKKQGLSLEELSSKIDFENLKVTNFKKSLQNKAEAIIAEIKKASPSAGIISDNFDPVLKSKEYEFFGASALSVLTEEDYFLGNIQHLMDVKAITSLPILRKDFIVDEYQIYESKLIGADCILLIASILNDEELKNFSEIAERLKLDYIIEVHDEEELQRVQHFSNAIIGVNNRNLKTFDVDINNSVALKKIFEGENIFIAESGIKSKKDIEYLQQNNINVFLIGESLMKGDFFET

SEQ ID NO: 148702 - protein, 265 aa, Unknown
  Bacterial polypetide isolated from the Sargasso Sea
MKNNILDKIKDYKISEVEEKKLNFPQEDIVNLIKNINSTRGFHSNLKEKNNNGYPGIIAEVKKASPSKGIIKQDFNHIDIANDYEAGNASCISVLTDFPSFQGKLEFLKDIHENVNLPLLRKDFMIDPYQVYEARLYRADCILIIMKMVNQETANELNETAKKMKMDVIFEVNNEDELNKALDLKPKMIGINNRDLRTFKTDLNNSINLSKKISDEITLISESGISERKDIELLLDHNIRNFLIGESIMKSSNIINVLKSFTGKY

SEQ ID NO: 148703 - protein, 261 aa, Unknown
  Bacterial polypetide isolated from the Sargasso Sea
MLENIIKNKIIEVEILKSSTKYELDNMIKTQSNNYNFLSRLKNVSQDGSNPIIAEIKRKSPSKGNLDSKLDVKVLSKIYEDNGAACISVLTDEKFFGGNIRDLQLVKENVSIPVLRKDFIIDEYQLLESKYHGADCVLLIVACLEEKKLRLLLQMCKKLNLQALVEVHTLDEMHIALRNEAYLIGINNRNLKTFEVDINTTTQLSKLKNGNTMLVSESGLKDRETLDKLKKCGVDAFLIGESLVTSQNPSKNLRELVGNVK

SEQ ID NO: 148704 - protein, 295 aa, Unknown
  Bacterial polypetide isolated from the Sargasso Sea
MEIRRRPPNPTVRVENLEYAVPHREGQAKNILEEIVWHKDIEIKNFKKIVPLEDLIKKIEKLPTPKDFYKNILESKIKPGVIAEIKKASPSKGVIRKDFNPENIAICYEGLGASCISVLTDKRFFQGSYEILETVRRSTNLPLLCKDFIISAYQIYKARVSGADAILLIAAILSDDDLIYLKKIADNLKMSVLVEVHNANELERILKLKSFNLIGINNRDLKTFKTDLKTSIDLMHTYADIFLKENIIPISESGINCAEDLESLRSIGIKGVLIGETFMRETDIEQSFKKLFTSI

SEQ ID NO: 148705 - protein, 251 aa, Unknown
  Bacterial polypetide isolated from the Sargasso Sea
MNILDEIVAKTKSKLEEKKQGVSLEELSSKIDFENLKETNFKKSLQNKTEAIIAEIKKASPSAGIISDNFDPVLKSKEYESFGASALSILTEEDYFLGNIQYLIDVKATTSLPILRKDFIVDEYQIYESKLIGADCILLIASILNDEELKNFSETAERLKLDYIIEVHDVEELQRVKHFSNAIIGVNNRNLKTFDVDINNSVELKNFFEGENIFIAESGIKSKKDIEYLQQHNINVFLIGESLMKGDFFET

SEQ ID NO: 148706 - protein, 249 aa, Unknown
  Bacterial polypetide isolated from the Sargasso Sea
MNILDEIVANTKAKVSIAKEKVSLDELVSTINSKNIVKSKFKASLKDKDQAIIAEIKKASPSAGVISESFDPVTKAKEYEAFGAAALSILTEEDYFLGSIQFLKDVKEVSDLPILRKDFIVDIYQIYESKLIGSDCVLLIASILSDTELDEFTKLADLLGLDYIIEVHNEEELRRAQNFPEAMIGVNNRNLKTFNVDIENSIRLKKLFTKNNLFIAESGIKGQEDIDKLIENDINVFLIGESLMKGDFV

SEQ ID NO: 148707 - protein, 251 aa, Unknown
  Bacterial polypetide isolated from the Sargasso Sea
MNILDEIVAKTKSKLEEKKQGLSIEELISKLDFQNFKESNFKESLENKTEAIIAEIKKASPSAGIISENFDPILKAKEYESFGVSALSILTEEDYFLGNIQYLKDIRANTSLPILRKDFIVDDYQIYESKLIGADCILLIASILNDDELKVFSETAEKLKLDYIIEVHNEEELRRIENFSSAIIGVNNRNLKTFEVDINNSIKLKKIFKEDNIFISESGIKSKKDIQQLQQHNINVFLIGESMMKGDFFET

SEQ ID NO: 148708 - protein, 168 aa, Unknown
  Bacterial polypetide isolated from the Sargasso Sea
MSILKKIVENTRENLKAKKAKLSLEDVKSSLKELDLPKSNFKSSISNKDEAIIAEIKKASPSAGVISENFNPVEKAKEYESVGAAALSILTEEDFFLGSIDYLKAVKRTTSLPILRKDFIIDEYQIYESKLIGADCILLIASILSDLQIEEFVKIAEKLELDYLIEVH

SEQ ID NO: 148709 - protein, 133 aa, Unknown
  Bacterial polypetide isolated from the Sargasso Sea
KDLFMMIYQIYESKLIGADCILLITSILSDMQIEDYVSKAEAIHLDVLIEVHDEEELARISKFHDVLIGVNNRNLKTFEVDLMNAVRLRKNYSGNQIFIAESGIKSNADIEYLISNDINVFLIGESLMRGNLF

SEQ ID NO: 148710 - protein, 148 aa, Unknown
  Bacterial polypetide isolated from the Sargasso Sea
MEIRRRPPNPKVRVAHLEYAVPHDEEEPKNILEKIVWAKDREVDAARERVPLQTLKRQIEDLPPTRDFLAALREAPVQPAVIAEVKKASPSKGVIREDFDPVAIAEAYAAGGARCLSVLTDKTFFQGGFDVLVEMRQAVDLPLLCKEF

SEQ ID NO: 148711 - protein, 195 aa, Unknown
  Bacterial polypetide isolated from the Sargasso Sea
MLDEIIKNKLKEVSQLKSSFDISKIDVSAPKKPFYETLLLRQGNKKNSIIAEIKKRSPSKGILDSSLNVSEKAIQYEAGGASCLSVLTEKDYFNGSIDDLLVAKKSVNLPVLRKDFIIDPLQVYQSKMIGADCILLIVSALSHKLFEELYSLATSLNLDVLAEVHDINELNFVKSLGIKLLGINNRNLKTFEVDI

SEQ ID NO: 148712 - protein, 208 aa, Unknown
  Bacterial polypetide isolated from the Sargasso Sea
AEVKKASPSKGIIKQNFNHIDIAKDYETGNAACISVLTDFPSFQGKLEFLKDIRDNVDLPLLRKDFMIDPYQVYEAKLYGADCILIIMKMVEQDKANEIYKTAKKINMDVIFEINNESELNNALDLEPKIIGINNRDLRTFKTDINNSVILSKKIDKEITLISESGISKREDIELLFENNIKNFLIGESIMKSSNIINELELLTRKFS

SEQ ID NO: 148713 - protein, 266 aa, Unknown
  Bacterial polypetide isolated from the Sargasso Sea
MKNNILDKIRDYKINEVKERKINFPQNDIIDLIKDDKKTLGFQDKLIEKNDKGFPGIIAEVKKASPSKGIIKQNFNHIDIAKDYETGNAACISVLTDFPSFQGKLEFLKDIRDNVNLPLLRKDFMIDPYQVYEAKLYGADCILIIMKMVEQDKANEIYKTAKKINMDVIFEINNESELNNTLDLEPKIIGINNRDLRTFKTDINNSVILSKKIDKEITLISESGISKREDIELLFENNIKNFLIGESIMKSSNIINELELLTGKFS

SEQ ID NO: 148714 - protein, 251 aa, Unknown
  Bacterial polypetide isolated from the Sargasso Sea
MNILDEIVSNTKSKLEYRKIQKSFDEIYLEISNKTFKKSIFKESLTNKTEAIIAEIKKASPSAGIISKDFDPVSKAKEYEALGASALSILTEEDYFLGSTDYLKAVREISNLPILRKDFIVDEYQIYESKLIEADCILLIASILTDSDLKNFSKIADNIGLDYIMEVHDKDELRRVSDFENAIIGVNNRNLKTFEVDIKNSITLRQQFDKDNVFVSESGIKSKKDIEKLKENNISVFLIGESLMNGDFFET

SEQ ID NO: 148715 - protein, 89 aa, Unknown
  Bacterial polypetide isolated from the Sargasso Sea
DCLMEVHDQDELNRIESIKDVIIGVNNRNLKTFEVDISLSVKLKNSYRGDNPFVAESGIKSQEDLDYLMNNGINNFLIGESLMRKNLQI

SEQ ID NO: 148716 - protein, 241 aa, Unknown
  Bacterial polypetide isolated from the Sargasso Sea
VSVNQLETTDLFNSRIKSLSKILANTTFGVIAEHKRRSPSKNIINFNHNVEDVTLGYQNAGVSGISVLTDKKYFGGSLDDLHLTRASVNIPILRKEFIIDEYQILEAKAYGADVILLIAAVLTREEIQHLSQFAQSLGLEVMLEVHNREELEKSIMPSLNMIGVNNRNLKTFEVSLDYSKELSQHIPDEFVKVSESGISSVEAVKELQQFGYQGFLMGEHFMKTDNPGNEAKLFIQKLISI

SEQ ID NO: 148717 - protein, 177 aa, Unknown
  Bacterial polypetide isolated from the Sargasso Sea
AACLSVLTDIDFFQGADEYLQAARGACSLPVLRKDFTLDPYQIWEARALGADAILLIVACLELPHLKDLHDCALEAGLDVLVEVHEEAELEEALTLGGDLVGINNRDLHTFETSLDTTYRLLERIPVEVQVVTESGFSSAAQVLEMRGRGVHTFLIGETFMRAEDPGAALATMFTDD

SEQ ID NO: 148718 - protein, 145 aa, Unknown
  Bacterial polypetide isolated from the Sargasso Sea
LRKDFILDESQIIESKIIGADCILLIVACLSKLQFNELLLFSKELDMDVLVEVHDRKELDIALESDCKIIGINNRNLKTFDVSIDTSLELCEIIKDDNIIVVSESGIKDIETIKKLNEKNIKSFLVGESLIKHSDPGLLLESLVG

SEQ ID NO: 148719 - protein, 122 aa, Unknown
  Bacterial polypetide isolated from the Sargasso Sea
GVYADLLMKRIESFNSKVFLVNTGWTGGPHGIGSRFDIPTTRRIINAIQNGELNNVETAHIDGLNLEVPKEINGVDAKVLIPKNTWSNHDLYEQYLKDLIKQFKDNFKKFSVSEDIIAAGPS

SEQ ID NO: 148720 - protein, 201 aa, Unknown
  Bacterial polypetide isolated from the Sargasso Sea
MKSAGPHPNSIIFLTCDAYGIMPPLARMTKKQAMYHFISGYTAKMAGTETGVTEPVAAFSPCYGGPFLTLHPLRYAELLEQKLNDYNSSVYLVNTGWSGSSATSGSSRIDLKLTKHIINLINDGSLDFSQSVFDKFFNLEIPLNVDGLENEFLVPHYSWDNLEEYFSTGNMLTRLFNNNFENFKIQDSDILAAGPKTDLSA

SEQ ID NO: 148721 - protein, 49 aa, Unknown
  Bacterial polypetide isolated from the Sargasso Sea
MNYLLPQKNIASMHCSANMGQDGSVALFFGLSGTEKNNLINRSKEAINW

SEQ ID NO: 148722 - protein, 156 aa, Unknown
  Bacterial polypetide isolated from the Sargasso Sea
SGFTAKTAGTERGITEPQPTFSACYGAAFLMLHPTKYSSVLSKKMKLSNSKVFLVNTGWNGQGERISLKNTRLIIDAILSDELNDVYMDTIPYFNLAIPKSIKNVPSNLLDPRSTWKNNTEWENKAKELAQLFINNFQKFCDDEHGRKLLAAGPQI

SEQ ID NO: 148723 - protein, 175 aa, Unknown
  Bacterial polypetide isolated from the Sargasso Sea
MHNLGIKQLDNFYRNLPVKDLVHHIVQNKEGLVGLRGAAMVDTGIYTGRSPDDKYFVDEPSSRDKIWWGSVNKKVDERIFDDLYSKVIDYYNNGVSNSYIFDGFAGADKTYRLNVRIIAKKAWQAHFAHNMFIRPNSAELEKFEPDFTIINASDIQNEDFQQHGLNSKTFVLFHI

SEQ ID NO: 148724 - protein, 135 aa, Unknown
  Bacterial polypetide isolated from the Sargasso Sea
IAGTERGVKEPTATFSSCFGEAFLSLHPNVYADLLKEKLNTHKPTVWLVNTGWIGGKYGVGERIPLDISRKCVNAILNDTINDFVTYTYFDLSIPSKIEGVDSQVLNPESMWEDKLDFLTTVNYLNKLFEARDNK

SEQ ID NO: 148725 - protein, 113 aa, Unknown
  Bacterial polypetide isolated from the Sargasso Sea
MSGAQAWLVNTGWTGGGLGVGQRIDLSSTRCIIDAIHAGSLTSEPTQRDPIFGLEAVCRVPGVSERLLVPRDAWADAAVWEEAARTLAEKFRKNFVLFGDEADEAVLRAGPSK

SEQ ID NO: 148726 - protein, 149 aa, Unknown
  Bacterial polypetide isolated from the Sargasso Sea
MGSSADIESTFSTSFGAPFFPRPANVYAYLLMKRVEGFNSKVFLVNTGWTGGPYGVGSRFKIPTTRRIVNAIQDGELNDVETLKIPGLNLNVPTAIEGVNSSLLNPIETWDNKEEYEKYLNELISKFQENFKRFNVSPEIILAGPGSDG

SEQ ID NO: 148727 - protein, 99 aa, Unknown
  Bacterial polypetide isolated from the Sargasso Sea
MNKKVQKQLFDIGIKDITEIIYNPSFEHLYIEENSSKLEGFEKVQNTEFGAVNVMTGIYTGRSPKDKYILKDETTKNNLWWTSKFSKNDNKPIDKETWE

SEQ ID NO: 148728 - protein, 189 aa, Unknown
  Bacterial polypetide isolated from the Sargasso Sea
MFFKQQFHKFIFRNYSNCNKYGLSKIGIYGPNNINYNLSQDKLFEHEVKNNEGKVFKTKYGDTFGVDTGKFTGRSPKDKWIVKSTETGKNIWWGDVNQPTKPEVFDHLLAKSLNHFNSLDNLYLFDGYCGSNDKSRKKVRFIHELSWQQHFVSNMFIRPNDDEKLYEEEPDFTIINACSVVNDQWKNHG

SEQ ID NO: 148729 - protein, 161 aa, Unknown
  Bacterial polypetide isolated from the Sargasso Sea
EVEVTEPEATFSACFGAAFMVWHPSKYAELLAERIKQHGTTVWLVNTGWSGGGFETGQRMSLKYSRAIVDAILDGSLQNAPTLKDPVFGLEMITECPAVPNEVLQPKLSWSDPDAYDRAANRLAAMFMENFKKFEKYSPAYIAAAGPVVLKDQNTRVSETV

SEQ ID NO: 148730 - protein, 133 aa, Unknown
  Bacterial polypetide isolated from the Sargasso Sea
APFFPRPANVYAELLIERIEGFGSNVFLVNTGWTGGPFGVGSRFDIPTTRRIVNAIQDGELDDSETIKIPGLNLLIPKSVDGVDNKLLNPIDTWENKDEYNRYLKELISKFQENFKKFNVKPEIVEAGPGFNG

SEQ ID NO: 148731 - protein, 165 aa, Unknown
  Bacterial polypetide isolated from the Sargasso Sea
MTTSQLFEKLKLGELGIDSASSISYQLSYEELFEKEVNAPEGYQKGIETSFGAVSVDTGKFTGRSAKDKYVVKDNLSENTVWWEDQGSTNKPLSETAWAHLKTICLGQLSNKDIYVIDGYCGANEDTRISVRLVTEVAWQAHFFKNMFIRPTDEELESFEPDFTF

SEQ ID NO: 148732 - protein, 241 aa, Unknown
  Bacterial polypetide isolated from the Sargasso Sea
MNQDDKNLYLNRPNGFYIEESIRRGRGKLSRQGALVVETGKFTGRAAKDKYVVKSDSTQDTVWWDNDVLEMTPETFSKLKTHITAHLNEQKDIYMTERSAGAHPIHNLSVRLVSSSPSHALFSKHMFRKKIREYDESKDYVILHAPDLDLDPKEFGTRSETCIVTCFDTNTILICGTRYAGEVKKSVFSILNYLLPETGVLPMHAGANKSETDTSVFFGLSGTGKTTLSTDEGRLLIGDDE

SEQ ID NO: 148733 - protein, 215 aa, Unknown
  Bacterial polypetide isolated from the Sargasso Sea
FYTQNTRVSYPIDYIDNAIIPCITCHPNNIILLTCDAFGVLPPVSKLTKEQTMYHFINGYTAKVGGTEDGINKPIATFSACYGDAFMVWHPLKYATLLSEKIEKYNVNCYLVNTGWIGGKCGVGKRCDIKITKTIIREIHNGNLSKAEYQKFNVFNLMIPKNVNNVPEKILNPINCWENKEEYNKSLNNLARLFIDNSKKFGLDKNKIFEDIITI

SEQ ID NO: 148734 - protein, 120 aa, Unknown
  Bacterial polypetide isolated from the Sargasso Sea
YADLLMKRIESFNSKVFLVNTGWTGGPHGIGSRFDIPTTRRIINAIQNGELNDVETAHIDGLNLEVPIEIDGVDPKVLIPKNTWSDQDEYDQYLQNLIKQFKDNFKKFSVSEEIVAAGPT

SEQ ID NO: 148735 - protein, 157 aa, Unknown
  Bacterial polypetide isolated from the Sargasso Sea
TKPEATFSACFGAAFMVWHPSKYAELLAERIEQHGTMVWLVNTGWSGGGFEMGHRMSLKYSRAIVDAILDGRLQNAPTLKDPVFGLEMITECPAVPHEVLQPKLTWSDPEAYDRAANRLAAMFVENFKKFEKNSPAYIAAAGPVVLQEQNTKVSETV

SEQ ID NO: 148736 - protein, 251 aa, Unknown
  Bacterial polypetide isolated from the Sargasso Sea
PDIYNAIRHGALLENVVYDEHTRVVDYTDNTKTENTRVSYPLNFIENSVFAKGKPALSDHPKTIIFLTCDAYGVIPPVSKLSPEQAMYHFITGYTAKVAGTERGVTEPTATFSPCFGGPFLTLHPLEYAELLRSKINKFNVPTFLVNTGWVGATAESGAKRISLPITRQIIYAILDGSLNKSDFETDPYFGVAVPNKLGNIENNVLIPMKAWPNKEDYVKTAETLVEKFQNNFADYNIEDENIRNAGPKKS

SEQ ID NO: 148737 - protein, 187 aa, Unknown
  Bacterial polypetide isolated from the Sargasso Sea
IFLTCDAFGVLPPISRLTPAQAAYHFISGYTAKVAGTEIGVVEPTPEFSACFGEPFMPMHPGVYADLLSAKMEEHNANCWLINTGWSGGSYGVGNRMKIRYTRAMLNAAMDGDLDDVEYVKDARFGFDIPVECPNVPSELLQPRNTWESGEEYDKTANKLVSMFNENFVRYSAGVSDEVNAASPKLE

SEQ ID NO: 148738 - protein, 202 aa, Unknown
  Bacterial polypetide isolated from the Sargasso Sea
MNKNYGTVNSNLTLGSQGITGFKNAFYNLTEPDLISYSLHRDEGKLGIGGAFLVETGRFTGRSPKDKHIVVSAETVDKVWWDRNAKMSSEAFDELHKDMLKHIQGKDLFVQDLYGGADPKYRIGVRVITEYCWHSLFIRHLLIRPTRSSLETYSNDFSIINLPSFSANPNKHGCRSETVIAINFEKRLILIGGTEYAGENKK

SEQ ID NO: 148739 - protein, 118 aa, Unknown
  Bacterial polypetide isolated from the Sargasso Sea
MERIEGFNSKVFLVNTGWTGGPYGVGSRFKIPTTRRIVNAIQDGELDNVETTTIPGLNLSVPLKVDGVDSELLNPINTWKNKDEYEKYLSQLITKFQENFKKFNAKPEIVKAGPGFND

SEQ ID NO: 148740 - protein, 238 aa, Unknown
  Bacterial polypetide isolated from the Sargasso Sea
MDNHIKTLDALELTTEELIQSAVDNNEGVIASNGAFSTSTGKRTGRSPNDRFIVQEPGTDNLIDWGEVNKPFDEDKFDLLWNKVESYLAERNRYSSKVHVGSHDEHYLPVNIITETAWHSLFARLIFVCTESYNPSMKQEWQIISAANFECDPDQDGTNSESCVIINFAKRKVIIAGMKYAGEMKKSMFSVQNFLLPEKGVLPMHCSANVNTKGDVALFFGLSRTGKTTLSADPKCSL

SEQ ID NO: 148741 - protein, 188 aa, Unknown
  Bacterial polypetide isolated from the Sargasso Sea
MSNIFENLSVDELILESLQREEGEIAANGALLVKTGKRTGRSPLDRFIVTDASTKDAVDWGEVNRPFESEDFDRLWSKVESYLESKDSFVSSLHVGEHSEHYVPVNIRTEWAWHNLFGKQMFIRPAKFNPSNKEVWQILSAPEFVCDPEADKTNSDGVVLLNFTSRKVLLAGMPYAGEMKKSMFAVQN

SEQ ID NO: 148742 - protein, 286 aa, Unknown
  Bacterial polypetide isolated from the Sargasso Sea
MKIVKHFFEFIFIVPFFIIFKIIGYKNATNLGEFIGKIFGPLFRSNFKIQKNLENSNIGNSEKDRKIIINNMWGNYGRIFAEYMYIKQYRQNSLSNNIEVVGQNILEEIKNDNKPVIFISGHFNNFELMAMHLEKSGIDLAAIYRPLNNKFLNPLMEKIRKNYICKKQIKKGMSGTKETLKYFKKGTSIALMIDQRVSEGISCNFFNKKALTTTIPAQFVKKFNCKVIPIYIERKNGYQFRLEIFKPIEFFKNENIEIITSNLNKILEEMIKRNPDQWIWTHNRWK

SEQ ID NO: 148743 - protein, 214 aa, Unknown
  Bacterial polypetide isolated from the Sargasso Sea
MSEAAISTPDVHSGLPSTELIDMALARGEGVLSDTGALRVETGARTGRSPADRFVVREPSSEDAIDWGGVNRPFNADRFDALWERVKSHANQSETWVQHLHVGEHSDHYLPVKVITATAWQSLFGRNMFIRPDTYNPANKPEWKILNVADFVCDPERDGTRSDATVIINFGQRKVLIAGMRYAGEMKKAMFSVQNFLLPEKDVMPMHCPPTWRR

SEQ ID NO: 148744 - protein, 110 aa, Unknown
  Bacterial polypetide isolated from the Sargasso Sea
NTFCWLVNTGWTGGGHGIGTRMPINVTRSLLAAAIDGNMNTATFVKDENFGFEVPKFVPGVDPKYLNPRNTWDDKAAYDQAAKKLVSLFISNFEQYLPSVDNDVKDALVF

SEQ ID NO: 148745 - protein, 191 aa, Unknown
  Bacterial polypetide isolated from the Sargasso Sea
MPSIFENLSVEELIDQALERGEGELASNGALLVKTGKRTGRSPLDRFIVNDESTKDSVDWGEVNKPFDSEAFNALWQRVNEYMDERDTFVSSLHVGEHSEYYVPVKIRTEWAWHNLFGKQMFIRPKNFNPAGKEHWEIMSAPQFVCEPERDSTNSDGVVLLDFTRKKVLLAGMPYAGEMKKSMFAVQNFLL

SEQ ID NO: 148746 - protein, 130 aa, Unknown
  Bacterial polypetide isolated from the Sargasso Sea
PSEYGKLLQKLIAKHSVKCWLVNTGWTGGPYGKGERMPIDATRKLLSSALNGSLLSAEMRIDENFGFEVPSFVDGVDTKILNPRDTWEDKEGYDLQAQKLVKMFSDNFDVFKPYVDIDIIDAAPNLQAAE

SEQ ID NO: 148747 - protein, 156 aa, Unknown
  Bacterial polypetide isolated from the Sargasso Sea
GYTAKVGSTEMGSTKSMDFAFSTCFGAPFFPRPAGVYADLLIKRIQKNNTKVFLVNTGWTGGSYGVGERFPIPVTRAIINAIQENKIDTNDVEHLEKLNLNVPKDIKGVDQKLLNPRNCWESAESYDEECEKLCMRFKDNFRKFDVAQQIIDAGPR

SEQ ID NO: 148748 - protein, 189 aa, Unknown
  Bacterial polypetide isolated from the Sargasso Sea
EPNAVISFTCDLSGVIPPVQILSKEAAAYHFLSGYTAAIGSTEIGSTEAFKTTFSTCYGAPFFPRAAGVYADLLMKRIEEFDSKVYLVNTGWTGGPYGIGNRFDIPVTRSIISAIQSGALIGADTETIEGMNLDVPLSVEGVDSMLLNPIKNWKDPSSYAEYENKLVNQFKENFKKFDVSQSIVDAGPR

SEQ ID NO: 148749 - protein, 154 aa, Unknown
  Bacterial polypetide isolated from the Sargasso Sea
KVGSTEIGSSSDIESTFSTCFGAPFFPRPAGVYADLLMKRVENFGSRVFLVNTGWTGGPYGVGKRFDIPTTRRIVNAVQNGELDDVETQMLKGLNLEVPLSIQGVDGNLLNPRETWEDKSVYDAAAADLIKLFQNNFERFDVSKEIISAGPSDQ

SEQ ID NO: 148750 - protein, 218 aa, Unknown
  Bacterial polypetide isolated from the Sargasso Sea
NTRVSYPLEHIENSISGKGMPSIAGHPKKIIFLTCDAYGVLPPVAKLTSDQAMYHFISGYTAKVAGTERGITEPTATFSPCFGGPFLTLHPLKYAELLKKKMQKFNVPVYLVNTGWVGNSAKSGESRFSLPLTRQILNSILNGHIEECKFDHDDYFGFQIPKTLGDIDPKLLNPLKAWKDIEEYHRSARELIQKFQENYMMYDLGDKNILNAGPNYVE

SEQ ID NO: 148751 - protein, 164 aa, Unknown
  Bacterial polypetide isolated from the Sargasso Sea
YHFLSGYTAKVAGTEKGVDEPEATFSACFGAPFMPRHPSEYGNLLKNLIHKYKVNCWLVNTGWSGGPVGEGNRMPIKDTRALLTAALNGTLGEAEMRIDNYFGFEVPLWVKNVNENILVPRNTWSNKERYDLQAKKLVEMFSENFAVFEAHVDSDVLDAAPKIS

SEQ ID NO: 148752 - protein, 213 aa, Unknown
  Bacterial polypetide isolated from the Sargasso Sea
TRGSYPIEFIENRTPDSMAGHPQNVVFLTCDAFGVLPPISRLNPAQAAYHFISGYTAKVAGTEVGVKEPQATFSACFGAPFMPRHPSVYADLLAEKMSQHGAKCWLLNTGWVSGGYGKSKRIRIKWTRALLNAALDGSLNDVEFVIDPRFGFEVPQSCEGVPEEMLNPRNTWGDGTEYDAAANRLAVMFGENFTQFEDGTSAEVLEAAPKPLR

SEQ ID NO: 148753 - protein, 255 aa, Unknown
  Bacterial polypetide isolated from the Sargasso Sea
NLSYEDEPQIFSTTEKFSTVIENMNYNPNDRSLNFSDPSITENMRCAYPISYIKNSSKSGFGGAPKNIILLTCDAFGVLPPVAKLTAAEAVFFFLSGFTSKVAGTEEGIKEPVPTFSTCFGAPFMPKRPEVYGQLLWNRINSTKPVCWLLNTGWSGGSYGEGERISIELTRKILKFILNIKGEFQTRKDQFFNFSVPIEINEVPKNLLKPRENWTNQEGYDRVATKLKTMFVDNFQQFSSINEKVHGVYNSLKND

SEQ ID NO: 148754 - protein, 134 aa, Unknown
  Bacterial polypetide isolated from the Sargasso Sea
MNLRHISLEQYGINVGTVIRNAAAPKLYEAALKYEPDAAISSDGALIVSSYEKTGRSPKDKRIVEHPSIQKHVWWGKINIGIDSETFLATRERAIDYLNSQSIIYVVDGFAGWDINYQIKVRIITTRPYHALFM

SEQ ID NO: 148755 - protein, 253 aa, Unknown
  Bacterial polypetide isolated from the Sargasso Sea
MKSCTSRVSRFGLHSLGLKDKKNVFWNLNTPELFEEACRRGEGQVTANGAFMALTGEHSGRSPNDRFIVHESLTGDEVFWGEINKAISEENFLRLQKKMQSHLSEKDVFVQDCYCGADFKNRLNIRVVTENAWHNLFARNMFIQPKLEELEEFEPEFSVLHAPSLLAEPEKDGTNSGTFIIVNLEKKVILIGGTAYAGEIKKSIFSVMNFLMPARGILPMHCSANTSESGDSAIFFGLSGTGKTTLSADSSRT

SEQ ID NO: 148756 - protein, 252 aa, Unknown
  Bacterial polypetide isolated from the Sargasso Sea
MSPENEPEIYATTSKFSTVIENMVCNTHTKQLDFQDDSLTVNMRAAYPMHYIANSAQDGLAKHPKDLVLLTCDAYGVMPPIASLSPAQAMYHFLSGFTSKVAGTERGVNEPEPTFSTCFGAPFLPLRPEVYGELLREKITKYNTRCWLLNTGWTGGGVGSGERMPIDITRALLDAALEGHLDRCSFRKDPNFGFDVPIALQGIDNKFLNPRENWLDKVSYDKEAAKLVKLFSDNFEQYLPFVDEKTKAAAIG

SEQ ID NO: 148757 - protein, 193 aa, Unknown
  Bacterial polypetide isolated from the Sargasso Sea
GKHPKNIIFLTCDAFGVLPPVSKLSIQQAMYHFISGYTAKIAGTEIGITEPEATFSACFGAAFLVWHPSKYADLLAKRIEKSGTSVWLVNTGWIGGSYGEGERISLKYTRHIIDAILNGLLEDKQTARDELFGFEILTQCPEVPEKILQPRSMWIDSNLYDKTSFKLAKMFRENFKKYEKDTSNEIIKAGPKI

SEQ ID NO: 148758 - protein, 262 aa, Unknown
  Bacterial polypetide isolated from the Sargasso Sea
EKEPEIFDAIKFGTVVENVVFDPNDREVDYYDTSITENTRAAYPLNHIPNALLPAKVDTHPSACILLSCDAFGVLPPIARLSSAQAQYYFISGYTAKVAGTEQGVTEPTATFSACFGAPFLVWHPIVYSEMLAEKLEKTGANAFLLNTGWSGGGYGVGKRIDLKYTRKMVDAVHDGYLKSKECEYVNFEAANGVPPENRLFNFEIPKKIPGVPDEILNPRLSWADKKAYDAGLKKLHDLFQDNFGQYADRCPLEVRQAGPYF

SEQ ID NO: 148759 - protein, 256 aa, Unknown
  Bacterial polypetide isolated from the Sargasso Sea
MFQLSEENFDKILKSFIDFAQDKNLFVHDLLGGADRDNCLGVSIITEYAWHGLFARHLLVRPTKDELKNFSSEFTIINFPNLKMDPDHHGTRSETVIAVNLDKKIILIAGTKYAGETKKSVFTLLNFILPEKNIMPMHCSVNTGKNGDSAIFFGLSGTGKTTLSADPNRSLLGDDEHGWSDQGLFNFEGGCYAKLIRLSQEAEPEIYATTQMKNSVIENVVMNDKGELDLNDNSLTENTRGAYPINFIPGVTLSGK

SEQ ID NO: 148760 - protein, 237 aa, Unknown
  Bacterial polypetide isolated from the Sargasso Sea
IVVDGEGVPDFFDTSKTENTRGSYPIDFIPNHVRGSKGGHPQNVIFLTCDAFGVLPPISKLTHHQAAYHFISGYTAKVAGTEVGVTEPVATFSACFGEPFMPMHPGVYADLLSDKMSQHGSNAWLINTGWSGGPYGVGNRMKIKYTRAMLNAALNGELENVDFEIDPRFGFAIPKTCPGVPSDVLNPRQTWNNPEEYDKTANRLADMFNENFKRYENGVSEDVNAVSPRPMTVSTNS

SEQ ID NO: 148761 - protein, 252 aa, Unknown
  Bacterial polypetide isolated from the Sargasso Sea
MTSTITRHVDLTVADLVEHAIRRNEGVLADNGALVVKTGHRTGRSPTDRFIVKEASTEQDIQWGNVNRPFDPAKFSALWARVNDFIATKEHFVSHLEVGADPEHYIPMTVTTETAWQHIFAKNLFITSAHWNKAGKETWQILNVPSFECDPERDGTNSDGTVMINFAERKVLLAGMRYAGEMKKAMFSVQNFLLPAKGVLPMHCSANVGEAGDTTLFFGLSGTGKTTLSADPKRFLIGDDEHGWAPNSVFNM

SEQ ID NO: 148762 - protein, 198 aa, Unknown
  Bacterial polypetide isolated from the Sargasso Sea
MQNLGIKQLDNFYRNLPVKDLVHHIVQNKEGLVGLRGAAMVDTGIYTGRSPDDKYFVDEPSSRDKIWWGSVNKKVDEKIFDDLYTKVIDYYNNGVSNSYIFDGFAGADKTYRLNVRIIAKKAWQAHFAHNMFIRPNSAELEQFEPDFTIINASDIQNEDFQQHGLNSKTFVLFHIGRRIAIIGGTEYGGEMKKRYFFS

SEQ ID NO: 148763 - protein, 162 aa, Unknown
  Bacterial polypetide isolated from the Sargasso Sea
FLSGFTSKVAGTEEGIKEPVPTFSTCFGAPFMPQKPEVYGKLLWSKIHSTEPACWLLNTGWSGGSYGEGKRISIELTRKILKFILSNKKRSQTRKDQFFHFCVPIEIDGVPKNLLNPRENWASVSDYDRSATELKSMFVNNFQKFSAINEKVDSVYNRLKND

SEQ ID NO: 148764 - protein, 303 aa, Unknown
  Bacterial polypetide isolated from the Sargasso Sea
DLEWQALYDAAIRRGEGELTAHGVLMAETGDRTGRSPNDKFVVKDDENGTLTRDIWWGDVNVPTTPEIYQKLSAKVRDYLSSKDELYVQDLYCGADLTERLPIRIVTENAWHAAFARNMFVRPNVSEIESHVPDFTILHAPHFHANPETDGTNSHVFVIISFEEKTVIIGGTEYAGEIKKSIFSIMNHLLPSRGHLPMHCSSNTTGENTAVFFGLSGTGKTTLSADPNRALVGDDEHGWSAKGVFNFEGGCYAKLIDLSEEDEPAIFATTRMPGSILENIIVDDDGIPDFTDDSLTANTRGSY

SEQ ID NO: 148765 - protein, 246 aa, Unknown
  Bacterial polypetide isolated from the Sargasso Sea
YNAIRPGALLENVVYDENTNVVDYFDGTKTENTRVSYPINFIENSVFAQGKPSIADHPEKIIFLTCDAYGILPPVAKLDPEQAMYHFISGYTAKVAGTERGITEPTATFSPCFGGPFLTLHPLRYAELLREKMNEFNVSVYLVNTGWIGASAQSGAKRISLPLTRKIIHKILDGSIDSVGFDEDIYFGFQIPKSLDDVESDILNPLNAWSDADMYNRSAKDLVTKFKDNYKKYDLGDEEIRKGGPY

SEQ ID NO: 148766 - protein, 145 aa, Unknown
  Bacterial polypetide isolated from the Sargasso Sea
MITTGKELQLNKIGLNKIDEVCRNLSVESLIEETVKNGEGIIGPRGVTIVDTGKFTGRSPKDKYIVDEPSSTDKVWWGSVNKKIDESIFDELYASVVDYYNSDDSKTYLFDGFAGFDPSHSINVRIIAKRAWQAHFVNNMFIRPE

SEQ ID NO: 148767 - protein, 298 aa, Unknown
  Bacterial polypetide isolated from the Sargasso Sea
YREKTTLSTNANRPLIGDDEHGWSDNGIFNFEGGCYAKAINLDKDKEPEIYNTIKHGTLLENVVYDLETKQVDFDDNAKSENSRICYPINFVENSLGSKGLKSAGPHPNSIIFLTCDAYGIMPPLARMTKKQAMYHFISGYTAKMAGTEIGITEPVAAFSPCYGGPFLTLHPLRYAELLEQKLNDYDSSVYLVNTGWSGSSAISGSSRIDLKLTKHIINLITDGSLDFSKSVFDKFFNLEIPLNVDGLENEFLVPHHSWDNIEEYFSTGNMLTRLFNNNFEKFKIQDSDILAAGPKLI

SEQ ID NO: 148768 - protein, 249 aa, Unknown
  Bacterial polypetide isolated from the Sargasso Sea
MKTPSKGPDSESEKNKLLFEICGLKKFGAKKIKNIHYNLPISSLTEMSISRGESFLANNGALVVNTGKFTGRSPKDKFTVNQSPSNKKIWWGEINQKLSPKNWITIKNKVANYLNNKEIFIFDGYVGNDKRYRIPVRVISEFAWHSLFCQTLLVRPSNKSFRPHKDPFTVIDVGRFLGCGKKEGLRQNNFTVVNFEKNMALIGGSEYAGEMKKSAFYIMNYLLPQKNIFPMHCSANMGEKEDTSLFFGL

SEQ ID NO: 148769 - protein, 210 aa, Unknown
  Bacterial polypetide isolated from the Sargasso Sea
YPISYIKNSSKSGYGGVPKNIILLTCDAFGVLPPFAKLTAAEAVFYFLSGFTSKVAGTEEGINEPVPTFSTCFGAPFMPQKPEVYGKLLWSKIHSTEPVCWLLNTGWSGGSYGKGKRISIEVTRKILKFILSNKKNLQTRKDKFFNFCVPIEIDGVPKNLLNPRENWANANDYDRAATNLKSMFVNNFQQFSSINEKVDSVYNLLRNDQH

SEQ ID NO: 148770 - protein, 196 aa, Unknown
  Bacterial polypetide isolated from the Sargasso Sea
PALSDHPKTIIFLTCDAYGVLPPVSKLTSEQAMYHFISGYTAKVAGTERGITEPTATFSPCFGGPFLTLHPLRYAKLLKEKMNKYDVPAYLVNTGWVGASAQSGAKRISLPVTRSIIYAILDGSIDNSDYELDPYFGIMVPKSLGDIDSNLLIPAKAWSNKDEYDSVAKNLVGKFQANFQEYDLGDSDIRNAGPSI

SEQ ID NO: 148771 - protein, 129 aa, Unknown
  Bacterial polypetide isolated from the Sargasso Sea
MNNKVQKQLIDIGIKDITEIIYNPSFEHLYSEENSLKLEGFEKVQNTEFGAVNVMTGIYTGRSPKDKYILKDETTKNNLWWTSEFSKNDNKPIDKEIWDSLYGIVSNQLSNKKLYVIDAFCGANKDTCL

SEQ ID NO: 148772 - protein, 212 aa, Unknown
  Bacterial polypetide isolated from the Sargasso Sea
NTRCAYPLHHIENAIFPSVGNHPNQIILLTCDAHGVLPPISKLNCKQAVYFFLSGYTSKTPGTEVGITQPTSTFSACFGEPFLVWDPNTYGQLLQKRLYEFQSEVWLLNTGWIEGSYGQGRRIPLKHTRQMINYIHSKYYLEDQWEECTPFSLQVPKDINNNLGVPRNILIPIQGWKDKLENGANLYQEKMEMLFQQFESNSKQKLNNIKWY

SEQ ID NO: 148773 - protein, 117 aa, Unknown
  Bacterial polypetide isolated from the Sargasso Sea
MKRVESFGSKVFLVNTGWTGGPYGVGKRFDIPTTRRIVNAVQNGELDDVETQMLGGLNLEVPLSIQGVDSNLLNPRDTWEDKSAYDAAAADLIKLFQNNFERFDVSEEIISAGPSNQ

SEQ ID NO: 148774 - protein, 185 aa, Unknown
  Bacterial polypetide isolated from the Sargasso Sea
LTCDAYGVLPPVSKLTRDQAMYQYLSGYTAKVAGTELGVTEPTATFSTCFGAPFLSVHPTTYAEILGKKIDEHQADAYLVNTGWSGGAYGVGSRIKLSYTRAIIDSILDGSIEKSEFETTRFFRLLIPKSLPGIDSAILNPSNIWDDKEAYEKTAKKLVQQFIDNFKKFTETPSGKAVAESGPVL

SEQ ID NO: 148775 - protein, 136 aa, Unknown
  Bacterial polypetide isolated from the Sargasso Sea
MLGEKIAKHEVRCWLVNTGWTGGAYGVGKRIEIKYTRAMINAILDGQLANGETKEDPVFGVHIPTSVKGVPKEYLFPRNTWKNPEAYDEKANELANQFIENFKEYESNVDKKILDASPRPVTKRGSTSGKIHELRK

SEQ ID NO: 148776 - protein, 313 aa, Unknown
  Bacterial polypetide isolated from the Sargasso Sea
ISHKNGEGQLSKHGALVVKTGKHTGRSANDKFFVEENDNKSKIHWGDTNVAISEDKFEKIANSFVEFAKDKSIFSNDLMGGADRNHSLNVSIITEYAWHGLFARHLLVRPTADEIKNFVADYTIINFPSLKLDPEFHGTNSETAIIVNLKEKVILIAGTEYAGETKKSVFTLLNFLLPEKEVMPMHCSVNSGEKGDSAIFFGLSGTGKTTLSADPNRSLLGDDEHGWSDEGLFNFEGGCYAKLIRLSKDAEPEIYKTTQMKGTVIENAVMNNDGLLDLDDNSLTENTRGAYPLDYIPGVIKSGKAPHPNNIIM

SEQ ID NO: 148777 - protein, 235 aa, Unknown
  Bacterial polypetide isolated from the Sargasso Sea
MSKVIDLSNPELIKEAVANGEGSLVSNGSFLALTGTRTGRSPADRFIVKESSTEDQIDWGEVNKPFDPLHFDTLWEKVSLYLDSRNHYQSEVHVGSNVNHYIPVNVKTELAWHSLFSKLIFIVPQEFNSQKKEVWKVLSAANYICDPEIDHTNSESCVIINFHKRKVLIAGMRYAGEMKKSMFSVQNFLLPEKGVLPMHCSANQTKDKRTTLFFGLSGTGKTTLSADPSCNLIGD

SEQ ID NO: 148778 - protein, 247 aa, Unknown
  Bacterial polypetide isolated from the Sargasso Sea
NRVHYNPSTAQLVEFALLRGEGELTANGALVAKTGTRTGRSPGDRFIVKEDSSAADIEWGPVNQAFEPGAFEGLWARVEAFLADKELFVSDLEVGADPEHYQPVRVTTQYAWHQLFARNLFIIPEEFNRQDKPVWQIINAPDFVCVPERDGTNSDAAVILNFAERKVLLAGLKYAGEMKKSMFSVQNFLLPAQGVLPMHCSANVGKDGDTTLFFGLSGTGKTTLSADPKRFLIGDDEHGWAPGGVFN

SEQ ID NO: 148779 - protein, 256 aa, Unknown
  Bacterial polypetide isolated from the Sargasso Sea
QFWWDNNKSITEENFNNLHEDVLNFCKEKELYVQDLFGGADLDYRLSTRVYTEYAWHSLFIQNLLIEVKEDEKSSFNPEFVIIDIPSFKADTSRHGCSSETLIAVNFEKKLVIIVGTSYAGEIKKSVFSMLNYLLPPKNVMPMHCSVNVGEENDPAIFFGLSGTGKTTLSADPDRILIGDDEHGWSSNGVFNFEGGCYAKMIRLSEKAEPEIYQTTKLRGTILENVVIDKDSGEIDLDDSSLAENTRGAYPLSFIP

SEQ ID NO: 148780 - protein, 253 aa, Unknown
  Bacterial polypetide isolated from the Sargasso Sea
DTNVPISEENYQKIASSFIEFAKGKSIYAHDLMGGADRNHSLKVTIITEYAWHGLFARHLLVRPTLEEVDSFIADFTIINFPNLKMDPKFHGTNSETAIIVNLKEKVILISGTEYAGETKKSVFTLLNFLLPEKKVMPMHCSVNTGNNGDSAIFFGLSGTGKTTLSADPKRSLLGDDEHGWSDNGLFNFEGGCYAKLIRLSEEAEPEIYQTTQMKGTVIENVIMKENGLLDLDDNSLTENTRGAYPLDYIPGV

SEQ ID NO: 148781 - protein, 239 aa, Unknown
  Bacterial polypetide isolated from the Sargasso Sea
IKRGSVVENVVLKPNTIDIDYANQSITENTRAVYPLSHVDSHLKDNFAGEPNAIIFLTCDLTGVLPPVSILSKEAAAYHFLSGYTAKVGSTEIGSTKDLDSTFSHCFGSPFFPRPPRVYAELLMKRIESFGSKVFIVNSGWTGGPYGVGNRFDIPVTRSVIKAIQNGSIHESSTEMLDIMNVEIPVNLDGVDPKLLNPSATWGSKSDYDNEAKQLAEKFRTNIEKFNLSSEVVAAGPKV

SEQ ID NO: 148782 - protein, 150 aa, Unknown
  Bacterial polypetide isolated from the Sargasso Sea
GSTEMGSTKSMDFAFSTCFGAPFFPRPAGVYADLLIKRVQKNNTKVFLVNTGWTGGSYGVGERFPIPVTRAIINAIQDNKINTDDVEHLEKLNLNVPKDIKGVNQELLNPRNCWESVENYDEECDKLCMRFKENFRKFDVAQQIIDAGPR

SEQ ID NO: 148783 - protein, 217 aa, Unknown
  Bacterial polypetide isolated from the Sargasso Sea
NTRVSYPLNFIENSVFAKGRPALSAHPKTIIFLTCDAYGVIPPVSKLTPEQAMYHFISGYTAKVAGTERGVTEPTATFSPCFGGPFLTLHPLKYAELLREKMNHHNVPAYLVNTGWVGASAQSGAKRISLPITRKIIYAILDGSINSADYETDPYFGVQIPINLKDIDTEILIPSKAWSNHNEYIKIAEDLVQKFQKNFEDYSIEDQEIINAGPKLT

SEQ ID NO: 148784 - protein, 249 aa, Unknown
  Bacterial polypetide isolated from the Sargasso Sea
MNNQTQETLHLSTEQLIDAAVENNEGVIASNGAFSTTTGERSSRSPNDRFIVKEAHTEDLIEWGEINKPFDREKFNSLWEKVESYLTNGNSYTSDVHVGAHPEHYLPVKVTTETAWHSLFARLIFICPNDFNPLNKIKWEILSAANYECVPEEDGTNSESCIVINFSERKVIIAGMKYAGELKKSMFSVQNFLLPDKDVLPMHCSANVNKNNNVTLFFGLSGTGKTTLSADTKCSLIGDDEHGWSKGSV

SEQ ID NO: 148785 - protein, 142 aa, Unknown
  Bacterial polypetide isolated from the Sargasso Sea
MEVPKKNQTFTALNDKKQLVNNSKHFLLELYRCDYEKLNDESFLRCTLNNAAKLANATVLNLISNKFEPQGVTAIALLAESHISIHTWPEAHYSAVDIFTCGQNMKPEISCKYLIQAFIAKEHLLRIIDRNLPSEVHSQLKK

SEQ ID NO: 148786 - protein, 144 aa, Unknown
  Bacterial polypetide isolated from the Sargasso Sea
MEIYKKSQILSSLSDEQKLSHQSKHLLLELYRCDREKLNDESFVRCILNRAAKLANATVLNLISNKFEPQGVTAIALLAESHISIHTWPESNYSAVDVFTCGQNMMPELASQYLIESMMAKEHSLRVIERNPPSAVSKQIRTVV

SEQ ID NO: 148787 - protein, 144 aa, Unknown
  Bacterial polypetide isolated from the Sargasso Sea
MEIYKKNQNLGSFSSAQKLSHQSKHLLLELYRCDYEKLNDESFLRCALNKAAKLAKATVLNLISNKFEPQGVTAIALLAESHISIHTWPESNYSAVDIFTCGQNMLPEVASQYLIEVLKAEEHFLRVIKRNPPEVVFKQMRTVV

SEQ ID NO: 148788 - protein, 107 aa, Unknown
  Bacterial polypetide isolated from the Sargasso Sea
MSVRSKRIEDVNDFKDFFSKRGGKKFAGTHILLDLWDAQHIDDQIFVEKTLKEAVKACEANLLHMHLHKFGEGLGISGVAVLAESHISIHTWPERQFAAIDIFMCGN

SEQ ID NO: 148789 - protein, 144 aa, Unknown
  Bacterial polypetide isolated from the Sargasso Sea
MEIYKKSQVLSSFSDEKKLSHQSKHLLLELYRCDCEKLNDESFLRCILNRAAKLANATVLNLISNKFEPQGVTAIALLAESHISIHTWPESNYSAVDIFTCGQNMMPELASQYLIESLIAKEHSLRIIKRNPPSEVPKQIRTAF

SEQ ID NO: 148790 - protein, 138 aa, Unknown
  Bacterial polypetide isolated from the Sargasso Sea
MNQSDQSPWYSDHRSDYFVNKDGVIYAGAHLIIDMWDAINLSNREVIHNTLKKIAKACDAQILHIHLHSFDENQGITGVIVLAESHINIHTWPEVGFAALDIFMCGKTNPVAAIPVLETAFKPQRMEVQTVTRGIITK

SEQ ID NO: 148791 - protein, 129 aa, Unknown
  Bacterial polypetide isolated from the Sargasso Sea
MNEQKDLDFLIRKDGQTFAGIHLLIDFYQASNLTDKNLIEEALESAASAVNAKKIDICVHKFSQNHGVSGVITLAESHISIHTWPEIFFAAIDVFTCGKCKPHSCIDILKNYLEPSRIEIVERYRGLIA

SEQ ID NO: 148792 - protein, 113 aa, Unknown
  Bacterial polypetide isolated from the Sargasso Sea
MEVPRKNQNLSSFCNDEKLIHQSKHLLLELYGCDFEKLNDESFLRCTLNRAAKLAKATVLNLISNKFEPQGVTGIALLAESHISIHTWPEAKYSAVDIFTCGQNMMPELASQY

SEQ ID NO: 148793 - protein, 149 aa, Unknown
  Bacterial polypetide isolated from the Sargasso Sea
MIKTQKPPSRHWEQSKPSPWYSDRLSEYFVKRDGLIYAGAHLIIDMWDGINLTNVEVVENTLKRAAEACNAQILHINLHCFDANQGITGVIVLAESHINIHTWPEAGFAALDIFMCGKANPATAIPVLERAFRPKLMEVQTVTRGIIAK

SEQ ID NO: 148794 - protein, 278 aa, Unknown
  Bacterial polypetide isolated from the Sargasso Sea
LCFVRAQDSGGAYIKTFLKDENIIVYDENYIHTWPKHPYDYLVQIIKDRNWDKLSIGVEMDAHYFTAFCYEKIKQGLPNAKIKDSERLVNWARYAKSDAEINYMKTAALISEKGMKTAMEVIKPGVRQCDAVGDIQKTLFYGTPEFGGEYSSIATLLPTGKGTSASHLTATHDKFVEGEATIVELSGVYKRYHAPMARTVLLGKPDQLKIDTMNKTIEALQAGIDVTKPGNTANDVAQAFWGILDKYGIEKKSRTGYSIGIGYPPDWGEHTLNIYKGE

SEQ ID NO: 148795 - protein, 88 aa, Unknown
  Bacterial polypetide isolated from the Sargasso Sea
GATLINLVTHSLKPQGVTGLALLAESHISIHTWPEIGYAAIDVFTCGDHTMPEKACKLLSEDFMAKKFSFKNIAREIPARIQTLHREP

SEQ ID NO: 148796 - protein, 144 aa, Unknown
  Bacterial polypetide isolated from the Sargasso Sea
MEVYKKNQNLGSFSNDQKLSHQSKHLLLELYRCDYEKLNDESFLRCTLNKAAKLAKATVLNLISNKFEPQGVTAIALLAESHISIHTWPELNYSAVDIFTCGQNMLPELASQYLIEALKAEEHYLRVIKRNPPEVLFKQMRTVL

SEQ ID NO: 148797 - protein, 117 aa, Unknown
  Bacterial polypetide isolated from the Sargasso Sea
MEVPKENRVLHSFSNGEKLIHQSKHFLLELYRCDGEKLNDESFLRCTLNRAAKLAKATVLNLISNKFEPQGVTAIALLAESHISIHTWPESNYSAVDIFTCGQNMMPEQASQYLINL

SEQ ID NO: 148798 - protein, 144 aa, Unknown
  Bacterial polypetide isolated from the Sargasso Sea
MEIYKKSQILSSLSDEQKLIHQSKHLLLELYRCDREKLNDESFLRCILNRAAKLANATVLNLISNKFEPQGVTAIALLAESHISIHTWPESNYSAVDIFTCGQNMMPELASQYLIESLMAKEHSLRVIERNPPSAVSNQIRTVV

SEQ ID NO: 148799 - protein, 144 aa, Unknown
  Bacterial polypetide isolated from the Sargasso Sea
MEIFKKSQILSSLSDEQKLRHQSKHLLLELYKCDREKLNDESFLRCILNRAAKLANATVLNLISNKFEPQGVTAIALLAESHISIHTWPESNYSAVDIFTCGQNMMPEVASQYLIESLIAKEHALRVIERNPPQAVSKQIRTVV

SEQ ID NO: 148800 - protein, 144 aa, Unknown
  Bacterial polypetide isolated from the Sargasso Sea
MEIYKKSQILSSLSDEQKLSHQSKHLLLELYRCDREKLNDESFLRCILNRAAKLANATVLNLISNKFEPQGVTAIALLAESHISIHTWPESNYSAVDIFTCGQNMMPELASQYLIESLMAKEHSLRVIERNPPSAVSNQIRTVV

SEQ ID NO: 148801 - protein, 137 aa, Unknown
  Bacterial polypetide isolated from the Sargasso Sea
MDSYSKYSKQTHIAYDHFVEENGKIFAGHHYLIDMWDCLYLEDENKVKDLIKSAAEEAGASVLQINIHHFGEGQGVSGVAILAESHISIHTWPERNFAAFDIFMCGNTNPELSLNFLKKKFKPRKVEIKKLKRGLIS

SEQ ID NO: 148802 - protein, 78 aa, Unknown
  Bacterial polypetide isolated from the Sargasso Sea
MNLKVLQQSHYWAESHISIHTWPESSYSAADIFTCGQNMMPELASQYLIESLMAEEHSLRVIERNPPAAVLKEIRSFV

SEQ ID NO: 148803 - protein, 318 aa, Unknown
  Bacterial polypetide isolated from the Sargasso Sea
MFFEGAEKKLEIRLTSNMASLRQREYGFWSTLVACANAEILSTIRNPACDAYLLSESSLFVWDDKILLLTCGNSTLVEAAYHFIHAVGVEHIAALCYQRKNEYQAQLQSTHFADDIATLRTLIPGKAFRVGHLDSHHHYLFCTDNLFCTDGQPMSSTYDTCLELMMYHIRGEFADYLKLPTQTEQGIYQRLGLQRLFPDFQFDMHCFQPAGFSLNGIRGADYVTLHITPSIGPGDNSYVSFETNLDLAVYPYPLVAQMIKLFMPSSWDLIRFNQPLMTAGFPEHVCLAHGSIVTEHGCQIDFNHYQQLQTEELLPVFL

SEQ ID NO: 148804 - protein, 377 aa, Unknown
  Bacterial polypetide isolated from the Sargasso Sea
MLFEKKEYKERLKKVKISMQKKGIDLLVSQDPANMNYLTGYDAWSFYYAQCVLVHINEDEPICFVRAQDGGGAYIKTFLQDKNIIEYDEKYIHTWPLHPYKYLVEIIKKRKWDNLNIGLEMDSHYFTAFCYETIKKGLPNAKLKDAERLVNWVRVVKSNAEIKLIQSAARIVESGMRTAFKSINPGVRQCDAVADIQKALFNGTKEFGGDYPSIATLLPTGKGTSASHLTHTDEKFISGEATIIEIAGVYKRYHCPMARTVLLGEKDQKKIDTMKATNEALNAGISATKPGNTVDDVAQKFWGVLDKYKIKKDSRTGYSIGIGYPPDWGEQTFNILKGDKTILQPNVTFHMIAVMQFGDWGVEASEAVRVTENGSEL

SEQ ID NO: 148805 - protein, 134 aa, Unknown
  Bacterial polypetide isolated from the Sargasso Sea
MTARDGIAPPRATFGSHVLADLAGIDAVLLRDAARLESILTEAAQQAGARVIGAHFHHFGGDHGVTGVVLLAESHITIHTWPEHRFAAVDAFMCGAARAADAVDAIAAALGTQAQVRQQVARGGAPTSAGHSSP

SEQ ID NO: 148806 - protein, 183 aa, Unknown
  Bacterial polypetide isolated from the Sargasso Sea
MFFEGAEKKLEIRLTPKMASLRQREYDFWSTLVACANAEILSTISNPACDAYLLSESSLFVWDDKILLLTCGNSTLVDAACHFINALGVEHIAALCYQRKNEYQAQRQSTSFVDDIAKLRTLIPGKAFRVGHLDSHHHYLFCTDKQTVSSTETCLELMMYHIRGELADYLKLPTQTEQGIISG

SEQ ID NO: 148807 - protein, 72 aa, Unknown
  Bacterial polypetide isolated from the Sargasso Sea
LLAESHISIHTWPESGYAAVDVFTCGDHTMPEQACAVLRDELRAQRHALRSFRRETPAAVADTVREPIQLPG

SEQ ID NO: 148808 - protein, 222 aa, Unknown
  Bacterial polypetide isolated from the Sargasso Sea
KTRMCKAYENEGSLAPLAPFDAEVFEGAEKKLEIYLDRSSGSPHGLRSFQTAVWADVIADAQATILHRQSNAEFDAYLLSESSLFVFSHRIVLKTCGTTTLLLVLPKLLRLAEAVGTSIEHLHYGHYRLKFPEQQAYPHQTFDQEHEYLERTLGGVVTSHVLGPSDGRCWYVLSAGRVAPPPAPPPADGPVDTDDIFEIAMEGMAHHVCARYLQASHPGLAG

SEQ ID NO: 148809 - protein, 128 aa, Unknown
  Bacterial polypetide isolated from the Sargasso Sea
MVGKHCILELYDCDSSKLDDEVFLRSAITQAAERAGATLLNLITHQFQPQGVTGLALLAESHISIHTWPEAGYAAVDVFTCGDHTMPEKACAVLSEELGSGHQSLRSFRRRTPASLVDSERQTSVPIG

SEQ ID NO: 148810 - protein, 100 aa, Unknown
  Bacterial polypetide isolated from the Sargasso Sea
MKVPKKNQTFQALSDGDKLLYQSKHFLLELYNCNYEKLNDESFLRCTLNNAAKLANATVLNLISNKFEPQGVTAIALLAESHLSIHTWPEAHYSAVDIFT

SEQ ID NO: 148811 - protein, 155 aa, Unknown
  Bacterial polypetide isolated from the Sargasso Sea
MEQTLSELHPNPGWGTTEIHATDMVGKHCILELYDCDPNRLDDEAFIRTTITSAAKGAGATLLNLITHQFQPQGVTGLALLAESHISIHTWPESGYAAVDVFTCGDHTMPEQACAILCTELQAKRHALKSFLRETPAAIASGVREPVETPTQLPS

SEQ ID NO: 148812 - protein, 323 aa, Unknown
  Bacterial polypetide isolated from the Sargasso Sea
MFFEGAEKKLEIRLTPKMASLRQREYGFWSTLVACANAEILSTISNHACDAYLLSESSLFVWDDKILLLTCGNSTLVDAACHFINALGVEHIAALCYQRKNEYQAQLQSSSFADDITKLRTLIPGKAFRVGHLDSHHHYLFCSDNQFCTGDLFCTDNQVMPSTETCLELMMYHIRGELADYLKLPTQTEQGIYQRLEFQQLFPDFQFDMHCFQPAGFSLNAIRGTDYVTLHITPSMGQGEHSYVSFETNLDLATYPHPVVARLVNIFSPTSWDLIGFHQHLLTEGFPAHLCLGQAVVTAASGGEIIFSHYQLLETQVLQPEFM

SEQ ID NO: 148813 - protein, 154 aa, Unknown
  Bacterial polypetide isolated from the Sargasso Sea
MAQVSCLHPDPGRAQLEPSSSTGSVPLDMVGKHCILELYDCDPSKLDDEDFLRSAITQAAERAGATLLNLITHQFEPQGVTGLALLAESHISIHTWPESGYAAVDVFTCGDHTMPERACAVLSEQLSSRRQSMRSFRRSTPADVLETTRQPSAC

SEQ ID NO: 148814 - protein, 164 aa, Unknown
  Bacterial polypetide isolated from the Sargasso Sea
MISKIFPKIHPEGYKFLVIAGIITLLLYVFSDFLGLIGLVLTIWVYYFFRDPERVIIDDNNYLVSPADGEIIKVEEVDGPKELGLENKRFNKISVFMNVFDCHVNRTPCAGKIEEILYKPGKFVNASLDKASEDNERNYFKIKDTENNDIIVVQIAGLVARRIV

SEQ ID NO: 148815 - protein, 62 aa, Unknown
  Bacterial polypetide isolated from the Sargasso Sea
QIAGLIARRIVCETDKNQELNQGDRIGMIRFGSRADVYYENYEPLVKVGQTAISGETLLAKK

SEQ ID NO: 148816 - protein, 84 aa, Unknown
  Bacterial polypetide isolated from the Sargasso Sea
SEDNERNYYKIKDLQNNDIVVVQIAGLVARRIVCESNKDQDIKQGDRIGMIRFGSRADVYYENYEPLVKIGQTTIAGETLLAKK

SEQ ID NO: 148817 - protein, 157 aa, Unknown
  Bacterial polypetide isolated from the Sargasso Sea
MSKIFPKIHNEGYKFIIIFAIVTIILYFINGFLGFIGLVLTIWCYYFFRDPERTSIGDDNYLTSPADGVVLQVMDTNGPKELGLENKQMKKISIFMDVFDCHVNRSPCSGAISEILYKPGKFFNASLDKASKDNERNYYKIKNSDGEEIIVVQIAGL

SEQ ID NO: 148818 - protein, 183 aa, Unknown
  Bacterial polypetide isolated from the Sargasso Sea
FLGFVGLVLTIWCYYFFRDPDRISIDDENYLISPADGLVLQVLETDGPKELGLENKKFTKVSIFMNVFDCHVNRSPCSGKISEILYKPGKFINASLDKASEDNERNYYKIKNSHGEDIIVVQIAGLVARRIVTETSVDEELQQGTRIGMIRFGSRADLYFENYQPLVKVNQKAIAGETLIAKR

SEQ ID NO: 148819 - protein, 205 aa, Unknown
  Bacterial polypetide isolated from the Sargasso Sea
EGYKFLIISLIITLILLSISSFFGIIFIFITVWVYYFFRDPERIIIDDQNYLVSPADGRISSISEVKGPIELGLDSKQFTKVSIFMNVFDCHVNRSPSNGEITEIFYKPGKFLNASLDKASEENERNYFKIKDETTNENIVIVQIAGLIARRIVTQVQKTQKIKQGERLGMIRFGSRVDIYFSQRKTMVKVGQNVIAGESLIARK

SEQ ID NO: 148820 - protein, 178 aa, Unknown
  Bacterial polypetide isolated from the Sargasso Sea
MLDKIFPKLHQEGYKFLVISAILTLILWSISNFFGFVFTLITIWVYYFFRDPERVSINDENYLISPADGKISSIQEINGPVELGLDNKKFTRVSIFMNVFDCHVNRSPASGEIQDIFYKPGKFLNASLDKASEENERNYFKIKEHKTGDTIVIVQIAGLIARRIVTQIEKKQTINQGQ

SEQ ID NO: 148821 - protein, 151 aa, Unknown
  Bacterial polypetide isolated from the Sargasso Sea
MFTKIFPKIHTEGYKFIVIAAFITVILLIVNNFLGLIGFLLTIWVYYFFRDPERTIIGDDNYLVSPADGEVIKVEDVDGPKEVGLENKKFKKISIFMNVFDCHVNRTPCSGTVEEILYKPGKFFNASLDKASEDNERNYYKIKDKHGNAII

SEQ ID NO: 148822 - protein, 156 aa, Unknown
  Bacterial polypetide isolated from the Sargasso Sea
MNKIFPKLHNEGYKFIIIFAIATIILYFLNGFLGFVGLILTIWCYYFFRDPERISIGDDNYLTSPADGIVLQVKDTKGPKELGLEGKQMKKISIFMDVFDCHVNRSPCSGAISEILYKPGKFFNASLDKASEDNERNYYKIKNSDGNEIIVVQIAG

SEQ ID NO: 148823 - protein, 214 aa, Unknown
  Bacterial polypetide isolated from the Sargasso Sea
MKNISKIHTEGYKFLAISGVITLVSWLMSNFLGFIFGIITIWVYYFFRDPDRTIILDDNFLVSPADGVISGIKDISGPVELGLENQTFTRVSIFMNVFDCHVNRSPVNGKIEDIFYKPGKFLNASLDKASDENERNYFRIKDNKTQEEIVVVQIAGLIARRIVTQTKKKQEIAQGERIGMIRFGSRVDLYFNNRKIMVKVGQNVIAGESLIAQK

SEQ ID NO: 148824 - protein, 61 aa, Unknown
  Bacterial polypetide isolated from the Sargasso Sea
IAGLIARRIICEVSKDQNLKQGDRIGMIRFGSRVDIFFKNKKILTKPGQNVVAGESLLAKE

SEQ ID NO: 148825 - protein, 111 aa, Unknown
  Bacterial polypetide isolated from the Sargasso Sea
MIDKIFPKLHNEGYRFILIFIVLTIILYLINGFLGFIGLVLTIWCYYFFRDPDRVSIEDESYLISPADGEVLQILETNGPKELGLENKKYNKISIFMNVFDCHVNRTPCSG

SEQ ID NO: 148826 - protein, 250 aa, Unknown
  Bacterial polypetide isolated from the Sargasso Sea
MALPGFGRPPAYYFIWVLPRNSFNRLCGLLADAKLPRFLMTLLIRLFSWKYGVNLEEASKQVSEYKNFNEFFTRKLLPDVRTLDPDKEAVLSPVDGIIGESGFISNEILIQAKGLEYRLADLLKDSKKSKLYDGGIFITIYLAPYNYHRIHSMVSGEVSQFCYIPGDLWTVSPIGVHHVPELFARNERLITFFETDRGECAIVKIGATVVGRIRVVYHDITSNRFGARFQKSVLEPPLRVERGDEFGLFE

SEQ ID NO: 148827 - protein, 57 aa, Unknown
  Bacterial polypetide isolated from the Sargasso Sea
DIANWPRFGLIRFGSRVDIYLPTGVQPLVCIGQIMVSGETVIADLNSKELARDGRKE

SEQ ID NO: 148828 - protein, 154 aa, Unknown
  Bacterial polypetide isolated from the Sargasso Sea
MFSKIFPKIHAEGYKFLVIAVIITLVIYSFSDFLGLIGLVLTVWVYYFFRDPERVIIEDDNYLVSPADGEIIKVEEVDGPKELGLENKKFKKISIFMNVFDCHVNRTPCAGKIDEILYKPGKFFNASLDKASEDNERNYFKIKRSSQRRCNCCS

SEQ ID NO: 148829 - protein, 54 aa, Unknown
  Bacterial polypetide isolated from the Sargasso Sea
LSFISSNHQLDQGERFGLIRFGSRVDIYMPLDAVEKCKVGDKVVAGESILAALK

SEQ ID NO: 148830 - protein, 222 aa, Unknown
  Bacterial polypetide isolated from the Sargasso Sea
MQFRIHNEGWVYFVISCLITIIIIPFYTVLGILLCILSAYIFYFFRDPIRSIPKDDVIVSPADGLVTFIGNEKNPLKDSLDNNNYTKISIFLSVFDVHVNRMPLDASIKSINYVPGKFLNATLDKSSNENERNIIYAKKNEDSFYIVQIAGLIARRIVCNIKINQEVIKGDRIGIIKFGSRVDLYIPQNYNILISKGQKVVGGETIISNPKNIQNIKSSILK

SEQ ID NO: 148831 - protein, 218 aa, Unknown
  Bacterial polypetide isolated from the Sargasso Sea
MSGILDKIFPKIHSEGYKFLIISILITVILYFISSFLSVIALLLTIWVYYFFRDPERISIDDENYLVSSADGVIVNVSEVSGPKELGLENRTFKKISVFMNVLDCHVNRTPCSGKIAEILYKPGKFLNASLDKASEDNERNYYKIINKHGEEIVVVQIAGLIARRIVTEVSEDQEIQQGSRIGMIRFGSRVDIFFENYDPIVKVNQKTIAGETLLAKK

SEQ ID NO: 148832 - protein, 107 aa, Unknown
  Bacterial polypetide isolated from the Sargasso Sea
MDKVKIALQYMLPKHLLSRLVGKLAAAEAGTLTTAAIKWFIKQYKIDMSEAAQSEPQAYKSFNDFFTRALKPGIRPINQHTNIMVHPVDGAVSQLGPIKEGRIFQAK

SEQ ID NO: 148833 - protein, 150 aa, Unknown
  Bacterial polypetide isolated from the Sargasso Sea
SIGFFLTFFVLLFFRDPERNSPQDSNLIISSADGKVCLIDEAYPPAEVPIEAEKMKRICVFMNVFNVHINRSPVQGRVEHIVYKKGQFLNASLDKASDKNERSSLVVNTDNGAKIIIVQIAGLIARRILSFISSNHRLNQGERFGLIRFG

SEQ ID NO: 148834 - protein, 215 aa, Unknown
  Bacterial polypetide isolated from the Sargasso Sea
MLDKIFPKIHNEGYKFIVIFILGTIILYFISSFLGFIGLVLTIWCYYFFRDPDRISIGDENYLTSPADGLVLQVLETDGPKELGLENKKFKKVSIFMNVFDCHVNRSPCSGKISEILYKPGKFFNASLDKASEDNERNYYKIKNSHGEDIIVVQIAGLVARRIVTETSVDEELLQGKRIGMIRFGSRADLYFENYEPLVKVNQKTIAGETLIAKR

SEQ ID NO: 148835 - protein, 183 aa, Unknown
  Bacterial polypetide isolated from the Sargasso Sea
MFSKIFPKIHTEGYKFIVIAVFITIILLIINNFLGLIGILLTIWVYYFFRDPERTIIGDDSYLVSPADGEVIKVEEVDGPKELGLENKKFKKISIFMNVFDCHVNRTPCSGIVEDILYKPGKFLNASLDKASEDNERNYYKIKDKHGNNIVVVQIARLVARRIVCETNNNQELSQGDRIGMIR

SEQ ID NO: 148836 - protein, 138 aa, Unknown
  Bacterial polypetide isolated from the Sargasso Sea
MFSKIFPKIHAEGYKFLVIAGIITIILYTLSDFLGLIGFVLTIWVYYFFRDPDRVIIENDNYLVSPADGEILKVEEVDGPKELGLENKKFNKISVFMNVFDCHVNRTPCAGKIEEILYKPGKFFNASLDKASEDTMRE

SEQ ID NO: 148837 - protein, 190 aa, Unknown
  Bacterial polypetide isolated from the Sargasso Sea
ILYFINGFLGFVGLVLSIWCYYFFRDPERYSINDENYLTSPADGIVLQVLETSGPKELGLENKKFKKISIFMNVFDCHVNRSPCSGKITEIIYKAGKFFNASLDKASEHNERNYYKIKNTNSEDIIVVQIAGLVARRIVVETSVDEDIKQGSRIGMIRFGSRADLYFENYDPLVKVNQKMIAGETLIAKR

SEQ ID NO: 148838 - protein, 233 aa, Unknown
  Bacterial polypetide isolated from the Sargasso Sea
MYIFIPHLILTRLMGWIANSRNKIIKNLLIKSFIKLYKPNLEESLISDINDFPTYNSFFTRKLKNGVRPIEDSKLTIVSPVDGTIMDHGMVESNMLIQAKKHEYPIKELLGKKSQNSNKFKHYFITIYLAPTDYHRIHCPYGGLISSTCHLGESLFSVNEKAQVNIPNLYIKNERAVMKVESNSLSYYLVSVGASIVGSIVPFWSDSGLKTRKDNINEWNEGPEENKNQALKD

SEQ ID NO: 148839 - protein, 176 aa, Unknown
  Bacterial polypetide isolated from the Sargasso Sea
ILTIWVYYFFRDPERFPINDENYLVSPADGLVIKVEEVNGPSELSLENKKFTKVSVFMNVFDCHVNRIPCSGEIEEILYKPGKFLNASLDKASEDNERNYYKIKNSNGDQVVVVQIAGLIARRIVTETNKGEKLNQGDRIGMIRFGSRADIYFENYTPLVKVNQRAVAGETLIAKK

SEQ ID NO: 148840 - protein, 202 aa, Unknown
  Bacterial polypetide isolated from the Sargasso Sea
KFLAISIIITFIILIFSKFFGSIMILLTVWVYYFFRDPERHSINDNSFLVSPADGLITDISDKTGPVELQLENTTFTKVSIFMNVFNCHVNRSPLAGTVEEISYKPGKFLNASLDKASDENERNYYRIKCSKSGEEIIIVQIAGLIARRIVTDVEQGQSLKQGERIGMIRFGSRVDIYFKNKKILAKLGQNVVAGESLVASE

SEQ ID NO: 148841 - protein, 86 aa, Unknown
  Bacterial polypetide isolated from the Sargasso Sea
KASEDNERNYFKIKDTDNNDIVVVQIAGLVARRIVCESNKDQELKQGDRIGMIRFGSRADVYYENYQPLVKVGQKAISGETLLAKK

SEQ ID NO: 148842 - protein, 119 aa, Unknown
  Bacterial polypetide isolated from the Sargasso Sea
DVFDCHVNRSPVSGKIEDIFYKPGKFLNASLDKASDENERNYFKIKDKKTQEQIVVVQIAGLIARRIITQTEKNKEIAQGERIGMIRFGSRVDLYFNKRKIMVKVGQNVIAGESLIAQI

SEQ ID NO: 148843 - protein, 118 aa, Unknown
  Bacterial polypetide isolated from the Sargasso Sea
GEVTKVDYIEGKFINATLDKASDENERLKISIKNGNNLIYVTQIAGLIARRIVNYVKPNENINQGERYGIIKFGSRVDIEFPNSFKLLVNEGQQCIGGETIIAQDIKSKISQREFKKI

SEQ ID NO: 148844 - protein, 165 aa, Unknown
  Bacterial polypetide isolated from the Sargasso Sea
MQLRIHNEGWVYFVISCLITIIIIPFYTILGIFLAIISAYIFYFFRDPIRAVPNEKVVVSPADGLVTYIGAEKNPLDDDKDQNTYTKVSIFLSVFDVHVNRMPVKGSISSIHYIPGKFLNATLDKSSKENERNIIFVKSNNDYFYIVQIAGLIARRIVCNLKINQ

SEQ ID NO: 148845 - protein, 162 aa, Unknown
  Bacterial polypetide isolated from the Sargasso Sea
MNKIFPKLHNEGYKFIIIFAIATIILYFLNGFLGFIGLILTIWCYYFFRDPERISIGDDNYLTSPADGIVLQVKDTKGPKELGLEGKQMKKISIFMDVFDCHVNRSPCSGAISEILYKPGKFFNASLDKASEDNERNYYKIKNSDGNEIIVVQIAGLVQEEL

SEQ ID NO: 148846 - protein, 113 aa, Unknown
  Bacterial polypetide isolated from the Sargasso Sea
MLIGHLVQEKLQKFYINHGKFFNASLDKASEENERNYYKISNSNGEDIIVVQIAGLIARRIVCEVKADDELNQGDRIGMIRFGSRADIYFENYNPLVKVNQKTIAGETLLAKK

SEQ ID NO: 148847 - protein, 71 aa, Unknown
  Bacterial polypetide isolated from the Sargasso Sea
KSQEEIVIVQIAGLIARRIVTQTEKNQEIKQGERIGMIRFGSRVDLYFNKRKIMVKVGQNVIAGESLIAQI

SEQ ID NO: 148848 - protein, 231 aa, Unknown
  Bacterial polypetide isolated from the Sargasso Sea
YSDIEKYSSYNDFFTRKLKHGSRVIDNVNTSFISPVDGEIVDHGLIEEGQLIQAKKFNYSLEDLIGRDYKSLYSGGYFITIYLAPTDYHRIHCPFNGQITDSKHLGTSLYSVNKKAQESIPCLYIKNERSVLQIDSDGFKYSLVSVGASVVGSIVPFWSTDENSSRKKLIQEWNEGPGQKIQINKGDELAYFRMGSTVILLFEDSSKLDLDSLKENMLVKFGNKLVSLKNL

SEQ ID NO: 148849 - protein, 222 aa, Unknown
  Bacterial polypetide isolated from the Sargasso Sea
MQLRIHNEGWVYFVISCLITIIIIPFYTILGIFLAIISAYIYYFFRDPIRAVPIEEVVVSPADGLVTYIGAEKNPLDDDIDQNTYIKVSIFLSVFDVHVNRMPVKGSISSIHYIPGKFLNATLDKSSKENERNIIFAKSNNDNFYIVQIAGLIARRIVCNLKVNQGVEKGDRIGIIKFGSRVDLYVPESYNILITKGQRVVGGETIISNPKDIKKIKNSKLI

SEQ ID NO: 148850 - protein, 175 aa, Unknown
  Bacterial polypetide isolated from the Sargasso Sea
MLDKILPKLHNEGYRFIVIFIAATVILYFLNGFLGFVGLVLTIWCYYFFRDPDRISIQDDNYLTSPADGEVLQVLEVDGPKELGLENRKFQKISIFMNVFDCHVNRSPCSGIISEILYKPGKFINASLDKSSEDNERNYYKIKSVLGEDIIVVQIAGLIARRIVTDSIKDQQLKQ

SEQ ID NO: 148851 - protein, 168 aa, Unknown
  Bacterial polypetide isolated from the Sargasso Sea
MPHHLISRFTYIITRTHHPLTSFLIRLYVRLFKINLDECIEKNTDNYNTFCDFFTRKLKKGIHVVNKDKDSIVSSCDGRILQFGKIQDNSILQVKGKSTPIRTLLCNDKELASIYKDGSFLTIYLSPKDYHRVHIPANGKLMKTLHVPGRLFSVADHAVECIDNLYSK

SEQ ID NO: 148852 - protein, 134 aa, Unknown
  Bacterial polypetide isolated from the Sargasso Sea
LGLDKQKFTRVIIFMNVFDCHVNRSPIKGEIKDIFYKPGKFLNASLDKASEENERNYYKIEESKSGETIIVVQIAGLIARRIVTQTVKNQIVHQGQRIGMIRFGSRVDVYFTKRKTLVKVGQNVIAGESLIAGF

SEQ ID NO: 148853 - protein, 139 aa, Unknown
  Bacterial polypetide isolated from the Sargasso Sea
VKGPVELGLDSKTFTRVSIFMNVFDCHVNRSPSNGEIEEIFYKPGKFLNASLDKASEENERNYFKIKDEANENIVVVQIAGLIARRIVTQVQKTQKIKQGERLGMIRFGSRVDIYFSQRNIMVKVGQNVIAGESLIARK

SEQ ID NO: 148854 - protein, 178 aa, Unknown
  Bacterial polypetide isolated from the Sargasso Sea
WTGFTIWCYYFFRDPERISIGDENYLTSPADGLVLQVLETDGPKELGLENKKFKKISIFMNVFDCHVNRSPCSGKISEILYKPGKFINASLDKASEDNERNYYKIKNSHGEDIIVVQIAGLVARRIVTETSVDEELQQGKRIGMIRFGSRADLYFENYEPLVKVNQKTIAGETLIAKR

SEQ ID NO: 148855 - protein, 142 aa, Unknown
  Bacterial polypetide isolated from the Sargasso Sea
MFSKIFPKIHSEGYKFLIIAVIISIIFYSLSDFLGLIGIVLTIWVYYFFRDPDRVIIEDDNYLVSPADGEVIKVEEVNGPKELGLEGKKFQKISIFMNIFDCHVNRTPCAGKIEEILYKPGKFFNASLDKASEDNERNYYKI

SEQ ID NO: 148856 - protein, 159 aa, Unknown
  Bacterial polypetide isolated from the Sargasso Sea
MNIFKSVKEEILVPIHPAGWPFIFLFWLITFLATYFWFPFLLLGSFLSLWSVYFFRNPKRTTPIGEFLVISPADGRVLSTGVTDLPDDLPLPDGKWRRVSIFMNVFDVHVNRAPVAGKIIATPYHEGVFLNASFDKASEKNERQNMVLEMESGLQVGVV

SEQ ID NO: 148857 - protein, 103 aa, Unknown
  Bacterial polypetide isolated from the Sargasso Sea
VTEILYKPGKFLNASLDKASEDNERNYYKISNSTGEEIIVVQIAGLIARRIVCEVKENDELNQGDRIGMIRFGSRADIYFENYNPLVKINQKTIAGETILAKK

SEQ ID NO: 148858 - protein, 165 aa, Unknown
  Bacterial polypetide isolated from the Sargasso Sea
FFRDPKRIIPKQDNLILSPADGKIIKIEEMHDPNGGEKLKIVSIFLSVFNVHTNRMPVDGKFMDVQYVKGKFLAAFDHMASDHNERTEIKIQTKFGIIKVKQIAGLIARRILCYANVGEKMEAGGRLGFIRFGSRTDIILPASINLEIKLNQKVLGGETVIGKYE

SEQ ID NO: 148859 - protein, 66 aa, Unknown
  Bacterial polypetide isolated from the Sargasso Sea
IVVVQIAGLVARRIVCETNKNQELNQGDRIGMIRFGSRADVYYENYEPLVKVGQTAISGETLLAKN

SEQ ID NO: 148860 - protein, 177 aa, Unknown
  Bacterial polypetide isolated from the Sargasso Sea
MLEKIFPKLHQEGYKFLVISVVLTLILWSISDFFGFVLTLITIWVYYFFRDPERTIINDDTYLVSPADGRISAIQEINGPVELGLDNKKFTRVSIFMNVFDCHVNRAPSNGEIQDIFYKPGKFLNASLNKASEENERNYFKIKDSKTDSPIIVVQIAGLIARRIVTQVEKTHTVIQG

SEQ ID NO: 148861 - protein, 174 aa, Unknown
  Bacterial polypetide isolated from the Sargasso Sea
TVWCYYFFRDPERFSIEDDNYLTSPADGVVLQVIDTNGPQELGLENKKFKKISIFMNVFDCHVNRSPCSGIVTEILYKPGKFINASLDKASEDNERNYYKIKNSMGEEIVVVQIAGLIARRIITEVNKDQELKQGTKIGMIRFGSRADIYFENYIPLVKVNQKTVAGETLLAKK

SEQ ID NO: 148862 - protein, 135 aa, Unknown
  Bacterial polypetide isolated from the Sargasso Sea
MNIVDSIKASILTPVHPAGIPFIAIFFILTVIIGWFWSPLYFAGIILTIWCVYFFRNPLRVTPVLSGANKNNLIISPADGRVIEISKINPSEEIGLPKGDWTRVSVFMNVFDVHVNRSPMLGKITYKNYIPGSFF

SEQ ID NO: 148863 - protein, 197 aa, Unknown
  Bacterial polypetide isolated from the Sargasso Sea
MFSKIFPKIHAEGYKFLVIAGIITIVFYIFSNFLGLIGLVLTIWVYYFFRDPERVIIDDDNYLVSPADGEVIKVEEVDGPKELGLENKKFQKISVFMNIFDCHVNRTPCAGKIEEILYKPGKFVNASLDKASEDNERNYFKIKDPHNNDIIVVQIAGLVARRIVCESNKDQELKQGDRIGMIRFGSRADIYYENYEP

SEQ ID NO: 148864 - protein, 156 aa, Unknown
  Bacterial polypetide isolated from the Sargasso Sea
DNYLTSPADGVVCRVMDTNVPKELGLENKKMKKVSIFMDVFDCHVNRSPCSGAISEILYKPGKFFNASLDKASEDNERNYYRIKNSNGEEIIVVQIAGLVARRIVTEVSKDELLEQGSRIGMIRFGSRADMYFENYSPLVKVDQKTIAGETLIAKK

SEQ ID NO: 148865 - protein, 196 aa, Unknown
  Bacterial polypetide isolated from the Sargasso Sea
MNKIFPKLHSEGYKFMIIFAIVTIILYLINGFLGFIGLLLTIWCYYFFRDPERTSIGDDNYLTSPADGVVLQVKDTNGPKELGLENKQMKKVSIFMDVFDCHVNRSPCSGAISEILYKPGKFFNASLDKASEDNERNYYRIRNSDGKDIIVVQIAGLVARRIVTEVSKDEIVDQGSRIGMIRFGSRADMYFEDYNP

SEQ ID NO: 148866 - protein, 163 aa, Unknown
  Bacterial polypetide isolated from the Sargasso Sea
MPKNLFSRICGFVANLKLPPFILQRLIRLFCHFYPIDLNEAEQSVEDFDCFNAFFTRKLRQGVRPLAEDPNALLCPVDGVLGEYGIIRNGNLLQAKGLEYRLENLLQDPERKDLYEGGRYITLYLAPHNYHRIHSPAEGQVREFAYVPGNLWTVGELGVMHVP

SEQ ID NO: 148867 - protein, 162 aa, Unknown
  Bacterial polypetide isolated from the Sargasso Sea
NIDLKMITIFTSPADGVVLQVKDTNGPKELGLENKQMKKVSIFMDVFDCHVNRSPCSGAISEILYKPGKFFNASLDKASEDNERNYYKIKNPDGEEIIVVQIAGLVARRIVTEVSKDELVEQGSRIGMIRFGSRADMYFENYTPLVKVDQKTIAGETLIAKK

SEQ ID NO: 148868 - protein, 216 aa, Unknown
  Bacterial polypetide isolated from the Sargasso Sea
MFEKIFPKIHTEGYKFLAISGVITLVLWLMSNFLGFIFGIITIWVYYFFRDPDRTIISDDNFLVSPADGIISGIKEINGPVELGLENQTFTRVSIFMNVFDCHVNRSPVSGKIEDIFYKPGKFLNASLDKASDENERNFFKIKDKKTQEEILVVQIAGLIARRIVTQTEKNQEIAQGERIGMIRFGSRVDLYFNKRKIMVKVGQNVIAGESLIAQI

SEQ ID NO: 148869 - protein, 278 aa, Unknown
  Bacterial polypetide isolated from the Sargasso Sea
MYIFIPNLILTRLMGWLASSRNKIIKNLLIKSFIKLYKPNLEESLISDINNFPTYNSFFTRKLKNGVRPIEDSKLAIVSPVDGTIMDHGIVERNMLIQAKNHEYPIKELLGKESQNANKSKQYFITIYLAPTDYHRIHCPYGGLISSTCHLGESLFSVNEKAQVNISDLYIKNERAVMKVESSSLSYYLVSVGASIVGSIVPFWSDSGPKTRKDCINEWNKGPQENKNQALKGQELAYFKMGSTVILIIEDSAQLDLHSLTTNKTVKFGSELINLKNL

SEQ ID NO: 148870 - protein, 276 aa, Unknown
  Bacterial polypetide isolated from the Sargasso Sea
MHKLVPHLFLTLLLGLLANSKVRIIKKLLIKGFIWLYKPDLNEAIHSDIEKYISYNDFFTRKLKQGSRVIDDEDTSFISPVDGEIVDHGLIEEGQLIQAKKFNYSLEDLIGRDYKSLYSGGYFITIYLAPTDYHRIHCPFNGQITDSKHLGTSLYSVNKKAQESIPYLYIKNERSFLQIDSDGFKYSLVSVGASVVGSIVPFWSTDKNFSRKQLIQEWNEGPGQKKQINKGDELAHFRMGSTVILLFEDSSKLDLDSLKENMLVKFGHKLVSLKNI

SEQ ID NO: 148871 - protein, 160 aa, Unknown
  Bacterial polypetide isolated from the Sargasso Sea
RITPNQDNLIVSPADGKIIKIDEVNDPKSGEKLKMVSIFLSVFNVHANRMPVDGKFVDVQYVKGKFLAAFDHKASDFNERTEIQIETRFGIIMVKQIAGLVARRILCYANVGEKMEAGARLGFIRFGSRTDIILPASIDLQIELDQKVIGGETIIGKYEK

SEQ ID NO: 148872 - protein, 258 aa, Unknown
  Bacterial polypetide isolated from the Sargasso Sea
MILSYWLYLVPHHLMSRFTYIITRTHHPLTQYLIKLYIRIFKINLKECEEENIENYHTFCDFFTRKLKKGVHKINLDNNSIVSSCDGRILQFGKITYESILQVKGKNTPIKELLVNDKELSSIYTNGSFLTIYLSPKDYHRVHIPFTGKLMKTLHVPGRLFSVADHAVECINNLYSKNERLVCHFKNNNSFFSVILVGAINVSSIETQWKGEVSPPMPKKVISTKYGNKNISFHKGNEIGMFKSGSTVILLFTDKINL

SEQ ID NO: 148873 - protein, 173 aa, Unknown
  Bacterial polypetide isolated from the Sargasso Sea
MINNIFPKIHKEGHKFLAIAIIITFFGLLISKGLGLILFVITIWVYYFFRDPERISIKDDRFLVSPADGVISHISEVPGPKELGLENKSYTRISIFMNVFDCHVNRTPASGTVEDIFYKPGKFLNASLDKASEENERNYYKIKTKNKGDDIIIVQIAGLIARRIVCEVKKEQV

SEQ ID NO: 148874 - protein, 269 aa, Unknown
  Bacterial polypetide isolated from the Sargasso Sea
MPHHLISRFTYIITRTHHPLTSFLIRLYVKIFKINLDECIEKNIDNYNTFCDFFTRKLKKGVHVVNKDKDSIVSSCDGRILQFGKIQEKSILQVKGKSTPIQTLLCNDKELASIYKDGSFLTIYLSPKDYHRVHIPANGKLMKTLHVPGRLFSVADHAVECIDNLYSKNERLVCHFKEDDNHFSVIFVGAINVSSIETQWKGEVSPPMPKKLISTKYGNKNIKFHKGDEIGMFKSGSTVILLFTENVELSNSLKINQSIRVGKKIGKIN

SEQ ID NO: 148875 - protein, 48 aa, Unknown
  Bacterial polypetide isolated from the Sargasso Sea
ICYLIRGERFGLIRFGSRVDIYLPLDAVEKCKVGDKVVAGESILASLN

SEQ ID NO: 148876 - protein, 278 aa, Unknown
  Bacterial polypetide isolated from the Sargasso Sea
MHYLIPHFILTRLMGILADSKNQYIKKFLINSFIKIYRPKLEESLIVDINDYATYNSFFTRKLKEEARPIESSYLSVVSPVDGTIVDHGLIERNMLIQAKKHKYSLHELLGEKANKERNTPGYFITIYLAPTDYHRIHCPYEGYISSTSHIGESLFSVNEKAQVDISDLYIKNERAVMNIKGSLLSYSLVSVGASIVGSIVPFWFDKDTTVRKDFVREWRKGPEEVERQVLKGQELAYFKMGSTVIIVFEDSDKLDLHSLTTNKSVKFGSKLINLKKV

SEQ ID NO: 148877 - protein, 215 aa, Unknown
  Bacterial polypetide isolated from the Sargasso Sea
MIDKVFPKIHNEGYKFLVIFGLGTLVLYLISGFLGLIGIILTIWVYYFFRDPERFPINDENYLVSPADGLVIKVEEVNGPSELSLENKKFTKVSVFMNVFDCHVNRIPCSGEIEEILYKPGKFLNASLDKASEDNERNYYKIKNSNGDQVVVVQIAGLIARRIVTETNKGEKLNQGDRIGMIRFGSRADIYFENYKPLVKVNQRAVAGETLIAKK

SEQ ID NO: 148878 - protein, 214 aa, Unknown
  Bacterial polypetide isolated from the Sargasso Sea
MSKIFPKLHNEGYKFIVIFAIATVILYLINGFFGFVGLVLTIWCYYFFRDPERTSIGDDNYLTSPADGVVLQVMDTNGPKELGLENKKMKKVSIFMDVFDCHVNRSPCSGAISEILYKPGKFFNASLDKASEDNERNYYRIKNSNGEEIIVVQIAGLVARRIVTEVSKDEIVEQGSRIGMIRFGSRADMYFENYSPLVKVDQKTIAGETLIAKK

SEQ ID NO: 148879 - protein, 183 aa, Unknown
  Bacterial polypetide isolated from the Sargasso Sea
MFFINIFLLVLFIFCLNFFRDPKRIVPTDENCIVSPADGKIIKIKEFEDPETKEKLRLVSIFLSVFNVHSNRMPVDGLIKSVDYIKGDFLAAFDHKASEQNERTEISIETRFGSMVVKQIAGLVARRILCYAKKNEKMLAGDRLGFIRFGSRTDIILPNKVSLNVELDQKVYGGQTIIGKYEV

SEQ ID NO: 148880 - protein, 261 aa, Unknown
  Bacterial polypetide isolated from the Sargasso Sea
AFLAHSNLSLIRYPLIWLFNSIYEPNLNEAREKNLKDYSSLNDFFIRKIKEESRTFDEDLLEIGSPVDGVISSFGVIEEGRLIQAKGIDYSLKDLVASETEYKKFDNGYFLTIYLSPKDYHRIHSPSDGKVYLTEHIPGSLFSVNESSQRSVRDLYAINERTLMGIKNKNFNFMLVNVGAAIVGNIVPYWYNEKLNDFDKIIDSWKLGPEKNLKVVEKGQEIAFFQMGSTVILLFERKLNLNSDYLEELKPVKLGETLFKL

SEQ ID NO: 148881 - protein, 162 aa, Unknown
  Bacterial polypetide isolated from the Sargasso Sea
MHKLVPHLLLTLLLGLLANSKVRIIKNILIKGFIWLYKPDLNEAIYSDIEKYSSYNDFFTRKLKHGSRVIDNVNTSFISPVDGEIVDHGLIEEGQLIQAKKFNYSLEDLIGRDYKSLYSGGYFITIYLAPTDYHRIHCPFNGQITDSKHLGTSLYSVNKKAQ

SEQ ID NO: 148882 - protein, 214 aa, Unknown
  Bacterial polypetide isolated from the Sargasso Sea
MDNIFPKIHKEGYKFLAISIIVTFIVWLFSGTLGFIFILLTIWVYYFFRDPERISIMDDKFLVSPADGLISNISNISGPIELGLENKSYTKVSIFMNVFNCHVNRTPVSGSVEEILYKPGKFINASLDKASEENERSYYKIKTKSGDEIIVVQIAGLIARRIVTDIKKDQNLKQGERIGMIRFGSRVDVYFSNMKLLTKVGQNVLAGESLIAEQ

SEQ ID NO: 148883 - protein, 195 aa, Unknown
  Bacterial polypetide isolated from the Sargasso Sea
MGVYAYAFENQILILLYHALGVLFLFSLYFFRDPVRVIPNDSSAIISPADGKILSIKIIDDDDVGNSSHLISIYLNIFNVHVNRFPFDGIVQNVDVKSGEFFAAFNHNASDVNEQVVTMVSHEKLKYKIKQIAGIFARRILCYAEPKMSVIKGGRLGFIRFGSRTDLVVSSNVNICVKEGDKIKGGKTVLAKIQK

SEQ ID NO: 148884 - protein, 130 aa, Unknown
  Bacterial polypetide isolated from the Sargasso Sea
MDKIFPKLHNEGYKFLIIFGIGTIILNLINGFLGFVGLVLTIWCYYFFRDPERVSIDDENYLVSPADGLVLKVEDSDGPKELNLENKKFKKISIFMNVFDCHVNRTPCSGKVTEILYKPGKFFNASLDKA

SEQ ID NO: 148885 - protein, 222 aa, Unknown
  Bacterial polypetide isolated from the Sargasso Sea
MQLRIHNEGWVYFVISCLITIIVIPFYTILGIFLSILSVYIFYFFRDPIRAVPTEEVVVSPADGVVTYIGRKKNPLEDNKDQNTYNKVSIFLSVFDVHVNRMPIKGSINSKHYIPGKFINATLDKSSDDNERNIITVKSNKDNFYIVQIAGLIARRIVCNLKINQEVEKGSRIGIIKFGSRVDLYLPENYDILVAKGQRVVGGETIISNPKNILKINNAKSI

SEQ ID NO: 148886 - protein, 65 aa, Unknown
  Bacterial polypetide isolated from the Sargasso Sea
MFVKFAGLIARRIVTQVQKSQKVKQGERLGMIRFGSRVDIYFSQRNTMVKVGQNVIAGESLIARK

SEQ ID NO: 148887 - protein, 161 aa, Unknown
  Bacterial polypetide isolated from the Sargasso Sea
TSIDDDNYLTSPADGLVLQVLETNGPKELELENKKFTKISIFMNVFDCHVNRTPCSGKISEIIYKPGKFFNASLDKASEENERNYYKIKNSSGEDVIVVQIAGLIARRIVTETSENQDLKQGERIGMIRFGSRADVYFENYKPLVKVNQKTIAGETLIAKK

SEQ ID NO: 148888 - protein, 213 aa, Unknown
  Bacterial polypetide isolated from the Sargasso Sea
MFSKIFPKIHTEGYKFIVIAVFITIIFLIINNFLGLIGILLSVWVYYFFRDPERTIIGDDSYLVSPADGEVIKVEEVDGPKELGLENKKFKKISIFMNVFDCHVNRTPCSGIVEDILYKPGKFLNASLDKASEDNERNYYKIKDKHGNDIVVVQIAGLVARRIVCETNKNQELNQGDRIGMIRFGSRADVYYENYEPLVKVGQTAISGETLLA

SEQ ID NO: 148889 - protein, 215 aa, Unknown
  Bacterial polypetide isolated from the Sargasso Sea
MFSKIFPKIHTEGYKFIVIAVFITIIFLIINNFLGLIGILLTVWVYYFFRDPERVIIGDDSYLVSPADGEVIKVEEVDGPKELGLENKKFKKISIFMNVFDCHVNRTPCSGIVEDILYKPGKFLNASLDKASEDNERNYYKIKDKHGNDIVVVQIAGLVARRIVCETNKNQELNQGDRIGMIRFGSRADVYYENYEPLVKVGQTAISGETLLAKN

SEQ ID NO: 148890 - protein, 128 aa, Unknown
  Bacterial polypetide isolated from the Sargasso Sea
KKIKKISIFMNVFDCHVNRTPCSGKIEEILYKPGKFLNASLDKASEDNERNYYKIKDVHNNDIVVVQIAGLIARRIVCESNKDQDLKQGDRIGMIRFGSRADVYYENYEPLVKIGQTSIAGETLLAKK

SEQ ID NO: 148891 - protein, 213 aa, Unknown
  Bacterial polypetide isolated from the Sargasso Sea
MSKKYLGIHREGWKFFIIFILISFFSFFITKTIFLISLSLSIFTLWFFRDPERYFDSQDNQVLSAADGKICFIGEDAAPIETGIDQKMNKVSIFMNVFNVHINRSPVSGEIEKIIYKNGKFFNASLDKASEYNERNSIIIKNNDEKIIVVQIAGLIARRILSFISENDIMAKGERIGLIRFGSRVDIYLPLNYQIKVNQNDIVTAGKTIIAER

SEQ ID NO: 148892 - protein, 214 aa, Unknown
  Bacterial polypetide isolated from the Sargasso Sea
MNKIFPKLHNEGYKFIIIFAIATIILYFLNGFLGFIGLILTIWCYYFFRDPERISIGDDNYLTSPADGIVLQVKDTKGPKELGLEGKQMKKISIFMDVFDCHVNRSPCSGAISEILYKPGKFFNASLDKASEDNERNYYKIKNSDGNEIIVVQIAGLVARRIVTEVSKDELVEQGSRIGMIRFGSRADIYFENYTPLVKINQKTIAGETLIAKK

SEQ ID NO: 148893 - protein, 191 aa, Unknown
  Bacterial polypetide isolated from the Sargasso Sea
MLNSIFPKIHKEGYKFLAISIIATFVVLLFSNLLGLLFVILTVWIYYFFRDPERYCINNDDYLTSPADGLITSISEETGPIELQLENTTFTKVSIFMNVFNCHVNRVPASGKVEEINYKPGKFLNASLDKASKENERNYYKLKCSKTNEEIIIVQIAGLIARRIVCEVEQGQDLKQGQRIGMIRFGSRVDL

SEQ ID NO: 148894 - protein, 195 aa, Unknown
  Bacterial polypetide isolated from the Sargasso Sea
VVVTIILYFLNGFLGLVGFVLTIWCYYFFRDPERIAIGDETYLTSPADGEVLQVLETNGPKELGLENRKFKKISIFMNVFDCHVNRSPCSGKVSEILYKPGKFFNASLDKASEDNERNYYKIKNSHDEDVIVVQIAGLVARRIVTETSVDQELQQGTRIGMIRFGSRADMYFENYDTLVKVGQKTIAGETLIAKR

SEQ ID NO: 148895 - protein, 74 aa, Unknown
  Bacterial polypetide isolated from the Sargasso Sea
IAGLIARRIITNVDVGKELKAGEIFGLIRFGSRVDVYFPIESKVKILVGQTSIAGETVLAELEEKKKLKKTTKK

SEQ ID NO: 148896 - protein, 197 aa, Unknown
  Bacterial polypetide isolated from the Sargasso Sea
MFSKVFPKIHTEGYKFIVIAVFITIILLIINNFLGLIGILLTIWVYYFFRDPERVIIRDDSYLVSPADGEVIKVEEVDGPKELGLENKKFKKISIFMNVFDCHVNRTPCSGIVEDILYKPGKFLNASLDKASEDNERNYYKIKDKHGNDIILVQIAGLVARRIVCETNKNQELIQGDRIGMIRFGSRADVYYENYEP

SEQ ID NO: 148897 - protein, 98 aa, Unknown
  Bacterial polypetide isolated from the Sargasso Sea
YKNGKFFNASLDKASEHNERNSIIIENNDEKIIVVQIAGLIARRILSFISENDIMTKGERIGLIRFGSRVDIYLPLNYQIKVHQNDIVAAGKTIIAER

SEQ ID NO: 148898 - protein, 210 aa, Unknown
  Bacterial polypetide isolated from the Sargasso Sea
MFSKIFPKIHAEGYKFLVIAGIITIIFYIFSSFLGLLGLVLTIWVYYFFRDPDRIIINDDNYLVSPADGEVIKVEESDGPKELGLENKKFKKISIFMNVFDCHVNRTPCSGKIEEILYKPGKFVNASLDKASEDNERNYYKIKDSHGNDVVVVQIAGLVARRIVCESSKDQDLKQGDRIGMIRFGSRADVYYENYEPLVQIGQTSIAGET

SEQ ID NO: 148899 - protein, 191 aa, Unknown
  Bacterial polypetide isolated from the Sargasso Sea
VLLLFSKLLGLFLMIITIWVYYFFRDPERYPINDDAFLVSPADGLITDISEKTGPIELQLENTSYTKISIFMNVFNCHVNRTPLSGKVEEINYKPGKFLNASLDKASEENERNYYKIKCSRSNEDIIIVQIAGLIARRIVCEVEQGQSLKQGERIGMIRFGSRVDIYFKNKKVLAKIGQNVVAGESLIASE

SEQ ID NO: 148900 - protein, 203 aa, Unknown
  Bacterial polypetide isolated from the Sargasso Sea
MQFKFHTEGWTYIVSVLILIIIIIPFFNILGIFLIILLIFILFFFRDPNRCVPNDNFIISPADGLISYVGESKLPIDASDTKIPYNRISIFLSIFDVHVNRMPISGKIKKINYHDGKFINASYDKSSEENERNVISIEHDNQIFYVVQIAGLIARRIVCQVDVNQELNKGDRIGIIKFGSRVDLYLPKEYNILVSKGQKVIAG

SEQ ID NO: 148901 - protein, 61 aa, Unknown
  Bacterial polypetide isolated from the Sargasso Sea
IAGLIARRIVCEVEQGQNLKQGDRIGMIRFGSRVDIYFKNKKVLAKIGQNVVAGESLIASE

SEQ ID NO: 148902 - protein, 194 aa, Unknown
  Bacterial polypetide isolated from the Sargasso Sea
AATIVLYFIHGFLGFVGFVLSIWVYYFFRDPDRISIDDDNYLTSPADGLVLQVLESNGPKELELENKKFTKISIFMNVFDCHVNRTPCTGKISQIVYKPGKFFNASLDKASEENERNYYKVQNSSGEDIIIVQIAGLIARRIVNESHEGQELKQGERIGMIRFGSRADIYFENYKPLVKVNQKTIAGETLIAKK

SEQ ID NO: 148903 - protein, 217 aa, Unknown
  Bacterial polypetide isolated from the Sargasso Sea
MIDILFPKLHKEGYRFLAIAGVITFIILLISNFFGIISLIITIWVYYFFRDPERFPINDENYLLSPADGVISQITELNGPQELGLDNKKFTRVSIFMNVFDCHVNRVPSSGKITQIFYKPGEYINASLDKASEKNERNYVKMVSKNGEELILVQIAGLIARRIVCEKKENDEIKQGDRIGMIRFGSRVDLYFENYQLMVNTNQKTIAGETILARKTK

SEQ ID NO: 148904 - protein, 216 aa, Unknown
  Bacterial polypetide isolated from the Sargasso Sea
MFNTIFPKIHKEGYKFLAISIITTFVVLLFSKFIGFILIILTVWVYYFFRDPERYPINDESYLVSPADGLITDVSERSGPEELRLENTTYTRVSIFMNVFNCHVNRIPTNGKIEEIYYKPGKFLNASLDKASEENERNFYKIKSNNNNEEIIIVQIAGLIARRIVCEAEQGQELKQGDRIGMIRFGSRVDLYFKNKKVLVKLGQNVVAGESLIASE

SEQ ID NO: 148905 - protein, 169 aa, Unknown
  Bacterial polypetide isolated from the Sargasso Sea
YFFRDPERTIIGDDSYLVSPADGEVIKVEEADGPKEVGLENKKFKKISIFMNVFDCHVNRTPCSGIVEDILYKPGKFLNASLDKASEDNERNYYKIKDKHGNDIVVVQIAGLVARRIVCETNKNQELNQGDRIGMIRFGSRADVYYENYEPLVKVGQTAISGETLLAKN

SEQ ID NO: 148906 - protein, 214 aa, Unknown
  Bacterial polypetide isolated from the Sargasso Sea
MSKIFPKIHNEGYKFIIIFAIATIILYFLNGFLGFFGLVLTIWCYYFFRDPERTSIGDDNYLTSPADGVVLQVMDTNGPKELGLENKQMKKISIFMDVFDCHVNRSPCSGAISDILYKPGKFFNASLDKASEDNERNYYKIKNSDGEDIIVVQIAGLVARRIVTEVSKDELLEQGSRLGMIRFGSRADIYFENYTPLVKVDQKTIAGETLIAKK

SEQ ID NO: 148907 - protein, 216 aa, Unknown
  Bacterial polypetide isolated from the Sargasso Sea
MFNTIFPKIHKEGYKFLAISIIATFVVLLFSKFIGFILIILTLWVYYFFRDPERYSINDESYLVSPADGLITDISERSGPEELRLENTTYTRVSIFMNVFNCHVNRIPTNGKIEEIYYKPGKFLNASLDKASEENERNFYKLKANKNNEEIIIVQIAGLIARRIVCETEQGQELKQGDRIGMIRFGSRVDLYFKNKKVLVKLGQNVVAGESLIASE

SEQ ID NO: 148908 - protein, 149 aa, Unknown
  Bacterial polypetide isolated from the Sargasso Sea
ADGEVIKVEEVDGPKELNLENKKFKKISIFMNVFDCHVNRTPCSGTVEEILYKPGKFLNASLDKASEDNERNYYKLKDKHGNDIIVVQIAGLVARRIVCETNQNQELTQGERIGMIRFGSRADVYYENYEPLVKVGQTAISGETLLAKN

SEQ ID NO: 148909 - protein, 183 aa, Unknown
  Bacterial polypetide isolated from the Sargasso Sea
LGFILIVITIWVYYFFRDPERFSINDDTFLVSPADGLITDISERSGPEELRLENTTYTKISIFMNIFNCHVNRIPTSGKVEEIYYKPGKFLNASLDKASEENERNYFKIKSISNNEEIIIVQIAGLIARRIVCDVEQGQDLKQGNRIGMIRFGSRVDVYFKNKKVLAKLGQNVVSGESLIASE

SEQ ID NO: 148910 - protein, 96 aa, Unknown
  Bacterial polypetide isolated from the Sargasso Sea
NGKFFNASLDKASEYNERNSIIIKNNDDKIIVVQIAGLIARRILSFISENDIMAKGERIGLIRFGSRVDIYLPLNYQIKVNQNDIVAAGKTIIAER

SEQ ID NO: 148911 - protein, 68 aa, Unknown
  Bacterial polypetide isolated from the Sargasso Sea
NDIIVVQIAGLVARRIVCESNKDQDLKQGDRIGMIRFGSRADVYYENYEPLVKIGQTAIAGETLLAKK

SEQ ID NO: 148912 - protein, 217 aa, Unknown
  Bacterial polypetide isolated from the Sargasso Sea
MIDILFPKLHKEGYRFLAISAILTFILLLVSNFLGVVSLIITIWIFYFFRDPERFPINDENFLVSPADGVISQITEINGPIELGLENKKFTRVSIFMNVFDCHVNRIPISGKIDKIYYKPGSYINASLDKASEKNERNYVKFKNAKGEDLVLVQIAGLIARRIVCDVQENDEIKQGDRFGIIRFGSRVDLYFENFQLLVQQNQKTISGETIIAKRKN

SEQ ID NO: 148913 - protein, 191 aa, Unknown
  Bacterial polypetide isolated from the Sargasso Sea
MQYKIHNEGWVYLVITLIIAIIFIPFFIILSFIFFFLSFFIYYFFRDPIRSVPVEELIVSPADGTVTFIGEVDAPEILNSDSKYFKISIFLSIFNVHVNRIPCNGTIKKVNYINGKFFNASFNKSSNENERNEIILRNSDNEEFLIVQIAGLIARRIVCNIKENQDVFQGHRFGIIKFGSRVDLFIPKKYT

SEQ ID NO: 148914 - protein, 80 aa, Unknown
  Bacterial polypetide isolated from the Sargasso Sea
SIGAVQIAGLVARRIVCYLEEGQQVLAGERFGLIRFGSRVDIYLPSGVMPQVIVGQRCIAGETVLADLSSDEVSRIGEIR

SEQ ID NO: 148915 - protein, 215 aa, Unknown
  Bacterial polypetide isolated from the Sargasso Sea
MFSKIFPKIHTEGYKFIVIAVFITIIFLIINNFLGLIGILLTVWVYYFFRDPERTIIGDDSYLVSPADGEVIKVEEVDGPKELGLENKKFKKISIFMNVFDCHVNRTPCSGIVEDILYKPGKFLNASLDKASEHNERNYYKIKDKHGNDIVVVQIAGLVARRIVCETNKNQELNQGDRIGMIRFGSRADVYYENYEPLVKVGQTAISGETLLAKN

SEQ ID NO: 148916 - protein, 215 aa, Unknown
  Bacterial polypetide isolated from the Sargasso Sea
MFSKIFPKIHAEGYKFLVIAGIITIVFYSFSDFLGLIGLVLSIWVYYFFRDPERVIIENDNYLVSPADGEVIKVEEVDGPKELGLENKKFKKISVFMNVFDCHVNRTPCSGIIEEILYKPGKFLNASLDKASEDNERNYFKIKDNHNNDIIVVQIAGLVARRIVCESNKDQKLNQGDRIGMIRFGSRADVYYENYEPLVKIGQKAISGETLLAKK

SEQ ID NO: 148917 - protein, 182 aa, Unknown
  Bacterial polypetide isolated from the Sargasso Sea
MTKISFIKFQNILKSYWLFFLPHHLFSRFTYIVTRTSHPLTGYLIKLYIKIFKVNMNECIESDISKYKTFCDFFTRKLKPGIHKIDKSNQSIVSSCDGKILEFGNIKNDSIVQVKGKLIKIAELLDNDNSSIKSFEHGSFASIYLSPKDYHRVHMPYKGKLSKNIHVPGRLYSVAKHAVTSI

SEQ ID NO: 148918 - protein, 178 aa, Unknown
  Bacterial polypetide isolated from the Sargasso Sea
MFSKIFPKIHTEGYKFIVIAVFITIIFLIINNFLGLIGILLTVWVYYFFRDPERIIIGDDSYLVSPADGEVIKVEEVDGPKELGLENKKFKKISIFMNVFDCHVNRTPCSGIVEDILYKPGKFLNASLDKASEDNERNYYKIKDKSGNNVIVVQIAGLVARRIVCETNNGQDLNQGDR

SEQ ID NO: 148919 - protein, 194 aa, Unknown
  Bacterial polypetide isolated from the Sargasso Sea
FVVGGILTAWCAYFFRDPVRHTPIREGLVISPADGIVQMISKAVPPSEVEMEIEALTRISIFMNVFDVHVNRSPVDGQISGLGYRPGAFLNASLDKASEENERQAVKITTADGMEIVLVQIAGLVARRILCWVEREQPIRVGERFGMIRFGSRVDVYLPEGVSPLVVVGQKAVAGETVLADMKSDEAQRKGNAR

SEQ ID NO: 148920 - protein, 214 aa, Unknown
  Bacterial polypetide isolated from the Sargasso Sea
MSKIFPKIHNEGYKFIIIFAIVTIILYFINGFLGFIGLVLTIWCYYFFRDPERTSIGDDNYLTSPADGVVLQVMDTNGPKELGLENKQMKKISIFMDVFDCHVNRSPCSGAISEILYKPGKFFNASLDKASEDNERNYYKIKNSDGEDIIVVQIAGLVARRIVTEVSKDELLEQGSRIGMIRFGSRADIYFQNYTPLVKVDQKTIAGETLIAKK

SEQ ID NO: 148921 - protein, 168 aa, Unknown
  Bacterial polypetide isolated from the Sargasso Sea
MIDKIFPKVHNEGYRFIVIFIATTIILYFIDGFLGFVGFILTIWCYYFFRDPDRISIEDENYLISPADGEVLQVLETNGPKELGLENNKFQKISIFMNVFDCHVNRTPCSGTVSEILYKPGKFFNASLDKSSEENERNYYRIKNISGEEIVVVQIAGLIARRIVTDVS

SEQ ID NO: 148922 - protein, 215 aa, Unknown
  Bacterial polypetide isolated from the Sargasso Sea
MFNTIFPKIHKEGYKFLAISILVTFIILFFSKFLGSVFILITFWVYYFFRDPDRYSIEDDNYLVSPADGLITDISEKSGPEELRLENTTFTKISIFMNVFNCHVNRVPSSGKVEEIFYKPGKFLNASLDKASEENERNYFKVKLNNGEEIIIVQIAGLIARRIVCEVEQGQELKQGDRIGMIRFGSRVDIYFKNKKVLAKLGQNVVAGESLLASE

SEQ ID NO: 148923 - protein, 225 aa, Unknown
  Bacterial polypetide isolated from the Sargasso Sea
MLFIPINRAGWPFILLFFIVAVGLFLASPYLGIIGFILTVWCIYFFRDPSRVTPKRPGLVISPADGIVQKISTVTPPRELQLGIDSMKRVSIFMNVFDVHVNRIPISGTITQLTYCKGKFFNASLDKASEFNERLAITLQTNENINIGFVQIAGLVARRIKCNLNENQSVNTGERFGIIRFGSRVDVYLPLSTTIFCVKGQKTVAGETVIADFDSKEESRLGDMI

SEQ ID NO: 148924 - protein, 211 aa, Unknown
  Bacterial polypetide isolated from the Sargasso Sea
MFNTIFPKIHKEGYKFLAISILATFIVLIFSKFLGLILTLISVWVYYFFRDPDRQSINDDHYLVSPADGLITDISEISGPEELKLENTTFTKISIFMNVFNCHVNRVPTSCKVDEIYYKPGKFLNASLDKASEENERNYFKIKCNLDKEEIVIVQIAGLIARRIVCEVEQGQELKQGDRIGMIRFGSRVDVYFKNKKVLDKIGQNVVAGES

SEQ ID NO: 148925 - protein, 94 aa, Unknown
  Bacterial polypetide isolated from the Sargasso Sea
DNERNGLVIETGHGLIGVVQIAGLVARRIVCFSENGDVLDAGERFGLIRFGSRLDVYLPTTATPRVAVGQMATAGETVLAGFGGFDLPTVGRKI

SEQ ID NO: 148926 - protein, 191 aa, Unknown
  Bacterial polypetide isolated from the Sargasso Sea
MNKLLSITKEKIQAYWLYFIPHYLFSRLTYIITRTRHPLTTFLIRFYIKFFKVNMQEASKQKPDDYKTFCEFFTRKLKPGIHKINKSKNAIVSSCDGKILEYGKIKDNKFLQVKGKTISINEIMFYDKKIQNQYIDGSFVTIYLSPKDYHRVHMPFDGKLERTIHIPGRLFSVATHAVKQIKNLYCKNERL

SEQ ID NO: 148927 - protein, 204 aa, Unknown
  Bacterial polypetide isolated from the Sargasso Sea
MSKIFPKIHNEGYKFIIIFAIATIILYLINGFLGFVGLVLTIWCYYFFRDPERTSIGDENYLTSPADGVVLQVMDTNGPKELGLENKQMKKISIFMDVFDCHVNRSPCSGAISEILYKPGKFFNASLDKASEDNERSYYKIKNSDGDDIIVVQIAGLVARRIVTEVSKDELVEQGSRIGMIRFGSRADMYFESYTPLVKVDQKT

SEQ ID NO: 148928 - protein, 217 aa, Unknown
  Bacterial polypetide isolated from the Sargasso Sea
ICGFVANLKLPPFILQRLIRLFCHFYPIDLNEAEQSVEDFDCFNDFFTRKLRQGVRPLAEDPNALLCPVDGALGEYGIIRDGNLLQAKGLEYRLEDLLHDPERKDLYDGGHYITLYLAPHNYHRIHSPAEGQVREFAYVPGDLWTVSELGVVHVPGLFARNERILTYLQTKAGECAIIKVGATVVGKIRVSYHDQVSNLPGATFSLSRLDTPWHVKE

SEQ ID NO: 148929 - protein, 215 aa, Unknown
  Bacterial polypetide isolated from the Sargasso Sea
MFTKIFPKIHAEGYKFLVIAGIITVLFYTFSDFLGLIGLVLTIWVYYFFRDPERVIIDDDNYLVSPADGEIIKVEEVDGPKELGLENKRFQKISVFMNVFDCHVNRTPCGGKIEEILYKPGKFLNASLDKASEDNERNYFKIKDNQNNDIVVVQIAGLVARRIVCESNKDQQLKQGDRIGMIRFGSRADVYYENYQPLVKVGQKAISGETLLAKK

SEQ ID NO: 148930 - protein, 216 aa, Unknown
  Bacterial polypetide isolated from the Sargasso Sea
MFNTVFPKIHKEGYKFLAISIIATFIILLFSNFFGLFFIVISIWIYYFFRDPDRFSINDNDFLVSPADGKIISINEQKGPMELQLENTTFTKVSIFMNVFNCHVNRTPLSGKVEEINYKPGKFLNASLDKASEDNERNYYRIKCNVSGEEIIMVQIAGLIARRIVCEVEQGQKLAQGERIGMIRFGSRVDIFFKNKKILAKIGQNVIAGESLIASK

SEQ ID NO: 148931 - protein, 147 aa, Unknown
  Bacterial polypetide isolated from the Sargasso Sea
MITDISERTGPMELQLENTSYTRASIFMNVFNCHVNRIPLAGTIEEINYKPGKFLNASLDKASEENERNYYKIKCSKSGEEIIIVQIAGLIARRIVCEVEQGQNLEQGDRIGMIRFGSRVDIYFKNKKVLAKVGQNVVAGESLIASE

SEQ ID NO: 148932 - protein, 199 aa, Unknown
  Bacterial polypetide isolated from the Sargasso Sea
MQYKIHNEGWVYLVITLIIAIIFIPFFIILSFIFFFLSFFIYYFFRDPIRSVPVEELIVSPADGTVTFIGEVDAPEILNSDSKYIKISIFLSIFNVHVNRIPCNGTIKKINYINGKFFNATFDKSSDENERNEIILKNSDNEELLIVQIAGLIARRIVCNIKENQDVYQGHRFGIIKFGSRVDLFIPNKYKPLVIEGQT

SEQ ID NO: 148933 - protein, 175 aa, Unknown
  Bacterial polypetide isolated from the Sargasso Sea
LTIWVYYFFRDPERTSIDDDNYLTSPADGLVLQVLETNGPKELGLENKKFTKISIFMNVFDCHVNRTPCSGKISEIIYKPGKFFNASLDKASEENERNYYKIKNSSGEDVIVVQIAGLIARRIVTETSENQDLKQGERIGMIRFGSRADVYFENYEPLVKVNQKTFAGETLIAKK

SEQ ID NO: 148934 - protein, 215 aa, Unknown
  Bacterial polypetide isolated from the Sargasso Sea
MFSKIFPKIHTEGYKFIVIAVFITIIFLIINNFLGLIGILLTVWVYYFFRDPERTIIGDDSYLVSPADGEVIKVEEVHGPKELGLENKKFKKISIFMNVFDCHVNRTPCSGIVEDILYKPGKFLNASLDKASEDNERNYYKIKDNHGNDIIVVQIAGLVARRIVCETNNNQQLNQGDRIGMIRFGSRADVYYENYEPLVKVGQTAISGETLLAKN

SEQ ID NO: 148935 - protein, 213 aa, Unknown
  Bacterial polypetide isolated from the Sargasso Sea
MNKILSTTKEKLQAYWLYFIPHYLFSRLTYIITRTQHPLTTFLIRFYIKFFKVNMQEASKQKPDDYKTFCEFFTRKLKPGIHKINKSKNAIVSSCDGKILEYGKIKDNKFLQVKGKTISINEIMFYDKKIQNQYIDGSFITIYLSPKDYHRVHMPFDGKLERTIHIPGRLFSVATHAVKQIKNLYCKNERLVCNFNNLDSKIAVIFVAAINVS

SEQ ID NO: 148936 - protein, 177 aa, Unknown
  Bacterial polypetide isolated from the Sargasso Sea
EYRLETLLQDPERKDFYDGGHYITLYLAPHNYHRIHSPAEGQVREFAYVPGDLWTVSELGVMHVPGLFARNERILTYLQTKAGECAIIKVGATVVGKIRVCYHDLFSNLPGATLSLNRLETPWHVERGGEIGVFELGSTVICLFQPGQVEFDSLNLGQTVYLGQSLGKILDNTTSLN

SEQ ID NO: 148937 - protein, 62 aa, Unknown
  Bacterial polypetide isolated from the Sargasso Sea
SIAGLVARRIVCEVSKDQELKQGDRIGMIRFGSRVDLFFNNKKILAKVGQNVVAGESLLAVE

SEQ ID NO: 148938 - protein, 178 aa, Unknown
  Bacterial polypetide isolated from the Sargasso Sea
MEYRLEDLLQDPERKNLYNGGHYITLYLAPHNYHRIHSPAEGQVREFSYVPGDLWTVSELGVMHVPGLFARNERILTYLQTKAGECAIIKVGATVVGKIRVCYHDQVSNLHGATFSLSCLQTPWHVERGGEIGVFELGSTVICLFQPGQVEFDSLNLGQTVYLGQSLGKIWDNTTSLN

SEQ ID NO: 148939 - protein, 126 aa, Unknown
  Bacterial polypetide isolated from the Sargasso Sea
MNKVSIFMNVFNVHINRSPVSGEIEKIIYKNGKFFNASLDKASEHNERNSIIIKNNDEKIIVVQIAGLIARRILSFISENDIMAKGERIGLIRFGSRVDIYLPLNYQIKVNQNDIVTAGKTIIAER

SEQ ID NO: 148940 - protein, 222 aa, Unknown
  Bacterial polypetide isolated from the Sargasso Sea
MQFKIHNTGWVYFVISILLAIIFTPFFNIIAIFFFILSIFIFYFFRDPDRAIPHEDVIISPADGKVTYVGKSESPIDLNKKNEFCKVSIFLNIFNVHVNRIPCNGLIQKIKYFHGKFLNATLNKTSELNERNIILIKKNNDDIIIVSQIAGLIARRIICDINENQEVFKGNRFGIIKFGSRVDIYMPLNYKPLVAVGQIVLGGETILANPNNIKEITKSNIN

SEQ ID NO: 148941 - protein, 184 aa, Unknown
  Bacterial polypetide isolated from the Sargasso Sea
DFLGLIGFVLTIWVYYFFRDPDRVIIENDNYLVSPADGEILKVEEVDGPKELGLENKKFNKISVFMNVFDCHVNRTPCAGKIEEILYKPGKFFNASLDKASEDNERNYFKIKDTNGNYIIVVQIAGLVARRIVCESNKDQELKQGDRIGMIRFGSRADVYYENYQPLVKVGQKAISGETLLAKK

SEQ ID NO: 148942 - protein, 213 aa, Unknown
  Bacterial polypetide isolated from the Sargasso Sea
MRLAPEGNIIVYPLFIILLFTCGYGYVFDFESIFVFIIILVALFLFCLNFFRDPFRNIPNDENIIISPADGKVIKIKDFEDPNTHEKLKLISIFLSVFNVHSNRMPVDGKFKSVKYVKGDFLAAFDHKASDQNERTEITIETKFGSMIVKQIAGLVARRILCYANENERMSAGDRLGFIRFGSRTDIILPENIDIKIGLNQKVYGGETIIGTY

SEQ ID NO: 148943 - protein, 228 aa, Unknown
  Bacterial polypetide isolated from the Sargasso Sea
IEKILVPIHPAGYPFIGAFLILTFILGLFLGSTSFVLGLVLSCWCIYFFRNPKRYTPQREDLVIAPADGRVLSVLVMNPPLEMGLRGNNWTRISIFMNVFDVHVNRSPVEGKVIHKYYFPGSFVNASLDKASEKNERACLIFENKSGKTIGVVQIAGLIARRILCKADEGEILLAGQIFGIIRFGSRVDVWLPNPVKLNVLVGQRTIAGETILADFRSSDELGEVRVE

SEQ ID NO: 148944 - protein, 148 aa, Unknown
  Bacterial polypetide isolated from the Sargasso Sea
LFLPADGKIVKVVEIIDPEIGDAKLVSIFLNVFNVHVNRVPIDGKVISSEHRSGKFLAAFDHKASDENEQVVTIISHKTGDYKVKQIAGLIARRIICYAKEGLKLHKGGRLGFIRFGSRTDLIMPSNIKLNVKLGEKVKGGETIIGEI

SEQ ID NO: 148945 - protein, 214 aa, Unknown
  Bacterial polypetide isolated from the Sargasso Sea
MDNIFPKLHKEGYKFLAISIIITIIIWFFSNFLATVMLLITIWVYYFFRDPDRVSINDNSFLVSPADGLITDISERNGPEELGLENKKYTRISIFMNIFNCHVNRSPVEGKIEEIFYKPGKFFNASLDKASKENERNYYKILSIKGEEIIIVQIAGLIARRIVCEVSKEQNLKQGERIGMIRFGSRVDIFCSNKTILAKLGQNVTAGESLLAKE

SEQ ID NO: 148946 - protein, 154 aa, Unknown
  Bacterial polypetide isolated from the Sargasso Sea
YLVSPADGEVIKVEEVDGPKELGLENKKFKKISIFMNVFDCHVNRTPCSGIVEDILYKPGKFLNASLDKASEDNERNYYKIKDKHGNDIIVVQIAGLVARRIVCETNKNQELNQGDRIGMIRFGSRADVYYENYEPLVKVGQTAISGETLLAKN

SEQ ID NO: 148947 - protein, 203 aa, Unknown
  Bacterial polypetide isolated from the Sargasso Sea
GYKFIVIAVFITIIFLIINNFLGLIGILLTIWVYYFFRDPERTIIGDDSYLVSPADGEVIKVEVVDGPKELGLENKKFKKISIFMNVFDCHVNRTPCSGTVEDILYKPGKFLNASLDKASEDNERNYYKIKDKHGNDIVVVQIAGLVARRIVCETNKNQELNQGDRIGMIRFGSRADVYYENYEPLVKVGQTAISGETLLAKN

SEQ ID NO: 148948 - protein, 190 aa, Unknown
  Bacterial polypetide isolated from the Sargasso Sea
EGVTLVIAALFTVFTIFNLWFFRDPKRLHPTGAGLVLAPAEGRVIDISEVGEPSFVGQARKISIFLSIFDVHIQRAPVEGVVNHREYRPGAYRVAWADKASEENEQASVGITTEMGNVLVRQIAGLVARRIITYPSEGDRLERGQRIGLIRFGSRVDLFLPLDWEIICSVGDRARVGSSVLARHPVEAIG

SEQ ID NO: 148949 - protein, 142 aa, Unknown
  Bacterial polypetide isolated from the Sargasso Sea
MPIKGTLREMIYVPGELFSVNPLTAENVPDLFARNERVVTIFDTELGPMALVLVGATIVASIETVWAGTVTPPAGKDVFRWTYPATGPQAVTLDKGAEMGRFKLGSTVILAFQAGQIEFTDKQYPTAVTRMGEPFAEIVSKG

SEQ ID NO: 148950 - protein, 215 aa, Unknown
  Bacterial polypetide isolated from the Sargasso Sea
MFSKIFPKIHTEGYKFIVIAVFITIIFLIINNFLGLIGILLTVWVYYFFRDPERTIIGDDSYLVSPADGEVIKVEEVDGPKELGLENKKFKKISIFMNVFDCHVNRTPCSGIVEDILYKPGKFLNASLDKASEDNERNYYKIKDKHGNDIVVVQIAGLVARRIVCETNKNQELNQGDRIGMIRFGSRADVYYENYEPLVKVGQTAISGETLLAKN

SEQ ID NO: 148951 - protein, 61 aa, Unknown
  Bacterial polypetide isolated from the Sargasso Sea
IAGLIARRIVCEVEQGQELKQGDRIGMIRFGSRVDIFFKNKKILAKLGQNVVAGESLLASD

SEQ ID NO: 148952 - protein, 122 aa, Unknown
  Bacterial polypetide isolated from the Sargasso Sea
SVFMNVFNCHVNRSPVSGKIEEIYYKPGKFLNASLDKASEENERNYYKIKTINGEEIIIVQIAGLIARRIVCEVEQDQNLKQGERIGMIRFGSRVDIYFKNKEVLARQGQNVVAGESLIARN

SEQ ID NO: 148953 - protein, 214 aa, Unknown
  Bacterial polypetide isolated from the Sargasso Sea
MSKIFPKIHNEGYKFIIIFAIVTIILYFLNGFLGFIGLVLTIWCYYFFRDPERTSIGDDNYLTSPADGVVLQVVDTNGPKELGLENKQMKKISIFMDVFDCHVNRSPCSGAISEILYKPGKFFNASLDKASEDNERNYYKIKNSNGEDIIVVQIAGLVARRIVTEVSKDELVEQGSRIGMIRFGSRADMYFENYTPLVKVDQKTIAGETLIAKK

SEQ ID NO: 148954 - protein, 216 aa, Unknown
  Bacterial polypetide isolated from the Sargasso Sea
MFNTIFPKIHKEGYKFLAISVLLTFVTLFFSKLIGLLLIIITVWVYYFFRDPERFSIDDDSYLVSPADGLITDVSEKSGPEELRLENTSFTRVSIFMNVFNCHVNRVPTSCKIEEIYYKPGKFLNASLDKASEENERNFFKITSKKDNEEIIIVQIAGLIARRIVCDVEQGQDLKQGDRIGMIRFGSRVDMYFKNKKVLAKLGQNVIAGESLIASE

SEQ ID NO: 148955 - protein, 115 aa, Unknown
  Bacterial polypetide isolated from the Sargasso Sea
CHVNRVPASGKIEEIYYKPEKFLNASLDKASEENERNYFKIKSNKNSEEIIIVQIAGLIARRIVCEVEQGQDLKQGDRIGMIRFGSRVDIYFKNKKVLAQKGQNVTAGESLIASD

SEQ ID NO: 148956 - protein, 179 aa, Unknown
  Bacterial polypetide isolated from the Sargasso Sea
MFNSIFPSIHKEGYKFLAISIIVTFIVLLFSKFLGSILILITIWIYYFFRDPERYPINDDAFLVSPADGLITDVSEQTGPIELQLENKTYTKISIFMNVFNCHVNRTSLSGTVEEINYKPGKFLNASLDKASEENERNYYKIKCSKSGEEIIIVQIAGLIARRIVCEVEQGQNLKQGKE

SEQ ID NO: 148957 - protein, 215 aa, Unknown
  Bacterial polypetide isolated from the Sargasso Sea
MTNTILPKIHNEGYKFIVIFVIATIILYFIHGFLGFVGLILTIWCYYFFRDPERVSIGDDNYLTSPADGVVLQVLETNGPKELGLESKKFTKISIFMNVFDCHVNRSPCSGTVEEITYVPGKFFNASLDKASEDNERNYYKIKSSKGEEIVVVQIAGLIARRIVTETSKNSELNQGSRIGMIRFGSRADLYFENYSPLVKVNQKTIAGETLIAKK

SEQ ID NO: 148958 - protein, 216 aa, Unknown
  Bacterial polypetide isolated from the Sargasso Sea
MLDILFPKLHKEGYRFLALAAVITFILLLISNFLGIISFILTIWIFYFFRDPERFPINDENYLLSPADGTISQITEVDGPGELGLEKKKFTRVSIFMNVFNCHVNRIPCSGKIDKIFYKPGKYINASLDKASEENERNYVQMNNGSGDGLVLVQIAGLIARRIVCEIKENDEIKQGDKFGIIRFGSRVDLYFENYQLMVQKNQKTIGGETIIAKKK

SEQ ID NO: 148959 - protein, 202 aa, Unknown
  Bacterial polypetide isolated from the Sargasso Sea
MPTKLDKIFPKLHDEGYKFLAIFAFATIILYFINGFLGFIGLVLTVWCYYFFRDPERFTIEDENYLISPADGVIVQSLETNGPKDLGLENKKFKKIAIFMDVFDCHVNRSPCSGVVTEILYKPGKFINASLDKASEDNERNYFKIKNNSGGEIIVVQIAGLIARRIVTEVSKDQELKQGSKIGMIRFGSRVDIYFENYDTIV

SEQ ID NO: 148960 - protein, 94 aa, Unknown
  Bacterial polypetide isolated from the Sargasso Sea
LNASLDKASDKNERSSLVLNTQDGTKIIVVQIAGLIARRILSFISSNEELDQGERFGLIRFGSRVDIYMPLDAIEKCRVGDRVVAGESILASLK

SEQ ID NO: 148961 - protein, 126 aa, Unknown
  Bacterial polypetide isolated from the Sargasso Sea
YTKVSVFMNVFNCHVNRIPTSGKIDEIYYKPGKFLNASLDKASEENERNYYKIKSKHNSEEIIIVQIAGLIARRIVCEVEQGQELKQGDRIGMIRFGSRVDIYFKNKKVLAKLGQNVIAGESIIAS

SEQ ID NO: 148962 - protein, 198 aa, Unknown
  Bacterial polypetide isolated from the Sargasso Sea
MISDLFPKLHEEGYRFLGIAVVATFILLLISSFLGLISFIITIWVYYFFRDPERFPIKDENYLLSPADGVVSQILEINGPNELSLEKKKYTRVSIFMNAFNCHVNRIPSTGKIDKIFYKTGKFLNASLDKSSEENERNYIKMTNSKGDELAIVQIAGLIARRIVCNVKESDEIKQGNRFGMIRFGSRVDLYFENYQIM

SEQ ID NO: 148963 - protein, 190 aa, Unknown
  Bacterial polypetide isolated from the Sargasso Sea
TLFFSKFLGVIFIIISVWVYYFFRDPERFSINDDLFLVSPADGLITDISERAGPEELRLENTTFTKVSVFMNVFNCHVNRIPTSGRVEEIYYKPGKFLNASLDKASEENERNYFKIKTVKDDEEIIIVQIAGLIARRIVCEVEQGQDLKQGDRIGMIRFGSRVDIYFKNKKVLAKVGQNVVAGESLIASK

SEQ ID NO: 148964 - protein, 216 aa, Unknown
  Bacterial polypetide isolated from the Sargasso Sea
MFNTIFPKIHKEGYKFLAISILLTFIVLFLSKFLGLIFILISIWVYYFFRDPDRISINDDSFLVSPADGLITDISERSGPEELRLENTTYTKVSIFMNVFNCHVNRIPTNGMVEEIYYKPGKFLNASLDKASEENERNYFKFKSSKNNEDIVIVQIAGLIARRIVCEVEQGQELKQGDRIGMIRFGSRVDIYFKNKKVLAKLGQNVVAGESLIASE

SEQ ID NO: 148965 - protein, 174 aa, Unknown
  Bacterial polypetide isolated from the Sargasso Sea
TVWVYYFFRDPERIIIGDDRYLVSPADGEVIKVEEVDGPKELGLENKKFKKISIFMNVFDCHVNRTPCSGIVEDILYKPGKFLNASLDKASEDNERNYYKIKDKHGNDIVVVQIAGLVARRIVCETNKNQELNQGDRIGMIRFGSRADVYYENYEPLVKVGQTAISGETLLAKN

SEQ ID NO: 148966 - protein, 179 aa, Unknown
  Bacterial polypetide isolated from the Sargasso Sea
LGLLLTIWVYYFFRDPERITIDDDNYLVSPADGEVIKVEEVDGPKEFNLESKRFRKISIFMNVFDCHVNRTPCAGKIEEILYKPGKFLNASFDKASEDNERNYYKIKDNQNNDIILVQIAGLVARRIVCETSKDQELKQGERVGMIRFGSRADIYYENYEPLVKVGQRAISGETLLAKK

SEQ ID NO: 148967 - protein, 222 aa, Unknown
  Bacterial polypetide isolated from the Sargasso Sea
MQYKIHNEGWVYLVITLIIAIIFIPFFIILSFIFFFLSFFIYYFFRDPIRSIPAEELIVSPADGTVTFIGEVDAPDIINSDSKYIKISIFLSIFNVHVNRIPCNGTIKKVNYINGKFFNASFDKSSDQNERNEIILKNSDNEELLIVQIAGLIARRIVCNIKENQDVYQGHRFGIIKFGSRVDLFIPNKYKPLVTEGQTVIGGESILANPNNIKHISSSIKI

SEQ ID NO: 148968 - protein, 177 aa, Unknown
  Bacterial polypetide isolated from the Sargasso Sea
LVLTVWVYYFFRDPERIIINDDNYLVSPADGEVIKVEEVNGPKELSLENKNFKKISIFMNVFDCHVNRTPCSGKIEDILYKPGKFLNASLDKASEDNERNYYKIKDIHNNDIVIVQIAGLVARRIVCESNNNQELKQGDRIGMIRFGSRADIYYENYEPLVKIGQTVIAGETLLAKK

SEQ ID NO: 148969 - protein, 214 aa, Unknown
  Bacterial polypetide isolated from the Sargasso Sea
MNNIFPKLHKEGYKFLAISIIITFIVWIFSIFLATIMLLVTIWVYYFFRDPDRISINDNSFLVSPADGLVTNISDSNGPEELGLENKKFTKISIFMNVFNCHVNRTPIAGKVEEIFYKPGKFLNASLDKASKENERNYYKILTSKGDEIIIVQIAGLIARRIVCEVSKEQNLKQGDRIGMIRFGSRVDLFFNNKKTLAKLGQNVIAGESLLAKE

SEQ ID NO: 148970 - protein, 215 aa, Unknown
  Bacterial polypetide isolated from the Sargasso Sea
MLDKIFPKIHTEGYKFLVIFVAATIVLYFINGFLGFVGFVLSIWVYYFFRDPDRISIDDDNYLTSPADGLVLQVLETNGPKELELENRKFTKISIFMNVFDCHVNRTPCAGKISQIIYKPGKFFNASLDKASEENERNYYKVQNTSGEDIIVVQIAGLIARRIVNESHEGQELKQGERIGMIRFGSRADIYFENYKPLVKVNQKTIAGETLIAKK

SEQ ID NO: 148971 - protein, 215 aa, Unknown; identical to SEQ ID NO: 148934
  Bacterial polypetide isolated from the Sargasso Sea

SEQ ID NO: 148972 - protein, 216 aa, Unknown
  Bacterial polypetide isolated from the Sargasso Sea
MFNTIFPKIHKEGYKFLAISIIATFVVLLFSKLIGFILIILTVWVYYFFRDPERYSINDESYLVSPADGLITDISERSGPEELRLENTTYTRVSIFMNVFNCHVNRIPTNGKIEEIYYKPGKFLNASLDKASEENERNFYKIKANKNNEEIIIVQIAGLIARRIVCEAEQGQELKQGDRIGMIRFGSRVDLYFKNKKVLAKLGQNVVAGESLIASE

SEQ ID NO: 148973 - protein, 215 aa, Unknown
  Bacterial polypetide isolated from the Sargasso Sea
MFSKIFPKIHTEGYKFIVIAVFITIIFLIINNFLGLIGILLTVWVYYFFRDPDRTIIGDDSYLVSPADGEVIKVEEVDGPKELGLENKKFKKISIFMNVFDCHVNRTPCSGIVEDILYKPGKFLNASLDKASEDNERNYYKIKDKHGNHIVVVQIAGLVARRIVCETNKNQELSQGDRIGMIRFGSRADVYYENYEPLVKVGQTAISGETLLAKN

SEQ ID NO: 148974 - protein, 215 aa, Unknown
  Bacterial polypetide isolated from the Sargasso Sea
MFSKIFPKIHTEGYKFIVIAVFITIIFLIINNFLGLIGILLTVWVYYFFRDPERVIIGDDSYLVSPADGEVIKVEEEDGPKELGLENKKFKKISIFMNVFDCHVNRTPCSGVVEDILYKPGKFLNASLDKASEDNERNYYKIKDNHGNDIIVVQIAGLVARRIVCETNNNQQLNQGDRIGMIRFGSRADVYYENYEPLVKVGQLAISGETLLAKK

SEQ ID NO: 148975 - protein, 214 aa, Unknown
  Bacterial polypetide isolated from the Sargasso Sea
MSKIFPKIHNEGYKFIIIFAIATIILYFLNGFLGFIGLVLTIWCYYFFRDPERTSIGDDNYLTSPADGVVLQVMDTNGPKELGLENKQMTKISIFMDVFDCHVNRSPCSGAISEILYKPGKFFNASLDKASVDNERNYYKIKNSDGKDIIVVQIAGLVARRIVTEVSKDELVEQGSRIGMIRFGSRADMYFENYTPLVKVDQKTIAGETLIAKK

SEQ ID NO: 148976 - protein, 215 aa, Unknown
  Bacterial polypetide isolated from the Sargasso Sea
MFSKVFPKIHPEGYKFIVISVIITIILYSLSNFLGLVGLVLSIWVYYFFRDPERIIIEDDNYLVSPADGEVIKVEEIDGPKELGLENKRFNKISIFMNIFDCHVNRTPCAGQIEEILYKPGKFLNASFDKASEDNERNYYKIKDKHGNDIIIVQIAGLIARRIVCETNKNQELKQGDRIGMIRFGSRADVYYENYDSLVKVGQKAISGETLLAKR

SEQ ID NO: 148977 - protein, 215 aa, Unknown
  Bacterial polypetide isolated from the Sargasso Sea
MTDIIFPKIHTEGYKFLAIAILITIFLYFFSGFLGLVSLVLTIWVYYFFRDPERMSINDDNYLVSPADGSVVQVQETNGPKELNLESKKFTKVSIFMNVFDCHVNRIPCDGKISDIIYKPGKFLNASLDKASEDNERNYYKITNNKEQDIIVVQIAGLIARRIVCETSKDQELKQGDRIGMIRFGSRVDVYFENYTSLVKINQKTVAGETLLAKI

SEQ ID NO: 148978 - protein, 224 aa, Unknown
  Bacterial polypetide isolated from the Sargasso Sea
MFAGVIIFLISLEKVHKEGYRLFTISMLISFGMEFVFQPLSIFLYIFSLFVLWFFRDPERNTPLDNNAVISPADGTICKIDQAPMPKETSLGNEACLRVCIFMNVVNVHINRAPITGIIDDIIYIAGKFFVASLDKASEHNERNILVMQNKKNEKIVSVQIAGLVARRILSFVEKSTSMKAGERFGLIRFGSRVDVYMPLHYSTQLKEGDKVTAGESIIASSST

SEQ ID NO: 148979 - protein, 215 aa, Unknown
  Bacterial polypetide isolated from the Sargasso Sea
MFTKIFPKIHSEGYKFLVIAAFITIILLIFNNFLGLIGLLLTVWVYYFFRDPERTIIGNDDYLVSPADGEVIKVEEVDGPKEVGLENKKFKKISIFMNVFDCHVNRTPCSGIVEDILYKPGKFFNASLDKASEDNERNYYKIKDKHGNDIIVVQIAGLIARRIVCETDKNQELNQGDRIGMIRFGSRADVYYENYEPLVKVGQTAISGETLLAKK

SEQ ID NO: 148980 - protein, 222 aa, Unknown
  Bacterial polypetide isolated from the Sargasso Sea
KIINYRFVMSKIFPKIHNEGYKFIIIFAIATIILYFINGFLGFIGLVLTIWCYYFFRDPERISIGDDNYLTSPADGVVLQVMDTNGPKELGLENKQMKKISIFMDVFDCHVNRSPCSGAVSEILYKPGKFFNASLDKASEDNERNYYKIKNSDGEDIIVVQIAGLVARRIVTEVSKDELVEQGSRIGMIRFGSRADMYFENYTPLVKVEQKTIAGETLIAKK

SEQ ID NO: 148981 - protein, 186 aa, Unknown
  Bacterial polypetide isolated from the Sargasso Sea
MSKIFPKIHNEGYKFVIIFVIATIILYFINGFLGFIGLLLTIWCYYFFRDPERVSIGDDNYLTSPADGVVLQVMDTTGPKELGLENKQMKKISIFMDVFDCHVNRSPCSGAISEILYKPGKFFNASLDKASEDNERNYYKIKNSDGEDIIVVQIAGLVARRIVTEVSKDELVEQGSRIGMIRLEVE

SEQ ID NO: 148982 - protein, 150 aa, Unknown
  Bacterial polypetide isolated from the Sargasso Sea
ADGIVSSIVEVNGPVELALQNNKYTRVSIFMNVFDCHVNRAPSSGEIKDIFYKPGKFLNASLDKASEENERNYFKINDNKTNDSIIVVQIAGLIARRIVTQVEKTQTVVQGQRLGMIRFGSRVDLYYNQRKTMVKVGQNVIAGESLIASS

SEQ ID NO: 148983 - protein, 222 aa, Unknown
  Bacterial polypetide isolated from the Sargasso Sea
MHLKIHNEGWVYLVSSIIITIIVTPFFNILGIFLGFLSICIFYFFRDPIRSIPNDDVIISPADGQIVYIGESDLPEELNIKKKSIKISIFLDLYNVHVNRIPVSGKVIDIKYIPGKFFRANIDKSSKENERNIILIENEKKEHIVVSQIAGLIARRIVCDLSLNQEVIKGDRFGIIKFGSRVDIYLPESYKPMITKDQLVIGGETIISNPNKINEIISFTRK

SEQ ID NO: 148984 - protein, 176 aa, Unknown
  Bacterial polypetide isolated from the Sargasso Sea
MFNTIFPKIHKEGYKFLAISILATFVVLFFSKSIGLILILITVWVYYFFRDPERFPINDDAFLVSPADGLITDVSERSGPEELRLENTTFTKVSVFMNVFNCHVNRVPISGKVEEIYYKPGKFLNASLDKASEENERNYFKIKSNKNNEEIIIVQIAGLIARRIVCEVEQGQDFKT

SEQ ID NO: 148985 - protein, 215 aa, Unknown
  Bacterial polypetide isolated from the Sargasso Sea
MFSKIFPKIHAEGYKFLVIAGIITIVFYIFSNFLGLIGLVLTIWVYYFFRDPERVIIDDDNYLVSPADGEVIKVEEVDGPKELGLENKKFKKISVFMNVFDCHVNRTPCAGKIEEILYKPGKFVNASLDKASEDNERNYFKIKDPHNNDIIVVQIAGLVARRIVCESNKDQELKQGDRIGMIRFGSRADIYYENYEPLVKVGQKAISGETLLAKK

SEQ ID NO: 148986 - protein, 200 aa, Unknown
  Bacterial polypetide isolated from the Sargasso Sea
MFSKIFPKIHAEGYKFLVISGIITIVFYSFSNFLGLIGLVLTIWVYYFFRDPNRVIIDDNNYLVSPADGEIIKVEEVDGPKELGLENKKFNKISVFMNVFDCHVNRTPCAGKIEEILYKPGTFVNASLDKASEDNERNYFKIKDTDNNDIIVVQIAGLVARRIVCESNKDQELKQGDRIGMIRFGSRADVYYEDYQPLVK

SEQ ID NO: 148987 - protein, 215 aa, Unknown
  Bacterial polypetide isolated from the Sargasso Sea
MFSKIFPKIHAEGYKFLVIAGIITIILYSLSDFLGLIGLVLTIWVYYFFRDPERVIIEDENYLVSPADGEIIKVEEVDGPKELGLENRKFNKISIFMNVFDCHVNRTPCSGKIEEILYKPGKFVNASLDKASEDNERNYFKIKDTHNDDVIVVQIAGLVARRIVCESNKNQDLKQGDRIGMIRFGSRADVYYENYVPLVKVGQKAISGETLLAKK

SEQ ID NO: 148988 - protein, 214 aa, Unknown
  Bacterial polypetide isolated from the Sargasso Sea
MSKIFPKIHNEGYKFIIIFAIATIILYFINGFLGFIGLVLTIWCYYFFRDPERISIGDDNFLTSPADGVVLQVMDTNGPKELGLENKQMKKISIFMDVFDCHVNRSPCSGAISEILYKPGKFFNASLDKASEDNERNYYKIKNSDGEEIIVVQIAGLVARRIVTEVSKDELLEQGSRIGMIRFGSRADIYFENYTPLVKVNQKTIAGETLIAKK

SEQ ID NO: 148989 - protein, 303 aa, Unknown
  Bacterial polypetide isolated from the Sargasso Sea
TPKHLLSRLVGKLAEAEMGSVTTFFIKAFIKQYNVDMSEALHEEPEHYRSFNKFFTRPLKPEARTIDENDDVLIHAVDGTVSQFGDIHSDSIFQAKGHDFSLTTLLGGKPDVAATFKNGKFATIYLAPRDYHRIHMPVEGTLTDMLYVPGELFSVNPLTAQNIPGLFARNERVVALFDTPVGKMAMVLVGATIVASIETVWAGTVTPPAGKNVQHWSYEKDSEAAVFLEKGAELGRFKLGSTIVVCFEKDMIDFEDLAPGMVTRLGEPMALKSTAQATAKDTHVSDETASDEKSEASSEGADS

SEQ ID NO: 148990 - protein, 278 aa, Unknown
  Bacterial polypetide isolated from the Sargasso Sea
MWILPKNLFSRICGFVANLKLPPFILQRLIRLFCHFYPIDLNEAEQSVEDFDCFNAFFTRKLRQGVRPLAEDPNALLCPVDGALGEYGIIRDGNLLQAKGLEYRLEDLLQDPERKDLYEGGHYITLYLAPHNYHRIHSPAEGQVREFGYVPGDLWTVSELGVMHVPGLFARNERILTYLQTKAGECAIIKVGATVVGKIRVCYHDQVSNLPGATFSLSRLETPWHVERGGEIGVFELGSTVICLFQPGQVEFDSLNLGQTVYLGQSLGKILDNTTSLN

SEQ ID NO: 148991 - protein, 216 aa, Unknown
  Bacterial polypetide isolated from the Sargasso Sea
MFNSIFPKIHKEGFKFLAISILTTFLVLFFSKIIGFLFLLITIWVYYFFRDPDRYSINDDAYLVSPADGLITDISERSGPEELRLENTTYTKISIFMNVFNCHVNRVPVSGKVEEIYYKPGKFLNASLDKASEENERNYFKIKSNRNGEEIILVQIAGLIARRIVCEVEQGQQLKQGERIGMIRFGSRVDIYFKNRKVLAKLGQNIVAGESLLASE

SEQ ID NO: 148992 - protein, 215 aa, Unknown
  Bacterial polypetide isolated from the Sargasso Sea
MFTKIFPKIHTEGYKFLVIAAFITIILLIFNNFLGLIGLLLTVWVYYFFRDPERTIIGSDDYLVSPADGEIIKVEEVDGPKEVGLENKKFKKISIFMNVFDCHVNRTPCSGIVEDILYKPGKFFNASLDKASEDNERNYYKIKDKHGNDIIVVQIAGLIARRIVCETDKNQELNQGDRIGMIRFGSRADVYYENYEPLVKVGQTAISGETLLAKK

SEQ ID NO: 148993 - protein, 215 aa, Unknown
  Bacterial polypetide isolated from the Sargasso Sea
MIDKIFPKIHNEGYKFLVIFGFATLILYFISSFLGLIGLVLTIWVYYFFRDPDRISINDENFLVSPADGLILKVEETDGPKELKLENKKFKKISIFMNVFDCHVNRTPCSGKITEILYKPGKFFNASLDKASEENERNYYKISNNAGEDIIVVQIAGLIARRIVTEVGENSELKQGDRIGMIRFGSRADIYFENYDPLVKVNQKTIAGETLLAKK

SEQ ID NO: 148994 - protein, 213 aa, Unknown
  Bacterial polypetide isolated from the Sargasso Sea
MNKKYLGIHREGWKFFIIFILISFFSFFITKTIFLISLSLSIFTLWFFRDPERYFDSQDNQVLSAADGKICFIGEDTAPIETGIDQKMNKVSIFMNVFNVHINRSPVSGEIEKIIYKNGKFFNASLDKASEYNERNSIIIKNNDEKIIVVQIAGLIARRILSFISENDIMAKGERIGLIRFGSRVDIYLPLNYQIKVNQNDIVTAGKTIIAER

SEQ ID NO: 148995 - protein, 166 aa, Unknown
  Bacterial polypetide isolated from the Sargasso Sea
RDPERFSIGDENYLTSPADGVVLQVMDTNGPKELGLENKQMKKISIFMDVFDCHVNRSPCSGAISEILYKPGKFFNASLDKASEDNERNYYKIKNSNGEDIIIVQIAGLVARRIVTEVSKDELVEQGSRIGMIRFGSRADMYFENYTPLVKVDQKTIAGETLIAKK

SEQ ID NO: 148996 - protein, 215 aa, Unknown
  Bacterial polypetide isolated from the Sargasso Sea
MLDKIFPKIHNEGYKFIVIFIFISIVLYFISGFLGFIGMILTIWCYYFFRDPDRISIENENYLTSPADGLVLQVLESNGPKELGLENKKFKKISIFMNVFDCHVNRTPCSGKITEILYKPGKFFNASLDKASEDNERNYYKIKNSFGEDVIVVQIAGLIARRIVTESSIDDELKQGSRIGMIRFGSRVDLYFENYDALVKVNQKTIAGETLIAKK

SEQ ID NO: 148997 - protein, 214 aa, Unknown
  Bacterial polypetide isolated from the Sargasso Sea
MSKIFPKIHNEGYKFIIIFAIATIILYFLNGFLGFIGLILTIWCYYFFRDPERISIGDDNYLTSPADGVVLQVMDTNGPKELGLENKQMKKISIFMDVFDCHVNRSPCSGAITEILYKPGKFFNASLDKASEDNERNYYKIKNSDGEDIIVVQIAGLVARRIVTEVSKDEIVEQGSKIGMIRFGSRADMYFENYSPLVKVDQKTIAGETLIAKK

SEQ ID NO: 148998 - protein, 215 aa, Unknown
  Bacterial polypetide isolated from the Sargasso Sea
MFSKIFPKIHAEGYKFLVIAGIITIIFYIFSDFLGLVGFVLTIWVYYFFRDPERVIINDDNFLVSPADGEVIKVEEVDGPKELNLENKRFKKISIFMNVFDCHVNRSPCGGKIEEILYKPGKFFNASLDKASEDNERNYFKLKDNQNNDIVLVQIAGLVARRIVCEANKDQELNQGDRVGMIRFGSRADVYYENYEPLVKVGQTAVSGETLLAKK

SEQ ID NO: 148999 - protein, 213 aa, Unknown
  Bacterial polypetide isolated from the Sargasso Sea
MLAPEGKKILISLLLLSLLLGITGYYYNYQILIILYFISGFLLIFSCNFFRDPIRNSPLDISLIVSPADGKVVRIDEVNDNKVGKNSTRISIFLNVFNVHVNRTPLTAEIEEVSYKVGNFKAAFDHKASDENERTNILFNSSKINYRVLQIAGLIARRIHCYAQVGKEMKKGDRLGFIMFGSRTDIIFPNSVEIKIEVGDKVKGGETVIGKLS

SEQ ID NO: 149000 - protein, 188 aa, Unknown
  Bacterial polypetide isolated from the Sargasso Sea
LIFNNFLGLIGLLFTVWVYYFFRDPERTIIGNDDYLVSPADGEVIKVEEVDGPKEVGLENKKFKKISIFMNVFDCHVNRTPCSGTVEDILYKPGKFFNASLDKASEDNERNYYKIKDKHGNDIIVVQIAGLVARRIVCETDKNQELNQGARIGMIRFGSRADVYYENYEPLVKVGQTAISGETLLAKK

SEQ ID NO: 149001 - protein, 190 aa, Unknown
  Bacterial polypetide isolated from the Sargasso Sea
VFYSFSNFLGLIGLVLTIWVYYFFRDPDRVIIEDNNYLVSPADGEIIKVEEVDGPKELGLENKKFNKISVFMNVFDCHVNRTPCAGKIEEILYKPGAFVNASLDKASEDNERNYFKIKDTDNNDIIVVQIAGLVARRIVCESNKDQELKQGERIGMIRFGSRADIYYENYQPLVKVGQKAISGETLLAKK

SEQ ID NO: 149002 - protein, 124 aa, Unknown
  Bacterial polypetide isolated from the Sargasso Sea
QGTILKPNMVTPGSEHQEKISVETVAKETLRCLHECVPDNLPAITFLSGGQSETVSTEHLDAMNKIGGFPWKLSFSYGRALQAGALKAWLGKSENVDAAQSAFSHRALMNKKAALGQWSKDLEV

SEQ ID NO: 149003 - protein, 44 aa, Unknown
  Bacterial polypetide isolated from the Sargasso Sea
MSIEEIAKQMVVKGKGILAADESTGTMEKRLKSVNVECTEKNRL

SEQ ID NO: 149004 - protein, 144 aa, Unknown
  Bacterial polypetide isolated from the Sargasso Sea
MSELKDIALKVIGNGKGILAADESTGTMTKRLDSVNVKSSNQNRLIFRETLFSSESMKNCIGGVILYDETIKQSSSSGEKIPQLISHSNAVPGIKVDTGAKVLAGSSEEKITEGLDGLRERLQEYYKLGARFTKWRAVYVISKE

SEQ ID NO: 149005 - protein, 84 aa, Unknown
  Bacterial polypetide isolated from the Sargasso Sea
PGIAFLSGGQSEVEATKNLDIINKHNKSKFIMTFSYGRALQQSALKYWSKNLDDAEGTQKVFNHRANMCLLAAKGNWTEQVEKA

SEQ ID NO: 149006 - protein, 82 aa, Unknown
  Bacterial polypetide isolated from the Sargasso Sea
MSELNKIALKILSDGKGILAADESTATMSKRLESVKVQSNEHNRLIFRKTLFSSESMKSCIGGVILYDETIKQIVNLNQFPK

SEQ ID NO: 149007 - protein, 200 aa, Unknown
  Bacterial polypetide isolated from the Sargasso Sea
VYSISKKNPSKLCIYSNAHALARYSSLVQECGMVPIVEPELLMDGNHSAALCFNKTSEIIKKCFEELIIHKVDLKGVILKPNMILDGSTCENKITNEEVADLTLKCLKESVPQEVPGIAFLSGGQTEIEATENLNFINKKNNTKFIMTYSYGRALQQSALKYWSKNIQDVKGTQEIFNHRAKMCTLAAKGEWSKELEKKI

SEQ ID NO: 149008 - protein, 118 aa, Unknown
  Bacterial polypetide isolated from the Sargasso Sea
KQSQHFIEDKHQCDPNPVNFVFHGGSGSSPQDIREAIDYGAIKMNLDTDMQWAFHKGVHNYYKKNADYLKTQLGNPEGDGKPNKKYYDPRKWLLEGEKKLIERLRQSFIDLNNINRNE

SEQ ID NO: 149009 - protein, 140 aa, Unknown
  Bacterial polypetide isolated from the Sargasso Sea
MSELNNIVLKILSNKKGILAADESNGTMTKRLDSVGVKSSPESRLKFREVLLSSEEGMKNIGGVILYDETIRQKTESGKKIPELINSFGSVTGIKVDTGAKKMVNSPVETITEGLDGLRERLEDYYELGARFTKWRAVII

SEQ ID NO: 149010 - protein, 89 aa, Unknown
  Bacterial polypetide isolated from the Sargasso Sea
MSELNKIALKIISDGKGILAADESNGTMTKRLEAVNVSSTPENRLLFREILFSSTSIRECIGGVILYDETINQTTSLKNSIPDLISSSG

SEQ ID NO: 149011 - protein, 69 aa, Unknown
  Bacterial polypetide isolated from the Sargasso Sea
MNELKKIVSKILSGGKGILAADESTGTMTKRLESVKVKSNEQNRLLFRKTLFSSESMKNCIGGVILYDE

SEQ ID NO: 149012 - protein, 149 aa, Unknown
  Bacterial polypetide isolated from the Sargasso Sea
MTELNKIALKIISNGKGILAADESNGTMTKRLEAVNVNSTPENRLLFREILFSSKGMKDYIGGVILYDETINQTSSSGKSIPELISNSGAVPGIKVDTGAKNLANSPEEKITEGLDGLRDRLKIYYDLGARFTKWRGVYSIGEKYPSKL

SEQ ID NO: 149013 - protein, 78 aa, Unknown
  Bacterial polypetide isolated from the Sargasso Sea
MSLEEIANYIVSDGKGILAADESNPTCGKRFDSIGVENSEDNRRDYREMLFRSKGMKGNIGGVILFDETLRQDGKDGT

SEQ ID NO: 149014 - protein, 84 aa, Unknown
  Bacterial polypetide isolated from the Sargasso Sea
MDFSSLNEIAKFIVSDGKGILAADESNPTCTKRFDTISVESTEKNRRDYRELLFRAPGMANNIGGVILFDETIRQKTDDGLLLI

SEQ ID NO: 149015 - protein, 157 aa, Unknown
  Bacterial polypetide isolated from the Sargasso Sea
MSELNKIALEIINNGKGILAADESTGTMTKRLENVNIPSTPENRLLFRETLFSSSSMKECIGGVILYDETIKQTSSKKNKITDLISSMGSHPGIKVDTGAKVLAGSPNEKITEGLDGLRERLKEYYNLGAKFTKWRGVYNISKDYPSKLSIQSNAHA

SEQ ID NO: 149016 - protein, 143 aa, Unknown
  Bacterial polypetide isolated from the Sargasso Sea
MSELNNIVLKILSNGKGILAADESTGTMTKRLSAVNVESTPENRLLFRETLFLSEGMKKCIGGVILYDETIKQSSKSKKTIPELISSSGAIPGIKVDTGAKVLAGSPNEKITEGLDGLRERLKEYYKLGARFTKWRGVYIISE

SEQ ID NO: 149017 - protein, 55 aa, Unknown
  Bacterial polypetide isolated from the Sargasso Sea
MSELNKIAIKIISNGKGILAADESNGTMTKRLEAVNVKSTEESRLCFREILFSSD

SEQ ID NO: 149018 - protein, 158 aa, Unknown
  Bacterial polypetide isolated from the Sargasso Sea
STSTMTKRLESVKVQSTAENRLLFRETLFSASGMTEYIGGVILYDETIKQITSKKNKIPELISAMGSVPGIKVDTGAKVLAGSPNEKITEGLDGLRERLKDYYNLGAKFTKWRGVYNVSKEHPSKLSMESNGHALARYSAIVQECNMVPIVEPEVLME

SEQ ID NO: 149019 - protein, 93 aa, Unknown
  Bacterial polypetide isolated from the Sargasso Sea
MSELYEIAEKILQNGKGILAADESTGTMKKRLDSVNVESNEKNRLIFRETLFSSNSMKECIGGVILYDETIKQNTSQNKSIPELISESGAVPG

SEQ ID NO: 149020 - protein, 166 aa, Unknown
  Bacterial polypetide isolated from the Sargasso Sea
MSELNKIAHKILSNGKGILAADESNGTMTKRLEAVEVKSTPDNRLAFRETLFSSESMKDCIGGVILYDETINQISNSGKSIPDLISASGAVPGIKVDTGAKILANSPEEKITEGLDGLRERLKKYYKLGARFTKWRGVFSISNNYPSKLAIHSNAHALARYAALVQ

SEQ ID NO: 149021 - protein, 63 aa, Unknown
  Bacterial polypetide isolated from the Sargasso Sea
MSELNKIVLKIISNGKGILAADESNGTMTKRLEAVGVKSTPENRLLFRESLFSSESMKEYIGG

SEQ ID NO: 149022 - protein, 221 aa, Unknown
  Bacterial polypetide isolated from the Sargasso Sea
DGLRDRLKDYYDLGARFTKWRGVYLISDKYPSDLAISANAHALARYAALVQEAGMVPIIEPEVLMDGNHSARVCLNKTSEVLKKCYEELELNNVDLTGTILKPNMILPGANSNEKISKEEIAELTLECLKNNVPSSVPGIAFLSGGQSEIEATANLNEINIKNNSSFIMTYSYGRALQQSALKFWSKDISNIIETQEIFDHRAKMCTLAAKGKWSENLEKS

SEQ ID NO: 149023 - protein, 155 aa, Unknown
  Bacterial polypetide isolated from the Sargasso Sea
MSDLNKIALQIISNGKGILAADESNGTMTKRLEAVNVDSNPKNRLKFRETLFSSECMRECIGGVILYDETIKQVSSLGKKIPDLIADLGALPGIKVDTGAKILPNSNNEKITEGLDGLRERLKEYYKLGARFTKWRGVYNIGEKYPSKLAIHSNA

SEQ ID NO: 149024 - protein, 172 aa, Unknown
  Bacterial polypetide isolated from the Sargasso Sea
VQESGMVPIVEPEVLMDGKHEAEDCLEKTSEVLKKCYEELILNKVDLKGTILKPNMILPGSASNEKIEAKKIAELTLKCLKESVPTEVPGIAFLSGGQTEKEAAKNLNEINKLNNTNFIMTYSYGRALQQSALKFWSKDINDIDGTQRIFDHRAKMCSLAAQGKWTEEIENK

SEQ ID NO: 149025 - protein, 212 aa, Unknown
  Bacterial polypetide isolated from the Sargasso Sea
IRSKRQREKSKNLSSDAVIRNLGELTQGQPVVHLDHGVGRYLGLETIDAGGLPTEFLTLEYAGGDKLFVPVTSLHLISRYTGSDNPPSHKLGGEAWVKARRKAAEKVRDVAAELLDVYAMRAARHGFAFKHDREAYRQFAAGFPFEETDDQLNAINAVLGDMCQAKSMDRLVCGDVGFGKTEVAMRAAFVAVHGGKQVAVLVPTTLLAQQHY

SEQ ID NO: 149026 - protein, 159 aa, Unknown
  Bacterial polypetide isolated from the Sargasso Sea
MSELNKIALKIISNGKGILAADESNGTMTKRLEAVNIKSTKENRLSFREILFSSDGMNDFIGGVILYDETINQISSTGKSIPDLISISGAVPGIKVDTGTKDLANSPKEKITEGLDGLRDRLKKYYDLGARFTKWRGVYSIGEKYPSELAISSNAHSLA

SEQ ID NO: 149027 - protein, 127 aa, Unknown
  Bacterial polypetide isolated from the Sargasso Sea
GTILKPNMILPGSLSKKKVSNEEIAEKTLDCLKKNVPSKVPGVAFLSGGQSEVEATKNLNEINKKNDTNFLITFSYGRALQQSALKTWSKEMKNIEKVQNVFNHRAMMNGLSSKAEWFEKLENSRAA

SEQ ID NO: 149028 - protein, 178 aa, Unknown
  Bacterial polypetide isolated from the Sargasso Sea
MNIDTLKTTAAAMVAPGKGILAMDESHPTCNKRFEALGIPTTPEMRREYRTMLVTTPKLGQHIGGAILFDETIRDCVVDGRSFVEVLTEQGIVPGIKVDAGAKDLALRSGEKVTEGLDGLGPRLAEYSELGARFAKWRAVYAITDTRPSQACFSANAHGLARYAALCQEHDIVPIVEP

SEQ ID NO: 149029 - protein, 46 aa, Unknown
  Bacterial polypetide isolated from the Sargasso Sea
MRIEDVAKKMCEKGKGILAADESTGTIAKRFKSINVENLEKNRLIF

SEQ ID NO: 149030 - protein, 106 aa, Unknown
  Bacterial polypetide isolated from the Sargasso Sea
MSELSKIALKILSNGKGILAADESTATMTKRLNSVKVESTPENRLLFRETLFSSSSMNSCIGGVILFDETIRQTTSSGKTIPELIESKGSITGIKVDTGTKAMLIK

SEQ ID NO: 149031 - protein, 39 aa, Unknown
  Bacterial polypetide isolated from the Sargasso Sea
MSELNKIALKIISNGKGILAADESNGTMTKRLEAVKVNS

SEQ ID NO: 149032 - protein, 102 aa, Unknown
  Bacterial polypetide isolated from the Sargasso Sea
MEKIVNKTEQLERIRTNKGFIAALDQSGGSTPKALQLYGISEDQYQDDEEMFKLIHDMRTRIITSPSFSQSNIIGAILFEQTMERLISGVPTADYLWKTKKI

SEQ ID NO: 149033 - protein, 75 aa, Unknown
  Bacterial polypetide isolated from the Sargasso Sea
MSIEDIAKQMVAKGKGILAADESTGTMEKRLKSVNVECTEKNRLHFRETLFSSKSMQTCISGVILFDETLRQTSN

SEQ ID NO: 149034 - protein, 60 aa, Unknown
  Bacterial polypetide isolated from the Sargasso Sea
MSELNDIALKIIGNGKGILAADESTGTMAKRLDSVNVKSSTQNRLIFRENLFSSEKYEKL

SEQ ID NO: 149035 - protein, 115 aa, Unknown
  Bacterial polypetide isolated from the Sargasso Sea
MSELNNIALQIISSGKGILAADESTGTMTKRLKSFNVESSTNNRLLFRETLFSSSSMKECIGGVILYDETIKQTSTSGKKVPELISDSNSIPGIKVDTGAKTLANSEEEKITEGL

SEQ ID NO: 149036 - protein, 100 aa, Unknown
  Bacterial polypetide isolated from the Sargasso Sea
MTELNKIALKIISNGKGILAADESNGTMTKRLEAVKVDSTPENRLLFREILFSSEGMKKYIGGVILYDETINQNSSLGKPIPDLISSSGAVPGIKVDTGA

SEQ ID NO: 149037 - protein, 175 aa, Unknown
  Bacterial polypetide isolated from the Sargasso Sea
MTELNKIACKILENGKGILAADESTGTMTKRLESVNVNSTPKNRILFRETLFSSDGMKEFIGGVILYDETIKQNTTDGKSIIDLLSETGSIAGIKVDTGAKQMAGSPDEKITEGLDGLRDRLKEYSKLGARFTKWRGVYNISNKYPSKLSIQSNAHALARYAAIIQECNMVPIVN

SEQ ID NO: 149038 - protein, 102 aa, Unknown
  Bacterial polypetide isolated from the Sargasso Sea
ILEDNTRDYREMLFRSKGMKGNIGGVILFDETLRQDAKDGTPLKELITNMGALPGIKVDKGLVPLVDGLDEVVTQGLDGLDERCSEYDSLGAKFTKWLCGNK

SEQ ID NO: 149039 - protein, 166 aa, Unknown
  Bacterial polypetide isolated from the Sargasso Sea
MSELNKIVLKIISNGKGILAADESNGTMKKRLDAVNVSSNPENRLLFREILFSSKCIGECIGGIILYDETINQTTSFGKSIPDLIASSGAIPGIKVDTGAKDLANSPEEKITEGLDGLRERLKKYYDLGARFTKWRGVYSISEKYPIKLAIHSNAHFACKICCLGP

SEQ ID NO: 149040 - protein, 92 aa, Unknown
  Bacterial polypetide isolated from the Sargasso Sea
MTLNEIAKKMCAKGKGILAADESTGTIAKRFKSINVENIEKNRLNFRQTLFNSSAMKDFIGGVILFDETIRQKTTLGPSIPELISKHGAYQE

SEQ ID NO: 149041 - protein, 171 aa, Unknown
  Bacterial polypetide isolated from the Sargasso Sea
MSELNNIALQILSNGKGILAADESTGTMTKRLEGVNVPSTPENRMLFRETLFSSACMNDCIGGVILYDETIKQISSKKNKIPELISSMGPHPGIKVDTGAKVLAGSPNEKITEGLDGLRERLKEYQNLGAKFTKWRGVYSISKDYPSKLTLQSNAHALARYSALVQECNMV

SEQ ID NO: 149042 - protein, 65 aa, Unknown
  Bacterial polypetide isolated from the Sargasso Sea
MTLEEIAKKMCAKGKGILAADESTGTIAKRFKSINVENTEKNRLVFRQTLFSSEAMKNYIGGVIL

SEQ ID NO: 149043 - protein, 110 aa, Unknown
  Bacterial polypetide isolated from the Sargasso Sea
MALVPLRLLLDHAAENGYGIPAFNVNNLEQVQAIMEAAYETDSPVILQASRGARNYAGEIFLRHLILAATETYPNIPVVMHQDHGNEPSTCYSAAINGLTSVMMDGSLEA

SEQ ID NO: 149044 - protein, 105 aa, Unknown
  Bacterial polypetide isolated from the Sargasso Sea
MEKNLINTEQLKRVREDKGFIAALDQSGGSTPKALQLYGIFEDQYQDEEEMFNLIHDMRTRIITSPSFSQSHIIGAILFEQTIERLISGVPTADYLWKTKKLFHF

SEQ ID NO: 149045 - protein, 155 aa, Unknown
  Bacterial polypetide isolated from the Sargasso Sea
MKDLPYQPYLDKISGSDGFIAALDQSGGSTPKALRLYGITESEYSNEEEMYEKVHQMRSRIITSNSFRGDRILGAILFEKTMNGEISGMDTANYLWSKKNVVPFLKIDKGLDEVNDGVQLMKPNPGLEDLLDQAVNKGIFGTKMRSVIKDDDEKG

SEQ ID NO: 149046 - protein, 138 aa, Unknown
  Bacterial polypetide isolated from the Sargasso Sea
MSELNKIANNILGKGKGILAADESTGTMTKRLESVKVPSTPENRLLFRETLFSASSMNECIGGVILYDETIKQMSSKKYNIPELISSMGSTPGIKVDTGAKVLSNSVEEKITEGLDGLRDRLKEYYKLGARFTKWRGV

SEQ ID NO: 149047 - protein, 55 aa, Unknown
  Bacterial polypetide isolated from the Sargasso Sea
MSLEEIANYIVSDGKGILAADESNPTCGKRFDSIEVENSENNRRDYREMLFRSKG

SEQ ID NO: 149048 - protein, 162 aa, Unknown
  Bacterial polypetide isolated from the Sargasso Sea
TSHGAYKFTRKPTGEVLAISRIAEIHKAIPNTHLVMHGSSSVPQEWLEMINKYGGAIPETYGVPVEEIQEGIRNGVRKVNIDTDNRLAFTAAVREAAMADPANFDPRHFNKPARKYMKQVCLDRYQQFWAAGNASKIKQRDINYYAGLYAKGALDPKTAVAA

SEQ ID NO: 149049 - protein, 102 aa, Unknown
  Bacterial polypetide isolated from the Sargasso Sea
MSELYSITEKIISHGKGILAADESTGTMTKRLDAVNVPSTAENRLLFRETLLSSQSMKDYIGGVILYDETIKQIASNKKTIPELISNSGAVPGNKVDTGAKV

SEQ ID NO: 149050 - protein, 268 aa, Unknown
  Bacterial polypetide isolated from the Sargasso Sea
MTKRLDAVNVPSTPENRLLFRETLFSSESMNDCIGGVILYDETIKQIASNKKTVPELISSSGAVPGIKVDTGAKVLANSKNEKITEGLDGLRDRLKIYYKLGARFTKWRGVYIISDKYPSKLAVHSNAHALARYAALVQESGMVPIVEPEVLMDGDHNSEDCFKKTSEVLKKCYDELILNKIDLKGTILKPNMILPGVDCKEKIECKKIAELTLKCLEESVPSEVPGIAFLSGGQTEKEAVENLNEINKLNKSNFIITYSYGRALQQS

SEQ ID NO: 149051 - protein, 235 aa, Unknown
  Bacterial polypetide isolated from the Sargasso Sea
VLSNSHEETITEGLDGLRERLKKYYELGARFTKWRGVYKISNKYPSQLAIHSNAHALARYAALVQECAMVPIVEPEVLMDGEHNSDICLQKTSEVIKKCFDELIIHKVDLTGIILKPNMILSGNHSNNKISKEEVSVKTLECIKNSVPKEVPGIAFLSGGQSDIEATENLNMINKNNNTNFIMTYSYGRALQQAALRTWSKDTKNIKETQNTFNHRAKMCSLAAEGKWFRNLENN

SEQ ID NO: 149052 - protein, 239 aa, Unknown
  Bacterial polypetide isolated from the Sargasso Sea
DTGAKVLANSTNEKITEGLDGLRDRLKEYYKLGARFTKWRGVYNITKEHPSKLAIHSNAHALARYSALVQECNMVPIVEPEVLMDGNHSAQDCFMKTSEVIKKCFEELILHKIDLTGIILKPNMILSGANSDKKIPCKEVANLTIECLKNSVPSEVPGIAFLSGGQTEVEATENLNLINKANSTNFIMSYSYGRALQQSALKHWSKDLNDIEGTQKVFNHRAKMNTLAAQSKWSKELEN

SEQ ID NO: 149053 - protein, 66 aa, Unknown
  Bacterial polypetide isolated from the Sargasso Sea
MSLEEIANYIVSDGKGILAADESNPTCGKRFDSIEVENSENNRRDYREMLFRSKRYERKYWRSNFI

SEQ ID NO: 149054 - protein, 92 aa, Unknown
  Bacterial polypetide isolated from the Sargasso Sea
MKINEIAKQMVSNGKGILAADESTGTMTKRLDSVKVESNEKNRLTFRHTLFTSKNISKYISGVILFDETIRQNKDGKTISEILNNQNILPGI

SEQ ID NO: 149055 - protein, 249 aa, Unknown
  Bacterial polypetide isolated from the Sargasso Sea
IKVDKGAIPLSKNSEEKFTEGLDGLSERLKEYKVLGAEFTKWRAIINIDLTKNYPSSYCLESNAFMLARYAKTVQDNEMVPIVEPEVIMDGNHTIEDCFKVTSSTLKKVFQQLELHEVNLSGILLKPNMVVSGTKCEEQATVEKVAKLTVQCLNENVPKEVAGVVFLSGGQSNQKATLHLNEMNKLFKNLPWKLSYSYGRALQQPAISSWKGEKNNIKISQNALFKRSKLNSSATSGTYSPNDEQQIYE

SEQ ID NO: 149056 - protein, 237 aa, Unknown
  Bacterial polypetide isolated from the Sargasso Sea
YEYNVEVTKVTVDMAHACGVSVEGELGCLGSLESGLAGEEDGVGAEGVLSMDQLLTDPEQAAEFVSETGVDALAIAIGTSHGAYKFSRPPSGDVLAIDRIKEIHSRLPNTHLVMHGSSSVPQDLLSEINEFGGDIPETYGVPLEEIQEGIKNGVRKVNIDTDLRLASTAAIRKHLSNNASEFDPRKYLADSTEAMKKIVIERYEAFNTAGNAQKIVPIPLDAMGSQYESGSLNQLVN

SEQ ID NO: 149057 - protein, 190 aa, Unknown
  Bacterial polypetide isolated from the Sargasso Sea
AIDKDMLVTDPDEAADFVNKTRCDALAVAIGTSHGAYKFTRKPTGDILAMEVVKAIHAKLPDTHLVMHGSSSVPQELQDIINQNGGEMPQTYGVPVEEIEIGIKNGVRKVNIDTDNRMAITGAIRKVLSEKKTEFDPRAYLKPAISAMEEVCIDRFERFNCAGQASKIKPIPLPDMAARYADGALDPTVH

SEQ ID NO: 149058 - protein, 101 aa, Unknown
  Bacterial polypetide isolated from the Sargasso Sea
MTELNKIALKILENGKGILAADESTGTMTKRLQSVSIDSTPENRILFRETLFSSKGMTECIGGVILFDETINQKTNDGKMVPDLLSNMGSIAGIKVDTGAK

SEQ ID NO: 149059 - protein, 165 aa, Unknown
  Bacterial polypetide isolated from the Sargasso Sea
MSELNKIALKIISNGKGILAADESTGTMTKRLTAVNVNSTPENRLLFREILFSSECMKDCIGGVILYDETINQTTNFEKSIPELISASGAVPGIKVDTGAKELANSLEEKITEGLDGLRDRLKKYYKLGARFTKWRGVYSISNKYPTKLAINSNAHALARYSALV

SEQ ID NO: 149060 - protein, 124 aa, Unknown
  Bacterial polypetide isolated from the Sargasso Sea
KITEGLDGLRERLKEYYKIGARFTKWRGVYNITKDYPTTISIQSNAHALTRYAPLVQECSMVPIVEPEVLMDGDHSADECFNKTSVVIKQCFEDLILHKVDLTGVILKPNMILAGSESKSQIPN

SEQ ID NO: 149061 - protein, 222 aa, Unknown
  Bacterial polypetide isolated from the Sargasso Sea
ELVLKGELGCLGSLETEKGEAEDGHGFEGELSTDMLLTDPVEAADFVAKTKVDALAIAIGTSHGAYKFTRKPTGEVLAISRIAEIHKALPNTHLVMHGSSSVPQEWLDIINKYGGEIPQTYGVPVEEIQEGIRNGVRKVNIDTDNRLAFTAAVREAAFADKANFDPRHFNKPARKYMKQVCLDRYKQFWCEGQASKIKQNSTNYFADLYAKGDLDPKVKATV

SEQ ID NO: 149062 - protein, 215 aa, Unknown
  Bacterial polypetide isolated from the Sargasso Sea
LKEYYKLGARFTKWRGVYNISEKYPSKLAISSNAHALARYSALVQECNMVPIVEPEVLMDGNHSANDCFDKTSEVINKCFEELNIHEVDLTGIILKPNMVLPGTKSKEKVSNEEVAKLTLKCLKENVPKSVPGIAFLSGGQSDIEATENLNLINKYNDTNFIMTYSYGRALQQSALKFWSKDTKDIKGTQNVFNHRANMCSLAARGKWSKELEEK

SEQ ID NO: 149063 - protein, 106 aa, Unknown
  Bacterial polypetide isolated from the Sargasso Sea
MSELNNIALKIIGNGKGILAADESTGTMTKRLDSVNVESSSKNRLIFRETLFSSESMKNCIGGVILYDETIKQSSSSGKKIPELISSSGAVPGIKVDTGAKVLANS

SEQ ID NO: 149064 - protein, 46 aa, Unknown
  Bacterial polypetide isolated from the Sargasso Sea
MSELKKIALQILSNGKGILAADESTATMTKRLDSVKVRSDENNRLL

SEQ ID NO: 149065 - protein, 59 aa, Unknown
  Bacterial polypetide isolated from the Sargasso Sea
MNLKNLNNIAIQMVQKGKGILAADESNPTCKKRFDSINVESTEQNRNKYRDMLFTTTGM

SEQ ID NO: 149066 - protein, 51 aa, Unknown
  Bacterial polypetide isolated from the Sargasso Sea
MSELNNIALKILENGKGILAADESTGTMTKRLESVNVPSTPENRLLLEKHY

SEQ ID NO: 149067 - protein, 186 aa, Unknown
  Bacterial polypetide isolated from the Sargasso Sea
MVLTGNKVQELFDKAKANKFAIPAVNVIGSNSINATLETAAKLNSPVIIQFSNGGAIFNAGKSLSNENQIAAIKGAVSGAKHVRELSDLYGATVILHTDHASRKLLPWIDGLIDESEKNFKLTGEPLFSSHMIDLSEEKIEDNIETCCEYLKRMSKIGMTLEIELGVTGGEEDGVDNTGIDESKKC

SEQ ID NO: 149068 - protein, 96 aa, Unknown
  Bacterial polypetide isolated from the Sargasso Sea
MTELNKISLKILSGGKGILAADESTGTMTKRLESVKVSSNEENRLLFRKTLFSSGSMKNCIGGVILYDETIKQSSESKTISELINESGAVVGIKVD

SEQ ID NO: 149069 - protein, 146 aa, Unknown
  Bacterial polypetide isolated from the Sargasso Sea
MSDIEKIAKKMVEKGKGILAADESTGTMTKRLSSVNVESTPENRLKFRETLFSAEGMKNHISGVILYDETIKQKASSGKSIPELIQSLGSIPGIKVDTGAKKLAGSPDEKITEGLDGLRERLAEYYKLGARFTKWRAVYSISNKYP

SEQ ID NO: 149070 - protein, 83 aa, Unknown
  Bacterial polypetide isolated from the Sargasso Sea
MDLSSLNSIAQSMVAPNKGILAADESTPTIGKRFATIDTESTESNRQIYRNLLFTSPNVSEYISGVILFDETIRQSTNEEHHC

SEQ ID NO: 149071 - protein, 229 aa, Unknown
  Bacterial polypetide isolated from the Sargasso Sea
RRKITEGLDGLRERLKTYYEMGARFTKWRGVYLISDKYPSKLSINSNAHALARYSALAQECGMVPIVEPEVLMEGNHSADDCYEKTSIVLKKCFDELELHKIDLKGIILKPNMILPGSQSTNKISNEEIASLTTKCLKENVPTEVPGIAFLSGGQTEIEATDNLNQINIKNNTNFIMTYSYGRALQQSALKFWSKDINNINGTQELFNHRAKMCSLAAQGKWSKDIENK

SEQ ID NO: 149072 - protein, 55 aa, Unknown
  Bacterial polypetide isolated from the Sargasso Sea
MSELNKIVLQIISNGKGILAADESTATMTKRLDSVKVQSNETNRLLFRQNSFFVS

SEQ ID NO: 149073 - protein, 96 aa, Unknown
  Bacterial polypetide isolated from the Sargasso Sea
MSDLNNIVNKILENGKGILAADESTGTMTKRLDGVGVPSTPENRLLFRETLFCSSGMKNCIGGVILYDETIKQTSSKKNKIPELIESMGSCAGIKV

SEQ ID NO: 149074 - protein, 83 aa, Unknown
  Bacterial polypetide isolated from the Sargasso Sea
MVLFSYLGGQTEIEATENLDQMNKIGNLPWNLSFSYGRALQASALQAWSGKVENEEIASATFDHRAKMNSLATLGKWDSELEK

SEQ ID NO: 149075 - protein, 71 aa, Unknown
  Bacterial polypetide isolated from the Sargasso Sea
MSKLNKIALEILGEGKGILAADESTATMTKRLSGVNVPSTPENRLMFRETLFSATGMTEYIGGVILYDETI

SEQ ID NO: 149076 - protein, 133 aa, Unknown
  Bacterial polypetide isolated from the Sargasso Sea
MSLEFESLNDIAEAMTVKGKGILAADESSPTCKKRFDSIDVDSTEENRNIYRDMLFTTKRMEEFISGVILFDETIRQSTIKDGVSFPEYLSGLGVIPGIKVDAGAKHLSGTDSEKITEGLDGLDGRLKDYTKW

SEQ ID NO: 149077 - protein, 130 aa, Unknown
  Bacterial polypetide isolated from the Sargasso Sea
MSELYKIAKKILHNGKGILAADESNGTMKKRLDSVNVKSNEKNRLIFRETLFSSNSMKECIGGVILYDETIRQNTSQNKSIPELITESGAVPGIKVDTGAKTLAGSKDEKVTEGLDGLRERLKDYYQLGS

SEQ ID NO: 149078 - protein, 73 aa, Unknown
  Bacterial polypetide isolated from the Sargasso Sea
MSDLEKIAKQMVAKGKGILAADESTGTMTKRLTSVNVESTSVNRLKFRETLFSASSMRNHIGGVILYDETIKQ

SEQ ID NO: 149079 - protein, 168 aa, Unknown
  Bacterial polypetide isolated from the Sargasso Sea
MSELNKIALKIVSPGKGILAADESTATMTKRLESVKINSTEQNRLKFRSILFSSKSMEDCVGGVILYDETIKQKYKEKSIPELISESGTVPGIKVDTGAKKLAKSNEEKITEGLDGLRERLKNYYNLGARFTKWRAVYLISDKYPSKLAIDVNAHALARYASLVQEAG

SEQ ID NO: 149080 - protein, 154 aa, Unknown
  Bacterial polypetide isolated from the Sargasso Sea
MSELNNIAIKIIKNGKGILAADESTGTMTKRLEAVNVPSTPENRLLFRETLFSSPSMTECIGGVILYDETIKQISSKKNKIPELISKMGAAPGIKVDTGAKVLAGSPNEKVTEGLDGLRERLKEYYKLGAKFTKWRGVYSISKNYPSKLSIEAN

SEQ ID NO: 149081 - protein, 169 aa, Unknown
  Bacterial polypetide isolated from the Sargasso Sea
MSELNKIALKMISNGRGILAADESNGTMTKRLEAVNINSTPENRLLFRETILSSESMRDCIGGVILYDETIRQTTKFGKSIPDLISSSSAVPGIKVDTGAKNLANSSGEKITEGLDGLRERLKGYYKLGARFTKWRGVYNIGYDYPSKQAIHSNAQALARYSALVQESH

SEQ ID NO: 149082 - protein, 52 aa, Unknown
  Bacterial polypetide isolated from the Sargasso Sea
MSEIENIAKQMVAKGKGILAADESTGTMTKRLSSVNVESTTENRLRFREVLF

SEQ ID NO: 149083 - protein, 96 aa, Unknown
  Bacterial polypetide isolated from the Sargasso Sea
MITLRQLLDHAAEYGYGVPAFNINNMEQGLAIMAAAKKTSSPLIIQASRGARSYANDLVLAKLIEGLSELYPDIPLVMHQDHGNNEATCMTAIKYG

SEQ ID NO: 149084 - protein, 77 aa, Unknown
  Bacterial polypetide isolated from the Sargasso Sea
MSELHNIAVKILEKGKGILAADESTGTMTKRLDGVNVPSTPENRLLFRETLFSAPSMTECIGGVILYDETINQVSSK

SEQ ID NO: 149085 - protein, 132 aa, Unknown
  Bacterial polypetide isolated from the Sargasso Sea
MSELNNIALKIIGNGKGILAADESTGTMTKRLENVKVKSSSENRLKFRHTLFSSKSMTTCIGGVILYDETIKQEFDSRKIPKIISDKGAVPGIKVDTGAKKLANSSEEKITEGLDGLRDRLKEYYKLGARSQ

SEQ ID NO: 149086 - protein, 95 aa, Unknown
  Bacterial polypetide isolated from the Sargasso Sea
KKNVPSQVPGIAFLSGGQSEIESSKNLNAINKINDSNFLITFSYGRGLQASALKEFGKNQSNIENIQKAFNHRAKMNGLSSKGEWSEDLEKDPAS

SEQ ID NO: 149087 - protein, 187 aa, Unknown
  Bacterial polypetide isolated from the Sargasso Sea
SNAHALARYAALVQEAEMVPIIEPEVLMDGSHDIDKCYTVTTNVLNECYNELIIHKVDLKGTVLKPNMIISGTECKNKSNSEEIAKKTLECLKKNVPKEVPGIAFLSGGQSEIESSKNLNEINKINDTSFLITFSYGRGLQASALREFGKNQGNSVNIQKAFNHRAKMNGLSSKGEWSPDLEKEAVA

SEQ ID NO: 149088 - protein, 268 aa, Unknown
  Bacterial polypetide isolated from the Sargasso Sea
TPLNRLLFRETLFSSKAMRDCVGGVILYDETIKQTTSKKISVSELIISNGAFPGIKVDTGAKVLAGSEQEKITEGLDGLRDRLKEYYQLGARFTKWRGVYTISSKYPSKLAISSNAHALARYSALVQECKMVPIVEPEVLMEGNHTAEDCLNKTKEVLNKCFEELSLHGIDLSGIILKPNMILSGTECKTQINNDEIANLTLKCLEETVPVEVPGIAFLSGGQTEIQATENLNLINKKNKTKFIMTYSYGRALQQSALKYWSKNINDV

SEQ ID NO: 149089 - protein, 58 aa, Unknown
  Bacterial polypetide isolated from the Sargasso Sea
MSLEEIANYIVSDGKGILAADESNPTCGKRFDSIEVENSEDNRREYREMLFRSKRYER

SEQ ID NO: 149090 - protein, 49 aa, Unknown
  Bacterial polypetide isolated from the Sargasso Sea
MVKTLEEIASYIVADGKGILAADESTGTIKKRFDSINVESTEDNRRDYR

SEQ ID NO: 149091 - protein, 88 aa, Unknown
  Bacterial polypetide isolated from the Sargasso Sea
VPGDVPGIVFLSGGQTEIEATENLDQMNKIGNLPWNLSFSYGRALQASALQAWSGKVENEEIASATFDHRAKMNSLATLGKWESELEK

SEQ ID NO: 149092 - protein, 171 aa, Unknown
  Bacterial polypetide isolated from the Sargasso Sea
MTDLKNIAKKILEKGKGILAADESTGTMTKRLEAVGVSSSPENRLLFRETLFSSSAMKSFIGGVILYDETIKQKSLTNIKIPELISSNGAIPGIKVDTGAKILANSPDEKITEGLDGLRERLKEYYKLGARFTKWRAVYSISENYPSKLSIYSNAHALARYSALVQECGMV

SEQ ID NO: 149093 - protein, 52 aa, Unknown
  Bacterial polypetide isolated from the Sargasso Sea
MSELNNIVLKILNNGKGILAADESTATMTKRLESVKIQSTPDNRLLFRETIV

SEQ ID NO: 149094 - protein, 66 aa, Unknown
  Bacterial polypetide isolated from the Sargasso Sea
MSELNKIALKIISNGKGILAADESNGTMTKRLEAVNISSTPENRLLFREILFSSKCMKEYIGGVIL

SEQ ID NO: 149095 - protein, 175 aa, Unknown
  Bacterial polypetide isolated from the Sargasso Sea
MSELNRIALKIISSGKGILAADESNGTMTKRLEAVNVKSNEENRLKFRKILFTSKNMADCIGGVILYDETIRQTFEDKPIPEIISQTGAITGIKVDTGAKKLAKSENEKITEGLDGLRERLKNYYDLGARFTKWRAVYLISDQFPSKLAIDTNAHALDRYSALVQEAGMVPIVNQ

SEQ ID NO: 149096 - protein, 138 aa, Unknown
  Bacterial polypetide isolated from the Sargasso Sea
MSELNNIALKILSHGKGILAADESTGTMTKRLSAVNVESTSENRLLFRETLFSSQSMKTCIGGVILYDETIKQNSSSKKTIPELISSSGAVPGIKVDTGAKSLKDSPDEKITERLDGLGERLKDYYKLGARFTKWRGI

SEQ ID NO: 149097 - protein, 116 aa, Unknown
  Bacterial polypetide isolated from the Sargasso Sea
MSFDQQLEIVKNREGFIAALDQSGGSTPKALRLYGIGESEYSGEDQMYDRIHEMRSRIVTSPQFESTRILGAILFEQTMRRQIEGLGSAQYLWERKQVVPFLKVDKGLAEETTGYS

SEQ ID NO: 149098 - protein, 168 aa, Unknown
  Bacterial polypetide isolated from the Sargasso Sea
MSDLYKIAIQILSNGKGILAADESTATMTKRLESVNLDSNEYNRLIFRQTLFTSLSMKECIGGVILYDETIRQRSTDGKTIPDLINSSGSLTGIKVDTGAKALAGFKDEKITEGLDGLRERLNDYYKLGARFTKWRGVYIISENFPSKQSVLSNAHALARYASLVQEA

SEQ ID NO: 149099 - protein, 237 aa, Unknown
  Bacterial polypetide isolated from the Sargasso Sea
MAADESTGTMTKRLDSVNVPSTSENRLMFRETLFTSSSMTDCIGGVILYDETIKQSSSKKKKITELISEMGSLPGIKVDTGAKVLAGSTGEKITEGLDGLRERLKEYYKIGAKFTKWRGVYLISKDYPSRLSISSNAHALARYSVLVQECNMVPIVEPEVLMDGEHSAEDCYEKTSKVIEKCFEELILHKVDLKGIILKPNMILAGNKSKNKISNDEVARLTLKCLKNCVPSEVPGI

SEQ ID NO: 149100 - protein, 95 aa, Unknown
  Bacterial polypetide isolated from the Sargasso Sea
MTELNKICLKILSNGKGILAADESTGTMTKRLETVNVASNEQNRLIFRKSLFSSNSMKDCIGGVILYDETIKQSFESKTIPELISENGAVPGIKV

SEQ ID NO: 149101 - protein, 47 aa, Unknown
  Bacterial polypetide isolated from the Sargasso Sea
MIIEDIAKKMCANGKGILAADESTGTIEKRFKSINVENLEINRLTFR

SEQ ID NO: 149102 - protein, 58 aa, Unknown
  Bacterial polypetide isolated from the Sargasso Sea
MSELNNIALKILSKGKGILAADESTGTMSKRLNSVKVESSEKNRLLFRETLFSSSSMK

SEQ ID NO: 149103 - protein, 77 aa, Unknown
  Bacterial polypetide isolated from the Sargasso Sea
MSLNNIEDIAAYIVADGKGILAADESNPTCGKRFDSIGVESTEENRRDYREMLFRSKGMKGNIGGVILFDETIRQSA

SEQ ID NO: 149104 - protein, 75 aa, Unknown
  Bacterial polypetide isolated from the Sargasso Sea
MKLEDIAKKMCAKGKGILAADESTGTIAKRFKSINVENIENNRLFFRQTLFDSSAMKDYIGGVILFDETIRQQTT

SEQ ID NO: 149105 - protein, 154 aa, Unknown
  Bacterial polypetide isolated from the Sargasso Sea
MNNLNNIEEVANYIVSDGKGILAADESNPTCGKRFDSIGVESNEENRRDYREMLFRSAGMKGNIGGVILFDETIRQKAEDGTPLVNIILDQGALPGIKVDQGLQPIGESEESLTQGLEGLDERLKEYYSLGAKFTKWRAVIKVGDSLPSEEAIV

SEQ ID NO: 149106 - protein, 174 aa, Unknown
  Bacterial polypetide isolated from the Sargasso Sea
DNTGIDSTKLYTQPEEVAYAYSELASISDNFIIAAAFGNVHGVYKPGNVSLTPKILKNSQEHISKQFQTPKNSINFVFHGGSGSSLEEIREAIDYGVIKMNIDTDLQYAFTEGVRDYIIEKKEFISTQIGNPEGNDIPNKKFYDPRVWLREGEDTFKNRLKKAFEDLNNIDTLD

SEQ ID NO: 149107 - protein, 124 aa, Unknown
  Bacterial polypetide isolated from the Sargasso Sea
GTLLKPNMVTFGKDNSNQTSIDEVAKKTLDCLIKNVPAELPGVTFLSGGQSDVLATAHLDAMNKIGGFSWKLSFSYGRALQAPSLKAWGGKSENVFISQDELSHRAEMNKLASLGQWEEELEDR

SEQ ID NO: 149108 - protein, 88 aa, Unknown
  Bacterial polypetide isolated from the Sargasso Sea
MSELHTIAQQMVQKGRGILAADESTGTCTKRFEGIGVESTADSRCAYRSALFTSPGLEEYISGVILYDETFRQNVHHTDTLIPQYLQS

SEQ ID NO: 149109 - protein, 180 aa, Unknown
  Bacterial polypetide isolated from the Sargasso Sea
LAADESTATMTKRLESVKVQSNEQNRLLFRKTLFSSESMKSCIGGVILYDETIRQNSDSKSIPEIIINNGAIPGIKVDTGAKPLAGSIEEKITEGLDGLRERLKVYYKLGARFTKWRGVYSISNKNPSKLCIYSNAHALARYSSLVQECGMVPIVEPELLMDGNHSAALCFDKTSEIIKK

SEQ ID NO: 149110 - protein, 184 aa, Unknown
  Bacterial polypetide isolated from the Sargasso Sea
IKGLRPLAGGHDVETFCSGLDGLVERAADYYEQGARFAKWRAVLQITDDGCPSKLSIRENAWGLARYARSVQESGLVPIIEPEILMDGSHSIEKTAAVQEEVIKEVYLACQVNGVLLEGTLLKPSMTVQGADSSTKADPQQVAEMTIRTMERCVPASVPGITFLSGGLSEEAASVYLNLMNKID

SEQ ID NO: 149111 - protein, 42 aa, Unknown
  Bacterial polypetide isolated from the Sargasso Sea
MSELNKIALKILSNGKGILAADESTATMTKRLDSVKVPSNEK

SEQ ID NO: 149112 - protein, 55 aa, Unknown
  Bacterial polypetide isolated from the Sargasso Sea
MNFSSLSEIASYIVSDGKGILAADESNPTCTKRFDSIGVESTEDNRRDYRELLFR

SEQ ID NO: 149113 - protein, 57 aa, Unknown
  Bacterial polypetide isolated from the Sargasso Sea
MIFNSIEEIATFIVKDGKGILAADESNPTCGKRFDSIGVESTEENRRDYREMLFRSK

SEQ ID NO: 149114 - protein, 104 aa, Unknown
  Bacterial polypetide isolated from the Sargasso Sea
MSELNRIALKIISSGKGILAADESNGTMTKRLESVNVKSSEENRLKFRSILFTSKNMMDCIGGVILYDETIRQTFEGKTIPEIITQTGAIPGIKVDTGAKNLQI

SEQ ID NO: 149115 - protein, 171 aa, Unknown
  Bacterial polypetide isolated from the Sargasso Sea
MSELNSIALKIIGKGKGILAADESTGTMTKRLQDVKLESSPENRLLFRETLFTSDGMKECIGGVILYDETIKQLSKSGKKIPELISDMSTVTGIKVDTGAKILANSIEEKITEGLDGLRERLKEYYKLGARFTKWRGVYLISDKYPSKLAIKTNSQALARYSALAQECGMV

SEQ ID NO: 149116 - protein, 88 aa, Unknown
  Bacterial polypetide isolated from the Sargasso Sea
MSELNKIALKIISNGKGILAADESNGTMTKRLTAVSVHSTPENRLLFREILFSSECMKDCIGGVILYDETINQTSSLEKSIPDLISAS

SEQ ID NO: 149117 - protein, 117 aa, Unknown
  Bacterial polypetide isolated from the Sargasso Sea
MPLISMRQLLDHAAENDYGVPAFNVNNLEQIRAIMEGAQKMNSPVIVQASAGARKYSGAIFIKNMMKAAVEEFPTIPIVMHPDHGGTPDECRECIDLGFTSVMMDGSLLADQKLHQI

SEQ ID NO: 149118 - protein, 196 aa, Unknown
  Bacterial polypetide isolated from the Sargasso Sea
KFPSSQSIKTNAHALARYAALVQEAKMVPIIEPEVLMDGSHDIDKCYQVTTDVLNECYNELEIHKVNLKGTVLKPNMVIPGSESKIKVSSAEIAKKTLDCLKKNVPSEVTGIAFLSGGQSEIEASKNLNEINKINNTNFLITFSYGRGLQSSALKEFGKDQNNQKNIQKAFDHRAKMNGLSSKGEWSENLEKEAAA

SEQ ID NO: 149119 - protein, 178 aa, Unknown
  Bacterial polypetide isolated from the Sargasso Sea
MSELEKIAKQMVAKGKGILAADESTGTMTKRLSSVNIESTSENRLRFRETLFSAQGMKNHIGGVILYDETIKQKTSSGKSVPDLIKSFGSIPGIKVDTGAKKLAGSHEEKITEGLDGLRERLNEYYKLGARFTKWRAVYNISDNYPSELSVKANAHALARYAALVQEAKMVPIVNQKF

SEQ ID NO: 149120 - protein, 174 aa, Unknown
  Bacterial polypetide isolated from the Sargasso Sea
MSELNKIALKIISNGKGILAADESNGTMTTRLEAVNIKSTQENRLAFREILFSSDGMKDCIGGVILYDETINQISTAGKSIPDLISSSGAVPGIKVDTGAKDLPNSPKEKITEGLDGLRDRLKTYYDLGARFTKWRGVYSIGEKYPSELAITSNAHALARYSALVQESGMVPIV

SEQ ID NO: 149121 - protein, 142 aa, Unknown
  Bacterial polypetide isolated from the Sargasso Sea
MTELNKIALNIISNGKGILAADESNGTMTKRLEAVNVSSTSENRLLFREILFSSKGMKKYIGGVILYDETINQITSSGKSIPDLISSAGAVTGIKVDTGAKELANSSGEKITEGLDGLRERLKKYYELGARFTKWRGVYNIG

SEQ ID NO: 149122 - protein, 158 aa, Unknown
  Bacterial polypetide isolated from the Sargasso Sea
MSELNKIALKIISNGKGILAADESNGTMTKRLEAVNVKSTQENRLAFREILFSSDGMKDCIGGVILYDETINQISSTGESIPDLISSSGAIPGIKVDTGAKDLANSTKEKITEGLDGLRDRLKKYYDLGARFTKWRGVYYISEKYPSKLAISSNAHAL

SEQ ID NO: 149123 - protein, 116 aa, Unknown
  Bacterial polypetide isolated from the Sargasso Sea
MSYDQQLEIVKNREGFIAALDQSGGSTPKALRLYGIGESEYSGEDQMYDRIHEMRSRIVTSPQFESARILGAILFEQTMRRQIEGLGSAQYLWERKQVVPFLKVDKGLAEESNGVQ

SEQ ID NO: 149124 - protein, 78 aa, Unknown
  Bacterial polypetide isolated from the Sargasso Sea
MSELNSIALKILSNGKGILAADESTATMTRRLESVKIPSTPENRLNFRETLFSSNSMAECIGGVILYDETIKQQSSKG

SEQ ID NO: 149125 - protein, 59 aa, Unknown
  Bacterial polypetide isolated from the Sargasso Sea
MTKNIVNEIANKLCLSPKGILAADESTNTIKKRFESINLESNFESRRNYRELLFKTKNL

SEQ ID NO: 149126 - protein, 58 aa, Unknown
  Bacterial polypetide isolated from the Sargasso Sea
MSELNQVALKILSNGKGILAADESNGTMTKRFNAVNITSTPENRLLFRETLFSSEKMK

SEQ ID NO: 149127 - protein, 316 aa, Unknown
  Bacterial polypetide isolated from the Sargasso Sea
ADESTGTMTKRLDAVNVESTPENRLLFRETLFSSESMKTCIGGVILYDETIKQNTSSKKTIPELISSSGAVPGIKVDTGAKPLVDSPDEKITEGLDGLGERLKDYYKLGARFTKWRGIYNISKNYPSKLSIDANANALAKYSSIVQENGMVPIVEPEVLMDGDHTAEDCLNKTSEVIKKCFEELIQHKVSLEGIILKPNMILPGNKSNEKISNEKIAHLTLKCLKDSVPKEVPGIAFLSGGQTEIEAAENLNLINKYNDTNFIMSYSYGRALQQSAIKFWSKDIKNIKGTQEIFNHRANMCSLAAQGKWSKELEAK

SEQ ID NO: 149128 - protein, 84 aa, Unknown
  Bacterial polypetide isolated from the Sargasso Sea
MISMRQLLDHAAENDYGVPAFNVNNLEQMRAIMEGARETSSPVIVQASAGARKYAGANFLRHLILAAIEEFPTIPIVMHQDHGA

SEQ ID NO: 149129 - protein, 63 aa, Unknown
  Bacterial polypetide isolated from the Sargasso Sea
MNIEDIAKKMCAKGKGILAADESTGTIAKRFKSINVANLEKNRLSFRQTLFNSSGMKDYIGGV

SEQ ID NO: 149130 - protein, 150 aa, Unknown
  Bacterial polypetide isolated from the Sargasso Sea
YNVTSRVLDECYKDFSVHNVNLKGTVLKPNMILPGKDCKQKTSTEEIAKKTLECIKKNMPSEVPGVAFLSGGQSELEATKNLNEINKINDTSFNFTFSYGRALQQSALKTWAKSMKDTDKIQKVFNHRAEMNGASTNAKWDEKLDQSFAA

SEQ ID NO: 149131 - protein, 58 aa, Unknown
  Bacterial polypetide isolated from the Sargasso Sea
MDTELLEKTARELVAPGRGILAADESNGTMSNRLEAVGVEPSPETRRAYRANIFATPE

SEQ ID NO: 149132 - protein, 111 aa, Unknown
  Bacterial polypetide isolated from the Sargasso Sea
TLTSEKSSSKTIAEKTISCFKEVVPEDVPGIVFLSGGQTEIEATENLDQMNKIGNLPWNLSFSYGRALQASALQAWSGKVENEEIASATFDHRAKMNSLATLGKWESELEK

SEQ ID NO: 149133 - protein, 135 aa, Unknown
  Bacterial polypetide isolated from the Sargasso Sea
MPLVPMRILLDHAAEHGYGLAAFNVNNMEQIQAIMEAAKETDSPVIVQASRGARAYSQDNYLRHLMLAASELYPMIPIAMHQDHGNSPATCQSAIDHGFTSVMMDGSLKEDGKTPADFDYNVQVTKDVVDLAHRQ

SEQ ID NO: 149134 - protein, 71 aa, Unknown
  Bacterial polypetide isolated from the Sargasso Sea
LGASFAKWRAVINISADLPSNNCIRLNAHALARYAALCQQAQMVPIVEPEVLMDGNHDIDRCFDVTSKFLQ

SEQ ID NO: 149135 - protein, 46 aa, Unknown
  Bacterial polypetide isolated from the Sargasso Sea
MSIEEIAKQMVAKGKGILAADESTGTMEKRLKNVGVECTEKNRLHF

SEQ ID NO: 149136 - protein, 74 aa, Unknown
  Bacterial polypetide isolated from the Sargasso Sea
MTLNEIAKKMCAEGKGILAADESTGTIAKRFKSINVENIEKNRLNFRQTLFNSSAMKDFIGGVILFDETIRQKT

SEQ ID NO: 149137 - protein, 294 aa, Unknown
  Bacterial polypetide isolated from the Sargasso Sea
REVLGDLLARIALQPKEFASLDAFITSKARHGLLVAPLERGFLLREPGQAELALITETELLGGKIRSKRQREKSKNLSSDAVIRNLGELTQGQPVVHLDHGVGRYLGLETIDAGGLPTEFLTLEYAGGDKLFVPVTSLHLISRYTGSDNPPSHKLGGEAWVKARRKAAEKVRDVAAELLDVYAMRAARHGFAFKHDREAYRQFAAGFPFEETDDQLNAINAVLGDMCQAKSMDRLVCGDVGFGKTEVAMRAAFVAVHGGKQVAVLVPTTLLAQQHYDNYRDRFANWPVRVEVLS

SEQ ID NO: 149138 - protein, 229 aa, Unknown
  Bacterial polypetide isolated from the Sargasso Sea
EAINVKSTPENRLSFREILFSSDGMKDCIGGVILYDETINQISSTGKSIPDLISSSDTVPGIKVDTGAKDLANSPKEKITEGLDGLRDRLKKYYDLGARFTKWRGVYSIGEKYPSELAISSNAHALARYSALVQESGMVPIVEPEVLMDGNHSSEVCLNKTSEVIKKCFEELILHKVDLSGIILKPNMILPGSLSKNKISSEEISIKTLECLKNSVPNEVPGIAFLSGG

SEQ ID NO: 149139 - protein, 240 aa, Unknown
  Bacterial polypetide isolated from the Sargasso Sea
IQGQILAGSKEEKITEGLDGLRERLNDYYELGARFTKWRGVYLISDKYPSKLSISSNAHALARYAALVQEAGMVPIIEPEVLMDGNHSAKDCLMKTSEVINKCYEELELNNVDLKGTILKPNMILPGKNSDEKISSEEIAELTLKCLRENVPSSVPGIAFLSGGQSEVDATANLNQINIKNDTDFIMTYSYGRALQQSALKFWSKDINNIKGTQEIFDHRAKMCTLAAQGKWSKNLENSQ

SEQ ID NO: 149140 - protein, 108 aa, Unknown
  Bacterial polypetide isolated from the Sargasso Sea
MSELNKIALKILSNGKGILAADESNGTMTKRLQAVEVKSTPENRLAFRETLFSSQSMKDCIGGVILYDETINQFTSSGKSIPELISKSGAVLGIKVDTGAKNWQTLKR

SEQ ID NO: 149141 - protein, 300 aa, Unknown
  Bacterial polypetide isolated from the Sargasso Sea
MTKRLEAVKVNSNEENRLNFRKALFTSESMKKCIGGVILYDETIKQSSGSKTIPELITESGAIVGIKVDTGAKSLAGSNDEKITEGLDGLRERLKEYYKLGARFTKWRGVYSISDKYPSKLSIHSNAHALARYAALVQECGMVPIVEPEVLMDGNHSARVCYEKTSEVIKKCFEELIISKIDLTGVILKPNMILDGSGVTQKIDGEQVAQLTLKCLKESVPEEVPGIAFLSGGQGEIEATENLNLINKSNNTKFIMTYSYGRALQQSALKYWAKDINDISGTPKTFNHRANLCSLAAQGK

SEQ ID NO: 149142 - protein, 85 aa, Unknown
  Bacterial polypetide isolated from the Sargasso Sea
MSELNELVLKIVSNGKGILAADESNSTMTKRLEDINIISTPENRLLFRETLFSSSGMKKYIGGVILYDETINQISSSGEKIPEFN

SEQ ID NO: 149143 - protein, 192 aa, Unknown
  Bacterial polypetide isolated from the Sargasso Sea
LSTDMLLTDLEEAADFVAKTKVDALAIAIGTSHGAYKFTRKPTGEVLAISRIAEIHKALPNTHLVMHGSSSVPQEWLDIINKYGGEIPQTYGVPVEEIQEGIRNGVRKVNIDTDNRLAFTAAVREAAFADKSNFDPRHFNKPARKYMKQVCLDRYKQFWCEGQASKIKQSSTNYYADLYANGKLDPKVKAIV

SEQ ID NO: 149144 - protein, 286 aa, Unknown
  Bacterial polypetide isolated from the Sargasso Sea
METLLFQTKSISEYISGVILYDETLKQKTSENQPIVELLSDNDIIPGIKVDKSTHPLAMFPNEVITEGLDGLRERLEEYYEIGARFTKWRAVINIGDNLPTQYAINVNSYLLALYASLSQEVGLVPIVEPEVLMDGDHSIDRCSEVTDITLNKVFEHLDESNVFLPGIVLKPNMVLSGADASNRADTSKVADYTIEVLSNNVPAEVPGIAFLSGGQEDQESIDNLNSINLVAKLKKSPWELTYSYGRGLQASPLKIWDGKEENVVMAQDEFEKRGIAASKARQGIY

SEQ ID NO: 149145 - protein, 156 aa, Unknown
  Bacterial polypetide isolated from the Sargasso Sea
MVKTLEEIASYIVADGKGILAADESTGTIKKRFDSINVESTEDNRRDYREMLFRASSMSEAIGGVILFDETLRQSAANGDLLREVISNQKSLPGIKVDQGVSPFNGSDKETITKGLDGLDERCQEYYTIGARFTKWRAEINISGNDIPTDECIDQN

SEQ ID NO: 149146 - protein, 197 aa, Unknown
  Bacterial polypetide isolated from the Sargasso Sea
YYFKNYPSKLSIDANADALAKYSSIVQENRMVPIVEPEVLMDGDHTAEDCFNKTSEVIKKCFEKLIQHEVSLEGIILKPNMILPGNKSNEKISNEKIAHLTLKCLKSCVPKEVPGIAFLSGGQTEIEATENLNLINKYNDTNFIMSYSYGRALQQSAIKFWSKDIKNIKGTQEIFNHRANMCSLAAQGKWSKELEDK

SEQ ID NO: 149147 - protein, 89 aa, Unknown
  Bacterial polypetide isolated from the Sargasso Sea
MSLISLRQLLDHAAENNYGVPAFNVNNLEAIRAIMEGAKELNSPVILQASGAARKYAGPIFVKKLVEAAMDEFSEIPTVLHQDHGGSPS

SEQ ID NO: 149148 - protein, 676 aa, Unknown
  Bacterial polypetide isolated from the Sargasso Sea
MWPRRGAEVRNRRKPVSEIATNATPAIDGLAPLQYVPLGTLRVSPHNARKKPPTRIREMAEDIAVSGLLQNLVAHVIDGEPGQHGVCAGQRRLAAMDLLKSEGRARDSDLIPIRIVSEGEALAISLIENAEREGMHIADQCVAFGRMAAEGRSIADIAGRLNVAERDVRRALKLASVSPKLIDVFRDDGMSYEQVCALALSDSHEQQERIWFDAKQDWQKRPNAIRSVITQEETCARDNPLVAFVGLDAYEAAGGYVRRDLFSDAKNSGYINDLELLSRLAVERLTAVAVDTGAEGWSWVETAVQRDSTLLARYGRLRPETRDFTRKEKAEFRKLEKARDDARQAFFAHQDSDAAEDDDAKGEALEEVAQEAEAALAELAERRNAWTDEQKARAGAYIWIDYSGTLQIERGLVKPSEKAAVKESGVVGTEQITPEKAKPLHGETLCERLTAHRTAAVQVELMKRPTVALAYQMFAMVPRVFAEHYEAGAMDALDAQFTPTHERLLRAADDMADSPAWLFIDGERQKWRAVLPCKVRDLLPWLLSCSEDMLANLFAFCVASTVNGLSRWDRPHDVNTLADTLGLDMAAYWKPTRASYLNHVSKQRIIDVVTQAVSADAAAQLVGMKKGEAAAAAELRLAESGWLPEVLANRQTDTVWEDDEPDADEADPEVDPDIPH

SEQ ID NO: 149149 - protein, 263 aa, Unknown
  Bacterial polypetide isolated from the Sargasso Sea
MNDKILKENAKKMMSKPKGLLAMDESSPTCAKRFAGVGIEDSENNRRRYRELIVTTPNLSDYISGAILFDETFHQKMSSGEYFRDYLNSIGILPGIKVDTGAKDFSNHEDEKVTEGLDNLRDRLKNYADLGAKFCKWRAVITIGKNIPSDACIISNCNALARYASLCQENNLVPIVEPEILINGDHSIETCDKYTRQTLDILFEQLNLLNVQLSGTILKPSMVISGDKNTNRAAPETVAEMTINCLKDKCPDDLGGVAFLSGG

SEQ ID NO: 149150 - protein, 142 aa, Unknown
  Bacterial polypetide isolated from the Sargasso Sea
MEKSILVEIANKMMMRPKGILAMDESSPTIAKRLASINVDNSEENRRRYRELIVTAPNLSDYISGAILFEETFDQKMNDGTLFRDYLASIGILPGIKVDKGAKDLSCHPNEKITEGLDGLRERLAAYYENGAKFCKWRAVIA

SEQ ID NO: 149151 - protein, 64 aa, Unknown
  Bacterial polypetide isolated from the Sargasso Sea
MSELNKIAVKIIGKGKGILAADESTGTMTKRLESVKVSSTPENRLLFRETLFSATGMKECIGGV

SEQ ID NO: 149152 - protein, 125 aa, Unknown
  Bacterial polypetide isolated from the Sargasso Sea
MSELNNIVLKILSNGKGILAADESTGTMTKRLGAVGVESTTENRLLFRETLFSSESMKKCIGGVILYDETIKQNSKSKKTIPELISTSGAVPGIKVDTGAKVLAGSPDEKITEGLDGLRERLKEY

SEQ ID NO: 149153 - protein, 126 aa, Unknown
  Bacterial polypetide isolated from the Sargasso Sea
MSELNKIALQILSNGKGILAADESTATMTKRLNSVKVHSDENNRLLFRQTLFSSSSMKDCIGGVILYDETIRQKTSNGKTIPELIHSSGSLTGIKVDTGAKILAGSKEEKVTEGLDGLRERLKDYY

SEQ ID NO: 149154 - protein, 168 aa, Unknown
  Bacterial polypetide isolated from the Sargasso Sea
MSELKSIVNKIVSSGKGILAADESTGTMTKRLESVNVVSTSDNRLNFRNTLFTSSAMKTCIGGVILYDETIRQENNSKKIPEIISQNGTVPGIKVDTGAKVLANSSEEKITEGLDGLRERLKDYYNLGARFTKWRGVYSISEKYPSKLAISSNAHALARYAALVQEAG

SEQ ID NO: 149155 - protein, 67 aa, Unknown
  Bacterial polypetide isolated from the Sargasso Sea
MNFESLEDIANHIVSDGKGILAADESTPTITKRFDTIDTESTEENRRDYRELLFRAEGMKNNIGGVI

SEQ ID NO: 149156 - protein, 92 aa, Unknown
  Bacterial polypetide isolated from the Sargasso Sea
MSELHAVAHKMVKKGKGILAADESTPTCTKRFASINTDSSAESRNFYRNMLFTTEDIEKYISGVILFDETFHQSELSSGMKFPDYLTSKDIL

SEQ ID NO: 149157 - protein, 118 aa, Unknown
  Bacterial polypetide isolated from the Sargasso Sea
KNSQEYVSDKFNLLSNSLDFVFHGGSGSSVEEIREAIDYGVIKMNIDTDLQFAFTEGVRDYMLKNSSYLMTQIGNPEGSDIPNKKYYDPRVWLRSGEETLKIRLIKAFEDLNNINTLD

SEQ ID NO: 149158 - protein, 159 aa, Unknown
  Bacterial polypetide isolated from the Sargasso Sea
MSELYSITEKIISKSKGILAADESTGTMTKRLDAVNVQSTPENRLLFREILLSSESMKDCIGGVILYDETIKQIASNKKTIPELISNSGAVPGIKVDTGAKVLANSKNEKITEGLDGLRDRLEIYYKLGARFTKWRGVYIISDKYPSKLAIYSNAHALL

SEQ ID NO: 149159 - protein, 62 aa, Unknown
  Bacterial polypetide isolated from the Sargasso Sea
MSELNNIVLKILSHGKGILAADESTGTMTKRLGAVNVESTPENRLMFRETLFSSESMKTCIG

SEQ ID NO: 149160 - protein, 90 aa, Unknown
  Bacterial polypetide isolated from the Sargasso Sea
ECVPDNLPAITFLSGGQSEIVSTEHLDAMNKIGGFPWKLSFSYGRALQAGALKAWLGKSENIDAAQSAFSHRALMNKKAALGQWSKDLEV

SEQ ID NO: 149161 - protein, 143 aa, Unknown
  Bacterial polypetide isolated from the Sargasso Sea
MALVPLRLLLDHAAENGYGIPAFNVNNLEQVQAIMEAADETDSPVILQASRGARNYAGEIFLRHLILAATETYPHIPVVMHQDHGNAPDTCYSAAINGFTSVMMDGSLEADAKTPASYEYNVAVTKQVVDFAHSVGVSVEGEL

SEQ ID NO: 149162 - protein, 130 aa, Unknown
  Bacterial polypetide isolated from the Sargasso Sea
MSELNKIALKIISNGKGILAADESNGTMTKRLEAVDVHSTPENRLLFRELILSSESMKECIGGVILYDETIKQNSSFGKSIPDLISSSGAIPGIKVDTGTKNLTNSSEEKITEGLDGLKERLKKYYKLGA

SEQ ID NO: 149163 - protein, 248 aa, Unknown
  Bacterial polypetide isolated from the Sargasso Sea
MGDLNNIEEIANYIVADGKGILAADESNPTCGKRFDSIGVESNEENRRDYRELLFRSEGMKGNIGGVILFDETIRQKAEDGTPLVNVILDQGALPGIKVDQGLKPIGDSEESLTQGLEGLDERLKEYYSLGAKFTKWRAVIKVGDSLPSEEAVTSNMNALAEYAKLVQENNMVPMVEPEVLMDGNHSIDQCFEATSRSLECLFRLLKEKGVNIKGTILKPNMVTSGSESSNKADINEVANQTIRCLKM

SEQ ID NO: 149164 - protein, 120 aa, Unknown
  Bacterial polypetide isolated from the Sargasso Sea
MSELNNIALKILSNGKGILAADESTGTMTKRLKAVNVESTEENRQLFRETLFSSESMNKCIGGVILYDETIKQNSKSKKTIPELISSSGAVPGIKVDTGVKILASSPNEKITEGLDGLRE

SEQ ID NO: 149165 - protein, 176 aa, Unknown
  Bacterial polypetide isolated from the Sargasso Sea
MKLLTLKFIITFIYLISSSPSYAIQTPNLKNLVIHKDPKKLEKINFKNINNETINLNKFENSLIIINFWATWCAPCIEEMPSLSRLQANSNFNNLQIIPINVGRESIEKSKNFYEKLNINNLEIYFDKKTELVNKFLLRGLPTTIFINKKGEEFARIIGFVNFDDKKIIKWLQKYD

SEQ ID NO: 149166 - protein, 90 aa, Unknown
  Bacterial polypetide isolated from the Sargasso Sea
MNFNSLSEIASYIVSDGKGILAADESNPTCTKRFDSIGVESTEDNRRDYRELLFRSEGMKGNIGGVILFDETIRQTAADGTSLVDVITNP

SEQ ID NO: 149167 - protein, 72 aa, Unknown
  Bacterial polypetide isolated from the Sargasso Sea
MSELHAVAHKMVEKGKGILAADESNPTCTKRFESINTDSTAESRNFYRNMLFTTEDIEKYISGVFLFDETFH

SEQ ID NO: 149168 - protein, 70 aa, Unknown
  Bacterial polypetide isolated from the Sargasso Sea
MKFENLSQIARYIVEDGKGILAADESNPTCKKRFDTISVESTEGNRRDYRELLFSSEGMEGNIGGVILFD

SEQ ID NO: 149169 - protein, 149 aa, Unknown
  Bacterial polypetide isolated from the Sargasso Sea
MSELNNTALKILGNGKGILAADESTATMTKRLNGVNVPSTPENRLLFRETLFSSSSMKDCIGGVILYDETIKQTSSKKNTIPELISDTGSLPGIKVDTGAKILAGSPDEKVTEGLDGLRERLKEYYKLGAKFTKWRGVYNITKSYPKQT

SEQ ID NO: 149170 - protein, 209 aa, Unknown
  Bacterial polypetide isolated from the Sargasso Sea
RLVDYESQGAKFCKWRAVITIGDKIPSESCIRSNCNALARYASLCQENNLVPIVEPEVLINGDHSIEKCDEVTRETLRCLFDELKSIDIYFPGVILKPSMVISGDTNTHRADYETVADMTVNCLKELCPKDLGGIAFLSGGQTNDEATTHLKIMNSGKYELPWRVTFSYARAIQQSALNAWSGKDENHEEAQSILGERAKLCSDASIGS

SEQ ID NO: 149171 - protein, 183 aa, Unknown
  Bacterial polypetide isolated from the Sargasso Sea
MNLEEIAKKMCAKGKGILAADESSGTIAKRFKSINVESTEANRLKFRETLFSSSAMRNYIGGVILFDETIKQKSTLGPTIPELISKNNAIPGIKVDKGAKPLASSQEETITEGLDGLRDRLKEYYTLGARFTKWRAVYKISENFPSKLSIKSNAHALGRYAALVQEAKMVPIIEPRSFDGWIS

SEQ ID NO: 149172 - protein, 246 aa, Unknown
  Bacterial polypetide isolated from the Sargasso Sea
LYLGIKVDTGAKDLAFNSNEKITEGLDGLRERLIEYFNLGAKFAKWRAVITIDDSIPSDLCINSNAHALARYAALCQENGIVPIVEPEVLMDGEHTIERCYDVTKKTLDVVFNELIAHGVNLKGICLKPNMIIDGSLTSEKSSSKMVAEKTISCFKEVVPEDVPGIVFLSGGQTEIEATENLDQMNKIGNLPWNLSFSYGRALQASALQAWSGKVENEEIASATFDHRAKMNSLATLGKWESELEK

SEQ ID NO: 149173 - protein, 266 aa, Unknown
  Bacterial polypetide isolated from the Sargasso Sea
IRQKTSEGSTFPDYLDKVGIIPGIKVDAGAKPFSSHPNEKITEGLDNLTERMKEYSSLGAKFAKWRAVIAIGENIPSSACMLANSHALARYASICQEINIVPIVEPEVLMDGSHNINKCFEVTNTMQSILFETLDKLDINFSGIILKPNMITPGASCVEKSSPEEIAELTVKCLGNNVPKEVPGIAFLSGGQSDEDASNNLSNINKINNNPWKVTFSYGRALQLEAMKKWGGNNQNIIEAQKIISKRAYMNSLAASGKYDLSMESK

SEQ ID NO: 149174 - protein, 117 aa, Unknown
  Bacterial polypetide isolated from the Sargasso Sea
MSLDNIEEIASFIVADGKGILAADESNPTCGKRFDSIGVESTEENRRDYREMLFRSKGIKGNIGGVILFDETIRQSAEDGSLLRDLISEQGALPGIKVDKGLKPIEDCPGRTVYVSL

SEQ ID NO: 149175 - protein, 227 aa, Unknown
  Bacterial polypetide isolated from the Sargasso Sea
TVTVGLDGLDDRLKEYTEMGAKFTKWRAVIKIGDGIPSDECIDANMDALAQYAKSAQNNGMVPIVEPEVLMDGDHSIDDCYDATERSLKSLFKHLEKYEVNIKGTLLKPNMVTSGSEHEVQAGIDEVANKTIECLVKNVPQDLPGVAFLSGGQSDVLATAHLDAMNKIGGFSWKLSFSFGRALQAAALKAWGGKPENVFIAQDELSHRAEMNKLASLGQWEKDLEER

SEQ ID NO: 149176 - protein, 208 aa, Unknown
  Bacterial polypetide isolated from the Sargasso Sea
MEKSVNNTEQLERIRTDKGFIAALDQSGGSTPKTLELYGISEDQYEDEEEMFQLIHNMRTRIITSPSFSQNHILGAILFEQTMERLIYGMPTADFLWKTKKIVPFLKVDKGLEDPNNGVRLMKDIPDLSETLKKALEHGIFGTKMRSVIDEDNSLGIDKIVDQQFEFGKIILDAGLTPIIEPEVTINISHKSKAEEILKKSLTKNLNK

SEQ ID NO: 149177 - protein, 155 aa, Unknown
  Bacterial polypetide isolated from the Sargasso Sea
MSELNKIALKIISNGKGILAADESNGTMTKRLETVRVNSTPENRLSFREILFSSDGMKDCIGGVILYDETINQISKNGKSIPDLIAMSGAVPGIKVDTGAKDLAKSPQEKITEGLDGLRDRLKKYYDLGARFAKWRGVYSINEKCPSEMAISSNA

SEQ ID NO: 149178 - protein, 286 aa, Unknown
  Bacterial polypetide isolated from the Sargasso Sea
LFSSDGMKDCIGGVILYDETINQISSTGKSIPDLISSSGAVPGIKVDTGAKDLANSPKEKITEGLDGLRDRLKTYYDLGARFAKWRGVYSIGEKYPSELAISTNAHALARYSALVQESGMVPIVEPEVLMDGNHSAEVCFNKTSEVIKKCFEELILNKVDLSGIILKPNMILSGSLSENKISSEEVSSKTLECLKNSVPNEVPGIAFLSGGQSEIEATENLNLINKNNNTNFIMTYSYGRALQQSALKVWSNDVKNVEATQTTFNHRAKMCTLAAQGKWAIELENK

SEQ ID NO: 149179 - protein, 114 aa, Unknown
  Bacterial polypetide isolated from the Sargasso Sea
MDLSSLNSIAQSMVAANKGILAADESTPTIGKRFATIDTESTESNRQIYRNLLFTSPNVSEYISGVILFDETIRQSTNDGTPFAEHLTSLGIVPGIKVDKGVKGIPFCDGETVT

SEQ ID NO: 149180 - protein, 176 aa, Unknown
  Bacterial polypetide isolated from the Sargasso Sea
MALVPLRLLLDHAAENGYGIPAFNVNNLEQVQAIMEAADETDSPVILQASRGARSYAGEIFLRHLILAATETYPHIPVVMHQDHGNEPSTCYSAAINGFTSVMMDGSLEADAKTPASYEYNVNVTKQVVDFAHSVGVSVEGELGCLGSLETGKGEAEDGHGFEGELSKDMLLTDPA

SEQ ID NO: 149181 - protein, 165 aa, Unknown
  Bacterial polypetide isolated from the Sargasso Sea
VPIVEPEVLMDGKHTIELCYDVTKKTLDVVFNELIAHGVNLKGICLKPNMIIDGTLTSEKSSSKTIAEKTISCFKEVVPGDVPGIVFLSGGQTEIEATENLDQMNKIGNLPWNLSFSYGRALQASALQAWSGKVENEEIASTTFDHRAKMNSLATLGKWESELEK

SEQ ID NO: 149182 - protein, 294 aa, Unknown
  Bacterial polypetide isolated from the Sargasso Sea
MSFDQQLKIVKKREGFIAALDQSGGSTPKALRLYGIGESEYSGEDQMYDRIHEMRSRIVTSPQFESTRILGAILFEQTMGRQIEGLGSAQYLWERKQVVPFLKVDKGLAEEINGVQLMKPMPDLDALLEEAGKNSVFGTKMRSVIKVSNPEGVKAVVDQQFEIGKRIIAAGLVPILEPEVDINSSTKAEAEQMLLDLLMENIKGLDSSQKIMLKLSLPDQNNHYALCIEHPNVIRVVALSGGYSREEANARLSRNQGMTASFSRALTEGLSAGQSDSEFNQKLDSTIDSIFQAS

SEQ ID NO: 149183 - protein, 214 aa, Unknown
  Bacterial polypetide isolated from the Sargasso Sea
KEYYKLGAKFTKWRGVYTISKDFPSKLSIHSNAHALARYSALVQECNMVPIVEPEVLMDGDHSAKECFQKTSEVIKKCFEELILHKVDLKGVILKPNMILAGNKSKEKISNEEVAKLTLECLKSSVPSEVPGIAFLSGGQSELEATENLNLINKLNNTGFIMSYSYGRALQQGALKFWSKNIKDIEGTQKVFNHRAKMNTLAAQGKWSKEIESK

SEQ ID NO: 149184 - protein, 207 aa, Unknown
  Bacterial polypetide isolated from the Sargasso Sea
MSDLNKIAKKILENGKGILAADESTGTMTKRLENVNVPSTPENRLLFRETLFSASSMIECIGGVILYDETIKQETSKKNKIPELISKMGSFPGIKVDTGAKILAGSPNEKITEGLDGLRDRLNEYYKLGAKFTKWRGVYNISKDFPSKLSIHANAHALARYSALVQECNMVPIVEPEVLMDGEHSAKDCYEKTSEVIKKCFDELILH

SEQ ID NO: 149185 - protein, 192 aa, Unknown
  Bacterial polypetide isolated from the Sargasso Sea
FPSKLQINSNAHALARYSALVQESGMVPIVEPEVLMDGNHSAEVCLNKTSEVIKKCFEELILHKVDLSGIILKPNMILAGNQYKKKISSEEVSAKTLQCLKSSVPSEVPGIAFLSGGQSEIEATENLNTINKNNNSHFIMTFSYGRALQQSALKIWSKNIKDIETTQKTFNHRAKMCTLAAQGKWASEIENK

SEQ ID NO: 149186 - protein, 289 aa, Unknown
  Bacterial polypetide isolated from the Sargasso Sea
MAADESTGTMTKRLDGVNVKSSPENRLFFRETLFTSARMKDCIGGVILYDETIKQTSKSGKKIPELISDLNSVPGIKVDTGAKTLANSEEEKITEGLDGLRDRLKEYYKLGARFTKWRAVYIISDKYPSKLSIQTNAHALARYSSLVQESGMVPIVEPELLMDGNHTADDCYKKTSEVIKKCFDELELHKIDLKGIILKPNMILPGSSSNKKISNEKIAKLTVKCLKESVPSEVPGIAFLSGGQTEVEATENLNQINIQNNTNFIMTFSYGRALQQSALKFWSKDIKNI

SEQ ID NO: 149187 - protein, 263 aa, Unknown
  Bacterial polypetide isolated from the Sargasso Sea
KRLKSVNVESNEKNRLNFRETLFSSEGMKNYIGGVILFEETLKQKSKKGISIPDLIAQSGSVPGIKVDKGAKTLAGSPDEKITEGLDGLRDRLNEYYKLGARFTKWRAVYSISEKYPSLQAIKSNAHALARYAALAQEAKMVPIVEPEVLMDGNHNIEKCFNVTTDVLNECYEQLAIHKISLEGTILKPNMILPGSSCKEKVSSQEIAKKTMECLKKNVPSEVTGIAFLSGGQTEKEATKNLNEINKINDTNFLISFSYGRAL

SEQ ID NO: 149188 - protein, 294 aa, Unknown
  Bacterial polypetide isolated from the Sargasso Sea
NFRQTLFNSSAMKDYIGGVILFDETIRQKTTLGPSVPELISNHGAIPGIKVDKGAKPLAGSYDETITEGLDGLRERLKEYYDLGARFTKWRAVYKISNKFPSSQSIKSNAHALARYAALVQEAKMVPIVEPEVLMDGSHNIDRCYQVTTNVLNECYNELEIHKVDLKGTVLKPNMVIPGSECKDKSSHEEIAKKTLDCLKKNVPNDVPGIAFLSGGQSEIESSKNLNEINKINDSNFLITFSYGRGLQASALKEFGKNQENVAKIQKAFNHRAKMNGLSSKGEWSEDLEKEFAA

SEQ ID NO: 149189 - protein, 248 aa, Unknown
  Bacterial polypetide isolated from the Sargasso Sea
MLDKLKTQTGFIAALDQSGGSTPKALRLYGIEESEYSSDEEMFNLVHEMRTRIITSTPFSGERVLGAILFENTLDREIEGMSSAHYLWQKKRVIPFLKVDKGLAEESNGVQVMKPMPGLDALLAKAVAQDVFGTKMRSVVKLANHQGIKDVVAQQFEVGKQILAAGLVPIIEPEVDIHSPQKAEAEALLKLEILTQLNLLNEGQEVMLKLTLPTEANFYKELVDHPRVLKVVALSGGYSREEANAKLA

SEQ ID NO: 149190 - protein, 157 aa, Unknown
  Bacterial polypetide isolated from the Sargasso Sea
SHTIDRCYEVTSQVLIDCFNELKINNVNLKGIVLKPNMILPGANYKQKASTDEIASKTLDCLKKTMPKEVPGVAFLSGGQSEIEATKNLNAINKINDTNFNFTFSYGRALQQSALKTWAKSMNDVKSIQKVFDHRAKMNGASTEAKWEEKNEQNFAA

SEQ ID NO: 149191 - protein, 249 aa, Unknown
  Bacterial polypetide isolated from the Sargasso Sea
DSGAVPGIKVDTGAKNLANSPEEKITEGLDGLRERLKKYYELGARFTKWRGVYSISDNYPSKLAIHSNAHALARYAALVQECEMVPIVEPEVLMDGDHSADQCLKKTSEVIKKCFEELILHKIDLSGIILKPNMILAGSNSKNKISNEEVSNKTLECLKNSVPTEVPGIAFLSGGQSEVEATENLNLISKNNSTNFIMTYSYGRALQQSALKFWSKDITKFAETQDVFNHRARMCTLAAQGKWTSDLEN

SEQ ID NO: 149192 - protein, 138 aa, Unknown
  Bacterial polypetide isolated from the Sargasso Sea
MGIEEIAKQMVAKGKGILAADESTGTMEKRLKSVNIECTEKNRLHFRETLFSSGSMKNCISGVILFDETLRQTSSSGISIPELIKKSGSIPGIKVDKGAKVLAGSDKEKVTEGLDGLRGRMEEYYKLGARFAKWRAVY

SEQ ID NO: 149193 - protein, 228 aa, Unknown
  Bacterial polypetide isolated from the Sargasso Sea
MKSKFIYGNKTQKLFELAKEKRFALPAINVSGTNTINAVLETASEVNSPVIIQFSHGGSHFIAGKGINNSSHNASISGSIAGAYHIHNVCENYKGKVIIHTDHCSRKNLPWIDGLLIHGSDFYKKNGYPLFSSHMIDLSDESIEDNINTCKEYLKKLTDLEMTLEIELGITGGEEDGVDNTGIDSTKLYTQPEEVAYAYSELVSISDNFIIAAAFGNVHGVYKPGNVS

SEQ ID NO: 149194 - protein, 239 aa, Unknown
  Bacterial polypetide isolated from the Sargasso Sea
EYNVAVTKKVVDFAHSVGVSVKGELGCLGSLETGKGEAEDGHGFEGELSTDMLLTDPQEAADFVAKTKVDALAIAIGTSHGAYKFTRKPTGEVLAISRIAEIHKALPNTHLVMHGSSSVPQEWLDIINKYGGEIPQTYGVPVEEIQEGIRNGVRKVNIDTDNRLAFTAAVREAAFADKANFDPRHFNKPARKYMKQVCLDRYKQFWCEGQASKIKQNSTNYFADLYAKGDLDPKVKAAV

SEQ ID NO: 149195 - protein, 142 aa, Unknown
  Bacterial polypetide isolated from the Sargasso Sea
NNRRDYREMLFRSKGMKENIGGVILFDETLRQDAKDGTPLKELISNSGALPGIKVDKGLVPLVDGSDEVVTQGLDGLDERCSEYDSLGAKFTKWRAVIKIGDSMPSDDCINANAKALADYAAIAQSNNMVPIVEPEVLMDGD

SEQ ID NO: 149196 - protein, 167 aa, Unknown
  Bacterial polypetide isolated from the Sargasso Sea
MVPIVEPEVLMDGEHSADICLSKTSEVIKKCFEELILHKVDLSGIILKPNMILAGTQSKERATSEEVSNKTLECLKNSVPSDVPGIAFLSGGQSELEATENLNLINKINNTNFIMTYSYGRALQQSALKVWSKNIKDIEGTQKTFNHRAKMCTLAAQGKWVRELESK

SEQ ID NO: 149197 - protein, 279 aa, Unknown
  Bacterial polypetide isolated from the Sargasso Sea
NVNNLEAIRAIMEGAKELNSPVILQASGAARKYAGPIFVKKLVEAAMDEFSDIPTVLHQDHGGSPSDCKNCIELGFTSVMMDGSLMDDQKTPSDFDYNVRVTKETTDMAHALGVSVEGEIGCLGSLETGTGEKEDGVGAEGKLDHDQLLTDPNEASDFVKATNVDALAIAIGTSHGAYKFSRPPTGDILAIDRIKEIHSRLPNTHLVMHGSSSVPQDLIKTINEYGGKIKETYGVPVSEIQEGIKHGVRKVNVDTDLRLAATAAVRKYFHENPSQFDPR

SEQ ID NO: 149198 - protein, 240 aa, Unknown
  Bacterial polypetide isolated from the Sargasso Sea
PASYEYNLDITRRVSEMAHHAGVSVEGELGVLGSLETGEGEQEDGHGAAGKLSEDQLLTDPDQAVVFVKDTKVDALAIAMGTSHGAYKFTRKPDGEILAMNVVEEINNRLPNIHLVMHGSSSVPQELQDVFNAHGGEMPQTWGVPLEEIERGIKHGVRKVNIDTDCRLAMLGIIRKIANENKAEFDPRKFLKPAMDAMEALCADRFERFGTAGNAARIKPISLSAMAVRYTNGSLDPSIN

SEQ ID NO: 149199 - protein, 268 aa, Unknown
  Bacterial polypetide isolated from the Sargasso Sea
MNIEEIAKKMCPKGKGILAADESTGTIAKRFKSINVENLEKNRLTFRQTLFDSSGMKDYIGGVILFDETIKQKSTLGPTIPELISKSGAIPGIKVDKGAKPLAGSNEETVTEGLDGLRERLKEYYNLGARFTKWRAVYKISNKHPSSQSIKSNAHALARYAALVQEANMVPIIEPEVLMDGSHDIETCYKTTTNVLNECYNELEIHKIFLKGTVLKPNMIIPGSDCKNKSSSEEIAKKTLDCLKKNVPSEVPGIAFLSGGQTEIEASK

SEQ ID NO: 149200 - protein, 216 aa, Unknown
  Bacterial polypetide isolated from the Sargasso Sea
MAHACGVSVEGEIGCLGSLETGEAGEEDGIGAAGKLSHDQLLTDPEEAAQFVADTDVDALAIACGTSHGAYKFTRPPTGDILAMDRIKAIHSRIPNTHLVMHGSSAVPQNWLEVINEFGGEIPETYGVPVEQVVEGIKHGVRKVNIDTDLRLASTGSIRRFLAEHPAEFDPRKYLAASLEAMKAICIDRYEAFGTAGNASKIQPLSLADMQARYAA

SEQ ID NO: 149201 - protein, 176 aa, Unknown
  Bacterial polypetide isolated from the Sargasso Sea
YSALVQECNMVPIVEPEVLMDGDHSADICLRKTSDVIKKCFDELILNKVDLSGIILKPNMILAGNNSKVKISNEEVAQKTLQCLKNSVPTEVPGIAFLSGGQSEIEATENLNLINKNNNTQFIMTYSYGRALQQSALKIWSKNTKDIKATQSTFNHRAKMCTLAAKGEWSFELENK

SEQ ID NO: 149202 - protein, 217 aa, Unknown
  Bacterial polypetide isolated from the Sargasso Sea
MLISLRQLLDDAADHGYGVPAFNINNMEQGLAILKAADRVDAPVIIQASRGARNYAGDVMLQAMVKALAEMYPHIPVCMHQDHGNNEATCMTAIQYGFTSVMMDGSLEADAKTPASYDYNLDITKRVTEMAHHAGVSVEGELGVLGSLETGKGEQEDGHGATGKLSEDQLLTDPDQAVDFVKQTKVDALAIAMGTSHGAYKFTRKPDGEILAMNVVE

SEQ ID NO: 149203 - protein, 192 aa, Unknown
  Bacterial polypetide isolated from the Sargasso Sea
ELAIKTNAHALARYAALVQETKMVPIVEPEVLMDGQHDIMKCYKVTANVLQECYKELKLHNVNLKGTILKPNMILPGNKSKDKSNSAEIAKLTLKCLKENVPNEVPGIAFLSGGQTEIEATQNLNEINKINDTNFLISFSYGRALQQSALKNWAKDIKDTSNTQKIFNHRSKMNGLSTSAKWTMEQENQINA

SEQ ID NO: 149204 - protein, 167 aa, Unknown
  Bacterial polypetide isolated from the Sargasso Sea
MVPIVEPEVLMDGDHSADQCLKKTSVVIKKCFEELILHKIDLSGIILKPNMILAGSNSKNKISNEEVSNKTLECIKNSVPTEVPGIAFLSGGQSEIEAAENLNLISKNNTTNFIMTYSYGRALQQSALKFWSKDITKITETQDVFNHRARMCTLAAQGKWTNELENK

SEQ ID NO: 149205 - protein, 201 aa, Unknown
  Bacterial polypetide isolated from the Sargasso Sea
WRGVYNISKDHPSKLSIQSNAHALARYSALVQECNMVPIVEPEVLMDGEHSAKDCYEKTSEVIKKCFEELILHKVDLKGIILKPNMILAGNKCKNKISNEEVAKLTLKCLKDSVPSEVPGIAFLSGGQSEIEATENLNLISKYNDTDFIMSYSYGRALQQSALKFWSQDTLNIDGTQKIFNQRAKMNTLAAQGKWSKELEN

SEQ ID NO: 149206 - protein, 171 aa, Unknown
  Bacterial polypetide isolated from the Sargasso Sea
MTLNEIAKKMCAKGKGILAADESTGTIAKRFKSINVENIEKNRLNFRQTLFNSSAMKDFIGGVILYDETIRQKTTLGPSIPELISKHGAIPGIKVDKGAKPLAGSSDETVTEGLDGLRERLKEYYDLGARFTKWRAVFKISDKIPSAQSIKSNAHALARYAALVQEAKMVP

SEQ ID NO: 149207 - protein, 242 aa, Unknown
  Bacterial polypetide isolated from the Sargasso Sea
IKVDTGAKVLAGSPDEKITEGLDGLRERLKEYYKLGAKFTKWRGVYNISKNYPSKLSIQANAHALARYSSLVQECNMVPIVEPEVLMDGEHSSKECYEKTSEVIKKCFDELILHKVNLKGIILKPNMILPGNKSKEKISNEEVAKLTLECLKNSVPSEVPGIAFLSGGQSELEATENLNLINKYNNSNFIMSYSYGRALQHSALRFWSKDIQNIEGTQKIFNHRAKMNTLASQGKWSKDLEN

SEQ ID NO: 149208 - protein, 169 aa, Unknown
  Bacterial polypetide isolated from the Sargasso Sea
CEMVPIVEPEILMDGNHSAEDCLNKTSEVIKKCFEELILHKVDLSGIILKPNMILAGNQSKYKISNEEVSLKTLQCLKDSVPNEVPGIAFLSGGQSEIEATENLNLINKNNNTNFIMTFSYGRALQQSALKVWSKDIKNTEATQNTFNHRANMCTLAARGKWSSELENK

SEQ ID NO: 149209 - protein, 139 aa, Unknown
  Bacterial polypetide isolated from the Sargasso Sea
MAIISLRQLLDHAAENNYGVPAFNVNNLEQIRAIMEGAKEVNSPVIVQASAGARKYAGPRFIKSMMEAAVEEFPEIPIVMHQDHGGSPKDCKVCIDLGFSSVMMDGSLLEDQKTPSDFEYNVKVTKETVDMAHSVGVSV

SEQ ID NO: 149210 - protein, 220 aa, Unknown
  Bacterial polypetide isolated from the Sargasso Sea
MSELNKIALKIISNGKGILAADESNGTMTKRLEAVNVKSTPENRLSFREILFSSHGMKDYIGGVILYDETINQISSTGKSIADLISSSGAVPGIKVDTGAKDLANSPKEKITEGLDGLRDRLKKYYDLGARFTKWRGVYSIGENYPSKLAISSNAHALARYSALVQENGMVPIVEPEVLMDGNHSAEVCFNKTSEVIKKCFEELILHKVDLSGIILKPNM

SEQ ID NO: 149211 - protein, 112 aa, Unknown
  Bacterial polypetide isolated from the Sargasso Sea
MSELNKMALRIISDGKGILAADESNATMTKRLEAVNVKSTPENRLSFREILFSSEGMKDCIGGVILYDETINQISSKGKSIPDLISASGAVPGIKVDTGTKDLANSRQEKIT

SEQ ID NO: 149212 - protein, 245 aa, Unknown
  Bacterial polypetide isolated from the Sargasso Sea
MSELNNIALKILEKGKGILAADESTSTMTKRLDSVNVPSTPENRLLFRETLFSSSCMTECIGGVILYDETIKQKTSKKNKIPELISEMGAAPGIKVDTGAKVLAGSPDEKITEGLDGLRERLKEYFKLGAKFTKWRGVYNITKNFPSKLSIQSNAHALARYSSLVQECNMVPIVEPEVLMEGEHSAKECYEKTSEVIKKCFEELILHRVDLKGIILKPNMILAGNKSEDKISNEEVAKLTLKCLK

SEQ ID NO: 149213 - protein, 186 aa, Unknown
  Bacterial polypetide isolated from the Sargasso Sea
MPLVPLRILLDHAAENDYGLAAFNVNNMEQIQAILEAAKETDSPVIVQASRGARAYSQDNYLRHLMLAAAELYPGIPIAMHQDHGNSPATCESAIDNGFTSVMMDGSLKEDGKTPADFDYNVQVTTEVVKQAHSRGVSVEGELGCLGSLESGQGEAEDGHGAEGVLSQDQLLTDPDEAARFVEATG

SEQ ID NO: 149214 - protein, 224 aa, Unknown
  Bacterial polypetide isolated from the Sargasso Sea
FSSHMLDLSAEEIDFNLLECERLLKRMSKIGLSLEIELGVTGGEEDGVGSDDDIGADNPLLYTQPEDCLRAYKLLSPIGHFSLAASFGNVHGVYKPGNVKLRPEILKNSQDLVRETCGTGEKPLDLVFHGGSGSDKEKIAEALSYGVFKMNIDTDTQFAFANAVGEYVNQNEKAFKYQIDPDDGTPYKKQYDPRKFLRLAEESMVKRLDEAFSDLGSVGKSLAL

SEQ ID NO: 149215 - protein, 270 aa, Unknown
  Bacterial polypetide isolated from the Sargasso Sea
SEKNRLVFRQTLFSSEAMKHYIGGVILFDETIKQKTTLGPTVPELISKNDAVPGIKVDKGAKSLAGSSDETVTEGLDGLRERLKDYYELGARFTKWRAVYKIGNQFPSSQAIKSNAHALARYAALVQEAKMVPIVEPEVLMDGSHDIDKCYQVTTDVLNECYNELVIHKVDLKGTVLKPNMVIHGSESKKKSSSEEIAKKTLECLKKNVPSNVPGIAFLSGGQSEVEASKNLNEINKINDTKFLITFSYGRGLQASALKAFGKDQNDKSN

SEQ ID NO: 149216 - protein, 150 aa, Unknown
  Bacterial polypetide isolated from the Sargasso Sea
IKISPNFMVAAAFGNVHGVYRPGNVKLTPTILQKSQEYVSLMHNTESNPINFVFHGGSGSSRNEIREAIGYGAVKMNLDTDMQWAFCSGVNEYHKKHQLYLNSQIGNPDGEDKPNKKYYDPRKWLLEGEKSMIERLRKSFTDLNNVNTNI

SEQ ID NO: 149217 - protein, 212 aa, Unknown
  Bacterial polypetide isolated from the Sargasso Sea
MTELNKIALKIISDGKGILAADESNSTMTKRLEAVGVSSTPENRLLFRESIMSSQSMKECIGGVILYDETINQTTSFGKSIPDLISSSGAVPGIKVDIGTKDLANSSEEKITEGLDGLRERLKKYYSLGARFTKWRGVYIISDKYPSTLAINSNAHALARYSALVQESKMVPIVEPEVLMEGDHSADSCLKKTSKGIKKCFDELILHKVDLQ

SEQ ID NO: 149218 - protein, 249 aa, Unknown
  Bacterial polypetide isolated from the Sargasso Sea
MSDLNKIALEILNSGKGILAADESTGTMTKRLDNVSVPSTPENRLLFRETLFSSSCMKECIGGVILYDETIKQTSLKNIKIPDLITSMGSHPGIKVDTGAKVLAGSTNEKITEGLDGLRERLKEYNNLGAKFTKWRGVYIISKDYPSKLSIQSNAHALARYSALVQECNMVPIVEPEVLMDGNHSAEECYQKTSEVIKKCFDELILHKIDLSGIILKPNMILSGNKSKNKISNEQIAKFTIECLKNSVP

SEQ ID NO: 149219 - protein, 159 aa, Unknown
  Bacterial polypetide isolated from the Sargasso Sea
MLDKLKTQTGFIAALDQSGGSTPKALRLYGIEESEYSSDEEMFNLVHEMRTRIITSTPFSGERVLGAILFENTLDREIEGMSSAHYLWQKKRVIPFLKVDKGLAEESNGVQVMKPMPGLDALLAKAVAQDVFGTKMRSVVKLANHQGIKDVVAQQLKWV

SEQ ID NO: 149220 - protein, 138 aa, Unknown
  Bacterial polypetide isolated from the Sargasso Sea
NELKINNVNLKGIVLKPNMILPGANYKQKASTEEIASKTLDCLKKTMPKEVPGVAFLSGGQSEIEATKNLNAINKINDTNFNFTFSYGRALQQSALKTWAKSMKDVKSIQKVFDHRAKMNGASTEAKWEEKNEQNFAA

SEQ ID NO: 149221 - protein, 225 aa, Unknown
  Bacterial polypetide isolated from the Sargasso Sea
ITEGLDGLRERLKEYYKLGAKFTKWRGVYNISKSCPSKLSIQSNAHALARYSALVQECNMVPIVEPEVLMDGDHSAKDCYSKTSEVIKKCFEELILHKVDLTGIILKPNMILAGNKFKDKITSEEVAKLTLECLKNSVPSEVPGIAFLSGGQSEIEATENLDLINKNNDTNFIMSFSYGRALQQSALKFWSKDILNIEGTQKIFNHRAKMNTLAAQGKWSKDLES

SEQ ID NO: 149222 - protein, 196 aa, Unknown
  Bacterial polypetide isolated from the Sargasso Sea
MALISLRQLLDHAAENDYGVPAFNVNNLEQVRAIMEGAASVNSPVILQASAGARKYAGSNFLKHLIQGAIEEFPHIPIVMHQDHGVSPAVCQRSIQLGFSSVMMDGSLAEDGKTPTDFDYNVRVTKTTVEMAHACGVSVEGEIGCLGSLETGMAGEEDGIGAEGKLSMEQLLTDPEEAYRFVDATGVDALAIAVGT

SEQ ID NO: 149223 - protein, 250 aa, Unknown
  Bacterial polypetide isolated from the Sargasso Sea
FNQLGILPGIKVDKGAKQLANTEDEKITEGLDGLRDRLKEYYELGARFTKWRAVITIGENMPTAYCMSTNAHALARYAALCQEQGLVPIVEPEILMDGTHTIEESYQLTTETLYNVFYELVSQGVELEGMVLKPNMVLSGYDCSEQASVEQVAEMTVDCFLNTVPAAVPGIAFLSGGQTDELATAHLSAMNQIDGSPWNLTFSYGRALQAPALKAWSGKDENISNAQEAFMNRAKFNSLATKGEYSKDME

SEQ ID NO: 149224 - protein, 161 aa, Unknown
  Bacterial polypetide isolated from the Sargasso Sea
MSLNNIEDIAAYIVADGKGILAADESNPTCGKRFDSIGVESTEENRRDYREMLFRSKGMKGNIGGVILFDETIRQSAADGTLLRDLITSQDALPGIKVDKGLQPIDDCPGETVTVGLDGLDERLKEYSSMGAKFTKWRAVINIGDGIPTDKCIDANMQALA

SEQ ID NO: 149225 - protein, 238 aa, Unknown
  Bacterial polypetide isolated from the Sargasso Sea
GAKNLANSFEEKITEGLDGLRDRLKKYYELGARFTKWRAVYNINNKYPSKLAIHSNAHALARYSALVQECGMVPIVEPEVLMDGDHSADICFIKTSEVIQKCFEELILHKVDLKGVILKPNMILDGKNSKNKISNEEVSFKTLECLKKSVPSEVPGVAFLSGGQSEIEAVENLNLISRNNDTNFIMTFSYGRALQQSALKIWSKDTKNIKDTQKIFNHRAKMCSLASQGKWSKELESK

SEQ ID NO: 149226 - protein, 142 aa, Unknown
  Bacterial polypetide isolated from the Sargasso Sea
MTLEEIAKKMCEKGKGILAADESTGTIAKRFKSINVENNEKNRLVFRQTLFSSDAMKNYIGGVILFDETIKQKTTMGPSIPELISGNNAIPGIKVDKGAKPLAGSIDETVTEGLDGLRERLKEYYDLGARFTKWRAVYKIGK

SEQ ID NO: 149227 - protein, 213 aa, Unknown
  Bacterial polypetide isolated from the Sargasso Sea
MNLSFPPGVVTGKNVQKVFELAKAKKFALPAVNVIGSNSINAVLETASTLKSPVIIQFSNGGSQFNSGKALSNENQKSAIYGAIAGAKHIHELARRYGAYVILHTDHCSKKLLPWIDGLLDANEDYFNKNGVSLFSSHMIDLSEEPLIENIEICKKYLQRMSLMEMTLEIELGVTGGEEDGVDNTSIDISKLYTQPEEVLYAYKELTMISPQF

SEQ ID NO: 149228 - protein, 108 aa, Unknown
  Bacterial polypetide isolated from the Sargasso Sea
MKIEDIAKKMCAKGKGILAADESTGTMEKRLKSVGVESNEKNRLNFREILFSSSAMKDYIGGVILFDETIRQKSKNGISIPELISKNNSIPGIKVDKGAKNLAGSQKK

SEQ ID NO: 149229 - protein, 238 aa, Unknown
  Bacterial polypetide isolated from the Sargasso Sea
GYSEEHYEKTSSPLFSSHMLDLSGEEIDFNLSECERMLKRMAPIGMSLEIELGVTGGEEDGVGSDDDIGADNPKLYTQPEDCLRAYQLLSPIGHFSLAASFGNVHGVYKPGNVKLRPEILKNSQDLVKETCGTEDKPLDLVFHGGSGSDKAKIAEALSYGVFKMNIDTDTQFAVSKAVGAYVEENSKAFKYQIDPDDGTPYKKKYDPRAWLRAGEVSMVERLDEAFQDLGSVGKTLAP

SEQ ID NO: 149230 - protein, 217 aa, Unknown
  Bacterial polypetide isolated from the Sargasso Sea
SKGVSVRGELGCLGSLETGTGEKEDGVGAEGVLTHSQLLTDPEEAAEFVDQTNVDCLAIAIGTSHGAYKFTKPPTGEVLAIKRIKDIHTKIPNTHLVMHGSSSVPKELLDIINQNGGKIIETYGVPVEEIQEGIKHGVRKVNIDTDLRLAATAAIRKYFNDNPDQFDPRKYLIESKNEMKNIVIKRLKEFKSADQASKIKPIPLSVMSKRYLSGELY

SEQ ID NO: 149231 - protein, 183 aa, Unknown
  Bacterial polypetide isolated from the Sargasso Sea
NAHALARYSALAQESGMVPIVEPEVLMDGNHSADDCYKKTSEVIKSCFDELELNKVDLKGVILKPNMILPGSRSDKKISNEEIAKLTVKCLKDSVPSEVPGIAFLSGGQTDIEATENLNQINIYNNTDFIMTFSYGRALQQSTLKFWSKDIKNIKDTQKLFNHRANMCHLAAQGKWSKELENQ

SEQ ID NO: 149232 - protein, 269 aa, Unknown
  Bacterial polypetide isolated from the Sargasso Sea
LLFREALFTSDSMKDYIGGVILYDETIKQSSKSGKKIPELISNLNSVPGIKVDTGAKTLANSKEEKITEGLDGLRERLKEYYKLGARFTKWRGVYTISDKYPSQLSIKSNAHALARYSALAQECGMVPIVEPEVLMDGNHSADVCYNKTSEVIKSCFDELQLNKVDLKGIILKPNMILPGSSSNKKISKEEIAKLTVKCLKDSVPSEVPGIAFLSGGQSDIEATENLNQINIQNNTNFIMTFSYGRALQKSALKFWSKDIKNITDTQKL

SEQ ID NO: 149233 - protein, 181 aa, Unknown
  Bacterial polypetide isolated from the Sargasso Sea
DALADYAKCAQDNGMVPIVEPEVLMDGDHNIDECYQATERSLKSLFNHIEKKGVNIKGTLLKPNMVTSGKDNSNQASIDEVAEKTLDCLIKNVPAELPGVAFLSGGQSDILATAHLDAMNKIGGFSWKLSFSYGRALQAPSLKAWGGKSENVFISQDELSHRAEMNKLASLGQWAEELEDR

SEQ ID NO: 149234 - protein, 311 aa, Unknown
  Bacterial polypetide isolated from the Sargasso Sea
MSLISLRQLLDHAAENNYGVPAFNVNNLEAIRAIMEGAKELNSPVILQASGAARKYAGPIFVKKLVEAAMDEFSDIPTVLHQDHGGSPSDCKNCIDLGFTSVMMDGSLLDDQKTPSDFDYNVKVTKQTTDMAHALGVSVEGEIGCLGSLETGTGEKEDGVGAEGKLDHDQLLTDPNEASDFVKATNVDALAIAIGTSHGAYKFSRPPTGDILAIDRIKEIHSRLPNTHLVMHGSSSVPQDLIKTINEYGGKIKETYGVPVSEIQEGIKHGVRKVNVDTDLRLAATAAVRKYFHENPSPFDPRKYLLLSKDA

SEQ ID NO: 149235 - protein, 214 aa, Unknown
  Bacterial polypetide isolated from the Sargasso Sea
KKYYDLGARFTKWRGVYSISEKYPSKLAINCNAHALARYSALVQESGMVPIVEPEVLMDGNHSAEVCLSKTSEVIKKCFDELILHKIDLSGIILKPNMILAGKNSNDKISSEEVSHATLECLEKSVPNDVPGIAFLSGGQSEIEATENLDLINKNNNTNFIMTYSYGRALQQSALKVWSKNINDIEGTQNIFNHRARMCTLAAQGKWTQEIENK

SEQ ID NO: 149236 - protein, 177 aa, Unknown
  Bacterial polypetide isolated from the Sargasso Sea
MSELNKIALKILSNGKGILAADESNGTMTKRLKAVNVNSTPKNRLLFREILFSSECMKDFIGGVILYDETINQTTSFGKSIPSLISGSGAVPGIKVDTGAKELANSPGEKITEGLDGLRDRLKKYYELGARFTKWRGVYSISNKYPTTLAINSNAHALARYSALVQESGMVPIVEPE

SEQ ID NO: 149237 - protein, 127 aa, Unknown
  Bacterial polypetide isolated from the Sargasso Sea
MPLISMRQLLDHAAENDYGVPAFNVNNLEQIRAIMEGAQQMNSPVIVQASAGARKYSGAIFIKNMMQAAVEEFPTIPIVMHQDHGGTPDECRECIELGFTSVMMDGSLLADQKTPSNFEYNVKVTKE

SEQ ID NO: 149238 - protein, 157 aa, Unknown
  Bacterial polypetide isolated from the Sargasso Sea
MNIEEIAKKMVEQGKGILAADESTGTMEKRLKSVNVDCTEQNRLHFRETLFSSSAMKSNISGVILFDETIRQKTSEGITVPELIKKNGALPGIKVDKGAKPLAGSNKEKITEGLDGLGTRMKEYYKLGARFAKWRAVYSISTNLPSDQCIKSNAHAL

SEQ ID NO: 149239 - protein, 94 aa, Unknown
  Bacterial polypetide isolated from the Sargasso Sea
KNMPKDVPGVAFLSGGQSEVEATKNLNAINKINDTSFHFTFSYGRALQQSALKTWSKSMKDVSKIQKVFDHRAKMNGASTEAKWSEKLEQSFAA

SEQ ID NO: 149240 - protein, 274 aa, Unknown
  Bacterial polypetide isolated from the Sargasso Sea
MPLISLKQLLDHAAENQYGLPAFNINNMEQGLSIMDAANALNAPVIIQASRGARSYANDIILSKLIEGLIELYPHIPICMHQDHGNSPATCMSAIKYGFSSVMMDGSLLEDGKTPSNYDYNVEVTKKVAEMAHFFGVSVEGELGVLGSLETGTGEAEDGHGAEGNLEINQLLTDPDQAVDFVKRTNVDALAIAMGTSHGAYKFSRKPDGNILAMNIIEQIHKKLPNTHLVMHGSSSVPQDLQDIINENGGEMPQTWGVPLEEIERGIKNGVRKN

SEQ ID NO: 149241 - protein, 213 aa, Unknown
  Bacterial polypetide isolated from the Sargasso Sea
SEYDSLGAKFTKWRAVIKIGDSMPSDDCINANAKALADYAAIAQSNNMVPIVEPEVLMDGDHSIDLSLDACARSFQALFDALDNNGVNIKGTILKPSMVTPGSLSEKVAIREVAEMTVKCLKENIPSDLPGVAFLSGGQTELEATAHLNEMNKIGDFPWKLSFSYGRALQQSALKAWSGQSENIFIAQDELSHRAEMNKLAALGQWDIKLEDR

SEQ ID NO: 149242 - protein, 136 aa, Unknown
  Bacterial polypetide isolated from the Sargasso Sea
MALNYYKNELKENAQLLASKGKGILAVDESTKTVGKRLAGIGVENTEDNRKAYRGMLFTTEGLGKYISGAILFEETLYQNHQDGESMVKKLNDLGIIPGIKVDKGLNPLPGGGDVETFCSGLDGLVERAAKYYEQG

SEQ ID NO: 149243 - protein, 258 aa, Unknown
  Bacterial polypetide isolated from the Sargasso Sea
KNKIPELISEMGSVAGIKVDTGAKVLAGSPQEKITEGLDGLRERLKEYYKLGAKFTKWRGVYTISKEFPSKLSIQSNAHALARYSALVQECNMVPIVEPEVLMDGGHSAKECFIKTSEVIKRCFEELILHKVDLKGVILKPNMILSGNECKEKISKEDVAKLTLKCLKNSVPSEVPGIAFLSGGQSEIEATENLDLINKYNDTNFIMSYSFGRALQQSALKFWSKDTQNVLGTQKIFNQRAKMNTLAAQGKWSKELEN

SEQ ID NO: 149244 - protein, 281 aa, Unknown
  Bacterial polypetide isolated from the Sargasso Sea
AYAGDIMLSRLVIALSEMYPDIPICLHQDHGNNEATCLSAIKLGFTSVMMDGSLQSDMKTPADYNYNVEITRKVCFAAHCVGASVEGELGVLGSLETGEASEEDGSGAEGKLNQDQLLTDPAQAHDFVKKTSVDALAIACGTSHGAYKFSRKPDGDILAMTVIEEIHNRIPNTHLVMHGSSSVPQYLQDLINDNGGEMPQTYGVPIEEIERGIKSGVRKINIDTDCRMAITGTFRKVAKENKKEFDPRKFFIPAMREMEILCRDRFERFGTAGNADKIKII

SEQ ID NO: 149245 - protein, 182 aa, Unknown
  Bacterial polypetide isolated from the Sargasso Sea
KRLKSVNVESNEKNRLHFRETLFTSDSMKTSISGVILYDETIRQTSSKGILIPELIKKSGSIPGIKVDKGAKLLAGSNDEKITEGLDGLRERMEEYYKLGARFAKWRAVYSISTKHPSEQCIKANAHALARYAAIVQEAKMVPIVEPEVLMDGSHTIDRCYEVTSKVLIECFNELKINNVNL

SEQ ID NO: 149246 - protein, 260 aa, Unknown
  Bacterial polypetide isolated from the Sargasso Sea
MSELNNIALEILKDGKGILAADESTGTMTKRLDNVNVPSTPENRLLFRETLFSASGMTECIGGVILYDETIKQQTSKKNLIPELILNMGSYPGIKVDTGAKVLAGSPGEKITEGLDGLRERLKEYYKLGAKFTKWRGVYNISKSYPSKLSIQSNAHALARYSALVQECNMVPIVEPEVLMDGDHSAKDCFSKTSEVIKKCFEELILHKVDLKGIILKPNMILAGDKCKDKISNDEVAKLTLKCLKNSVPSEVPGIAFLSG

SEQ ID NO: 149247 - protein, 236 aa, Unknown
  Bacterial polypetide isolated from the Sargasso Sea
KSLARSDKEKITEGLDGLRERLKEYYKLGARFTKWRGVYIISDKHPSKAAISTNAHALARYSALVQESGMVPIVEPEVLMDGNHSAEVCLEKTSEVIKKCFDELISQNVDLKGVILKPNMILPGSESVEKISSEKISEYTLKCLFESVPDEVPGIAFLSGGQSEIEATKNLNTINKKNTSKFIMTYSYGRALQQSALKHWSKNTNDIEGTQKIFNHRANMCSLASKGEWTEQLEKK

SEQ ID NO: 149248 - protein, 157 aa, Unknown
  Bacterial polypetide isolated from the Sargasso Sea
MSLNTLEEIANYIVSDGKGILAADESNLTCGKRFDSIGVESTEINRRDYREMLFRADGMQDNIGGVILFDETIRQSAEDGTPLVELIKNQGALPGIKVDKGLAPLESSHEETVTQGLEGLDERCKEYVSLGAKFTKWRAVIKISPSLPTDECIEANM

SEQ ID NO: 149249 - protein, 300 aa, Unknown
  Bacterial polypetide isolated from the Sargasso Sea
IQSSPENRLLFREILFASESMIDCIGGVILFDETINQTSNYGKTIPTMISETGAVPGIKVDTGAKDLANSLDEKITEGLDGLRERLKKYYELGARFTKWRGVYNIGEKYPSKIAINSNAHALARYSALAQESGMVPIVEPEVLMDGEHSADDCLIKTSEVIKKCFEELIIHKIDLTGVILKPNMILAGNKSKNKISNEEVASKTLECLKKSVPNEVPGIAFLSGGQSEIEATENLNLINKNNDTNFIMTYSYGRALQQSTLKFWSKDIKNIKGTQNIFNHRAKMNTLAAQGKWSNELENK

SEQ ID NO: 149250 - protein, 238 aa, Unknown
  Bacterial polypetide isolated from the Sargasso Sea
MSNYEEQLKKIRSADGFIAALDQSGGSTPKALQLYGVEGDAYNNDEEMFTVVHEMRTRIVTSPAFDGSRILGAILFENTLDRDIENINSASYLWEVKNVAPFLKVDKGLADETDGVQILNPMPDLLQLLDKAKAKNVFGTKMRSVIKSANPNGIEQVVEQQFAIGKQIISMGLTPIIEPEVDIHSPDKAEAESLLRQQLLTHLNSLSEKEMVIFKLTLPEENNFYEDCQKHPNLLRLV

SEQ ID NO: 149251 - protein, 269 aa, Unknown
  Bacterial polypetide isolated from the Sargasso Sea
FDETLRQKAQDGSYLRDVILSHGSLPGIKVDQGVKELEDNPNEKITTGLDGLNERCREYDTLGAKFTKWRAVINIGNGIPSAKCINENMLALSEYALIAQENNMVPIVEPEVIMDGPHTIDQCYDVTKNTLSVLFEMLDKKNINIRGTLLKPNMVVSGTENSHQANYKEVAEKTLECLNSSVPDELPGIVFLSGGQSDIDATAHLDEMNKIGGFKWKLSFSYGRALQQAALKVWSGNDSNLEHAQKAFGHRAIMNMKASLGEWSESLET

SEQ ID NO: 149252 - protein, 287 aa, Unknown
  Bacterial polypetide isolated from the Sargasso Sea
PLVDELKDTPIVLHQDHGGSPEDCKICMDLGFTSVMMDGSLKEDQKTPSDFDYNVKVTKETVNIAHSLGISVEGELGCLGSLETGTGEKEDGVGAEGILTQDQLLTDPDEASTFVSQTKVDALAIAIGTSHGAYKFSKPPTGETLAMERIRQIHSKIPNTHLVMHGSSSVPNNLIADINKYGGKIKETYGVPLDEIKEGIKNGVRKVNVDTDLRLASTAAIRKYFFENPSEFDPRKYLSLSKDAMKEVVKNKLEEFGAAGNASKIKPSSLSIMASRYQSGELSSITN

SEQ ID NO: 149253 - protein, 155 aa, Unknown
  Bacterial polypetide isolated from the Sargasso Sea
MPLISMRQLLDHAAENDYGVPAFNVNNLEQIRAIMEGAQYVNSPVIVQASAGARKYSGPIFIKNMMQAAVEEFPKIPIVMHQDHGGSPEECNECIELGFTSVMMDGSLLSDQKTPSNFEYNVKVTRETVKIAHSKGVSVEGELGCLSSLKQVWEK

SEQ ID NO: 149254 - protein, 270 aa, Unknown
  Bacterial polypetide isolated from the Sargasso Sea
MYDETINQKSKNLKIPELISSRGVIPGIKVDTGAKVLASSPDEKITEGLDGLRDRLKNYFQLGAKFTKWRGVYSISKNFPSKVAIQSNAHALARYAALVQEVNMVPIVEPEVLMDGNHSAKECFEKTIEVVKSCFEQLILHKVDLSGIILKPNMILAGNKSENKLSSEEVAKMTVEFLKNSVPPEVPGVAFLSGGQSELEATENLNLINKYNSTNFIMTYSYGRALQESALKHWSKNLDDIEGTQKIFNHRAEMNTLSAEGKWSLEIENK

SEQ ID NO: 149255 - protein, 244 aa, Unknown
  Bacterial polypetide isolated from the Sargasso Sea
MSELNSIAIKILKNGKGILAADESTGTMTKRLDSVSVPSTPKNRLLFRETIFSSSSMKDYIGGVILFDETIKQTTSKKKTIPELISKMGSIPGIKVDTGAKILASSPSEKITEGLDGLRERLKEYYKLGAKFTKWRGVYSITKDYPSKISIHSNAHALARYSALVQECNMVPIVEPEVLMDGDHSAKECFIATSEVIEKCFEELIAHKVNLNEIILKPNMILAGNKSKDKISNEEVAKLTLECL

SEQ ID NO: 149256 - protein, 113 aa, Unknown
  Bacterial polypetide isolated from the Sargasso Sea
YKQKASTEEIASKTLDCLKKTMPKEVPGVAFLSGGQSEIEATKNLNAINKINDTNFNFTFSYGRALQQSALKTWAKSMKDVKNIQKVFDHRAKMNGASTEAKWEEKNEQNFAA

SEQ ID NO: 149257 - protein, 225 aa, Unknown
  Bacterial polypetide isolated from the Sargasso Sea
LDGLRERLKEYYGLGARFTKWRAVYKIGNKFPSSQSIKSNAHALARYAALVQEAKMVPIVEPEVLMDGYHDIDKCYQVTTNVLNECYNELEIHKVDLKGTVLKPNMIIPGSNSSKKSTSEEIAKKTLDCLKKNVPSKVTGIAFLSGGQSEIEASKNLNEINKINDTNFLITFSYGRGLQASALKAFGMDQNNQNNIQKAFDHRAKMNGLSSKGEWSENLEEGEAA

SEQ ID NO: 149258 - protein, 109 aa, Unknown
  Bacterial polypetide isolated from the Sargasso Sea
MALISLRQLLDHAAEHDYGVPAFNVNNLEQTRAIMEAADQTDSPVIMQASAGARKYAGAPFLRALMEAAMTEFPHVPVVVHQDHGTSPAVCQRSIQLGFSSVMMDGSLG

SEQ ID NO: 149259 - protein, 189 aa, Unknown
  Bacterial polypetide isolated from the Sargasso Sea
MSELNKIALKIISSGKGILAADESNGTMTNRLTAVNVNSTPENRLLFREILFSSECMKDCIGGVILYDETINQTTSFGKSIPDLISASGAVPGIKVDTGAKELANSHNEKITEGLDGLRDRLKKYYELGARFTKWRGVYSISNKHPTKLAMNSNAHALARYSALVQESGMVPIVEPEVLMDGEHSADIC

SEQ ID NO: 149260 - protein, 268 aa, Unknown
  Bacterial polypetide isolated from the Sargasso Sea
ILYDETIKQKYNSKTIPEIISETGAVPGIKVDTGAKALANSHNEKITEGLDGLRERLKEYYKLGARFAKWRGVYNIAENLPSKLSIHTNAQALARYSSLVQEAKMVPIVEPELLMDGNHTAETCLRKTTEVIKQCFEELKLNNVDLTGIILKPNMILPGSNSEKKKSSEEIAELTLKCLIDSVPTEVPGIAFLSGGQTEIEATKNLNLINKKNKSKFIMTYSYGRALQQGALKYWSKNIDDFEGTQKIFNHRANMCSLAAKGEWTEQI

SEQ ID NO: 149261 - protein, 177 aa, Unknown
  Bacterial polypetide isolated from the Sargasso Sea
SSVMMDGSLMSDGKTPSSYEYNVEVTRETVAMAHACGVSVEGELGVLGSLETGEAGEEDGVGAEGKLTTDQMLTDPEEAADFVNKTHVDALAIACGTSHGAYKFTRPPTDDILAIDRIKAIHARIPNTHLVMHGSSSVPQEWLEIINQYGGEIPETYGVPVEQIVEGIKHGVRKVNI

SEQ ID NO: 149262 - protein, 222 aa, Unknown
  Bacterial polypetide isolated from the Sargasso Sea
HSCGVSVEGELGCLGSLESGMAGEEDGSGAEGKLSHDQLLTDPEEAAQFVKETGVDALAIAIGTSHGAYKFTRPPTGDILAIERIKEIHARIPDTHLVMHGSSSVPQDWLAIINEFGGDMGETYGVPVEEIQEGIKHGVRKVNIDTDLRMASTGSIRRFMHQNPSAFDPRKYLKEATKAMSEICVDRYEAFGTAGNASKIRSLDLEEMVKRYDSGELDPTVH

SEQ ID NO: 149263 - protein, 133 aa, Unknown
  Bacterial polypetide isolated from the Sargasso Sea
MSLNTLEEIAEYIVSDGKGILAADESNPTCGKRFDSIGVESTETNRRDYREMLFRATGMKDNIGGVILFDETIRQNAEDGTPLVDLIKNQGALPGIKVDKGLAPLESSPDETVTQGLDGLDERCKEYVSLGAK

SEQ ID NO: 149264 - protein, 244 aa, Unknown
  Bacterial polypetide isolated from the Sargasso Sea
MSELYSISKKIISTGKGILAADESTATMTKRLDAVKVPSTPENRLLFRETLLSSQSMKNCIGGVILYDETVKQIASNKKTIPELISSTGAVPGIKVDTGTKALANSKDEKITEGLDGLRDRLKEYYKLGARFTKWRAVYVISDKFPSKLSIHKNAHALARYAALVQETGMVPIVEPEVLMDGEHNAQDCFVKTSEVLKKCYDELILNKVDLKGTILKPNMILPGSNSKEKIECKKVAELTLKCL

SEQ ID NO: 149265 - protein, 147 aa, Unknown
  Bacterial polypetide isolated from the Sargasso Sea
MSLISLRQLLDHAAENNYGVPAFNVNNLEAIRAIMEGAKELNSPVILQASGAARKYAGPIFVKKLVEAAMDEFSDIPTVLHQDHGGSPSDCKNCIDLGFTSVMMDGSLLDDQKTPSDFDYNVRVTKETTDMAHALGVSVEGEIGCLG

SEQ ID NO: 149266 - protein, 163 aa, Unknown
  Bacterial polypetide isolated from the Sargasso Sea
MSLISLRQLLDHAAENNYGIPAFNVNNLEAIRAIMEGAKELNSPVILQASGAARRYAGPIFVKKLVEAAMDEFSDIPTVLHQDHGGSPSDCKNCIDLGFTSVMMDGSLLDDQKTPSDFDYNVRVTKETTDMAHALGVSVEGEIGCLGSLETGTGEKEDGVGRR

SEQ ID NO: 149267 - protein, 240 aa, Unknown
  Bacterial polypetide isolated from the Sargasso Sea
SKNILPGIKVDQGLEDFSPYEMLTKGLDGLSERLGKYYELGARFAKWRAVITPGDSIPTDDCILANAKNLAKYSKKCQQANLVPIVEPEVLMDGAHTIDESFDITSRTLNMVFDQLDEHNVSLQGIVLKPNMVLSGYECSYQASIEEVAEKTVNCLSTHVPSEVPGIAFLSGGQSDEDATLHLNEMNKYETDWNLTFSYGRALQQSALKTWSGKKENVTDAQETFIESAKANSLATVAGL

SEQ ID NO: 149268 - protein, 163 aa, Unknown
  Bacterial polypetide isolated from the Sargasso Sea
MSELHAVAHKMVEKGKGILAADESTPTCTKRFESINTDSTAESRNFYRNMLFTTEDIEKYISGVILFDETFHQSELSSGIKFPEYLTSKNILPGIKVDQGLEDFSPYEKLTKGLDGLSERLGKYYALGARFAKWRAVITPGDSLPTDDCILANAKNLAKYAQE

SEQ ID NO: 149269 - protein, 196 aa, Unknown
  Bacterial polypetide isolated from the Sargasso Sea
MSDLNSTALKIISSGKGILATDESTGTMTKRLESVNVDSTAENRLKFRKILFSSETMKTCIGGVILYDETIKQSFNSSSISALISASGAVPGIKVDTGAKTLSSSKNEKITEGLDGLRERLQTYYKLGARFAKWRGVYIISEIYPSKVAISSNAHALARYASLVQESGMVPIVEPEVLMDGNHDSKTCLIKTTRSY

SEQ ID NO: 149270 - protein, 298 aa, Unknown
  Bacterial polypetide isolated from the Sargasso Sea
MKVIQLGGKRFESIGVESTEENRRDYREMLFRSKGMKGNIGGVILFDETIRQSAADGTLLRDLITSQDALPGIKVDKGLQPIDDCPGETVTVGLDGLDERLKEYSSMGAKFTKWRAVINIGEGIPTDKCIDANMQALADYAKCVQDNGMVPIVEPEVLMDGVHSIDDCYDASARSLKSLFDHLDNKGVNIKGTILKPNMVTSGKDSEIQASIGEVAKRTLECLTKNVPSDLPGIAFLSGGQSDILATAHLDAMNKIGGFSWKLSFSYGRALQAAALQAWGGKPENVFISQDELSHRAE

SEQ ID NO: 149271 - protein, 180 aa, Unknown
  Bacterial polypetide isolated from the Sargasso Sea
ALSRYSALVQECNMVPIVEPEVLMDGDHSAKECFQKTSEVIKKCFEELILHKVDLKGVILKPNMILAGNKSKNKISNEEVAKLTLDCLKSSVPSEVSGIAFLSGGQSELEATENLNLINKLNKTGFIMSYSYGRALQQSALKFWSKNIKDIQGTQKVFNHRAKMNTLAAKGKWSKEIESR

SEQ ID NO: 149272 - protein, 220 aa, Unknown
  Bacterial polypetide isolated from the Sargasso Sea
MLISLRQLLDDAAERGYGVPAFNINNMEQGLAILQAADKRDAPVIIQASRGARNYAGDIMLQAMVKALAEMYPHIPVCMHQDHGNNQATCMTAIQYGFTSVMMDGSLEADAKTPASYDYNLGITRQVTEMAHHAGVSVEGELGVLGSLETGGGEQEDGHGAEGKLSEDQLLTNPDQAVDFVRQTRVDALAIAMGTSHGAYKFTRKPDGDILAMSVVEEIN

SEQ ID NO: 149273 - protein, 278 aa, Unknown
  Bacterial polypetide isolated from the Sargasso Sea
MKDYIGGVILFDETIKQKTTLGPTVPELILKQGAIPGIKVDKGAKLLAGSNDETVTEGLDGLRERLKEYYSLGARFTKWRAVYKIGEKYPSTQSIKSNAHALARYAALVQEANMVPIIEPEVLMDGSHDIQRCYQVTTNVLNECYNELNIHKINLKGTVLKPNMIIPGSDCKKKSSPEEIAKKTLDCLKKNVPSEVPGIAFLSGGQSEIEASKNLNEINKINDTNFLITFSYGRGLQASALKEFGKNQENIENIQKAFNHRAKMNGLSSKGKWSENFR

SEQ ID NO: 149274 - protein, 190 aa, Unknown
  Bacterial polypetide isolated from the Sargasso Sea
MSELNNIALKILSNGKGILAADESTGTMTKRLESVNVESTPDKRLNFRETLFTAAGMKEFIGGVILFDETIKQKVKSTIPEIIKKSGSLTGIKVDTGAKKLANSGEEKITEGLDGLRERLKEYYDLGARFTKWRGVYLISNDYPSQISIDSNAHALARYAALVQEANMVPIVEPELLMDGKHDSDMCLKK

SEQ ID NO: 149275 - protein, 295 aa, Unknown
  Bacterial polypetide isolated from the Sargasso Sea
IFVKKLVEAAMDEFSEIPTVLHQDHGGSPKDCKNCIELGFTSVMMDGSLLDDQKTPSDFEYNVRVTKETTDMAHALGVSVEGEIGCLGSLETGTGEKEDGVGAEGKLDHDQLLTDPDEASDFVKATNVDALAIAIGTSHGAYKFSRPPTGDILAIDRIKEIHSRLPNTHLVMHGSSSVPQDLIKTINEYGGKIKETYGVPVSEIQEGIKHGVRKVNVDTDLRLAATAAVRKYFHENPSQFDPRKYLLLSKDAMKEVVKSRLQEFGTAGNASSINSISLGAMATKYKSGEFKAVIN

SEQ ID NO: 149276 - protein, 217 aa, Unknown
  Bacterial polypetide isolated from the Sargasso Sea
MPASVKPGVVTGEALWDLLEHAKENKYAIPAVNVVSSCSIASCLEAAKEYGGPMIVQFSRGGGQFIAGKAAPNADDAACIAGTVAAALHTRAIAALYGVPVILHTDHCQRSWLPWFDGLMEANEDYFKKNGEPLFSSHMLDLSEEPLEENIGTCVEYLERMSKCNVLLEMELGVTGGEEDGVDNSDVDSSKLYTQPDEVYEVYKALSAVEGGRFTIA

SEQ ID NO: 149277 - protein, 241 aa, Unknown
  Bacterial polypetide isolated from the Sargasso Sea
MDTELLEKTARELVAPGRGILAADESNGTMSNRLEAVGVEPSPETRRAYRSNIFATPDYESAISGVILFDETIRQTMDDGTPIPEYLASRGVHPGIKVDTGAKELAHHSGEKVTEGLDGLRERCMEYFALGARFAKWRAVIRIGDGMPSDANISTNAHALARYAAICQEQGLVPIIEPEVLMDGDHDSRTCFEVTARILDATFAECEIQGVHIPGALLKPNMVLPGKSCEDQGTREKAAQM

SEQ ID NO: 149278 - protein, 186 aa, Unknown
  Bacterial polypetide isolated from the Sargasso Sea
ELGVTGGEEDGVDNTDIDSSKLYTQPEEVAYAYSELSSISDNFMIAAAFGNVHGVYKPGNVKLTPKILKNSQEFVSEKFNLPSNSLDFVFHGGSGSSVEEIREAIDYGVIKMNIDTDLQFAFTEGIRDYMIGESEYLMKQIGNPDGDDIPNKKYYDPRVWLRKGEETFKTRLIKAFEDLNNINTLD

SEQ ID NO: 149279 - protein, 294 aa, Unknown
  Bacterial polypetide isolated from the Sargasso Sea
MEQIQAIMEAAKETDSPVIVQASRGARAYSQDNYLRHLMLAAVELYPEIPVVMHQDHGNSPETCLSAIKQGFTSVMMDGSLLEDAKTPADFAYNCEVTKKVCDAAHALGVSVEGELGCLGSLESGQGEQEDGHGFEGTLSKEKLLTDPEEAFRFVKATKVDALAVAIGTSHGAYKFSSPPTGETLAINRIIEIHEKLPNTHLVMHGSSSVPKELQDLINDHGGQMKPTYGVPVEEIQMAIKHGVRKINVDTDNRMAITGTIRKMLQQSPHEFDPRFYLKPARQAMKEVVKQRMI

SEQ ID NO: 149280 - protein, 176 aa, Unknown
  Bacterial polypetide isolated from the Sargasso Sea
GLVPIVEPEVLIDGDLTIEVDQNITIKTLTKVYEMLDLYKVSLEGTLLKPNMVTSGSSSSNRAPATEVASRTVEAFEKSVPSSVPGIVFLSGGQPDDEATLNMNEIALFGQNNNAPWELSYSFGRGLQALPLNTWLGIKENVPSAQQAFIQRCILTSAARQGKYSAQMEDELTRAN

SEQ ID NO: 149281 - protein, 188 aa, Unknown
  Bacterial polypetide isolated from the Sargasso Sea
MAISSNAHALARYSALVQENGMVPIVEPEVLMDGNHSAEDCFNKTSEVIKKCFEELILHKVDLSGIILKPNMILSGNISENKISSEEVSIKTLECLKNCVPNEVPGIAFLSGGQSEIEATENLNLINKNNNTNFIMSYSYGRALQQSALKVWSNDIKNVEAAQTTFNHRAKMCTLAAQGKWSSKLENK

SEQ ID NO: 149282 - protein, 169 aa, Unknown
  Bacterial polypetide isolated from the Sargasso Sea
SGMVPIVEPEVLMDGEHSADVCLNKTSEVIKKCFEELILHKVDLSGIILKPNMILSGNQSKETNSSEEISNKTLECIKNSVPGDVPGVAFLSGGQSELEATENLNLINKNNNTNFVMTFSYGRALQQSALKAWSKNIKNIEATQKVFNHRAKMCTLAAQGRWVRELESK

SEQ ID NO: 149283 - protein, 166 aa, Unknown
  Bacterial polypetide isolated from the Sargasso Sea
VPIVEPEVLMDGNHSAEVCLNKTSEVIKKCFEELILHKVDLSGIILKPNMILSGSLSENKISSEEVSIKTLECIKNSVPNEVPGIAFLSGGQSEIEATENLNSINQNNNTNFIMTYSYGRALQQSALKVWSNDIKNVEATQNTFNHRAKMCTLAAQGKWSSELENK

SEQ ID NO: 149284 - protein, 311 aa, Unknown
  Bacterial polypetide isolated from the Sargasso Sea
DESPATMTKRLEGVKVDSTYENRILFRETLFTSREMSECIGGVILYDETIKQKTSNGKSVPEALSEVGSIAGIKVDTGAKQLAGSPDEKITEGLDGLRERLKEYSKLGAKFTKWRGVYNISNIYPSKLSIHSNAHALARYSALVQECNMVPIVEPELLMDGNHSAEDCYNKTSLVIKKCFDELILHNVDLTGLILKPNMILAGVDSKNQISNEDTAKLTVKCLKESVPSEVPGVAFLSGGQSEIQATENLNLINKFNTTNFIMSYSYGRALQQSALKHWAKDTKDYKGTQEVFNHRAKMCSLASQGKWRAN

SEQ ID NO: 149285 - protein, 147 aa, Unknown
  Bacterial polypetide isolated from the Sargasso Sea
MDLSSLNSIAQSMVAPNKGILAADESTPTIGKRFATIDTESTESNRQIYRNLLFTSPNVSEYISGVILFDETIRQSTNDGTPFAEHLTSLGIVPGIKVDKGVKGIPFCDGETVTEGLDGLDERLDEYYELGARFAKWRAVISISDDL

SEQ ID NO: 149286 - protein, 216 aa, Unknown
  Bacterial polypetide isolated from the Sargasso Sea
MSELNNIALKIISKGKGILAADESTGTMTKRLESVNVSSTPENRLLFRETLFSSQVMSECIGGVILYDETIKQLSSKKEKIPELIASMGAYAGIKVDTGAKVLAGSPNEKITEGLDGLRERLKEYYKLGAKFTKWRGVFNISEEYPSRLSIESNAHALARYSALVQENNMVPIVEPEVLMDGNHSAEDCYNKTSEVLKKCFDELILHKVKFKRNYT

SEQ ID NO: 149287 - protein, 227 aa, Unknown
  Bacterial polypetide isolated from the Sargasso Sea
MGAILFEKTMNGEIFGMDTPNYLWKKKQVLPFLKIDKGLEEVDEGVQLMKPNPGLEDLLDQAISKDIFGTKMRSVIKDANEKGIASVVKQQFEIAKKIIQKNLVPIIEPEVDIHCENKADAESMLIDNLKNHIEQLSSDQKIFLKLTIPNEVNLYAAFVNHPNVMRVFALSGGYSREESNKLLALNKGMLASFSRALTEGLSSKQSDEEFDSVLDASIESIHQASNS

SEQ ID NO: 149288 - protein, 196 aa, Unknown
  Bacterial polypetide isolated from the Sargasso Sea
ISDNYPSKLSIYSNAHALARYSALVQECGMVPIVEPEVLMDGNHSAEECFNKTSEVIKKCFDELNKHKVDPAGVILKPNMILPGSSSKREVNTKTIAELTLKCLKMSVPSEVPGIAFLSGGQSEFDAARNLNSINLINDTNFIMTYSYGRALQQSALKFWAKDIQNIKGTQEMFNHRAKMCSLASKGKWSEDLEKI

SEQ ID NO: 149289 - protein, 263 aa, Unknown
  Bacterial polypetide isolated from the Sargasso Sea
YGIDKSEYSNDEEMFEKIHQMRTRIITSKSFTGDRILGAILFEKTMNSEISGMNTAHYLWSKKQVVPFLKVDKGLDDVKEGVQLMKPNPGLENLLSQAVNKKIFGTKMRSVIKEANEKGVAGVVEQQFEIAKIIIQNNLVPIIEPEVDIFCENKPDVEKMLFEHLKNQIDQLNSNQKILLKLTIPSEANIYAPFINHPNVIRVFALSGGYSRDDSNKLLALNKGMLASFSRALTEGLSAQQSDEEFNKVLDASIESIFNASNC

SEQ ID NO: 149290 - protein, 169 aa, Unknown
  Bacterial polypetide isolated from the Sargasso Sea
GMVPIVEPEVLMDGNHSANICLNKTSEVIKKCFEELINHKIDLSGVILKPNMILDGASAEKKITSTEVAKLTLQCLKDSVPQEVPGIAFLSGGQSEIEATENLNTINQKNNTNFIMTFSYGRALQQSALKYWSKNIEDTNGTQRVFNHRANMCSLASQGKWSKEFEKKI

SEQ ID NO: 149291 - protein, 198 aa, Unknown
  Bacterial polypetide isolated from the Sargasso Sea
YLISEKYPSKLAINVNAHALARYASIVQEAGMVPIVEPEVLMDGNHSAEDCFNKTSEVVKKCFDELIFQKVDLKGILLKPNMILPGSKSNQKITSDEIAELTIKCLINSVPSEVPGIAFLSGGQSELEATKNLNTINKHNKSKFVMTYSYGRALQQSALKHWSKDIKDIEGTQKIFDHRANMCSLASMGKWFEEVDKI

SEQ ID NO: 149292 - protein, 235 aa, Unknown
  Bacterial polypetide isolated from the Sargasso Sea
MTKVQAQWEKRLKSVNVECTEKNRLHFRETLFSSSAMKTSISGVILFDETLRQTSSKGLPIPELIKKSGSIPGIKVDKGVKLLAGSDKEKVTEGLDGLRGRMEEYYKLGARFAKWRAVYSISSKHPSEQCIKSNAHSLARYAAIVQEAKMVPIVEPEVLMDGDHSIDRCYDVTSKVLNECYKELVIHKVNLKGTVLKPNMILPGADCKSKSTPEEIAKKTLECLKKNMPTEVPGV

SEQ ID NO: 149293 - protein, 242 aa, Unknown
  Bacterial polypetide isolated from the Sargasso Sea
LVEVIANSGSLPGIKVDTGAKDLAFNSNEKITEGLDGLRERLIEYFNLGAKFAKWRAVITIEDSIPSDLCINSNAHALARYAALCQENGIVPIVEPEVLMDGEHTIERCYDVTKKTLDVVFNELIAHGVNLKGICLKPNMIIDGSLTSEKSSSKIIAEKTISCFKEVVPEDVPGIVFLSGGQTEIEATENLDQMNKIGNLPWNLSFSYGRALQASALQAWSGKVENEEIASATFDHRAKKIP

SEQ ID NO: 149294 - protein, 215 aa, Unknown
  Bacterial polypetide isolated from the Sargasso Sea
LKKYYDLGARFTKWRGVYSISEKYPSELAITSNAHALARYSALAQESGMVPIVEPEVLMDGNHSAEVCLNKTSEVIGKCFEELILHKVDLSGIILKPNMILPGSESENKISSEEVSIKTLECLKNSVPNEVPGMAFLSGGQSEIEATENLNLINKNNNTNFIMTYSYGRALQQSALKVWSNDIENVEATQTTFNHRAKMCTLAAQGKWSSELENK

SEQ ID NO: 149295 - protein, 163 aa, Unknown
  Bacterial polypetide isolated from the Sargasso Sea
IAIGTSHGAYKFTKPPTGDVLSIERIKEIHKRIPNTHLVMHGSSSVPQEWLKVINEFGGDIKETYGVPVEEIVEGIKHGVRKVNIDTDLRLASTGAIRRMMAEHPSEFDPRKFFAKTIVAMRDICIARYEAFGTAGNASKIKPISLEGMYQRYASGELNAKVN

SEQ ID NO: 149296 - protein, 267 aa, Unknown
  Bacterial polypetide isolated from the Sargasso Sea
MSELNKIALQIISNGKGILAADESTATMTKRLDSVKVHSDKNNRLLFRQTLFSSSSMSKCIGGVILYDETIRQRASNGKTITDLINSSGSLAGIKVDTGAKTLAGSKEEKVTEGLDGLRERLNDYYKLGARFTKWRGVYSISDKYPSKLSISSNAHALARYAALVQEAGMVPIIEPEVLMDGDHSAKDCLIKTSEVINKCYEELELNNVDLKGTILKPNMILPGINSGEKISSEEIAELTLDCLKNNVPSSVPGIAFLSGGQTEIEA

SEQ ID NO: 149297 - protein, 180 aa, Unknown
  Bacterial polypetide isolated from the Sargasso Sea
AADFVAKTKCDALAIAIGTSHGAYKFTRKPTGEVLAISRIAEIHKAIPNTHLVMHGSSSVPQEWLEMINKHGGAIPETYGVPVEEIQEGIRNGVRKVNIDTDNRLAFTAAVREAAMADPANFDPRHFNKPARKYMKQVCLDRYQQFWAAGNASKIQQQTINYFAGLYAKGALDPKAAVAA

SEQ ID NO: 149298 - protein, 200 aa, Unknown
  Bacterial polypetide isolated from the Sargasso Sea
RGVYNISKEHPSKLSIQSNAHALARYSALVQECNMVPIVEPEVLMDGEHSAKDCYKKTSEVIKKCFEELILHKVDLKGIILKPNMILDGNKCKNKISNEEVAKLTLKCLKASVPSEVPGIAFLSGGQSEIEATENLNLINKYNDTNFIMSYSYGRALQQSALKLWSQDTKNVEGTQKIFSQRAKMNSLAAQGKWSEELEN

SEQ ID NO: 149299 - protein, 236 aa, Unknown
  Bacterial polypetide isolated from the Sargasso Sea
SGSVVYPEYLASKGIIPGIKVDAGAHSLSGSEDEKITLGLDGLDERLSNYRKLGARFAKWRAVINITELNPSDYCIKANAHALARYAALCQSNNVVPIVEPEILMDGDHDIEDSFVVTEEVLHTVFDELYTQGVQYEEMVLKPNMVLSGYGANDRAGVDEVASATVQCFLRSVPAAVPGIAFLSGGQSDEDATAHLNAMNQILGDNKPWHLSFSYGRALQQPALKAWQGSDDNISN

SEQ ID NO: 149300 - protein, 220 aa, Unknown
  Bacterial polypetide isolated from the Sargasso Sea
SVEGELGCLGSLETGKGEAEDGHGFEGELSTDMLLTDPEEAADFVAKTKVDALAIAIGTSHGAYKFTRKPTGEVLAISRIAEIHKALPNTHLVMHGSSSVPQEWLDIINKYGGEIPQTYGVPVEEIQEGIRNGVRKVNIDTDNRLAFTAAVREAAFADKANFDPRHFNKPARKYMKQVCLDRYKQFWCEGQASKIKQNSTNYFADLYAKGDLDPKVKATV

SEQ ID NO: 149301 - protein, 217 aa, Unknown
  Bacterial polypetide isolated from the Sargasso Sea
DERCAEYFSLGAKFTKWRAVIKQDGSFPSDDCLKANMEALAEYAKIVQNNNMVPIVEPEVLMDGSHSIEDCYSATSRALETLFNSLTDHEVNIKGTILKPNMVTSGSTASEQANISLVAEKTVQCLQNSLSDDLPAVTFLSGGQSDIDSTAHLDKMNKVSSNPWKLSFSYGRALQQAALKAWSGNVENETVAQEAFSHRAKMNKLAALGEWEKSLEN

SEQ ID NO: 149302 - protein, 187 aa, Unknown
  Bacterial polypetide isolated from the Sargasso Sea
MSKLNSIALKILENGKGILAADESTATMTKRLESVDVQSTAENRLLFRETLFSATGMTDHIGGVILYDETIKQETSKKEKIPELISKMGSAPGIKVDTGAKVLANSPNEKITEGLDGLRERLKEYNQLGAKFTKWRGVYNISKEYPSKLSIQSNAHALARYSALVQECDMVPIVEPEVLMDGDHSAK

SEQ ID NO: 149303 - protein, 260 aa, Unknown
  Bacterial polypetide isolated from the Sargasso Sea
MKITDRKYREMLFRSPAMAEAIGGVILFDETLRQKAQDGSYLRDVILNHGSLPGIKVDQGVKELEDNSNEKITTGLDGLNERCREYNALGAKFTKWRAVINISDGMPSTKCINENMLALSEYALIAQENNMVPIVEPEVIMDGPHTIDQCYEVTKNTLSVLFEMLDKKNINIRGTLLKPNMVVSGTENSHQANYKEVAEKTLDCLNSSVPDELPGIVFLSGGQSDIDATAHLDEMNKIGGFKWKLSFSYGRALQQAALKV

SEQ ID NO: 149304 - protein, 241 aa, Unknown
  Bacterial polypetide isolated from the Sargasso Sea
MSELNNIALKILKNGKGILAADESTGTMTKRLDGVNVPSTPENRLLFRETLFSATGMSECIGGVILYDETIKQQTSKKKLVPELILNMGSYPGIKVDTGAKVLAGSPDEKITEGLDGLRERLKEYYKLGAKFTKWRGVYNISKRYPSKLSIQSNAHALARYSALVQECNMVPIVEPEVLMDGNHSAKDCFSKTSEVIKKCFEELILHKVDLKGIILKPNMILAGNKCKDKISNDEVAKLTL

SEQ ID NO: 149305 - protein, 209 aa, Unknown
  Bacterial polypetide isolated from the Sargasso Sea
MIDLSEEPLEENIEICKTYLERMSKMGMTLEIELGITGGEEDGVDNSDVDESKLYTQPEEVAYAYEELSKVSDQFTIAAAFGNVHGVYKPGNVKLTPKILKNSQEYITKKYGVDNNHIDFVFHGGSGSTLEEIREAIGYGVIKMNIDTDMQYAFMSGIRDYMGEKADYLKSQIGSPDGPDSPNKKYYDPRVWLRKGEQTFVERLKKAFE

SEQ ID NO: 149306 - protein, 120 aa, Unknown
  Bacterial polypetide isolated from the Sargasso Sea
MALNYYKNELKENAQLLASKGKGILAVDESTKTVGKRLAGIGVENTEDNRKAYRGMLFTTEGLGKYISGAILFEETLYQNHQDGESMVKKLNDLGIIPGIKVDKGLNPLSGGGNVETFCS

SEQ ID NO: 149307 - protein, 276 aa, Unknown
  Bacterial polypetide isolated from the Sargasso Sea
HRWRNLYDETINQTTSLGKSIPDLIYSSGALPGIKVDTGAKNLANSSEEKITEGLDGLRERLKKYYELGARFTKWRGVYNISNKYPSILSVNSNAHALARYSALVQESKMVPIVEPEVLMDGDHSAEICLKKTSEVIKKCFDELILHKVDLSGIILKPNMILAGNMSREQLSNEEVSEKTLECLKNSVPSEVPGIAFLSGGQSEIEATENLNLISKNNNTNFIMTYSYGRALQQSALKVWSKNIKDIESTQNIFNHRAKMCSLAAKGNWSKELETK

SEQ ID NO: 149308 - protein, 225 aa, Unknown
  Bacterial polypetide isolated from the Sargasso Sea
LDGLRERLKEYYDLGARFTKWRAVYKISDRFPTSQSIKSNAHALARYAALVQEAKMVPIVEPEVLMDGSHNIDKCFQVTTNVLNECYNELETHKVNLKGTVLKPNMIIPGSKCEEKSSTEEIAKKTLECLKKNVPDRVPGIAFLSGGQSEIEASKNLNEINKINDTNFLITFSYGRGLQASALKEFGKNQKNTKSIQKAFNHRAKMNGLSSKGEWSETLEKEFAA

SEQ ID NO: 149309 - protein, 292 aa, Unknown
  Bacterial polypetide isolated from the Sargasso Sea
MSELNNIALKILSHGKGILAADESTGTMTKRLSAVNVESTPESRLLFRETLFSSESMKTSIGGVILYDETIKQNSSSKKTIPELISSSGAVPGIKVDTGAKSLVDSPDEKITEGLDGLGERLKDYYKLGARFTKWRGIYIISKNYPSKLSIDANANALAKYSSIVQENGMVPIVEPEVLMDGDHTAEDCLNKTSEVIKKCFEELIQHKVSLEGIILKPNMILPGNKSNEKISNEKIAHLTLKCLKDSVPKEVPGIAFLSGGQTEIEATENLNLINKFNDTNFIMSYSYEEPY

SEQ ID NO: 149310 - protein, 183 aa, Unknown
  Bacterial polypetide isolated from the Sargasso Sea
NAHALARYASLVQETGMVPIVEPEVLMDGAHNSKTCLEKTSEVIKKCFEELILQNIDLKGVILKPNMILPGTTSDEKINSEKIAELTLKCLNDSVPKEVPGIAFLSGGQSELQATENLNTINIKNNSNFKMTFSYGRALQQSALKFWAKNQDDIKKTQEVFNHRANMCTLAAKGEWKKELEKQ

SEQ ID NO: 149311 - protein, 275 aa, Unknown
  Bacterial polypetide isolated from the Sargasso Sea
KGILAADESTGTMTKRLNAVKVESTPENRLLFRETLFSSESMKTCIGGVILYDETIKQKSSSEKTIPELISSSGAVPGIKVDTGAKPLADSPDEKITEGLDGLGERLKNYYKLGARFTKWRGIYIISKNYPSKLSIDANANALARYSYIVQENGMVPIVEPEVLMDGDHSAEDCLNKTSEVINKCFEELIKHKVNLEGIILKPNMILPGNKSNNKIGNEKIAHLTLKCLKESVPKEVPGIAFLSGGQTEIEATENLNLINKLNDKNFIMSYSFGR

SEQ ID NO: 149312 - protein, 159 aa, Unknown
  Bacterial polypetide isolated from the Sargasso Sea
MSIELLAETAQAMVAPGKGIIAIDESTGTIAKRFASVGIENTEENRRAYRELLLTTPKLNEHISGAILYDETIRQSTRDGVPFAKYMADHGMIPGIKVDKGAHPLAGCPGELVTEGLDGLRERLQEYYKLGARFAKWRAVINIGESIPSGTCIESNAHA

SEQ ID NO: 149313 - protein, 275 aa, Unknown
  Bacterial polypetide isolated from the Sargasso Sea
MHQDHGASPAVCQRSIQLGFSSVMMDGSLLEDQKTPAEYDYNVDVTRRVVDMAHACGVSVEGELGCLGSLESGIAGEEDGVGAEGVLSMEQMLTDPEQAADFVQKTGVDALAIAIGTSHGAYKFSRPPTGDILAIEQVKAIHSRLPNTHLVMHGSSSVPQELIAEINQYGGEIPETYGVPVAEIQQGIKHGVRKVNIDTDLRLASTAAIRKFLASNKSEFDPRKYLTASTEAMKAVVIDRYKAFGTEGQAQKLRPYSLDAMHDQYSSGALNQVIQ

SEQ ID NO: 149314 - protein, 273 aa, Unknown
  Bacterial polypetide isolated from the Sargasso Sea
GVILYDETIKQQTSKKNLIPELIFKMGSFPGIKVDTGAKVLAGSPNEKITEGLDGLRERLKEYYKLGAKFTKWRGVYNISKNHPSKLSIQSNAHALARYSALVQECNMVPIVEPEVLMDGDHSAKDCYSKTSEVIKKCFEELILHKVDLTGIILKPNMILAGSECKDKITNEEVAKLTLECLRNSVPSEIPGVAFLSGGQSEIEATENLNLINKNNNTNFIMSFSYGRALQQSALKFWSKDIQNIEGTQKIFNHRAKMNTLAAQGKWSKNLEN

SEQ ID NO: 149315 - protein, 257 aa, Unknown
  Bacterial polypetide isolated from the Sargasso Sea
KVIIHTDHCSRKNLPWIDGLLRHGSDFYKKNGYPLFSSHMIDLSDESIEDNINTCKEYLKKLTDLEMTLEIELGITGGEEDGVDNTGIDSTKLYTQPEEVAYAYSELVSISDNFIIAAAFGNVHGVYKPGNVSLTPKILKNSQEYISKQFQTPKNSINFVFHGGSGSSLEEIREAIDYGVIKMNIDTDLQYAFTEGVRDYIIKKKEYISTQIGNPEGDDIPNKKFYDPRVWLREGEDTFKNRLKKAFEDLNNIDTLD

SEQ ID NO: 149316 - protein, 181 aa, Unknown
  Bacterial polypetide isolated from the Sargasso Sea
GEEDGVDNTNVDSSRLYTQPEEVAYAYEELMKVSPRFTIAAAFGNVHGVYRPGNVQLTPVILKNSQEYIQKKYNTNQNPIDFVFHGGSGSSIEEIREAIGYGVIKMNIDTDLQFAYTEGVRDYVSSKIDYLGSQIGNPEGADEPNKKYYDPRKWIREGEFTFQKRLEKAFSDLNNVNSLSK

SEQ ID NO: 149317 - protein, 213 aa, Unknown
  Bacterial polypetide isolated from the Sargasso Sea
MSELNKIALKIISNGKGILAADESNGTMTKRLKAVNVNSTPENRLLFREILFSSECMKDCIGGVILYDETINQTTSFGNSIPDLISASGAVPGIKVDTGAKNLANSPEEKITEGLDGLRDRLKKYYEIGARFTKWRGVYSISNKYPTKLAINSNAHALARYSALVQESGMVPIVEPEVLMDGAHSADVCFSKTSEVIRKCFEELILHKVDLSG

SEQ ID NO: 149318 - protein, 282 aa, Unknown
  Bacterial polypetide isolated from the Sargasso Sea
NRILFRETLFSSKGMTEYIGGVILFDETINQKANDGKEVSNLLSDMGSLTGIKVDTGAKQLAGSPKEKITEGLDGLRERLKEYYKIGARFTKWRGVYNITKDYPSKLSIHSNSHVLARYAALVQECNMVPIVEPEVLMDGDHSAEECFNKTSSVIKKCFEDLILHKVDLTGMILKPNMILAGTESNNQISNEETAKLTIKCLKESVPSEVPGIAFLSGGQSEVQATENLNLINKFNDSGFIMSYSYGRALQQSALKHWSKDIKDIKGTQKVFDHRAKMCSLA

SEQ ID NO: 149319 - protein, 177 aa, Unknown
  Bacterial polypetide isolated from the Sargasso Sea
MALISLRQLLDHAAENDYGVPAFNVNNLEQVRAIMEGAASVNSPVILQASAGARKYAGSNFLKHLIQGAIEEFPHIPIVMHQDHGVSPAVCQRSIQLGFSSVMMDGSLAEDGKTPTDFDYNVRVTKTTVEMAHACGVSVEGEIGCLGSLETGMAGEEDGIGAEGKLSMEQLLTDPEE

SEQ ID NO: 149320 - protein, 300 aa, Unknown
  Bacterial polypetide isolated from the Sargasso Sea
MFREILFSSECMKNCIGGVILYDETINQTTSFGKSVPDLISASGAVPGIKVDTGAKELANSPEEKITEGLDGLRDRLKRYYELGARFTKWRGVYCIGNKYPTKLAITSNAHALARYSALVQESGMVPIVEPEVLMDGNHSAEVCLSKTSEVIKKCFDELILHKVDLSGIILKPNMILSGNRSKEKISGEEVSYKTLECLKNSVPSDVPGIAFLSGGQSEIEATENLNLINKNNNTNFIMTYSYGRALQQSALKVWSKNIKEIEETQKIFNHRAKMCTLAAHGKWVSELESNKKKFIYLIS

SEQ ID NO: 149321 - protein, 214 aa, Unknown
  Bacterial polypetide isolated from the Sargasso Sea
MSELNKIALKILSSGKGILAADESTATMTKRLESVKVPSNEQNRLLFRKTLFSSESMKSCIGGVILYDETIKQNSESKSIPEIIVNNGAIPGIKVDTGAKPLAGSVEEKITEGLDGLRERLKEYYKLGARFTKWRGVYSISKKNPSKLCIYSNAHALARYSSLVQECGMVPIVEPELLMDGNHSAALCFNKTSEIIKKCFEELIIHKVDLKGVI

SEQ ID NO: 149322 - protein, 239 aa, Unknown
  Bacterial polypetide isolated from the Sargasso Sea
ASYEYNLDIPRRVTEMAHHAGVSVEGELGVLGSLETGGGEQEDGHGATGKLSEDQLLTDPDQAVDFVKDTKVDALAIAMGTSHGAYKFTRKPDGEILAMNVVEEINRRLPNIHLVMHGSSSVPQELQDVFNAHGGEMPQTWGVPLEEIERGIKHGVRKVNIDTDCRLAMLGVIRKIANENKSEFDPRKFLKPAMEAMEALCADRFERFGTAGNASRIKPISLSAMAGRYASGAFNPSIN

SEQ ID NO: 149323 - protein, 196 aa, Unknown
  Bacterial polypetide isolated from the Sargasso Sea
MTELNQIALKILLDGKGILAADESTGTMTKRLESVKVKSNEANRLLFRKTLFSAERMRDCIGGVILYDETIKQQSDSKTIPELVNENGAIPGIKVDTGAKALATSPEEKITEGLDGLRERLKEYYKLGARFTKWRGVYIISDKYPTKLSIYSNAHALARYAALVQECGMVPIVEPEVLMDGSHSAMICYNKTSEII

SEQ ID NO: 149324 - protein, 205 aa, Unknown
  Bacterial polypetide isolated from the Sargasso Sea
MSELNKIALKIVSSGKGILAADESTATMTKRLESVKVKSNEENRLKFRGTLFLSSGMKECIGGVILYDETIKQKYKDKFIPELISESGTITGIKVDTGVKKLAKSDNEKITEGLDGLRDRLKEYYQLGARFTKWRAVYVISESHPTKLAINTNAHALARYASLVQESGMVPIVEPEVLMDGNHSAEDCFNKTSEVIKKCFDELIF

SEQ ID NO: 149325 - protein, 258 aa, Unknown
  Bacterial polypetide isolated from the Sargasso Sea
MSKISGNSGFIAALDQSGGSSPKALRLYGITESEYSNEDEMFEKIHQMRTRIITSKSFTGDRILGAILFEKTMNGEISGMDTAHYLWNKKQVVPFLKVDKGLVDVNDGVQLMKPNPGLEKLLDQAVNKDIFGTKMRSVIKDANEKGVAAVVEQQFETAKIIIHKNLVPIIEPEVDIHCENKSEAEQMLFENLKNQIEQLTSEQKILLKLTIPNEVNLYRPFINHPNVLRVFALSGGYSREESNKLLALNNQYACKLQQ

SEQ ID NO: 149326 - protein, 158 aa, Unknown
  Bacterial polypetide isolated from the Sargasso Sea
MNLEEIARKMCAKGKGILAADESTGTIAKRFKSINVDNTEKNRLIFRQTLFSSKAMKNYIGGVILFDETIKQKTTLGPSIPELILKNDAIPGIKVDKGAKPLAGSNDETVTEGLDGLRERLKEYYELGARFTKWRAVYKIGNKFPSSQCIKSNAHALA

SEQ ID NO: 149327 - protein, 127 aa, Unknown
  Bacterial polypetide isolated from the Sargasso Sea
MTLNEIAKKMCAKGKGILAADESTGTIAKRFKSINVENIEKNRLNFRQTLFNSSAMKDYIGGVILFDETIRQKTTLGPSIPELISKHGAIPGIKVDKGAKLLAGSNDETVTEGLDGLRERLKEYYDF

SEQ ID NO: 149328 - protein, 253 aa, Unknown
  Bacterial polypetide isolated from the Sargasso Sea
MNFNSLSETASYIVSEGKGILAADESNPTCTKRFDSIGVESTEDNRRDYRELLFRSEGMKGNIGGVILFDETIRQNAADGTSLVDVITSQGSLAGIKVDKGLQQIGDSEESLTQGLEGLDERLKEYYELGAKFTKWRAVINIGEDMPSSEAISANMEALADYAKIVQNNNMVPMVEPEVLMDGNHSIDHCFEATSRCLDALFTYLLEKGVDIKGTILKPNMVTSGSNYSDQADVEEVARKTIDCLKAYVLDDL

SEQ ID NO: 149329 - protein, 164 aa, Unknown
  Bacterial polypetide isolated from the Sargasso Sea
MSLNTLEEIAEYIVSNGKGILAADESNPTCGKRFDSIGVESTETNRRDYREMLFRATGMKDNIGGVILFDETIRQNAEDGTPLVDLIKNQGALPGIKVDKGLAPLESSPDETVTQGLDGLDERCKEYVSLGAKFTKWRAVIKISDTIPSDECIEANMRAWQSTQ

SEQ ID NO: 149330 - protein, 216 aa, Unknown
  Bacterial polypetide isolated from the Sargasso Sea
MSELNKIALKIISNGKGILAADESNGTMTKRLKAVNVNSTPENRLLFREILFTSESMQDCIGGVILYDETINQTTSSGKSIPELISASGAVPGIKVDTGAKELANSPEEKITEGLDGLRDRLKKYYELGARFTKWRGVYSISNKYPSMLAINSNAHALARYSALVQESGMVPIVEPEVLMDGAHSADVCLSKTSEVISKCFEELILHKVDLSGIIL

SEQ ID NO: 149331 - protein, 251 aa, Unknown
  Bacterial polypetide isolated from the Sargasso Sea
MALSGYSSELIATAQSLATPGKGILAVDESTKTIGKRLGTIGVENTEANRQAYRGMLFTTAGLGEFISGAILYEETLFQNHADGESMVNKLGKLGIIPGIKVDKGLRPLGGAGSVETLCTGLDGLVERASDYYAQGARFAKWRAVLQITSDGCPSPLSVRENAWGLARYARSVQESGLVPIIEPEILMDGDHTIETTARIQEHVIQEVYHACHANGVLLEGTLLKPSMTVQAAECAEKVDPAKVAAMTVRT

SEQ ID NO: 149332 - protein, 111 aa, Unknown
  Bacterial polypetide isolated from the Sargasso Sea
MGIITLRQLLDHAAEKGYGVPAFNINNMEQGLAILKAAYETDSPVIMQASKGARAYAGDIMLSHIVIALSKMYPSIPICMHQDHGNNEATCMSAIGHGFTSVMMDGSLESD

SEQ ID NO: 149333 - protein, 244 aa, Unknown
  Bacterial polypetide isolated from the Sargasso Sea
DAKTPASYDYNIEVTAKVTEMAHLVGVSVEGELGCLGSLETGMGDKEDGHGFEGSLDKDMLVTDPDEAADFVKKTKCDALAVAIGTSHGAYKFTRKPTGDILAMDVVKAIHAKLPDTHLVMHGSSSVPQNLQDMINEFGGEMPQTYGVPVEEIETGIKNGVRKVNIDTDNRMAITGAIRKVLTQKKAEFDPRAYLKPALAAMEEVCVDRFERFNCSGQASRIKAIPLSDMAARYADGSLDPTVH

SEQ ID NO: 149334 - protein, 167 aa, Unknown
  Bacterial polypetide isolated from the Sargasso Sea
MVPIVEPEVLMDGDHSAENCSEKTYLVIKKCFDELIQHKVDLTGIILKPNMILAGNKSNNKISNEEVSSKTLECLKKSVPREVPGIAFLSGGQSEIEATENLNLINKNNDTNFIMTYSYGRALQQSALKFWSKDIKNIKGTQDIFNHRAKMCSLAAKGKWSKELENK

SEQ ID NO: 149335 - protein, 137 aa, Unknown
  Bacterial polypetide isolated from the Sargasso Sea
KEIHKRIPNTHLVMHGSSSVPQEWLKVINEFGGDIKETYGVPVEEIVEGIKHGVRKVNIDTDLRLASTGAIRRMMAEHPSEFDPRKFFAKTIVAMRDICIARYEAFGTAGNASKIKPISLEGMYQRYASGELNAKVN

SEQ ID NO: 149336 - protein, 237 aa, Unknown
  Bacterial polypetide isolated from the Sargasso Sea
MSELNNIALKIIGKGKGILAADESTGTMTKRLQSVSVESNAENRLKFRHALFSSESMTTCIGGVILYDETIKQEFNSKKIPKIISDKGAVPGIKVDTGAKNLANSSEEKITEGLDGLRDRLKEYYKLGARFTKWRGVYIISNNYPSKIAISTNAHALARYSALVQEAGMVPIVEPEVLMDGNHSAEICLTKTSEVIKKCFEELILQKVDLKGVILKPNMILPGSKYNQKISSDEIAA

SEQ ID NO: 149337 - protein, 215 aa, Unknown
  Bacterial polypetide isolated from the Sargasso Sea
MSELNRIALKIISNGKGILAADESNGTMTKRLDAVNVPSTPENRLLFRETLFSSESMQECIGGVILYDETINQKSSLGKPIPDLISSSGAVPGIKVDTGAKDLANSYDEKITEGLDGLRERLKKYYELGARFTKWRAVYNISGKLPSKLAVHSNAHALARYSALVQESKMVPIVEPEVLMDGDHSAELCLNKTSEVIKKCFEAIILHKVDLSGII

SEQ ID NO: 149338 - protein, 241 aa, Unknown
  Bacterial polypetide isolated from the Sargasso Sea
TRIITMPAFSGDRVLGAILFEGTMDRDVQGLPTGTYLWATKQIVPFLKIDKGLAPVENGVQLMKSILGLELTLERARAMGIFGTKMRSVVKEANTEGIQKIIEQQLEVGKQVVRHGLIPILEPEVDIHCPQKGEAEKILLDSLMLGLDSLVENEKVMLKLTLPEVNGFYTPCIEHPNVLKVVALSGGYSRDEASRRLAHQPKMIASFSRALVEGLSAQQSDEEFNTGLDASIQSIYDASIS

SEQ ID NO: 149339 - protein, 257 aa, Unknown
  Bacterial polypetide isolated from the Sargasso Sea
MLFRETLFSSESMKEYIGGVILYDETINQTTSFGKSIPDLISSSGALPGIKVDTGTKDLANSSEEKITEGLDGLKDRLKKYYELGARFTKWRGVYIISNKYPSKLAIKSNANALARYSALVQESGMVPIVEPEVLMDGDHSAELCLNKTSEVINKCFEELILHKVDLSGIILKPNMILAGNKSKSKISNEEVSQKTLLCLKNSVPNEVPGIAFLSGGQSEIEATENLNLINKNNNTKFIMTFSYGRALQQSALKNMV

SEQ ID NO: 149340 - protein, 230 aa, Unknown
  Bacterial polypetide isolated from the Sargasso Sea
MKNNFIFGKKNQQIFKLAKEKKFALPAVNVSGTNTINSVLETASEINSPVIIQFSNGGSQFIAGKGMPNKGFNSSISGSIAGAYHIHKTINEYNAKVIIHTDHCSKKLLPWIDGLIDYGKDYYRKNKYPLFSSHMIDLSEEPIEENISICKEYLKKLTDLEMTLEIELGVTGGEEDGVDNTDIDSSKLYTQPEEVAYAYSELISVSDRFMIAAAFGNVHGVYKPGNVKLT

SEQ ID NO: 149341 - protein, 234 aa, Unknown
  Bacterial polypetide isolated from the Sargasso Sea
LANASEEKITEGLDNLRDRLKKYYEIGARFTKWRGVYSIGEKYPSKLAINCNAHALARYSALVQENGMVPIVEPELLMDGNHSADVCLSKTSEVIKKCFEELILHKIDLSGIILKPNMILPGNDSKDKITGEEISIKTIECLKNSVPREVPGIAFLSGGQSELEATENLNLINKNNDTNFIMTYSFGRALQQSALRVWSKNTKDIEGTQRTFNHRAKMCTLAAQGKWMSEFENK

SEQ ID NO: 149342 - protein, 280 aa, Unknown
  Bacterial polypetide isolated from the Sargasso Sea
SMTEYIGGVILYDETIKQVTSKKNKIPELILEMGSVPGIKVDTGAKVLAGSPNEKITEGLDGLRERLKEYYYLGARFTKWRGVYNISKEYPSKLSIQSNAHALARYSALVQECNMVPIVEPEVLMDGNHSVQECFNKTSEVIKKCFEELILHKIDLKGVILKPNMILPGNECKDKISNEEVAKLTLKCLKNSVPSEVPGIAFLSGGQSEIEATENLNLINKYNDTDFIMSYSFGRALQQSALKFWSQDIRNIEGTQKIFNQRAKMNTFAAQGKWSKELEN

SEQ ID NO: 149343 - protein, 157 aa, Unknown
  Bacterial polypetide isolated from the Sargasso Sea
MTRTAQAEKMTFGPGFVAALDQSGGSTPKALSLYGIDENAYNNDDEMFNLIHQMRCRIMQSPAFKGDKVIGAILFENTMDREVAGKAAADFLWGERGVVPFLKVDKGLADEGNGVQLMKPMPELTSLLERAKAAGIFGTKMRSVINEANNKGIEEMQ

SEQ ID NO: 149344 - protein, 256 aa, Unknown
  Bacterial polypetide isolated from the Sargasso Sea
MSELNNIALKILENGKGILAADESTGTMTKRLEGVNVSSTPENRLLFRETLFSSTAMTECIGGVILYDETIRQQSSKKNKIPELISKMGSAPGIKVDTGAKILAGSPEEKITEGLDGLRERLKEYYKLGAKFTKWRGVYNISKNFPSRLSMESNAHALARYSALVQECNMVPIVEPEVLMDGDHAADECYNKTSEVIKKCFEQLIIHKVNLKGIILKPNMILAGNKSKNKISNEEVAKLTLKCLKDSVPSEVPGIA

SEQ ID NO: 149345 - protein, 314 aa, Unknown
  Bacterial polypetide isolated from the Sargasso Sea
DESNGTMTKRLENVNVFSSAESRLRFRSILLASDAMKTCIGGVILYDETIKQTVNSDTISKLISKSEAVPGIKVDTGAKILSSSKEEKITEGLDGLRERLEEYYKLGARFTKWRAVYNISEKFPSKVAISTNSHALARYSSLAQEAGMVPIVEPEVLMEGNHDSKICYQKTSEVIKKCFDELILQKIDLKGIILKPNMILPGTSSQEKTGPEEIAELTIKCLKESVPNEVPGIAFLSGGQSEVQATENLNMINLKNDTTFKMTYSYGRALQQSALKYWSNNQDNVAGTQSIFNHRAKMCTLAAKGQWKKNFEEN

SEQ ID NO: 149346 - protein, 239 aa, Unknown
  Bacterial polypetide isolated from the Sargasso Sea
EQKLLAVSPEEKITEGLDGLRERLKQYYKLGARFTKWRGVYTISKNYPSKLSIHSNAHGLARYAALVQECEMVPIIEPEVLMDGDHSAKTCFEKTSEVIKKCFDELILHKIDLSGLILKPNMILDGSSATKKISNEEVADLTLKCLKETVPQEVPGIAFLSGGQSEIEATENLNLINKKNNTNFIMTFSYGRALQQSALKYWSKNIKDITGTQKIFDHRANMCSLAAQGKWSKQFETQG

SEQ ID NO: 149347 - protein, 358 aa, Unknown
  Bacterial polypetide isolated from the Sargasso Sea
MSYSLKPGVVTGEDYLTLLKAAKEGGYALPAVNAVGTNSINAVLEAAAKNNADVIVQFSNSAGQFYAGKSLSDAFEAKVIGSVSAAQHVHLLAEKYGVCVVLHTDHANKPLIPWVEALVAHSESHYENTGSPLFSSHMLDLSAEEIDFNLSECKRLLERMAPIGMSLEIELGVTGGEEDGVGSDDDIGADNPLLYTQPEDCLQAWELLSPIGHFSLAASFGNVHGVYKPGNVKLRPEILKSSQELVENTCGTGSKPLDLVFHGGSGSDKSKISEALTYGVFKMNIDTDTQFAFAKAVGDYVNEFPRAFKYQIDPDDDTPYKKQYDPRKFLRLAEQSMVTRLDEAFHDLGSVGKSIAKR

SEQ ID NO: 149348 - protein, 224 aa, Unknown
  Bacterial polypetide isolated from the Sargasso Sea
MLDKLKTQTGFIAALDQSGGSTPKALRLYGIEESEYSSDEEMFNLVHEMRTRIITSTPFSGERVLGAILFENTLDREIEGMSSAHFLWQKKRVIPFLKVDKGLAEESNGVQVMKPMPGLDALLAKAVAQDVFGTKMRSVVKLANHQGIKDVVAQQFEVGKQILAAGLVPIIEPEVDIHSPQKAEAEALLKLEILTQLNLLNEGQEVMLKLTLPTEANFYKELVD

SEQ ID NO: 149349 - protein, 337 aa, Unknown
  Bacterial polypetide isolated from the Sargasso Sea
MSELYKIAEKILHNGKGILAADESTGTMKKRLDSVNVESSEKNRLIFRETLFSSNSMKECIGGVILYDETIRQNTSQKKSIPELISESGAIPGIKVDTGAKTLAGSKDEKITEGLDGLRERLKEYYLLGARFTKWRGVYIISDAFPSKLSMVANAHALARYAALAQEAGMVPIVEPEVLMDGKHSAKDCFNKTSEVIKRCYDELDINKVDLKGTILKPNMILTGTDSNETISNNEVAEMTLECLKNNVPSEVPGIAFLSGGQTEVEATNNLNQINVKNDTSFIMTYSYGRALQQSALKFWSKDINNIKGTQEVFDHRAKMCTLAAQGKWSESLENSK

SEQ ID NO: 149350 - protein, 327 aa, Unknown
  Bacterial polypetide isolated from the Sargasso Sea
MPLVPLRILLDHAAENDYGLAAFNVNNMEQIQAIMEAAKETDSPVIVQASRGARAYSQDNYLRHLMLAAAELYPGIPIAMHQDHGNSPATCESAIDNGFTSVMMDGSLKEDGKTPADFDYNVQVTTEVVKQAHSQGVSVEGELGCLGSLESGQGEAEDGHGAEGVLSQDQLLTDPDEAARFVEATGVDALAVAIGTSHGAYKFSRKPDGDVLAMKRIEEIHAKLPNCHLVMHGSSSVPQELQDIINKYGGEMPQTYGVPVEEIQRGIKHGVRKINVDTDCRMAITGAIRKVLAESPAKFDPRDYLKPARAAMQKVCAERMVQFGQAG

SEQ ID NO: 149351 - protein, 336 aa, Unknown
  Bacterial polypetide isolated from the Sargasso Sea
MSELNNIALKILSHGKGILAADESTGTMTKRLNTVNVESTQENRLLFRETLFSSESMKTCIGGVILYDETIKQISSSKKTIPELISLSGAVPGIKVDTGAKSLPDSPDEKITEGLDGLGDRLKDYYKLGARFTKWRGIYIISKKYPSKLSIDANANALAKYSSIVQENGMVPIVEPEVLMDGDHTAEDCLNKTSEVLKKCFEELIQHNVSLEGIILKPNMILPGNKSNEKISNEKIAHLTLKCLKDSVPKEVPGIAFLSGGQNEIEAAENLNLINKYNDTNFIMSYSYGRALQQSAIKFWSKDIKNIKGTQEIFNHRANMCSLAAQGKWSKELEAK

SEQ ID NO: 149352 - protein, 337 aa, Unknown
  Bacterial polypetide isolated from the Sargasso Sea
MRDLNTIEEVAKYIIEDGKGILAADESNPTCGKRFDSIGVESNEENRRDYREMLFRSEGMKGNIGGVILFDETIRQKAKDGTPLVNIILDQGALPGIKVDKGLQNIGDSEESLTQGLEGLNERLKEYYSLGARFTKWRAVIKVSDSLPSEEAILSNMSALAEYAKLVQENNMVPMVEPEVLMDGNHSIDQCFEATSRSLECLFGLLNDKGVNIKGTILKPNMVTAGSDSPVKADIEEVANQTLKCLKMHVPDDLPGVTFLSGGQSDVDSTAHLDAMNKIGGFTWKLSFSYGRALQQPALKAWMGKNENTSLAQEALSHRAHMNSLASEGSWSSSLEN

SEQ ID NO: 149353 - protein, 305 aa, Unknown
  Bacterial polypetide isolated from the Sargasso Sea
VLNQLENMLSNILKKMVEAATEEFLEIPIVLHQDHGGSPEDCKNCIELGFTSVMMDGSLKEDQKTPSDYNYNIKVTKRTVDIAHSVGVSVEGELGCLGSLETGTGEKEDGVGADGILSHDQLLTDPNEASDFVNQTNVDALAIAIGTSHGAYKFSKPPTGETLAMGRIREIHERLPNTHLVMHGSSSVPKELISIINKFGGKINETYGVPLSEIKEGIKNGVRKINVDTDLRLASTAAIRKFFFENPSEFDPRKYLVLSKDEMKDIVKNRLEEFGTAGNASKIKPSSLSVMVSRYKSGELTSIVN

SEQ ID NO: 149354 - protein, 135 aa, Unknown
  Bacterial polypetide isolated from the Sargasso Sea
MNIEEIAKQMVAKGKGILAADESTGTMEKRLKSVNVESNEKNRLHFRETLFTSPAMATCISGVILFDETIRQVSSSGISIPELIKKNGSIPGIKVDKGAKSLAGSNNEKITEGLDGLRSRMEEYYKLGARFAKWR

SEQ ID NO: 149355 - protein, 339 aa, Unknown
  Bacterial polypetide isolated from the Sargasso Sea
MDRELLEKNARFLVSPGRGILAADESNGTMSNRLEAVGVEASSETRRAYRANLFSTEGYESAISGVILFDETIRQTMKDGTPIPVELSSRGILPGIKVDTGAKELANHEGEKITEGLDGLRERCSEYFAMGARFAKWRAVIRIDEGLPTKACIATNAHALARYSAICQEQGLVPIIEPEVLMDGDHDARRCYEVTAEILDATFSECESQGVHIPGALLKPNMIIQGNDCENQISREEVANLTVECLTNHVPHDLPGIVFLSGGQSDEDATAHLNLMNKMTLEHPWELSYSYGRALQADALRKWAEETEDSDISSQTAFSHRAKMNSLARFGDWNQELES

SEQ ID NO: 149356 - protein, 354 aa, Unknown
  Bacterial polypetide isolated from the Sargasso Sea
MSLISLRQLLDHAAENNYGVPAFNVNNLEAIRAIMEGAKELNSPVILQASGAARKYAGPIFVKKLVEAAMDEFSDIPTVLHQDHGGSPSDCKSCIDLGFTSVMMDGSLLDDQKTPSDFDYNVKVTRQTTDMAHALGVSVEGEIGCLGSLETGTGEKEDGVGAEGKLDHDQLLTDPDEASDFVKATNVDALAIAIGTSHGAYKFSRPPTGDILAIDRIKEIHSRLPNTHLVMHGSSSVPQDLIKTINEYGGKIKETYGVPVSEIQEGIKHGVRKVNVDTDLRLAATAAVRKYFHENPSQFDPRKYLLLSKDAMKEVVKSRLEEFGTAGNASSINSISLGEMATRYKSGEFKAVIN

SEQ ID NO: 149357 - protein, 293 aa, Unknown
  Bacterial polypetide isolated from the Sargasso Sea
RLAFREIIFSSDGMKDCIGGVILYDETINQISSTGKSIPDLISTSGAVPGIKVDTGAKDLASSPEEKITEGLDGLRNRLKKYYNLGARFAKWRGVYSISEKYPSKLAISSNSHALARYSALVQESGMVPIVEPEVLMDGNHSAEDCLNKTSEVIKKCFEELILHKIDLSGIILKPNMILSGSLSKNKISSEEVSIKTLECLNNSVPNEVPGIAFLSGGQSEIEATENLNLIYKNNNTNFIMTYSYGRALQQSALKVWSNDIKNVEATQTTFNHRAKMCTLAAQGKWSSELENK

SEQ ID NO: 149358 - protein, 232 aa, Unknown
  Bacterial polypetide isolated from the Sargasso Sea
MSNLEDIAKQMVMPGKGILAADESSGTIKKRFDSIGVESTEENRRNYREMLFQSKNAMENYISGVILFDETLRQESKNGQPLVEVIANSGSLPGIKVDTGAKDLAFNSNEKITEGLDGLRERLIEYFNLGAKFAKWRAVITIEDSIPSDLCINSNAHALARYAALCQENGIVPIVEPEVLMDGKHTIERCYDVTKKTLDVVFNELIAHGVNLKGICLKPNMIIDGTLTSEKS

SEQ ID NO: 149359 - protein, 264 aa, Unknown
  Bacterial polypetide isolated from the Sargasso Sea
MSDLNKIALKILSNGKGILAADESNGTMTKRLEAVKITSTPENRLLFRKTLFSSESMKDCIGGVILYDETINQTLSSDETIPNMINKSDTVPGIKVDTGAKVLLNSPEEKITEGLDGLKERLKRYYELGARFTKWRGVYNISEKYPSKLAINSNAQALAKYSALVQECFMVPIVEPEVLMDGDHSAEDCLNKTSEVIQKCFEELILHKVDLTGIILKPNMILAGNKSKDKISNEEVSMKTLECLKNLYRVKCQELLFCPEVNLK

SEQ ID NO: 149360 - protein, 299 aa, Unknown
  Bacterial polypetide isolated from the Sargasso Sea
STEENRNAYRDMLFTTPGMEKFISGVILFDETFRQSSLADGKRYPDYLKNLGVIPGIKVDKGAHPLPGSEEEKVTEGLDGLNSRLKEYYDLGARFAKWRAVITIGESAPSGTCLVANAHALARYASLCQENGIVPIVEPEILMEGEHTIEESFIVTEEVLHATFNELHSQNVLLEGMVLKPNMVLSGYGCSEQANVDEVAEMTVTVLKRCVPSAVPGIAFLSGGQSDEDATAHLNKMNQILGNNNPWNLTYSYGRALQAPALAAWGGKQENVKKAQDAFYKRAKLNSLASKGEYGSDME

SEQ ID NO: 149361 - protein, 168 aa, Unknown
  Bacterial polypetide isolated from the Sargasso Sea
MVPIVEPELLMDGKHNINVCNDVTSMIMEETFYQLANNNVDVEGIVLKPNMILNGSESNTKNNPSEVAKLTLNCLKKNVPSGVPGIAFLSGGQSEFEATMNLNEINKVNDSKFAFTFSYGRALQQSALKIWAKDLKDTKSVQHAFEERAKMNSLAAQGKWNKELEKAA

SEQ ID NO: 149362 - protein, 331 aa, Unknown
  Bacterial polypetide isolated from the Sargasso Sea
MDKNILEETAKKMMTKPKGILAMDESSPTIAKRLASINTENNEINRRKYRELIVTAPNLSSYISGAILFEETFEQKMSDGILFRDYLNSIGILPGIKVDKGAKDFSCHPNEKITEGLDGLRERLAGYYTNGAKFCKWRAVITIDQDIPSEACIESNMNALARYASLCQENNLVPIVEPEVLINGAHTIEQCDTVTRKSLESLFKNLDMLNVHLPGTVLKPSMVISGQDNGSRADNNTVANMTVDCLSDCVPDTTSGIAFLSGGQSDTEAEEHLNIMNKKNNLPWRVTFSYARAIQAAALAAWQGDDTNLANAQKILINRASRCSKASIGEL

SEQ ID NO: 149363 - protein, 134 aa, Unknown
  Bacterial polypetide isolated from the Sargasso Sea
MGVYKPGNVKLTPKILKNSQEHISKTLDLPYNPVDFVFHGGSGSSKEEIKEAIGYGVVKMNIDTDLQYAFTEGIRDYMNNKFDYLNSQIGNPEGADIPNKKYYDPRIWLRLGEKTFIERLKKAFEDLNNVNTLD

SEQ ID NO: 149364 - protein, 168 aa, Unknown
  Bacterial polypetide isolated from the Sargasso Sea
MNLNEIAKKMCAKGKGILAADESTGTIAKRFKSINVENLEKNRLNFRQTLFNSKAMKEFIGGVILFDETIRQKTTLGPSIPELISKHGAVPGIKVDKGAKPLAGSSDETITEGLDGLRERLNEYYNLGARFTKWRAVYKISEKFPSIQSIKSNAQALARYAALVQEAK

SEQ ID NO: 149365 - protein, 295 aa, Unknown
  Bacterial polypetide isolated from the Sargasso Sea
MNNEQLNKVQHDDGFIAALDQSGGSSPKALMNYGIEDNAYDNDEEMFNLIHEMRTRIMTSNSFNGDRILGAILFENTMDREVLGQSTASYLWEEKRVVPFLKVDKGLGDEEHGVQLMKPMPDLGSLLERAKENQIFGTKMRSVIKSANESGINSIVDQQFEVGKQILDAGLIPIIEPEVDIHSTDKGECESILLDSIVQNLEGLSGSQAIMLKLTLPEEDNFYRELISDQRVLRVVALSGGYSRLESNERLGRNNGMVASFSRALTEGLSAQQSDTDFDELLDSSIQSIFDASSS

SEQ ID NO: 149366 - protein, 217 aa, Unknown
  Bacterial polypetide isolated from the Sargasso Sea
KEYYDLGARFTKWRAVYKISDKFPSAQSIKSNAHALARYAALVQEAKMVPIVEPEVLMDGSHNIDKCYQVTTNVLNECYNELEIHKVDLSGTVLKPNMVIPGSECKDKSNTEEIAKKTLDCLKKNVPGDVPGIAFLSGGQSEIESSKNLNEINKINDSNFLITFSYGRGLQASALKEFGKNQENTENIQKAFNHRAKMNGLSSKGEWSEELEKEFAA

SEQ ID NO: 149367 - protein, 189 aa, Unknown
  Bacterial polypetide isolated from the Sargasso Sea
LLSIDNHVQLLKPINDLKNSLKLAKENEVFGTKMRSVIIGANETGIKDIVDQQFDVASEILSYGLIPIIEPEVAITIPDKKEAEDLLYENLRSRLDQIGSNKKVILKLSLPDQDNLYEPLTNHPNILRIVALSGGFKKNEAVAKLTRNTKIIASFSRALAEGLKRNDPKEQFEKQLEQTIQSIYEASLT

SEQ ID NO: 149368 - protein, 238 aa, Unknown
  Bacterial polypetide isolated from the Sargasso Sea
KGLQPLNGSEIETLTQGLDDLDERCVEYAALGAKFTKWRAVISIGQNIPSQECIDANMEALASYAKTAQKHGMVPIVEPEVLINGEHSIEDCYDATSRSIKSLFDYLDSYDVDISGTILKPNMVTPGLDHAHTATVEEVAEATVKCLNDNVPTELPGIAFLSGGQTEIESTEHLNMMNKIGGFPWKLSFSYGRALQASALSAWLGKKENISAAQDAFSHRAEMNKLASLGKWSHSLEE

SEQ ID NO: 149369 - protein, 297 aa, Unknown
  Bacterial polypetide isolated from the Sargasso Sea
NPENRLIFRETLFKSDSMKDCIGGVILYDETIKQSSITKKKIPELISDLNSIPGIKVDTGAKNLANSKEEKITEGLDGLRERLNEYYKLGARFTKWRGVYIISDKYPSKLSIKSNAHALARYSALAQECGMVPIVEPELLMDGNHSADECYKKTSEVIKYCFEELELNKVNLKGVILKPNMILPGSNSNIKISNEEIAKLTVKCLKDSVPSEVPGIAFLSGGQTDIEATENLNLINIHNDTNFIMTFSYGRALQQSALKFWSKDIKNISGTQKVFNHRATMCSLAAQGKWSKELENK

SEQ ID NO: 149370 - protein, 213 aa, Unknown
  Bacterial polypetide isolated from the Sargasso Sea
KEYYNLVQKLPKWRGVYSISKDYPSKLCIQSNAHALARYSALVQECNMVPIVEPEILMEGDHTAKDCFQKTSEVIKKCFEELVLHKVDLTGIILKPNMILAGDKSKDKITNEEIAKLTIECLKDSVPSEVPGIAFLSGGQSEIEATENLNLINKYNTTNFIMSFSYGRALQQSALKFWAKNIKDIEGTQKVFNHRAKMNTLAAQGKWSKELEN

SEQ ID NO: 149371 - protein, 225 aa, Unknown
  Bacterial polypetide isolated from the Sargasso Sea
TEGLDGLRERLKNYYELGARFTKWRAVYLISDNYPSKLAINVNAHALARYASLVQEAGMVPIVEPEVLMEGNHSAQDCFNKTSEVIKKCFDELIFQKVDLKGVLLKPNMILPGLNSNQQISSDQIAELTLNCIINSVPSEVPGIAFLSGGQSEFEATKNLNTINKNNRTKFIMTYSYGRALQQSALKHWSSNINDVEGTQKVFNHRANMCSLASMGKWTEEVDKN

SEQ ID NO: 149372 - protein, 210 aa, Unknown
  Bacterial polypetide isolated from the Sargasso Sea
MSELNNIALKIIEKGKGILAADESTGTMTKRLDSVNVPSTPENRLLFRETLFSATSMTECIGGVILYDETIKQLSSKKNKIPELISNMGAAPGIKVDTGAKALAGSLDEKVTEGLDGLRERLKEYYKLGAKFTKWRGVYSISKNYPSKLSIEANAHALARYSALVQECNMVPIVEPEVLMDGEHSAKECYEKTSNVIKKCFEELFCIKLI

SEQ ID NO: 149373 - protein, 203 aa, Unknown
  Bacterial polypetide isolated from the Sargasso Sea
MSEIHNTANQIISNGKGILAADESTGTMTKRLESVEIESTEINRLIFREALFSSSSMKECIGGVILYDETIKQKSSNGTPIAELIKKNGSYTGIKVDTGAKSLAGSKNEKITEGLDGLRERLKNYYKLGARFTKWRGVYLIDHKYPSKLCIAANAHALARYAALVQEAGMVPIIEPEVLMDGNHSSDDCLLKTSEVIKKCLKN

SEQ ID NO: 149374 - protein, 198 aa, Unknown
  Bacterial polypetide isolated from the Sargasso Sea
MSELNNIALKILSHGKGILAADESTGTMTKRLSAVNVESTPENRLLFRETLFSSESMKTCIGGVILYDETIKQNTSSKKTIPDLISLSGAVPGIKVDTGAKSMMDSPDEKITEGLDGLGERLRDYYKLGARFTKWRGIYVISKNYPSKLSIDANANALAKYSSVVQENGMVPIVEPEVLMDGDHTAEDCLNKTSEVIK

SEQ ID NO: 149375 - protein, 236 aa, Unknown
  Bacterial polypetide isolated from the Sargasso Sea
VPLVDGSDEVVTQGLDGLDERCSEYDSLGAKFTKWRAVIKIGDSIPSDDCINANAKALADYAAIAQSNNMVPIVEPEVLMDGDHSIDLSFDACARSFQALFDALENNGVNIKGTILKPSMVTPGSLSEKVAIREVAEMTVRCLKENIPSDLPGVAFLSGGQTELEATAHLNEMNKIGGEFPWKLSFSYGRALQQSALKAWSGKSENLFIAQDELSHRAEMNKLAALGQWDIKLEDR

SEQ ID NO: 149376 - protein, 168 aa, Unknown
  Bacterial polypetide isolated from the Sargasso Sea
MTIEDIAKQMVTKGKGILAADESTGTMGKRLKSVNVESTEENRLHFRETLFSSAAMKSSISGVILYDETLRQTSSKGISIPDLIKKSGSIPGIKVDKGVKLLAGSNDEKITEGLDGLRERMKEYYKLGARFAKWRAVYSITQKHPSEQSIKANAHALARYAAIVQEAQ

SEQ ID NO: 149377 - protein, 162 aa, Unknown
  Bacterial polypetide isolated from the Sargasso Sea
MSLEEIANYIVSDGKGILAADESNPTCGKRFDSIEVENSEDNRRDYREMLFRSKGMKGNIGGVILFDETLRQDAKDGTPLKELISNMGALPGIKVDKGLVPLVDGLDEVVTQGLDGLDERCSEYDSLGAKFTKWRAVIKIGDSMPSDDCINANAKALADYAA

SEQ ID NO: 149378 - protein, 309 aa, Unknown
  Bacterial polypetide isolated from the Sargasso Sea
MTKRLQSVNVESTPENRILFRETLFSSKGMTDCIGGVILFDETINQKTNNGEKVSELLSKMGSLAGIKVDTGAKQLAGSPKEKITEGLDGLRERLKEYYKIGARFTKWRGVYNITKDCPSKLSIDSNAHALARYAALVQECNMVPIVEPEVLMDGNHSADECFNKTSVVIKKCFKDLILHKVDLTGVILKPNMILAGTESKNQISNKETAKLTIKCLKESVPNEVPGIAFLSGGQSEVQATENLNLINKFNDTNFIMSYSYGRALQQSALKHWSKDIKDIKGTQMIFDHRAKMCTLAAQGKWSINLENN

SEQ ID NO: 149379 - protein, 250 aa, Unknown
  Bacterial polypetide isolated from the Sargasso Sea
TGALPGIKVDTGAKVLANSSDEKITEGLDGLRDRLKEYYSLGARFAKWRGVYIITDKYPSKISIISNAHSLARYSALVQESGMVPIVEPEVLMDGDHTAEICYEKTSEVIKRCYEELILHKVDLSGTILKPNMILPGIKSDQKLSSKEIAELTIKCLTENVPKEVPGIAFLSGGQSEIDATKNLDAINKINNSNFIMTYSYGRALQQSALKHWSKNLDDIQGTQKVFNHRARMCSSASKGEWSEEIEKKQ

SEQ ID NO: 149380 - protein, 272 aa, Unknown
  Bacterial polypetide isolated from the Sargasso Sea
MSELNNIALKIIGDGKGILAADESTGTMSKRLENVNIVSSAESRLTFRETLFSSDSMKTCIGGVILYDETIKQTGSNGKKIPELISNASSVPGIKVDTGAKVLANSSDEKITEGLDGLRERLKEYYKLGARFTKWRAVYIISKDCPSKLSITSNAHALARYAALAQESGMVPIVEPEVLMDGNHTAEDCLKKTSEVIKKCYDELILNKIELKGTILKPNMILPGNKSKEKISSEEIAKLTLECLKESVPTEVPGIAFLSGGQTETEATENLN

SEQ ID NO: 149381 - protein, 240 aa, Unknown
  Bacterial polypetide isolated from the Sargasso Sea
MSELNKIALKIISNGKGILAADESNGTMTKRLEAVNVKSTPENRLAFREILFSSDGMKDCIGGVILYDETINQISSTGKSITDLISSFGAVPGIKVDTGAKDLANSPKEKITEGLDGLRDRLKKYYDIGARFTKWRGVYSIDEKYPSKLAISSNAHALARYSALVQESGMVPIVEPEVLMDGNHSAEICFNKTSEVIKKCFEELILHKVDLSRIILKPNMILPGNLSENKISNEEVSIKT

SEQ ID NO: 149382 - protein, 231 aa, Unknown
  Bacterial polypetide isolated from the Sargasso Sea
MSELNNIALKIIGNGKGILAADESTGTMTKRLDSVNVKSNSENRLLFRETLFTSDRMRDCIGGVILYDETIKQCGSSGKTIPEIISETGSVPGIKVDTGAKDLANSKEEKITEGLDGLRERLKTYYALGARFTKWRGVYLISDNYPSKLSINSNAHALARYSALAQECGMVPIVEPEVLMEGNHSADDCYEKTSIVLKKCFDELELHKIDLKGNNIKTKYGFCLDQNLQRK

SEQ ID NO: 149383 - protein, 248 aa, Unknown
  Bacterial polypetide isolated from the Sargasso Sea
MSLNTLEEIAEYIVSDGKGILAADESNPTCGKRFDSIGVESTESNRRDYREMLFRSSGMKDNIGGVILFDETIRQNAQDGTPLIELIKNQGALPGIKVDKGLAPLDSSPEETLTQGLDGLDERCKEYFTLGAKFTKWRAVIKISDDIPTDACIQANMEALARYAKIVQENNMVPMVEPEVLMDGNHSIERCYEVTSKSLNTLFKCLKDQGVNIAGTILKPNMVTSGSTAEAQASIQEVAEMTVQCLKE

SEQ ID NO: 149384 - protein, 148 aa, Unknown
  Bacterial polypetide isolated from the Sargasso Sea
MTLNNIEEIATFIVEDGKGILAADESNPTCGKRFESIGVESTEENRRDYREMLFRSKGMKGNIGGVILFDETIRQSSEDGTLLRDIISNQGALPGIKVDKGLQPIEDCPGETVTIGLDGLDERLKEYSSMGAKFTKWRAVINIGDGIP

SEQ ID NO: 149385 - protein, 172 aa, Unknown
  Bacterial polypetide isolated from the Sargasso Sea
MALVPLRLLLDHAAENGYGIPAFNVNNLEQVQAIMEAAYETDSPVILQASRGARNYAGEIFLRHLILAATETYPNIPVVMHQDHGNEPSTCYSAAINGFTSVMMDGSLEADAKTPASYEYNVAVTKKVVDFAHSVGVSVEGELGCLGSLETGKGEAEDGHGFEGELSTEYAL

SEQ ID NO: 149386 - protein, 62 aa, Unknown
  Bacterial polypetide isolated from the Sargasso Sea
MQNITTSWFVQGMIKATSDAWLKGWDERNGGNLTLRLDEADIAPFSADFDEKPRYIALSQPM

SEQ ID NO: 149387 - protein, 136 aa, Unknown
  Bacterial polypetide isolated from the Sargasso Sea
HCHATNLIALTYVLENNSDLFTRKLWEGSTECLVVFPDGVGILPWMVPGTDEIGQATAQEMRKHSLVLWPFHGVFGSGPTLDETFGLIDTAEKSAEVLVKVYSMGGMKQTITREELIALGKRFAVQPMQSALDLYQ

SEQ ID NO: 149388 - protein, 175 aa, Unknown
  Bacterial polypetide isolated from the Sargasso Sea
MKVCKLGAKEIDIVISRRHVLTQNWQELFNEVKAFRSACGDAHLKTILATGELGSLRNVARASMVCMMAGADFIKTSTGKESINATLGTSIVMVRAIREYWEKTGFKVGYKPAGGISKAKDALVYLSLIKEELGNDWMDASLFRFGASSLLGDIERQLEHYLTGNYSANYRHPLG

SEQ ID NO: 149389 - protein, 248 aa, Unknown
  Bacterial polypetide isolated from the Sargasso Sea
RVKRLCAKAKNPISSKLLEDLDLDNITVGAVCVYHDMIEAAVSKLKGTRIPVAAVSTGFPAGLSPLPLRIAEIEYSVSAGASEIDIVISRRHVLTQNWKALYEEVKDFRKACGSAHIKTILATGDLGTLRNVARASAVCMMAGADFIKTSTGKEPINATLPVSLVMVRAIREYHEKTGYKIGYKPAGGISKAKDALTYLSLIKEELGDQWLNPELFRFGASSLLGDIERQLEHHITGAYSASYRHAMG

SEQ ID NO: 149390 - protein, 268 aa, Unknown
  Bacterial polypetide isolated from the Sargasso Sea
MSGKSDQRNTGTPLDLDWVDAVQVNRSAVERRCSSLTKRRSIKKEWQAAWLLKAIRCMDLTTLSSDDTPDRVRRLCSKALRPLKQELTNDLGITSLNLTVGAVCVYHALVETAAKVLKGSNIPVAAVSTGFPHGLSPLPRRIEEIRDSVSAGALEIDIVITRAHVFSGNWEALYQEIKSFREACGDSHLKTILGTGELGSLRNVAKASLVCMMAGADFIKTSTGKEPQNATLPISLVMLRMIRDYHQKTGHKVGFKPAGGIRAAKQAL

SEQ ID NO: 149391 - protein, 185 aa, Unknown
  Bacterial polypetide isolated from the Sargasso Sea
MKNLAHFIDHTNLSPDAKSIDIEDLCSEAIKYDFASVCLNPVYVPIAKSILKDSKPIICSVVGFPLGADSAEMKYAEARFLIFNGVEEIDMVLNIGALKERNTNIIQKEIKKVVDAAEGKIVKVIIETCLLNNHEKVLASKIVRDCGANFVKTSTGFSAFGATIDDVKLIKKTIGDEIGIKASEE

SEQ ID NO: 149392 - protein, 254 aa, Unknown
  Bacterial polypetide isolated from the Sargasso Sea
IDLTTLEGKDTTNKVIQLCNKAMNLHDGLQLPKVAAVCVYPNMVAIAKKALGDSGIHVAAVATAFPSGMSNRKVKLEDTKMAVEQGADEIDMVISRGKFLEGDYAYVFDEIAAIKEKCNKARLKVILETGELGSPDQVRRASDIAIKAGADFIKTSTGKISPAATMPITLLMLEAIRDHYLATGKMVGMKPAGGISDAKLSLHYLVMVKETLGDQWMSNEWFRFGASRLANDLIMQIQKQKTGHYQSADYFSKD

SEQ ID NO: 149393 - protein, 124 aa, Unknown
  Bacterial polypetide isolated from the Sargasso Sea
DLETMRNVAKASLVCMMAGADFIKTSTGKESTNANLNNSLVMLRMIREFYEVTNKKVGFKPAGGISTSKSVIEFLILVMEELGSEWINPKLLRIGASSLLIDIERQLYHFAVGRYANKEKLAIG

SEQ ID NO: 149394 - protein, 163 aa, Unknown
  Bacterial polypetide isolated from the Sargasso Sea
IVITRAHVFTKNWQALYDEIRSFREASSSAHLKTILGTGELGTFRNVAKASLVCMMAGADFIKTSTGKERVNATLPVSLVMLRMIREYLEKTGYSVGFKPAGGISTARQSLEWLVMMKEELGREWMEPNLFRFGASGLLTDIERQLEHHTTGRYSAAHRQPAT

SEQ ID NO: 149395 - protein, 171 aa, Unknown
  Bacterial polypetide isolated from the Sargasso Sea
MNRIASLIDHTNLKPDASEIDIKNLCLQAIKYEFFSVCVNPIYVPKAVEILKSEKPKVCTVIGFPLGADFPKTKSTETQTLRYVGAQEFDMVVNIGAIKNGNYEITKTEISNVVNAAKGACVKVIIETCLLAKNEIIKVCNIVKDSGATFVKTSTGYSHTGATAENVTIMK

SEQ ID NO: 149396 - protein, 134 aa, Unknown
  Bacterial polypetide isolated from the Sargasso Sea
SHLKTILGTGELGSLRNVAKASLVCMMAGADFIKTSTGKEPQNATLPVSLVMLRMIRDYHQKTGHKVGFKPAGGIRTAKQALEWQILMKEELGREWLEPELFRFGASGLLTDIERQLEHFLTGRYSAAYRQPMG

SEQ ID NO: 149397 - protein, 112 aa, Unknown
  Bacterial polypetide isolated from the Sargasso Sea
DQNWKSHIQYLEQLRQVVGLRSYGQRDPLIEYKREAFELFSNLLDKLKFDYITILMNLKVIVETKEKTNSRKEISKSGNPKCLLFIKKDQKISRNERCEATGKKFKNCCGSL

SEQ ID NO: 149398 - protein, 283 aa, Unknown
  Bacterial polypetide isolated from the Sargasso Sea
KSINKKFYDLDIDWVNNIKVNLSAIERRTLSLTKRRTVKKEFQVAWLLKSITLIDLTTLSGDDTYGKVDRLCQKALNPISSNILNALDLHKANIKVGAVCVYHHLVSHAHKMVKGELPIAAVSAGFPAGLSSYQTRKREIKESIKAGAQEIDIVINRGYVLQNNWKKLYDEVRSFKEIAKNVKLKTILGVGELETLRNVAKASLVCMMAGADFIKTSTGKEKTNANLNNSLVMLRMIREFNEFSGKKVGFKPAGGISTAKIVLDFMILIYEELGIDWLNQKFI

SEQ ID NO: 149399 - protein, 251 aa, Unknown
  Bacterial polypetide isolated from the Sargasso Sea
TLEGRDTPGKVRQMCYKAKHLHDSMSGLPTVAAVCVYPTMVKIAKKELSGTSINVAAVATAFPSGLAPMSVKIDDTKYAVQEGADEIDMVISRGRFLAGEYNFVFDEIAAVKEACGKAHLKVILETGELNTLDNVRRASDIAMYAGADFIKTSTGKIAPAATMPVTLVMLEAIRDFYFKTGIMIGMKPAGGISKAKLALHYLVMVKEVLGANWLTSEWFRFGASSLANDVLMQLVKLDTGNYQSMNYFSID

SEQ ID NO: 149400 - protein, 284 aa, Unknown
  Bacterial polypetide isolated from the Sargasso Sea
MSRHSRNKGMALNLDWIDSVQMNRSAIERRCSSMSKRRSIKKDWQAAWLLKSLSCIDLTTLSSDDTHERVRRLCAKARQPLRPELAESLGLKGIKTQVAAVCVYHSFVKTAVKALQNSKIPVAAVSTGFPHGLNSLPRRIEEISDSINDGAEEIDIVITRAHVFSKNWQALYDEISAFREASGTAHLKTILGTGELGTFRNVAKASLVCMMAGADFIKTSTGKEGINATLPVSLVMLRMIREYLENTGYSVGFKPAGGIRTASQSLEWLIMIKEELGREWRNRK

SEQ ID NO: 149401 - protein, 316 aa, Unknown
  Bacterial polypetide isolated from the Sargasso Sea
MSGKSDQRNPGIPLDIDWVDAVQVNRSAVERRCSSLTKRRSIKKAWQAAWLLKAIRCMDLTTLSSDDTPDRVRRLCSKALKPLKQELSNDLGITSLNLTVGAVCVYHALVETAAKALKGSNIPVAAVSTGFPHGLSPLPRRIEEIRDSVSAGALEIDIVITRAHVFSGNWEALYQEIKSFREACGGSHLKTILGTGELGSLRNVAKASLVCMMAGADFIKTSTGKEPQNATLPVSLVMLRMIRDYYQKTGHKVGFKPAGGIRTAKQALEWQILMNEELGREWLEPELFRFGASGLLTDIERQLEHFVTGRYSAAYR

SEQ ID NO: 149402 - protein, 160 aa, Unknown
  Bacterial polypetide isolated from the Sargasso Sea
TRAHVFSKNWQALYDEISAFREASGKAHLKTILGTGELGTFRNVAKASLVCMMAGADFIKTSTGKEGVNATLPVSLVMLRMIREYLENTGYSVGFKPAGGIKTAKQSLEWLIMLKEELGREWMEPEMFRFGASGLLTDIERQLEHHVTGRYSAAHRQPTA

SEQ ID NO: 149403 - protein, 319 aa, Unknown
  Bacterial polypetide isolated from the Sargasso Sea
MLPKAIIPRNTGIDLDLDWVSSIQANTSAIERRATTIASRRSIKKQHQAAWLIQAVRCMDLTTLSGDDTIGRVKRLCAKAKKPISTTLTDKLGLNNVKVGAVCVYHDMIETAVSKLTGSGIPVAAVSTGFPAGLSPLPLRIAEIEYSVSAGASEIDIVISRRHVLTQNWKALYEEVKDFRKACGSAHIKTILATGDLGTLRNVARASAVCMMAGADFIKTSTGKEPVNATLPVSLVMMRAIREYHEKTGFKIGYKPAGGISKAKDALTYLSLVKEELGDQWLSPDLFRFGASSLLGDIERQLEHYTTGVYSASYRHAMG

SEQ ID NO: 149404 - protein, 326 aa, Unknown
  Bacterial polypetide isolated from the Sargasso Sea
MDQILNHHSLNELRNQGLPYDEKLFLDISVNMSAIERRCATAVKRRAVKKESQVAWLLKAISCIDLTTLSGDDTPGRVRRLCAKAKSPIKRDLVDSLDVEELNLNVGAVCVYHDMITHAKAALAGSEIPIAAVSTGFPAGLTPFKLKVLEIHESVAAGADEIDVVISRKHVLNGDWKKLYDEVKEYKAACGSSHLKTILATGELGTLRNVAKASWVCMMAGADFIKTSTGKESINATLPVTLVMLRAIRDFYELTGQRIGYKPAGGISKAKDSINYLILVKEELGRNWLTPNLFRFGASSLLADIERQLEFYATGNYSAFNRHGIA

SEQ ID NO: 149405 - protein, 239 aa, Unknown
  Bacterial polypetide isolated from the Sargasso Sea
MEARGILELIDLTLLDRSASEEDIASLCRVANEQGTAAVCVFPEHAQLVRRHLQEGVSLAVVAGGFPEGTESPEDISLAIAEAVSSGADEIDCVLEPRDSGDFPGQEELAKLIAMREASSGLVLKVIVETPMLGGRQIRAVARMALSTGADFVKTCTGKRGPCSEEHAEILADEVSRHCLSFEGAPGIKLSGGISRREDAERLVGLVMSRDESISGAGRLRIGASSLVDDIVSGGLGRN

SEQ ID NO: 149406 - protein, 267 aa, Unknown
  Bacterial polypetide isolated from the Sargasso Sea
MIPATAFAPACAATEAASRAIRLMDLTSLNDDDHDARIIALCHQAQTPVGNTAAVCIYSRFVGLARLTLAAQGTPEIKVATVVNFPHGDDELDVVLAETRAALLDGADEIDLVIPWRALKVGDEAPARVLVRGCKALCGPRLLKVIIESGELQEPALIRAASLLAIEEGADFIKTSTGKVPVNATPEACRTMLAAIAECGAQHRVGFKAAGGVKSAQEAAEYLAMAAALFGDEWLVAERFRFGASSLLGQLLATIEGKKPVAADGSY

SEQ ID NO: 149407 - protein, 65 aa, Unknown
  Bacterial polypetide isolated from the Sargasso Sea
AFIKTSTGFSFNGATIEDVRLIRKTVGNEVGVKASGGLNTLKKVQSMIDAGANRIGTSSGASLMI

SEQ ID NO: 149408 - protein, 75 aa, Unknown
  Bacterial polypetide isolated from the Sargasso Sea
ASSLVKECGANFIKTSTGFSSAGATIKDVRLIKKVVGDRVGVKASGGIKTKKEALLFIKAGADRIGTSRGIEIVS

SEQ ID NO: 149409 - protein, 214 aa, Unknown
  Bacterial polypetide isolated from the Sargasso Sea
MQSVSNYIDHTNLNQTANNFDIEKLCNEAIDNNFAAVCVNPVYVPLASDMLNGQDSKVCTVVGFPMGADSTEMKFAESRYLTHQGAEELDMVINIAAIKEKNISLVKNEIVKIVDAADGNYVKVIIETCLLTDDEKKLASEIAMDAGAHFIKTSTGFSLSGATEKDVKLIRKIIGSDMKIKASGGIKTLSDLKKLVKAGADRIGTSNAISMINE

SEQ ID NO: 149410 - protein, 214 aa, Unknown; identical to SEQ ID NO: 149409
  Bacterial polypetide isolated from the Sargasso Sea

SEQ ID NO: 149411 - protein, 214 aa, Unknown
  Bacterial polypetide isolated from the Sargasso Sea
MQSISNYIDHTNLNQIAKDFDIGKLCKEAIDNNFAAVCINPVYVPLASDILNGEAPRVCTVVGFPIGADSTEMKFAESRYLTHQGAEELDMVINIAAIKEKNISLVKNEIVKIVDAADGNCVKVIIETCLLTDDEIKSASEIAMDAGAHFIKTSTGFSLSGATEKDVTLIRKIVGSDMGIKASGGIKTLSDLKKLVKAGADRIGTSNAISIINE

SEQ ID NO: 149412 - protein, 214 aa, Unknown
  Bacterial polypetide isolated from the Sargasso Sea
MRDIAKYIDHTNLRPDLTKKDIQKICKEASQYNFASVCINPIHVFSAAKYLKDSFSKVGTVIAFPLGAISTEIKYAEAMDAIDQGAEELDMMINIGYLKEGKNDQLADEITKIVKESEDICLKVIIEASLLNTEGKIRISKIVKESGADYIKTSTGFSAKGADAKDVKIIRKTVGDSIGIKASGGIKSLSDLNKMLNAGANRIGTSSGISILNE

SEQ ID NO: 149413 - protein, 213 aa, Unknown
  Bacterial polypetide isolated from the Sargasso Sea
MNEFAHLIDHTNLKPNATRSEIIQLCEESIEYGFSAACVNPANVPLARSVLNENKPKLCTVIGFPLGSISVEMKFAEARFLIHQGAEELDMVLNIGALKEGETNIVEREIQQVVNAADGNCVKVIIETCLLNDKEKISACILAKENGADFVKTSTGFSSGGANVDDIKLMRRTVGDDMGVKASGGIKTLEHARAMVNAGADRIGTSSGVEIVS

SEQ ID NO: 149414 - protein, 214 aa, Unknown
  Bacterial polypetide isolated from the Sargasso Sea
MQSVSNYIDHTNLNQTANNFNIEKLCNEAIDNNFAAVCINPVYVPLASDILNGQDPKVCTVVGFPMGADSTEMKFAESRYLTHQGAEELDMVINIAAIKEKNIPFVKNEIVKIVDAADGNCVKVIIEACLLTDDEKKLASEIAMDAGAHFIKTSTGFSLSGATEKDVKLIREIIGSDMKIKASGGIKTLSGLKKLVKAGADRIGTSNAISIINE

SEQ ID NO: 149415 - protein, 214 aa, Unknown; identical to SEQ ID NO: 149409
  Bacterial polypetide isolated from the Sargasso Sea

SEQ ID NO: 149416 - protein, 176 aa, Unknown
  Bacterial polypetide isolated from the Sargasso Sea
CVNPTNLPLAASVLNGNKPKPCTVIGFPLGSISIEMKFAEARFLTHQGAEELDMVLNIGALKEGEINIIENEIRQVVNAADGNCVKVILETCLLTDKEKVLACNLAKDNGADFVKTSTGFSLSGATTEDIAIMRKVVGEDMGIKASGGIKTLEDARSMINAGANRIGTSNGVNIVS

SEQ ID NO: 149417 - protein, 198 aa, Unknown
  Bacterial polypetide isolated from the Sargasso Sea
ADVPLIILARTDANAAKLITNDHDENDKSFLTGERSPEGFYYVKHGIEQAISRGLAYAPYSDLIWCETAQPNLEEAKKFADAIHKKFPGKILAYNCSPSFNWKKHLSDDEIASFQIKISEMGYKFQFITLAGFHTQNLAVFELAEQYKSKGMTAYSKIQQQEFAREKDGYTSVKHQREVGTSYFDAVSNTISSGKSST

SEQ ID NO: 149418 - protein, 123 aa, Unknown
  Bacterial polypetide isolated from the Sargasso Sea
PGKMLAYNCSPSFNWKKHLSDEEIGSFQRKIGEMGYKFQFITLAGFHTQNIAIFELAEKYKSEGMTAYSKIQQHEFAREKDGYTSVKHQREVGTSYFDAVSNTISSGKSSTTAMEGSTESEQF

SEQ ID NO: 149419 - protein, 145 aa, Unknown
  Bacterial polypetide isolated from the Sargasso Sea
MGDKRNYTDEHVKSLQGSVKIEHTLAKMGSKQLRNLFESEPYVNTFGAYNGQQAVQHVKAGLKAIYVSGWQVAASANSNNEVYPDQSLYSVDSVPNAVKGINNAFRRQDQIQVQEGREGFYYAPIIADAEAGFGGALDAYELSRH

SEQ ID NO: 149420 - protein, 95 aa, Unknown
  Bacterial polypetide isolated from the Sargasso Sea
LGSMGYKFQFITLAGFHALNYSMFELSKGYNAEQMTAYVKLQEAEFAAEKDGYTATKHQREVGTGYFDSVTQVITGGASSVTALTGSTEEEQFDK

SEQ ID NO: 149421 - protein, 149 aa, Unknown
  Bacterial polypetide isolated from the Sargasso Sea
DLIWCETATPNLEEAKKFADAIHKKFPGKILAYNCSPSFNWKKHLSDKEISTFQQKISEMGYKFQFITLAGFHTQNIAVFELAENYRKEGMSAYSKIQEQEFKKEKDGYTSVKHQREVGTSYFDAVSNTISSGKSSTTAMDGSTESEQF

SEQ ID NO: 149422 - protein, 173 aa, Unknown
  Bacterial polypetide isolated from the Sargasso Sea
MSSDSNVSYELKRFAGIKRDYSKEEVERLRGSIKIEYSMCKHQSEKLWKLLNTEPYINTLGSLSGNHAVQHAKAGLKAIYLSGWQVAADANSAGEMYPDQSLYPYDSAPKLVESMNNALIRADQIQHMEIKDGEMNSKDRVDYMLPIIADGEAGFGGPLNVFELAKKFIKAGA

SEQ ID NO: 149423 - protein, 127 aa, Unknown
  Bacterial polypetide isolated from the Sargasso Sea
MCKMQSQKLWKLLNTEAYVNTLGSLSGNHAVQHAKAGLKAIYLSGWQVAADANSAGEMYPDQSLYPYDSAPKLVETMNNSLIRADQIQHMEMIDGDMDKSKRTDYMLPIIADGEAGFGGPLNVFELT

SEQ ID NO: 149424 - protein, 154 aa, Unknown
  Bacterial polypetide isolated from the Sargasso Sea
GTSTPNLDQAKKFSEAIRKEYPDQLLAYNCSPSFNWTANLSKDDIARFQKELGAMGYKFQFITLAGFHTLNYSMFELAHGYKKKGMTAYSELQDAEFLAENIGYTAHRHQREVGAGWFDAISVAVKGGACSTTALSGSTEEDQFHEGTIADVAE

SEQ ID NO: 149425 - protein, 147 aa, Unknown
  Bacterial polypetide isolated from the Sargasso Sea
MGDKRNYTDEHVKSLQGSVRIEHTLAKMGAKQLRDLFESEPYVNTFGAYNGQQAVQHVKAGLKAIYVSGWQVAASANSNNEVYPDQSLYSVDSVPNAVKNINNAFRRQDQIQVQEGREGFYYAPIIADAEAGFGGALNAYELSRNLI

SEQ ID NO: 149426 - protein, 187 aa, Unknown
  Bacterial polypetide isolated from the Sargasso Sea
MTTDFSALIPSAPEGRFEGITRNYTPADVLRLRGSVMPASTLAERGANKLWAMLHEEPYISSLGAITGNQAMQMVRAGLKAIYLSGWQVAADNNTAGAMFPDQSLYPANSAPELCRKINRSLQRADQIEVAEGKVTRDWFAPIMADAEAGFGGPLNVFEIMKNFIEAGAAGVHFEDQAIFREKMRSF

SEQ ID NO: 149427 - protein, 157 aa, Unknown
  Bacterial polypetide isolated from the Sargasso Sea
MSAENVSYDLKRFAGIKRDYTPEEVERLRGSIRIEYSMCKQQSQKLWKLLNTEPYINTLGSLSGNHAVQHAKAGLKAIYLSGWQVAADANSAGEMYPDQSLYPYDSAPKLVETMNNSLTRADQIQHMEIIDGDMEEGKRVDYMLPIIADGEAGFGGP

SEQ ID NO: 149428 - protein, 145 aa, Unknown
  Bacterial polypetide isolated from the Sargasso Sea
ETSHPSLEEAKEFADAIHAEFPGKMMAYNCSPSFNWRANIDEKTTAEFRDQLAEMGYKYQFITLAGWHMLNLNAFELAQEFKEEGMPAYVRLQDREFSQEENGYTATKHQQEVGAGFFDKVIMSITGGDSATTALAGSTESGQFN

SEQ ID NO: 149429 - protein, 138 aa, Unknown
  Bacterial polypetide isolated from the Sargasso Sea
LEEAKKFADAIHEKFPGKFLAYNCSPSFNWKKHLSDKEIASFQKEISAMGYKFQFITLAGFHTQNIAIFELAEKYKKEGMSAYSKIQEQEFAREKDGYTSVKHQREVGTSYFDAVSNTISSGKSSTTAMDGSTESEQF

SEQ ID NO: 149430 - protein, 166 aa, Unknown
  Bacterial polypetide isolated from the Sargasso Sea
MSSEAKVSYDLKRFAGIKRDYTPEEVERLRGSIKIQYSMCDQQSKKLWNLLNTEPYVNTLGSLSGNHSVQHAKAGLKAIYVSGWQVAADANTAGEMYPDQSLYPFDSAPKLVDSINNALIRADQIQHMEIQDGEMNSKDRTDYMLPIIADGEAGFGGPLNVFELTK

SEQ ID NO: 149431 - protein, 205 aa, Unknown
  Bacterial polypetide isolated from the Sargasso Sea
MDRWSDIKRDYSPENISSLRPSIKVEHTLSEIGSNSLFNLLSREDTWVSGLGAATAQQALQMFHLDYEIIYVSGWQVAAESNLGVNTYPDLSLYPSNSTPNFVKKINNTLVRRMSELNKKQIPPIVADGESGFGGVYNVFELTNQFIDAGVSGVHFEDQLASEKKCGHVGGKVVIPTHEYIKKLNSARLASDVAGVPIILIARTD

SEQ ID NO: 149432 - protein, 172 aa, Unknown
  Bacterial polypetide isolated from the Sargasso Sea
MSAENISYDLKRFAGIKRDYTEEEVERLRGSIKIEYSMCKMQSQKLWKLLNTESYINTLGSLSGNHAVQHAKAGLKAIYLSGWQVAADANSAGEMYPDQSLYPYDSAPKLVESMNNALVRADQIQHMELKDGDMKEENKVDYMLPIIADGEAGFGGPLNVFELAKKFIKAGA

SEQ ID NO: 149433 - protein, 273 aa, Unknown
  Bacterial polypetide isolated from the Sargasso Sea
ATIQQGVQMLKAGLEIIYVSGWQIASESNIGDNTYPDLSLYPSNSGPNFIKKMNNTLLRVISEKEMSSLPPIVADAESGFGGIYSVFNLTSQFINSGISGLHFEDQLASEKKCGHMGGKVVIPTREFINKLNASRLASDVLETPIILIARTDALHAKLITSDFDDVDKPYLTGKRTQDGYFELKNNKELAITKSLSYAEFADVIWCETNEPDLGFAKEFADEIKSKFPKKLLAYNCSPSFNWTEKFSDDELTNFQSQLSDYGYKLQFVSLAGF

SEQ ID NO: 149434 - protein, 131 aa, Unknown
  Bacterial polypetide isolated from the Sargasso Sea
ADAIHEKFPGKMLAYNCSPSFNWKKHLSDEEIGSFQRKIGEMGYKFQFITLAGFHTQNIAIFELAEKYKSEGMTAYSKIQQHEFAREKDGYTSVKHQREVGTSYFDAVSNTISSGKSSTTAMEGSTESEQF

SEQ ID NO: 149435 - protein, 120 aa, Unknown
  Bacterial polypetide isolated from the Sargasso Sea
ILAYNGSPSFNWKKHLSEQEISTFQEKIAEMGYKFQFITLAGFHTQNIAIFELAESYKKDGMTAYSKIQQQEFDKEKDGYTSVKHQREVGTSYFDAVSNTISGGSSSTTAMEGSTETEQF

SEQ ID NO: 149436 - protein, 178 aa, Unknown
  Bacterial polypetide isolated from the Sargasso Sea
MTQNSFLDKELLNSEWENNPRWEGITRNYSAEDVVSIRNSIEIKYTLAENGANNLFNHLMKKDEWISALGALSGNQAVQMVKAGLKAIYLSGWQVAADSNLGETTYPDQSLYPSNSAPNLAKRINNALLRAEQVDRVEENFDIDYVVPIVADGEAGFGGVLNVFELTKKFIEAGAAGI

SEQ ID NO: 149437 - protein, 186 aa, Unknown
  Bacterial polypetide isolated from the Sargasso Sea
MSEEWETNPRWKDTKRNFSAEDVVSLRNSIQIEYSLSQNGSTNLWNLINRKDDWVSALGALSGNQAVQMAKAGLEAIYLSGWQVAADSNLGDTTYPDQSLYPSNSAPNLAKKINNALLRAEQVDKTDGIDSTNYIVPIVADGEAGFGGALNVFELTKKFIEAGVAAVHFEDQLAAEKNVDIWVEKF

SEQ ID NO: 149438 - protein, 144 aa, Unknown
  Bacterial polypetide isolated from the Sargasso Sea
PDLEQAQIFADAIHAEYPDQLLSYNCSPSFNWKSNLDEETMKHFREKLGEMGYKFQFITLAGWHALNTSMFELSKAYKKNGMYAYSQLQEREFKYESDGFRAAKHQSFVGAGYFDAVQNTIMAGHSSTTAMDGSTEEEQFDDKE

SEQ ID NO: 149439 - protein, 419 aa, Unknown
  Bacterial polypetide isolated from the Sargasso Sea
MNQTFNQIETVDEYLSSKRWSDIKRDYSVDDICSLRPSFKIEHSLSEIGSELLLDLLSRKDSWVSGLGAATAQQALQMFHLDYEIIYVSGWQVAAESNIGVNTYPDLSLYPSNSTPNFVKKINNTLLRRMAELDKKKLPPIIADGESGFGGIYNVYELTNQFIDSGVSGIHFEDQLASEKKCGHVGGKVVIPTHEYIKKLNSARLSSDVSGVPIIIIARTDAMNAKLMTSDFDDRDSKYLSKNRTSDGYFLIENNHEMAITKSLNYADYADVVWCETNTPDLGFAKEFADEIRKSHPNKILAYNCSPSFNWLDKFTKKEIENFQSELSSCGYKLQFVSLAGFHSLASSMYDLASKYKGGNMSAILELQQFEKDLSKDGYTGIKHQQEVGGNYYERIGEALLGDESELLSKKDSTENTQF

SEQ ID NO: 149440 - protein, 177 aa, Unknown
  Bacterial polypetide isolated from the Sargasso Sea
MSEEWETNPRWKDTKRNFSAEDVVSLRNSIQIEYSLSQNGSTNLWNLLNRKDEWVSALGALSGNQAVQMAKAGLEAIYLSGWQVAADSNLGDTTYPDQSLYPSNSAPNLAKKINNALLRAEQVDKTDGIDSTNYIVPIVADGEAGFGGALNVFELTKKFIEAGVAAVHLKISCRRKK

SEQ ID NO: 149441 - protein, 97 aa, Unknown
  Bacterial polypetide isolated from the Sargasso Sea
SKRTWVLWGYKFQFITLAGIHSMWHGMFNLANEYVADGMTAYVKLQEKEFEDAKKGYTFVSHQQEVGTGYFDAVNNCIQGEESSTSALKGSTEEDQF

SEQ ID NO: 149442 - protein, 139 aa, Unknown
  Bacterial polypetide isolated from the Sargasso Sea
NLDEAKKFADAIHEKYPGKMLAYNCSPSFNWKKHLSDEEIGSFQRKIGEMGYKFQFITLAGFHTQNIAIFELAEKYKKEGMTAYSKIQQHEFAREKDGYTSVKHQREVGTSYFDAVSNTISSGKSSTTAMEGSTESEQF

SEQ ID NO: 149443 - protein, 173 aa, Unknown
  Bacterial polypetide isolated from the Sargasso Sea
EGFYYVKNGIDQAISRGLAYSPYADLIWCETATPNLEEAKKFADAIHKKFPGKILAYNCSPSFNWKKHLSDKEISTFQQKISEMGYKFQFITLAGFHTQNIAVFELAENYRKEGMSAYSKIQEQEFKKEKDGYTSVKHQREVGTSYFDAVSNTISSGKSSTTAMDGSTESEQF

SEQ ID NO: 149444 - protein, 154 aa, Unknown
  Bacterial polypetide isolated from the Sargasso Sea
YAPYADLIWCETATPNLEEAKKFADAIHSKFPGKLLAYNCSPSFNWKKHLSDEEIASFQIKIGEMGYKFQFITLAGFHTQNIAIFELAEKYKKEGMAAYSKIQQNEFAREKDGYTSVKHQREVGTSYFDAVSNTISSGKSSTTAMEGSTESEQF

SEQ ID NO: 149445 - protein, 230 aa, Unknown
  Bacterial polypetide isolated from the Sargasso Sea
MSAENISYELKRFAGIKRDYNPDEVERLRGSIKIEYSLCKQQSVKLWKLLNTENYISTLGSLSGNQAVQHAKAGLKSIYLSGWQVAADANSAREMYPDQSLYPYDSAPKLVESMNNALLRADQIQHMELKDGDMKKEKRIDYMLPIIADGEAGFGGPLNVFELTKKFIKAGAAGVHFEDQLASEKKCGHMGGKVLVPTGTMIKNLKAARLAADIADVPLIILARTDANAA

SEQ ID NO: 149446 - protein, 215 aa, Unknown
  Bacterial polypetide isolated from the Sargasso Sea
LAADIADVPLIILARTDANAAKLITNDFDDNDKPFLTGERSPEGFFYVKDGIEQAISRGLAYAPYADLIWCETATPNLEEAKKFADAIHEKFPGKMLAYNCSPSFNWKKHLSDEEIGSFQRKIGEMGYKFQFITLAGFHTQNIAIFELAEKYKSEGMTAYSKIQQHEFAREKDGYTSVKHQREVGTSYFDAVSNTISSGKSSTTAMEGSTESEQF

SEQ ID NO: 149447 - protein, 261 aa, Unknown
  Bacterial polypetide isolated from the Sargasso Sea
MSAENISYDLKRFAGIKRDYTSEEVERLRGSLKIEYSLCKHQSTKLWNLLNSETYVNTLGSLSGNHAVQHAKAGLKAIYLSGWQVAADANSAGEMYPDQSLYPYDSAPKLVESMNNALIRADQIQHMEIIDGDMKKENKVDYMLPIIADGEAGFGGPLNVFELAKKFIKAGAAGVHFEDQLASEKKCGHMGGKVLVPTGTMIKNLKAARLAADIANVPLIILARTDANAAKLITNDHDDNDKPFLTGERSPEGFYYVKARY

SEQ ID NO: 149448 - protein, 223 aa, Unknown
  Bacterial polypetide isolated from the Sargasso Sea
MSSETKVSYELKRFAGIKRDYTPEEVERLRGSIKIEYSMCKHQSQKLWRLLNTEPYVNTLGSLSGNHAVQHAKAGLKAIYLSGWQVAADANSAGEMYPDQSLYPYDSAPKLVESMNNALTRADQIQHMEIKDGEMKSKDRVDYMLPIIADGEAGFGGPLNVFELAKKFIRAGAAGVHFEDQLASEKKCGHMGGKVLVPTGTMIKNLKAARLAADIADVPLIIL

SEQ ID NO: 149449 - protein, 257 aa, Unknown
  Bacterial polypetide isolated from the Sargasso Sea
MSAENISYDLKRFAGIKRDYSPEEVERLRGSIKIEYSLCKQQSEKLWKLLNSEPYINTLGSLSGNHAVQHAKAGLKAIYLSGWQVAADANTAGEMYPDQSLYPYDSAPKLVESMNNALIRADQIQHMEIQDGDMKKEKKVDYMLPIIADGEAGFGGPLNVFELAKKFIKAGAAGVHFEDQLASEKKCGHMGGKVLVPTGTMVKNLKAARLAADIADVPLIILARTDANAAKLITNDHDENDKQFFNWAKDHPESFFL

SEQ ID NO: 149450 - protein, 228 aa, Unknown
  Bacterial polypetide isolated from the Sargasso Sea
PTQTAIRNLTSARLAADVMNVPLIIIARTDANAAKLITSDFDENDKPFITGERSPEGFHYVKDGIEQAISRGLAYAPYADLVWCETGKPNIKEAEKFASEIHKKYPDKMLAYNCSPSFNWKKHLSDKEIESFQKSMGDMGYKFQFVTLAGFHAQNHAIFDLAKNYKKSGMAAYSKLQQQEFESEKDGYTATKHQREVGTSYFDAVSNTITSGKSATTAMKDSTEEEQF

SEQ ID NO: 149451 - protein, 130 aa, Unknown
  Bacterial polypetide isolated from the Sargasso Sea
DEIHKKFPGKLLAYNCSPSFNWKKHLSDAEIAIFQEEISKMGYKFQFITLAGFHTQNIAIFELAEKYKKEGMTAYSRIQQQEFAREKDGYTSVKHQREVGTSYFDAVSNTISSGKSSTTAMDGSTESEQF

SEQ ID NO: 149452 - protein, 152 aa, Unknown
  Bacterial polypetide isolated from the Sargasso Sea
YSDLIWCETATPNLEEAKKFANAIHEKFPGKLLAYNCSPSFNWKKHLSDSEIASFQQKISEMGYKFQFITLAGFHTQNIAIFELAEKYKKEGMTAYSKIQQQEFAREKDGYTSVKHQREVGTSYFDAVSNTISSGKSSTTAMEGSTESEQFQ

SEQ ID NO: 149453 - protein, 224 aa, Unknown
  Bacterial polypetide isolated from the Sargasso Sea
IKNLKAARLAADIADVPLIILARTDANAAKLITNDFDENDKPFLTGERSPEGFYYVKSGIEQAISRGLAYAPYSDLIWCETATPNLEEAKKFADAIHEKFPGKLLAYNCSPSFNWKKHLSDEEIASFQKEISKIGYKFQFITLAGFHTQNIAIFELAEKYKKEGMAAYSKIQQQEFAREKDGYTSVKHQREVGTSYFDAVSNTISSGKSSTTAMDGSTESEQFQ

SEQ ID NO: 149454 - protein, 208 aa, Unknown
  Bacterial polypetide isolated from the Sargasso Sea
CSINNLARTDANAAKLITNDHDENDKPFLTGERSPEGFYYVKHGIDQAISRGLAYAPYSDLIWCETATPNLEEAKKFADAIHAKYPGKLLAYNCSPSFNWKKHLSDAEIATFQQKISDMGYKFQFITLAGFHTQNIAIFELAQKYKKEGMTAYSKIQEQEFAREKDGYTSVKHQREVGTSYFDAVSNTISGGKSSTTAMEGSTESEQF

SEQ ID NO: 149455 - protein, 233 aa, Unknown
  Bacterial polypetide isolated from the Sargasso Sea
KFFCTNWEQWVRNLKAARLAPYIADVPLIILARTDANAAKLITNDFDENDKPFLTGERSPEGFFYVKDGIEQAISRGLAYAPYADLIWCETATPNLEEAKKFADAIHEKFPGKMLAYNCSPSFNWKKHLSDDEIGSFQRKIGEMGYKFQFITLAGFHTQNIAIFELAEKYKSEGMTAYSKIQQHEFAREKDGYTSVKHQREVGTSYFDAVSNTISSGKSSTTAMEGSTESEQF

SEQ ID NO: 149456 - protein, 247 aa, Unknown
  Bacterial polypetide isolated from the Sargasso Sea
EPYVNTLGSLSGNHAVQHAKAGLKAIYLSGWQVAADANSAGEMYPDQSLYPYDSAPKLVEAMNNALLRADQIQHMEIKDGDQKKEKRIDYMLPIIADGEAGFGGPLNVFELTKKFIKAGAAGVHFEDQLASEKKCGHMGGKVLIPTSQAVKNLKAARLAADIADVPLIILARTDANAAKLITNDHDENDKPFLTGDRSPEGFYYVKSGIDQAISRGLAYAPYSDLIWCETATPNLDEAKKFADAIHK

SEQ ID NO: 149457 - protein, 246 aa, Unknown
  Bacterial polypetide isolated from the Sargasso Sea
IKHTLAENGAQKLFEDLNKKDEWISALGALSGNQAVQMVKAGLKAIYLSGWQVAADSNLGETTYPDQSLYPSNSAPTLAKRINNALLRAEQVDRVEGDNSIDYLVPIVADGEAGFGGTLNVFELTKKFIEAGAAGVHFEDQLAAEKKCGHMGGKVLVPTSQHIRTLTSARLASDTMGVPTVIIARTDALAANLVTSDIDEIDSDFVLGERTSEGFFKVKNGPESAISRGLSYAPYSDLVWCETGKP

SEQ ID NO: 149458 - protein, 313 aa, Unknown
  Bacterial polypetide isolated from the Sargasso Sea
MCEDFEKLYNAIPGRFKNKKRDYTVADVKKLSGSVKIEHTLAHRGAQKLWSLLHNEDYVNTLGALTGNQAMQQVRAGLKAIYLSGWQIAADNNLAGGMYPDQSIYPANSGPELVKKINRTLSRADEIEVMENGSPQRDWFAPIIADAEAGFGGVLNAFEITRNYIEAGASGVHFEDQLASEKKCGHMGGKVLIPVKQHVSNLNAARLAADISGTPTLIIARTDAESAKLITSDVDEKDKPYLTGERTAEGFYTLTPESSFERCVTRGRAYAEYADLIWMETSTPNLDQAKKFSEAIRKEYPDQLLAYNCSPKF

SEQ ID NO: 149459 - protein, 179 aa, Unknown
  Bacterial polypetide isolated from the Sargasso Sea
TGERSPEGFFYVKDGIEQAISRGLAYAPYADLIWCETATPNLEEAKKFADAIHEKYPGKMLAYNCSPSFNWKKHLSDEEIGSFQRKIGEMGYKFQFITLAGFHTQNIAIFELAEKYKKEGMTAYSKIQQHEFAREKDGYTSVKHQREVGTSYFDAVSNTISSGKSSTTAMEGSTESEQF

SEQ ID NO: 149460 - protein, 241 aa, Unknown
  Bacterial polypetide isolated from the Sargasso Sea
EKKCGHMGGKVLVPTSTMIKNLKAARLAADIADVPLIILARTDANAAKLITNDHDENDKPFMTGERSPEGFYYVKAGIEQAISRGLAYAPYSDLIWCETATPNLEEAKKFADAIHEKFPGKLLAYNCSPSFNWKKHLSDAEIASFQKKISAMGYKFQFITLAGFHTQNIAIFELAEKYKKEGMSAYSKIQEQEFAREKDGYTSVKHQREVGTSYFDAVSNTISSGKSSTTAMAGSTESEQF

SEQ ID NO: 149461 - protein, 233 aa, Unknown
  Bacterial polypetide isolated from the Sargasso Sea
IKRDYTQEDVERLRGSIKIEYSLCKQQSIKLWKLLNTENYVNTLGSLSGNHAVQHAKAGLKAIYLSGWQVAADANSAGEMYPDQSLYPYDSAPKLVESMNNALIRADQIQHMELLDGDMKKEKRVDYMLPIIADGEAGFGGPLNVFELAKKFIKAGAAGVHFEDQLASEKKCGHMGGKVLVPTGTMIKNLKAARLAADIADVPLIILARTDANAAKLITNDHDENDKPFLTGE

SEQ ID NO: 149462 - protein, 206 aa, Unknown
  Bacterial polypetide isolated from the Sargasso Sea
FIILARTDANAAKLITNDFDENDKPFLKGDRSPEGFFYVKDGIDQAISRGLAYAPYADLIWCETATPNLEEAKKFADAIHSKFPGKMLAYNCSPSFNWKKHLSDDEIGSFQRKIGEMGYKFQFITLAGFHTQNIAIFELAEKYKKEGMAAYSKIQEHEFSREKDGYTSVKHQREVGTSYFDAVSNTISSGQSSTTAMEGSTESEQF

SEQ ID NO: 149463 - protein, 153 aa, Unknown
  Bacterial polypetide isolated from the Sargasso Sea
GIEQAISRGLAYAPYADLIWCETATPNLEEAKKFADAIHEKFPGKMLAYNCSPSFNWKKHLSDEEIGSFQRKIGEMGYKFQFITLAGFHTQNIAIFELAEKYKSEGMTAYSKIQQHEFAREKDGYTSVKHQREVGTSYFDAVSNTISSGKSST

SEQ ID NO: 149464 - protein, 159 aa, Unknown
  Bacterial polypetide isolated from the Sargasso Sea
FRGLAYAPYSDLIWCETATPNLEEAKKFADAIHKKFPGKLLAYNCSPSFNWKKHLSDSEIASFQKEISKMGYKFQFITLAGFHTQNIAIFELAEKYKKEGMSAYSKIQEQEFAREKDGYTSVKHQREVGTSYFDAVSNTISSGKSSTTAMDGSTESEQF

SEQ ID NO: 149465 - protein, 219 aa, Unknown
  Bacterial polypetide isolated from the Sargasso Sea
MSAENVSYDLKRFAGIRRDYTPEEVERLRGSIKIEYSMCKQQSQKLWKLLNTEPYINTLGSLSGNHAVQHAKAGLKAIYLSGWQVAADANSAGEMYPDQSLYPYDSAPKLVETMNNSLTRADQIQHMEIIDGDMEEGKRVDYMLPIIADGEAGFGGPLNVFELAKKFIKAGAAGVHFEDQLASEKKCGHMGGKVLVPTGTMVRNLKAARLAADIADVPL

SEQ ID NO: 149466 - protein, 245 aa, Unknown
  Bacterial polypetide isolated from the Sargasso Sea
MSSKTKSGNVSFDLKRFAGIKRDYNKEDVEKLKGTFDIEYTLCKLQSEKLWNLLNTEPYINTLGSLSGNQAVQHAKAGLRAIYLSGWQVAADANSAGEMYPDQSLYPYDSAPKLVEAMNNALIRADQIQHLEKLEQKLDNKNLVDYKMPIIADGEAGFGGPLNVFELTKKFIKAGAAGVHFEDQLASEKKCGHMGGKVLVPTQAMIKNLKSARLAADVMGVPLIILARTDANAAKLITNDFDEND

SEQ ID NO: 149467 - protein, 194 aa, Unknown
  Bacterial polypetide isolated from the Sargasso Sea
MSAENISYDLKRFAGIKRDYTEEEVERLRGSIKIEYSLCKQQSQKLWKILNTEPYVNTLGSLSGNHAVQHAKAGLKAIYLSGWQVAADANSAGEMYPDQSLYPYDSAPKLVDSMNNALIRADQIQHMELKDGDMKEENKVDYMLPIIADGEAGFGGPLNVFELAKKFIKAGAAGVHFEDQLASEKKCGHMGGKV

SEQ ID NO: 149468 - protein, 157 aa, Unknown
  Bacterial polypetide isolated from the Sargasso Sea
MRGTVHVEHSLARLGAEKLWKYLHEKDFVNALGALTGNQAMQQVKAGLNAIYLSGWQVAADANLAGQMYPDQSLYPADSVPAVVKRINNTLLRADQLHHAEGKDEIDFLQPIVADAEAGFGGVLNAFELMKAMIEAGAAGVHFEDQLASVKKCGHMG

SEQ ID NO: 149469 - protein, 243 aa, Unknown
  Bacterial polypetide isolated from the Sargasso Sea
MSAENISYDLKRFAGIKRDYKPEDVERLRGSIKIEYSICKQQSVKLWKLLNTENYVNTLGSLSGNHAVQHAKAGLKAIYLSGWQVAADANSAGEMYPDQSLYPYDSAPKLVESMNNALIRADQIQHMELEDGDMKKEKRIDYMLPIIADGEAGFGGPLNVFELTKKFIKAGAAGVHFEDQLASEKKCGHMGGKVLVPTGTMIKNLKAARLAADIADVPLIILARTDANAAKLITNDHDENDKP

SEQ ID NO: 149470 - protein, 263 aa, Unknown
  Bacterial polypetide isolated from the Sargasso Sea
MTSETKISYGLKRFAGIKRDYTTEEVDRLRGSVKIEYSMCKHQSEKLWRLLNTENYINTLGSLSGNHAVQHAKAGLKAIYLSGWQVAADANSAREMYPDQSLYPFDSAPKLVESMNNALIRADQIQHMEIKDGDMKSKDKVDYMLPIVADGEAGFGGPLNVFELTKKFIKAGAAGVHFEDQLASEKKCGHMGGKVLVPTNTMIKNLKAARLASDIADVPLIILARTDANAAKLITNDHDENDKPFLTGKRSPEGFYYVKHGID

SEQ ID NO: 149471 - protein, 201 aa, Unknown
  Bacterial polypetide isolated from the Sargasso Sea
ARTDANAAELLTSDVDDRDAEFVTGERTSEGFYRVKAGIQQAISRGLSYAPYSDLLWCETGKPNLEEAKLFAESIKKDHPELMLAYNCSPSFNWRKNLDDATIAKFQRELGAMGYKFQFITLAGIHSMWHGMFDLTKNYVKSGMTAYVELQEKEFADHDKGYTFSAHQQEVGTGYFDAVNNCIVGDPSTSAMDGSTEEEQF

SEQ ID NO: 149472 - protein, 136 aa, Unknown
  Bacterial polypetide isolated from the Sargasso Sea
EAKKFADAIHEKFPGKLLAYNCSPSFNWKKHLSDDEIASFQKKIGEMGYKFQFITLAGFHTQNIAIFELAEKYKTEGMTAYSKIQQHEFSREKDGYTSVKHQREVGTSYFDAVSNTISSGKSSTTAMEGSTESEQF

SEQ ID NO: 149473 - protein, 217 aa, Unknown
  Bacterial polypetide isolated from the Sargasso Sea
MSAENISYELKRFAGIKRDYTPEEVERLRGSIKIEYSICKQQSEKLWHLLNTEPFVNTLGSLSGNQAVQHAKAGLKAIYLSGWQVAADANSAGEMYPDQSLYPYDSAPKLVEAMNNSLIRADQIQHMELKDGDMKENQRVDYMLPIIADGEAGFGGPLNVFELTKKFIKAGAAGVHFEDQLASEKKCGHMGGKVLVPTGTMVRNLKAARLAAEYCRC

SEQ ID NO: 149474 - protein, 195 aa, Unknown
  Bacterial polypetide isolated from the Sargasso Sea
MSEEWETNPRWKDTKRNFSAEDVVSLRNSIQIEYSLSQNGSTNLWNLLNRKDEWVSALGALSGNQAVQMAKAGLEAIYLSGWQVAADSNLGDTTYPDQSLYPSNSAPNLAKKINNALLRAEQVDKTDGIDSTNYIVPIVADGEAGFGGALNVFELTKKFIEAGVAAVHFEDQLAAEKKCGHMGGKVLVPTSQHIR

SEQ ID NO: 149475 - protein, 296 aa, Unknown
  Bacterial polypetide isolated from the Sargasso Sea
YDLKRLLGIKRDYTPEEVERLRGSIKIEYSICKQQSTKLWKLLNTENYVNTLGSLSGNHAVQHAKAGLKAIYLSGWQVAADANSAGEMYPDQSLYPYDSAPKLVESMNNALIRADQIQHMELKDGDMKKEKRIDYMLPIIADGEAGFGGPLNVFELAKKFIKAGAAGVHFEDQLASEKKCGHMGGKVLVPTGTMIKNLKAARLAADIADVPLIILARTDANAAKLITNDYDENDKPFLTGERSPEGFYYVKAGIEQAISRGLAYAPYSDLIWCETATPNLDEAKKFADAIHEKFPG

SEQ ID NO: 149476 - protein, 223 aa, Unknown
  Bacterial polypetide isolated from the Sargasso Sea
VKNLKAARLAADIADVPLIILARTDANAAKLITNDHDENDKPFLTGERSPEGFYYVKSGIDQAISRGLAYAPYSDLIWCETATPNLEEAKKFADAIHKKYPGKLLAYNCSPSFNWKKHLSDNEIATFQNKISEMGYKFQFITLAGFHTQNIAIFELAEKYKAEGMTAYSKIQEREFAREKDGYTSVKHQREVGTTYFDAVTNTISSGKSSTTAMDGSTESEQF

SEQ ID NO: 149477 - protein, 248 aa, Unknown
  Bacterial polypetide isolated from the Sargasso Sea
FEDQLSSEKKCGHLGGKVLVPTSNFEKILNTARLASDVLNVPTLIMARTDANAAKLLTSDIDERDKPFLTGERTSEGFFRITGGLDCAIARGIAYAKYADLIWCETDRPDIEEAKKFADAIKKVYPDKMLAYNCSPSFNWKKHLDDSQIANFQKELGAMDYKFQFITLAGFHNLNLSTFNLAKNYAVTGMSAYANLQEEEFAKEAEGYSAIKHQREVGVSYFDKISEIISSGESSTTAMQDSTESEQF

SEQ ID NO: 149478 - protein, 184 aa, Unknown
  Bacterial polypetide isolated from the Sargasso Sea
RPFLTGERTSEGFYRSKAGLDQAIARGLAYAPYSDLVWCETSKPDLEQAKVFAEAIKKDHPEILLAYNCSPSFNWKKNLDEQTIAKFQKELGAMGYKFQFITLAGIHSMWHSMFKLSKEYVNDGMSAYVRLQEEEFADANQGYTFVSHQQEVGTGYFDAVNECIQGGESSTSALKGSTEEEQFK

SEQ ID NO: 149479 - protein, 131 aa, Unknown
  Bacterial polypetide isolated from the Sargasso Sea
LAADIADVPLIILARTDANAAKLITNDFDENDKPFLTGERSPEGFFYVKDGIEQAISRGLAYAPYADLIWCETATPNLEEAKKFADAIHEKFPGKLLAYNCSPSFNWKKHLSDDEIASFQKKIGEMGYKFQ

SEQ ID NO: 149480 - protein, 268 aa, Unknown
  Bacterial polypetide isolated from the Sargasso Sea
PLNVFELAKKFIKAGAAGVHFEDQLASEKKCGHMGGKVLVPTGTMIKNLKAARLAADIADVPLIILARTDANAAKLITNDHDDNDKEFLTGERSPEGFYYVKAGIDQAISRGLAYAPYSDLIWCETATPNLEEAKKFADAIREKFPGKFLAYNCSPSFNWKKHLSDDEIASFQTEISKMGYKFQFITLAGFHTQNIAIFELAEKYKKEGMTAYSKIQQQEFAREKDGYTSVKHQREVGTSYFDAVSNTINNGKSSTTAMDGSTESEQF

SEQ ID NO: 149481 - protein, 232 aa, Unknown
  Bacterial polypetide isolated from the Sargasso Sea
KVLVPTGTMINNLKAARLAADIADVPLIILARTDANAAKLITNDHDDNDKKFLTGERSPEGFYYVKAGIDQAISRGLAYAPYSDLIWCETATPNLKEAKKFADAIHEKFPGKLLAYNCSPSFNWKKHLSDTEIATFQKEISAMGYKFQFITLAGFHTQNIAIFELAEKYKKEGMSAYSKIQEQEFAREKDGYTSVKHQREVGTSYFDAVSNTISSGKSSTTAMDGSTESEQF

SEQ ID NO: 149482 - protein, 296 aa, Unknown
  Bacterial polypetide isolated from the Sargasso Sea
MKNLRVHSISNILFCKTQSEKLWNLLNTEPYVNTLGSLSGNQAVQHAKAGLKAIYLSGWQVAADANSAGEMYPDQSLYPYDSAPKLVEAMNNALIRADQIQHMEAKEGKIKIEDQVDYKMPIIADGEAGFGGPLNVFELTKKFIKAGAAGVHFEDQLASEKKCGHMGGKVLVPTQTMIRNLKSARLAADVMEVPLIILARTDANAAKLITNDVDENDKPFLTGKRSPEGFYYVKDGLDQAISRGLAYAPYSDLIWCETAKPDLKEAKKFADAIHNKYPGKLLAYNCSPSFNLKKKS

SEQ ID NO: 149483 - protein, 121 aa, Unknown
  Bacterial polypetide isolated from the Sargasso Sea
KLLAYNCSPSFNWKKSLSDKEIETFQEQLGSFGYKFQFITLAGFHALNTSMFELASKYKGGNMSAYVELQQKEFSMEKDGFTSVKHQREVGAGYFDTVSTIISDGDASTLALEGSTEEEQF

SEQ ID NO: 149484 - protein, 209 aa, Unknown
  Bacterial polypetide isolated from the Sargasso Sea
MSKEWETNPRWKDTKRNFSAEDVVSLRNSIQIEYSLSQNGSINLWNLLNRKDKWVSALGALSGNQAVQMAKAGLEAIYLSGWQVAADSNLGDTTYPDQSLYPSNSAPNLAKKINNALLRAEQVDKTDGIDSTNYIVPIVADGEAGFGGALNVFELTKKFIEAGVAAVHFEDQLAAEKKCGHMGGKVLVPTSQHIRTLTSARLAADTLGV

SEQ ID NO: 149485 - protein, 232 aa, Unknown
  Bacterial polypetide isolated from the Sargasso Sea
KVLVPTSTMIKNLKAARLAADIADVPLIILARTDANAAKLITNDHDENDKPFLTGERSPEGFYYVKSGIDQAISRGLAYAPYSDLIWCETATPNLEEAKKFADAIHKQFPGKLLAYNCSPSFNWKKHLSDEEIASFQKEISKMGYKFQFITLAGFHTQNIAIFELAEKYKKEGMTAYSRIQQQEFSREKDGYTSVKHQREVGTSYFDAVSNTISSGKSSTTAMDGSTESEQF

SEQ ID NO: 149486 - protein, 291 aa, Unknown
  Bacterial polypetide isolated from the Sargasso Sea
MSAENVSYDLKRFAGIKRDYKPDEIERLRGSIKIEYSLCKQQSMKLWNLLNSEPYVNTLGSLSGNHAVQHAKAGLKAIYLSGWQVAADANSAGEMYPDQSLYPYDSAPKLVDSMNNALIRADQIQHMEIQDGDMKKENKVDYMLPIIADGEAGFGGPLNVFELAKKFIKAGAAGVHFEDQLASEKKCGHMGGKVLVPTGTMIKNLKAARLAADIADVPLIILARTDANAAKLITNDHDENDKPFLTGERSPEGFYYVKSGIEQAISRGLAYAPYSDLIWCETATPNLKKQK

SEQ ID NO: 149487 - protein, 143 aa, Unknown
  Bacterial polypetide isolated from the Sargasso Sea
TATPNLDEAKKFADAIHEKFPGKLLAYNCSPSFNWKKHLSDAEIASFQVEISKMGYKFQFITLAGFHTQNIAIFELAEKYKQEGMTAYSRIQQQEFAREKDGYTSVKHQREVGTSYFDAVSNTISSGKSSTTAMDGSTESEQF

SEQ ID NO: 149488 - protein, 230 aa, Unknown
  Bacterial polypetide isolated from the Sargasso Sea
MVPTGTMIKNLKAARLAADIADVPLIILARTDANAAKLITNDHDENDMPFLTGKRSPEGFFYVKHGIDQAISRGLAYAPYSDLIWCETAQPNLEEAKKFADEIHSKFPGKLLAYNCSPSFNWKKHLSDEEIATFQVKISEMGYKFQFITLAGFHTQNLAIFELAEQYKSKGMAAYSKIQQKEFAREKDGYTSVKHQREVGTSYFDAVSNTISSGKSSTTAMEGSTESEQF

SEQ ID NO: 149489 - protein, 150 aa, Unknown
  Bacterial polypetide isolated from the Sargasso Sea
SDLIWCETATPNLEEAKKFANAIHEKFPGKLLAYNCSPSFNWKKHLSDSEIATFQQEISKMGYKFQFITLAGFHTQNIAIFELAEKYKSEGMTAYSKIQEQEFAREKDGYTSVKHQREVGTSYFDAVSNTISSGKSSTTAMAGSTESEQF

SEQ ID NO: 149490 - protein, 253 aa, Unknown
  Bacterial polypetide isolated from the Sargasso Sea
GSLSGNQAVQHAKAGLKAIYLSGWQVAADANSAGEMYPDQSLYPYDSAPKLVEAMNNALIRADQIQHMEIIEKKINNKDRVDYKMPIIADGEAGFGGPLNVFELTKKFIKAGAAGVHFEDQLASEKKCGHMGGKVLVPTQTMIKNLKSARLAADIMEVPLIILARTDANAAKLITNDVDENDKPFLTGKRSPEGFYYVKSGLDQAISRGLAYAPYSDLIWCETAKPSLKEAKTFAKAIHDKFPGKLLAYNCSP

SEQ ID NO: 149491 - protein, 189 aa, Unknown
  Bacterial polypetide isolated from the Sargasso Sea
DFDENDKPFLTGERSHEGFFYVKDGIEQAISRGLAYAPYADLIWCETATPNLEEAKKFADAIHEKFPGKMLAYNCSPSFNWKKHLSDEEIGSFQRKIGEMGYKFQFITLAGFHTQNIAIFELAEKYKSEGMTAYSKIQQHEFAREKDGYTSVKHQREVGTSYFDAVSNTISSGKSSTTAMEGSTESEQF

SEQ ID NO: 149492 - protein, 235 aa, Unknown
  Bacterial polypetide isolated from the Sargasso Sea
WEEKYLVPTQTMIKNLKSARLAADVMGVPLIILARTDANAAKLITSDIDKNDKPFLTGKRSPEGFYYVKEGLDQAISRGLAYAPYSDLIWCETAKPNLEEAKAFATAIHNKFPGKLLAYNCSPSFNWKKNLSDKEIKVFQNEIGKMGYKFQFITLAGFHAQNYAIFDLAKKYKQYGMAAYSRLQQQEFDSEKEGYTATKHQREVGTSYFDAISNAISSGESSTTAMKDSTETDQF

SEQ ID NO: 149493 - protein, 256 aa, Unknown
  Bacterial polypetide isolated from the Sargasso Sea
MSAENISYDLKRFVGIKRDYTPEEVERLRGSIKIEYSMCKHQSTKLWNLLNSEPYVNTLGSLSGNHAVQHAKAGLKAIYLSGWQVAADANSAGEMYPDQSLYPYDSAPKLVESMNNALIRADQIQHMEIKDGDMKDEKKVDYMLPIIADGEAGFGGPLNVFELAKKFIKAGAAGVHFEDQLASEKKCGHMGGKVLVPTGTMIKNLKAARLAADIANVPLIILARTDANAAKLITNDHDDNDKKFLTGERSPEGFFY

SEQ ID NO: 149494 - protein, 171 aa, Unknown
  Bacterial polypetide isolated from the Sargasso Sea
FFYVKDGIEQAISRGLAYAPYADLIWCETATPNLEEAKKFADAIHEKFPGKMLAYNCSPSFNWKKHLSDEEIGSFQRKIGEMGYKFQFITLAGFHTQNIAIFELAEKYKSEGMTAYSKIQQHEFAREKDGYTSVKHQREVGTSYFDAVSNTISSGKSSTTAMEGSTESEQF

SEQ ID NO: 149495 - protein, 240 aa, Unknown
  Bacterial polypetide isolated from the Sargasso Sea
MSAENISYDLKRFAGIKRDYTPEEVERLRGSIKIEYSLCKQQSVKLWNLLNSEPYVNTLGSLSGNHAVQHAKAGLKAIYLSGWQVAADANSAGEMYPDQSLYPYDSAPKLVDSMNNALIRADQIQHMELKDGDMKTEKKIDYMLPIIADGEAGFGGPLNVFELAKKFIKAGAAGVHFEDQLASEKKCGHMGGKVLVPTSTMIKNLKAARLAADIADVPLIILAKTDANAAKLITNDHDEN

SEQ ID NO: 149496 - protein, 219 aa, Unknown
  Bacterial polypetide isolated from the Sargasso Sea
KAARLAADIADVPLIILQETDANAAKLITNDFDENDKPFLTGERSPEGFYYVKDGIDQAISRGLAYAPYADLIWCETATPNLEEAKKFADAIHAKFPGKMLAYNCSPSFNWKKHLSDDEIATFQTKIGMMGYKFQFITLAGFHTQNIAIFELAEKYKKEGMTAYSRIQQNEFAREKDGYTSVKHQREVGTSYFDAVSNTISSGKSSTTAMAGSTESEQF

SEQ ID NO: 149497 - protein, 269 aa, Unknown
  Bacterial polypetide isolated from the Sargasso Sea
KNPRWSGISRNYKAEDVVSIRNSLEIKYTLAENGANNLFNSLNEKDGWISALGALSGNQAVQMVKAGLKAIYLSGWQVAADANLGETTYPDQSLYPSNSAPNLAKRINNALLRAEQVDRVEGKNDIDYLVPIVADGEAGFGGTLNVFELTKKFIEAGAAGIHFEDQLAAEKKCGHMGGKVLVPTSQHIRTLTSARLAADTLGVPTVIIARTDALAANLITSDIDETDSSFVLGDRTSEGFFKVKNGPEAAISRGLSYAPYSDLVWCETG

SEQ ID NO: 149498 - protein, 227 aa, Unknown
  Bacterial polypetide isolated from the Sargasso Sea
MSAENISYDLKRFAGIKRDYKPEEIERLRGSIKIEYSLCKQQSMKLWNLLNTEPYVNTLGSLSGNHAVQHAKAGLKAIYLSGWQVAADANSAGEMYPDQSLYPYDSAPKLVDSMNNALIRADQIQHMELQDGDMKKENKVDYMLPIIADGEAGFGGPLNVFELAKKFIKAGAAGVHFEDQLASEKKCGHMGGKVLVPTGTMIKNLKAARLAADIADVPLIILARTDA

SEQ ID NO: 149499 - protein, 166 aa, Unknown
  Bacterial polypetide isolated from the Sargasso Sea
DGIEQAISRGLAYAPYADLIWCETATPNLEEAKKFADAIHEKFPGKMLAYNCSPSFNWKKHLSDEEIGSFQRKIGEMGYKFQFITLAGFHTQNIAIFELAEKYKSEGMTAYSKIQQHEFAREKDGYTSVKHQREVGTSYFDAVSNTISSGKSSTTAMEGSTESEQF

SEQ ID NO: 149500 - protein, 219 aa, Unknown
  Bacterial polypetide isolated from the Sargasso Sea
MGGKVLVPTGTMIKNLKAARLAADIADVPLIILARTDANAAKLITNDHDENDKKFLTGERSPEGFYYVKHGIDQAISRGLAYAPYSDLIWCETATPNLDEAKKFADAIHTKYPGKLLAYNCSPSFNWKKHLSDSEISTFQQKISEMGYKFQFITLAGFHTQNIAIFELAEKYKKEGMTAYSRIQQQEFSREKDGYTSVKHQREVGTSYFDAVSNTISGG

SEQ ID NO: 149501 - protein, 270 aa, Unknown
  Bacterial polypetide isolated from the Sargasso Sea
YIEAGASGVHFEDQLASEKKCGHMGGKVLIPVKQHIANLNAARLAADVSGVPTLIIARTDAESAKLITSDVDERDQPYLTGERTTEGFYTLTQESSFDRCVTRGLAYSEYADLIWMETSTPNLDQAKRFAEAIRGKYPDQLLAYNCSPSFNWTSNLSKDDIARFQRELGAMGYKFQFITLAGFHTLNYSMFELAHGYKKRGMTAYSEVQDAEFAAEEIGYTAHRHQREVGAGWFDAISVAVKGGSSATTALSGSTEEDQFHGEKVSDAAE

SEQ ID NO: 149502 - protein, 224 aa, Unknown
  Bacterial polypetide isolated from the Sargasso Sea
MIKNLKAARLAADIANVPLIILARTDANAAKLITNDHDENDKPFLTGERSPEGFFYVKQGIEQAISRGLAYAPYSDLIWCETATPNLEEAKKFADAIHEKFPGKLLAYNCSPSFNWKKHLNDDEIASFQQEISKMGYKFQFITLAGFHTQNIAIFELAEKYKKEGMAAYSRIQEQEFAREKDGYTSVKHQREVGTSYFDSVSNTISSGQSSTTAMEGSTESEQF

SEQ ID NO: 149503 - protein, 248 aa, Unknown
  Bacterial polypetide isolated from the Sargasso Sea
FEDQLASEKKCGHMGGKVLVPTSTMIKNLKAARLAADIADVPLIILARTDANAAKLITNDFDENDKPFLTGERSPEGFYYVKSGIEQAISRGLAYAPYSDLIWCETATPNLEEAKKFADAIHEKFPGKLLAYNCSPSFNWKKHLSDNEIASFQKEISKMGYKFQFITLAGFHTQNIAIFELAEKYKKEGMAAYSKIQEQEFAREKDGYTSVKHQREVGTSYFDAVSNTISSGKSSTTAMDGSTESEQF

SEQ ID NO: 149504 - protein, 231 aa, Unknown
  Bacterial polypetide isolated from the Sargasso Sea
SFSSTGTMIKNLKAARLAAHIADVPLIILARTDANAAKLITNDHDENDKPFLTGERSPEGFYYVKSGIEQAISRGLAYAPYSDLIWCETATPNLEEAKKFADAIHQKFPGKLLAYNCSPSFNWKKHLSDAEIASFQVEISKMGYKFQFITLAGFHTQNIAIFELAEKYKKEGMSAYSRIQQQEFAREKDGYTSVKHQREVGTSYFDAVSNTISSGKSSTTAMDGSTESEQF

SEQ ID NO: 149505 - protein, 215 aa, Unknown
  Bacterial polypetide isolated from the Sargasso Sea
MTKSFYDLVPSAPEGRYDGIDRPYSVEEVERLRGSFPIEYTLATRGSNRLWDLLHSEDQVSSLGALSGNQAMQMVKAGLKAIYLSGWQVAADNNTAGSTYPDQSLYPANSGPELARKINRTLQRADQIEHSEGGAQREWFAPIVADAEAGFGGPLNCYEIMRAYIEAGASGVHYEDQLASEKKCGHMGGKVLIPTKQHVRNLNAARLAADVCGVP

SEQ ID NO: 149506 - protein, 261 aa, Unknown
  Bacterial polypetide isolated from the Sargasso Sea
MSAENISYDLKRFAGIKRDYTPEEVERLRGSIKIEYSLCKQQSTKLWNLLNLEPYINTLGSLSGNHAVQHAKAGLKAIYLSGWQVAADANSAGEMYPDQSLYPYDSAPKLVESMNNALIRADQIQHMEIKDGEMKEEKKIDYLLPIIADGEAGFGGPLNVFELAKKFIKAGAAGVHFEDQLASEKKCGHMGGKVLVPTGTMIKNLKAARLAADIADVPLIILARTDANAAKLITNDHDDNDKPFLSGERSPEGFYYVKAGN

SEQ ID NO: 149507 - protein, 206 aa, Unknown
  Bacterial polypetide isolated from the Sargasso Sea
MSAENVSYDLKRFAGIKRDYKPEEIERLRGSIKIEYSLCKQQSIKLWKLLNSEPYVNTLGSLSGNHAVQHAKAGLKAIYLSGWQVAADANSAGEMYPDQSLYPYDSAPKLVDSMNNALIRADQIQHMEIQDGDMKKENKIDYMLPIIADGEAGFGGPLNVFELAKKFIKAGAAGVHFEDQLASEKKCGHMGGKVLVPTGTMIKNLK

SEQ ID NO: 149508 - protein, 433 aa, Unknown
  Bacterial polypetide isolated from the Sargasso Sea
MKEDFEKLNNAKSGRFKNKKRDYTVADVKKLSGSVKIEHTLAHRGAQKLWSLLHNEDYVNTLGALTGNQAMQQVRAGLKAIYLSGWQIAADNNLAGGMYPDQSIYPANSGPELVKKINRTLSRADEIEVMENGSPERDWFAPIIADAEAGFGGVLNAFEITRNYIEAGASGVHFEDQLAAEKKCGHMGGKVLIPVKQHISNLNAARLAADISGTPTLIIARTDAESAKLITSDVDERDKPYLTGERTAEGFYTLTPESSFERCVTRGRAYAEYADLIWMETSTPNLDQAKKFSEAIRKEYPDQLLAYNCSPSFNWTANLSKDDIARFQKELGAMGYKFQFITLAGFHTLNYSMFELAHGYKKKGMTAYSELQDAEFLAENIGYTAHRHQREVGAGWFDAISVAVKGGACSTTALSGSTEEDQFHEETIADVAE

SEQ ID NO: 149509 - protein, 272 aa, Unknown
  Bacterial polypetide isolated from the Sargasso Sea
GFGGALNAYELSRNLIEAGAGAVHFEDQLSAEKKCGHLGGKVLISTSQAIRNLNAARLAADVAGTDTLIIARTDAEAAKLLMTDVDDIDKKYMTGERTSEGFYQITGGLDMGCDRGQAFAEYADLVWCETSKPCLKDAKKFADAVRGAHPDQLLAYNCSPSFNWKQHIPSETELAEFQKELGKMGFKFQFITLAGFHSTNFAVFDFAREYKKLGMLAYSKLQEKEFDYQQYGFTTVKHQAEVGVGYFDAISQAVGADSVAALADSTESEQFG

SEQ ID NO: 149510 - protein, 227 aa, Unknown
  Bacterial polypetide isolated from the Sargasso Sea
MSAENISYDLKRFAGIKRDYTPEEVERLRGSVKIEYSLCKQQSTKLWKLLNTENYVNTLGSLSGNHAVQHAKAGLKAIYLSGWQVAADANSAGEMYPDQSLYPYDSAPKLVESMNNALIRADQIQHMELLDGDMKKEKRVDYMLPIIADGEAGFGGPLNVFELAKKFIKAGAAGVHFEDQLASEKKCGHMGGKVLVPTSTMIKNLKAARLAADIADVPLIILARTDA

SEQ ID NO: 149511 - protein, 191 aa, Unknown
  Bacterial polypetide isolated from the Sargasso Sea
MKLAEQVASLEKDWAENPRWKHVKRPYSAEEVVKLRGSLQPESTLARKGAEKLWKYLETEEYINCLGALTGGQAVQQVKAGVKAIYLSGWQVAADNNSAETMYPDQSLYPVDSVPNVITRINNAFRRADQIEWMNTNGEPKFDFFAPIIADAEAGFGGVLNAFELMKRMIRAGAAGVHFEDQLASVKKCGH

SEQ ID NO: 149512 - protein, 158 aa, Unknown
  Bacterial polypetide isolated from the Sargasso Sea
MNLNEQVLELKNDWEMNERWSYVKRPYSAEEVVKLRGSLQPEYTLARIGAEKLWNMLHKEDYVHCLGTLTGGQAVQGVKAGAKAIYVSGWQVAADNNSAEAMYPDQSLYPVDSVPSLVKRINSSFKRADQIEWMSSNGKPKFDFFTPIVADAEAGFGG

SEQ ID NO: 149513 - protein, 156 aa, Unknown
  Bacterial polypetide isolated from the Sargasso Sea
LAYAPYSDLIWCETATPNLAEAKKFADAIHEKFPGKLLAYNCSPSFNWKKHLSDDEIASFQKEISKMGYKFQFITLAGFHTQNIAIFELAEKYKKEGMAAYSKIQEQEFSREKDGYTSVKHQREVGTSYFDAVSNTISSGKSSTTAMAGSTESEQF

SEQ ID NO: 149514 - protein, 151 aa, Unknown
  Bacterial polypetide isolated from the Sargasso Sea
YSDLIWCETATPNLEEAKKFADAIHEKFPGKLLAYNCSPSFNWKKHLSDSEISTFQQEISKMGYKFQFITLAGFHTQNIAIFELAEKYKNEGMTAYSKIQEQEFAREKDGYTSVKHQREVGTSYFDAVSNTISSGKSSTTAMAGSTESEQF

SEQ ID NO: 149515 - protein, 142 aa, Unknown
  Bacterial polypetide isolated from the Sargasso Sea
AQPNLEEAKKLADAIHSKFPGKLLAYNCSPSFNWKKHLSDEEIASFQVKISEMGYKFQFITLAGFHTQNLAIFELAEQYKSDGMSAYSKIQEKEFAREKDGYTSVKHQREVGTSYFDAVSNTISSGKSSTTAMEGSTESEQF

SEQ ID NO: 149516 - protein, 224 aa, Unknown
  Bacterial polypetide isolated from the Sargasso Sea
MPKSNVSYDIKRFSGIKRDYKEEEVERLRGSIKIHYSMCEHQSKKLWNLLNTEPYVNTLGSLSGNHSVQHAKAGLKAIYVSGWQVAADANTAGEMYPDQSLYPFDSAPKLVDSINNALVRADQIQHMEIKDGDMKIEDKVDYMLPIIADGEAGFGGPLNVFELTKKFIKAGAAGVHFEDQLASEKKCGHMGCKVLIPTSTAVRNLKAARLAADIADVPLIILAR

SEQ ID NO: 149517 - protein, 198 aa, Unknown
  Bacterial polypetide isolated from the Sargasso Sea
MSSEAKVSYDLKRFAGIKRDYTPEEVERLRGSIKIEYSLCKLQSEKLWKLLNTEAYVNTLGSLSGNHAVQHAKAGLKAIYLSGWQVAADANSAGEMYPDQSLYPYDSAPKLVESMNNALIRADQIQHMEIKDGDMKEKDKTDYMLPIIADGEAGFGGPLNVFELAKKFIKAGAAGVHFEDQLASEKKCGHMGGKVLVP

SEQ ID NO: 149518 - protein, 180 aa, Unknown
  Bacterial polypetide isolated from the Sargasso Sea
LTGERSPEGFFYVKDGIEQAISRGLAYAPYADLIWCETATPNLEEAKKFADAIHEKYPGKMLAYNCSPSFNWKKHLSDEEIGSFQRKIGEMGYKFQFITLAGFHTQNIAIFELAEKYKKEGMTAYSKIQQHEFAREKDGYTSVKHQREVGTSYFDAVSNTISSGKSSTTAMEGSTESEQF

SEQ ID NO: 149519 - protein, 154 aa, Unknown
  Bacterial polypetide isolated from the Sargasso Sea
YAPYSDLIWCHTATPNLEEAKKFADAIHEKFPGKLLAYNCSPSFNWKKHLSDTEIGSFQKEISAMGYKFQFITLAGFHTQNIAIFELAEKYKKEGMSAYSKIQEQEFAREKDGYTSVKHQREVGTSYFDAVSNTISSGKSSTTAMEGSTESEQF

SEQ ID NO: 149520 - protein, 308 aa, Unknown
  Bacterial polypetide isolated from the Sargasso Sea
LLESAEGGERLARYSFMGTNPYKILKTDMDSQNVDPLCEIETELSRYKIAEIEGLPPFVGGAVGFLSYEAIRHFEPTVDTFSSGAYSIPESVFFFTDSLLIFDHVTHKIKVIAIARIQDNPSKAYESAIDRIDELIERLNSPLPPDENHIFPGQMSNPDAMDFHLQSNKTKAEYHEMVDRAKEYIVAGDIIQVVPSQRLAIKVKSAPFNFYRSLRAINPSPYMYFLQIEDYSIVGASPEMLVRSENGMVETHPIAGTRRRGKDNEEDNALEQELLQDGKEIAEHVMLLDLGRNDIGRVSKPGTVQVTQ

SEQ ID NO: 149521 - protein, 324 aa, Unknown
  Bacterial polypetide isolated from the Sargasso Sea
FLESVEGGENLGRWSIVATKPLWEAVCYGEEIVKTWNNGKTETHKGDPFDILKSWTKEYKSTMVEDLPSIGQLYGSWGYELINRIEPSVPINEISENNIPYGSWMFFDQLVVFDQIKRCITAVVYADTTSKECSIEELYLNSISKIQKTRNLMRVPLKENEFLDWSENDNLNLDLESNWEKKDFEDAVLSAKEYIRKGDIFQLVISQRFQTQVNNDPFNLYRSLRMVNPSPYMSFFDFGSWYLIGSSPEVMVKAEKNKNSQIVASLRPIAGTRPRGIDNQQDLELEKELLNDPKEIAEHVMLIDLGRNDLGRVCEIGTVKVKDL

SEQ ID NO: 149522 - protein, 282 aa, Unknown
  Bacterial polypetide isolated from the Sargasso Sea
SRIDIPDNLPPLSAGLFGYIGYDMVSYFEDIKIKNNDPLNLPETILMRPSLICIFDRLKDEFILITPVRAKKDISALDAWESGKNILSNAVNELNVGLEHRNLPVQKDTMLDNNAPSNLEKLDFYNSVERAKEYIKSGDIYQVVLSQRFEIPFKKSSISFYRSLRRLNPSPFLFHFNFKDFFVVGSSPEILVRLRNNECTIRPIAGTRPRGSNKAEDLSLKEELLNDPKERAEHLMLLDLGRNDVGRVSKPGSVEVTESFSVEMYSHVMHIESEVKGELRDG

SEQ ID NO: 149523 - protein, 241 aa, Unknown
  Bacterial polypetide isolated from the Sargasso Sea
ELIIHDNLKRKIYYIYNCYSDEKIKNYNIMYREILSTLEYNIFLSNYNLTLSKQYKKSKILIKSNVTKKKFIDNVRKAKKYIKIGDIFQVVLSQRFETKLTKEPIDIYKKLRITNPSPFMYFFNFKDFQIIGASPEILVRLRDDKITIRPIAGTRPRGKNKKQDLFYKKDLLKDKKEISEHLMLLDLGRNDTGKVSKVGTVKVTEKFIIEKYSHVMHIVSNVTGHFNDKFTRFETLMSGFP

SEQ ID NO: 149524 - protein, 317 aa, Unknown
  Bacterial polypetide isolated from the Sargasso Sea
PESIFIRPSLTLVFDNVNDKLYISKIISPSKKNALETFKLAKSEINNLIQKIARPLEKNNLSLHNLSGKVNIFKNVKSNTTYSEFKKMVEKAKKYIFEGEIFQVVLSRLFKAKIKSSPVSVYRALRHLNPSPYLFFMNFKNFDIVGSSPEILIKLEDDKVTIRPIAGTRKRGKTKQEDKKLEKDLLSDPKEIAEHLMLLDLGRNDISRVTKSGTVEVTSKMYIEYFSHVMHIVSNIEGKINKKKNSTDVLFSGFPAGTVTGAPKIRAIEIIEELEKNRRNIYAGSVGYISNNGNINTCIALRTALIKENQIYVQAGA

SEQ ID NO: 149525 - protein, 229 aa, Unknown
  Bacterial polypetide isolated from the Sargasso Sea
MSLYKALRKLNPSPYMYFLKIDDLHIVGASPEILVRLQNNQVTVRPIAGTVKRGKDEIEDQELAKILLNDEKEIAEHLMLIDLGRNDVGRIANIGSVETTDQMVIEKYSHVMHLVSNVIGDLKHGQSAIDVLKATLPAGTLSGAPKVRAMEIIEELEPDRRGVYGGAIGYLSWTGNMDTAIAIRTAIIQKNVLKVRAGGGIVHDSDPEAEYQESLNKAQSIFNALEEMD

SEQ ID NO: 149526 - protein, 178 aa, Unknown
  Bacterial polypetide isolated from the Sargasso Sea
MPPMAGAFFGYISYENIYNIEDISKFKKKNTLMTPELILFIPEILIVYDNVSNSLYILKHFLSGIKKAQEYEQVLNELNDIENNLYKKLKNHTINLNKKKRLKIKSNITKSKFINNIKKAKKYIKAGDIFQVVPSQRFETNFKSKGSSLYKVLRLTNPSPFMYYFNLPNFQIVGSSPE

SEQ ID NO: 149527 - protein, 238 aa, Unknown
  Bacterial polypetide isolated from the Sargasso Sea
EVTFEGNYDPLTLYRALRLINPSPYMFYMSFDKFNVIGASPEILVQHQKDKVTIRPIAGTRKRGLTESEDLSNKIDLLEDEKEKAEHMMLVDLARNDLSKVSEVGTVQVDEMMVIEKYSHVMHMTSNVIGQKKNGATPIDCLKAALPAGTLSGTPKIRAMEILSEHENRVRGIYGGSVGYIGFNGNLDTAIVIRTAIHTDESVKVGVGGGIVFDSTPKNEWQETESKLAVFREALKYK

SEQ ID NO: 149528 - protein, 88 aa, Unknown
  Bacterial polypetide isolated from the Sargasso Sea
LGAPKIRAMEIINELEPSSRGIYGGAIGHISWDGDIDTAIAIRTAVIKNNKIHVGAGAGVVADSIPENEWNECLQKAHVFLDAIEMIK

SEQ ID NO: 149529 - protein, 169 aa, Unknown
  Bacterial polypetide isolated from the Sargasso Sea
MNQEQYDQLVAQGYNRIPIIREVLADTETPLSVYLKLAKGKNSYFFESVQGGEKWGRYSIIGLPCRTILTVRDKKITIETDGSVQDEFVTDDPFAFLAEFKSRFKVAEITDEQRFSGGLVGYFSYDTVRFVETKLGPADNKDEIDTPDILLMLSEELVVFDNLRGTILL

SEQ ID NO: 149530 - protein, 304 aa, Unknown
  Bacterial polypetide isolated from the Sargasso Sea
MKKYSFLLESVEGGSKRGRYSLLGCDPDLIWKVEKGKARIKYLDYNYDYKLDINPINSLKELVKISKFTNNEVDVPFPTLVGYLGYPMIQYIENIKLRNKDDINIPDAILIRPKIVAVFDNIKDIISLMVVTYPTKKISAQKAYKNNKLLIEKTINKLQESILKPAQNKNKKSKLNFKSNIKKEQFYKIVNKAKEYIQNGDIFQVVPSQRFETKYSLKAINLYRSLRRLNPSPYLVNLNFDKIGLVASSPELMVQLRDKKVTIRPIAGTRKRGKNATEDMFLSNDLLNDKKELAEHLMLLDLGR

SEQ ID NO: 149531 - protein, 257 aa, Unknown
  Bacterial polypetide isolated from the Sargasso Sea
MGYPMVSYMEKINLKNNDTLNIPDSIMIRPKLVAVFDNIKDTINIMTAVYPNKKIDPETAYLKAFQKIDKVNYQLKNYFENEKTKLKNESDKDINFISNYTKKEYFNMVNKAKKYIREGDIFQVVLSQRFECDYKLDAKTLYRSLRRLNPSPFLVNLNFDDLGLVASSPEILVRLRDKKVTIRPIAGTRKRGQNNNEDEILSNDLLNDKKELAEHLMLLDLGRNDVGRVSKIGSVNVTEKMQIEYYSHVMHIVSNVE

SEQ ID NO: 149532 - protein, 305 aa, Unknown
  Bacterial polypetide isolated from the Sargasso Sea
SLGRWSIVATGPLWEAVCYGEEIVKTFNNGKTETHKGDPFDILRSWTKEYKSTILDDLPSIGQLYGSWGYELINRIEPSVPINSILENNIPYGSWMFFDQLVVFDQIKRCITAVVYVDTTSSKESSIEELYLNAISKIQKTRNLMKVPLKENEFLDWNENENLNLDLESNWKKKDFEDAVLSAKEYIKKGDIFQIVISQRFQTQVNNDPFNLYRSLRMVNPSPYMSFFDFGSWYLIGSSPEVMVKAEKNKNSQIVASLRPIAGTRPRGIDNQQDLELEKDLLKDPKEIAEHVMLIDLGRNDLGRV

SEQ ID NO: 149533 - protein, 84 aa, Unknown
  Bacterial polypetide isolated from the Sargasso Sea
GAPKIRAMEIIDELETTRRKVYAGGIGYFSSNGDFDTCIALRTAISKNKKFYVQSGAGIVADSKPINEFNETVNKAKALIKALE

SEQ ID NO: 149534 - protein, 307 aa, Unknown
  Bacterial polypetide isolated from the Sargasso Sea
KSKKYNLIPVYQEIRADLETPLSIYIKLSDNKYSFLLESITGGENLARYSIIGTNPRKVIKTGKNEKYGEIDPLEIVKEEIKSFKVPEIEELPVFTGGAVGYLSYETVSYFEDTVTKKKNSNLEVPESIFLITDSLVVFDHVKQTIFIVNYAKIEENSDLEKVFLESQKKIDDIYVKIRKPITDKFNNISNINNSSDKSNNELVDEYQKNMTKEEYKSAIEKCIENIYSGEIIQVVFSQRLSKKTKASAIEIYRCLRTINPSPYMFLLNLDDFHILGASPELLVKSSNKQISVHPIAGTRPRGSDSI

SEQ ID NO: 149535 - protein, 256 aa, Unknown
  Bacterial polypetide isolated from the Sargasso Sea
MVGYLGYPMIKYMEKIYLKNDDNINIPDSVLIRPKIVAVFDNIKDTISVMTVVYPSENKHYESLYTKAQELLEVKVNQLKENLVQNSAISIKSNLDFKSNYSKDEYFSIISKAKEYIKEGDIFQVVTSQRFETEYDLEAISLYRSLRRLNPSPYLVNLNFNDIGLVASSPELLVQLRNKKITIRPIAGTRKRGKNANEDLELSRNLLQDKKELAEHLMLLDLGRNDVGRVSRNQSVKVTEQMIIEYYSHVMHIVSN

SEQ ID NO: 149536 - protein, 300 aa, Unknown
  Bacterial polypetide isolated from the Sargasso Sea
ESVEKRRIRGRYTIIGADPDKIWEFNNKKIHVIENEKRKLIKDEPYPFLKNLIESFNFPMPKNLPPLSSLLVGYFSYDIIRYIENVPNKCLDDLKIPDIRLIRPKTIIIHDNLSKKIYFLVNCFADEKIYNYSEYYHKQVRNLKFLKNLIFRSSNLIKIKKSKKNIKLKIKVKSNISKKKFKKIVLKAKKYIKKGDIFQVVLSQRFESKLTKTPLEIYKKLRLENPSPFMFFFNFKDFQIIGSSPEILVRLRNNKITIRPIAGTRPRGLNAKKDNFYKRQLLNDKKELAEHLMLLDLGRN

SEQ ID NO: 149537 - protein, 277 aa, Unknown
  Bacterial polypetide isolated from the Sargasso Sea
EGDKKWSRYTIVGLPSQNFIDIYDKNIKVYKENKLDEDFTVNNPISWIEEYQKKFVVLQDRKLPEFQGGLVGFFGFDAVSHFEKSIKPSNQDDSMKTPDISLLISRELLIFDKLKRKVHLVVYAEDSIESFNLAKSKLSTLKQAICEPIVIKKNKNISNNDSPLKINYHFPKEKFISAVEKIKNYIFKGDVMQVVLSQRMSIEFKEDPFDFYKELRELNPSPYMYYLNMGDYHIVGSSPEILVRLENNIITVRPIAGTRPRGKDAESDKLLEIELLN

SEQ ID NO: 149538 - protein, 286 aa, Unknown
  Bacterial polypetide isolated from the Sargasso Sea
DGSYSFLLESVEGGENVARYSFIGTNPLEVIQTGKNTTNGKKNPLDQLRNKMKKISYAPVEGLPKFHGGAVGYLSYDSIKYFEPSVPEINSQDSGLNVPESVFMLTNSLLIFDHVKHTIIVVAHAEIGSDVSGAYNDAINTITSLINKLSKELPREEKIKNFIPISQIQNLHNQISYKDSIKDKSKSFIPNMSKEYYKDSVSRCKKAINDGELIQVVFSQRLSRYTEIKPFNLYRSLRAINPSPYMFFLHLDDFNIVGASPELLTQVIDKKMAVHPIAGTRPRGKK

SEQ ID NO: 149539 - protein, 120 aa, Unknown
  Bacterial polypetide isolated from the Sargasso Sea
KYSHVMHIVSNVEGQFNKKLSLLDTMLAGFPAGTVTGAPKIRAMEIIDELEKSKRKMYAGSIGYFSANRNFDTCIALRTALIKNNKFYIQSGAGIVADSVPEKEYYETVNKAKALISSLN

SEQ ID NO: 149540 - protein, 157 aa, Unknown
  Bacterial polypetide isolated from the Sargasso Sea
KNINNRTELKSRNIKVKSNTSKNRFLQMVNKAKEYIKLGDIFQVVLSQRFEAKLTKKPIDIYKKLRVTNPSPFMFFFNFNDFQIIGASPEILVRLRDNKITVRPIAGTRPRGKTLSEDRFYEKDLLQDKKELSEHLMLLDLGRNDAGKVSKINTVKV

SEQ ID NO: 149541 - protein, 86 aa, Unknown
  Bacterial polypetide isolated from the Sargasso Sea
PKVRAMEIIQELEPTQRETYAGAVGYFSFNGCCDFAIAIRSIFANKERGFVQAGAGIVFDSIAENELKETEHKANAMITALKEASK

SEQ ID NO: 149542 - protein, 289 aa, Unknown
  Bacterial polypetide isolated from the Sargasso Sea
KNNEDPIKSLKKLIKQSRIDIPEHLPPLSAGLFGYIGYDMVSYFENIKIKNNDPLNLPETILMRPSLICIFDRLKDEFILITPVRAKKDISALDAWENGKNILSNAVNELNVGLEHRNLPVQKDTMLDNNAPSNLERLDFYNSVKRAKEYIKSGDIYQVVLSQRFEIPFKKSSISFYRSLRRLNPSPFLFHFNFKDFFVVGSSPEILVRLRNKECTIRPIAGTRPRGANKAEDLSLKEELLNDPKERAEHLMLLDLGRNDVGRVSKPGSVEVTESFSVEMYSHVMHIES

SEQ ID NO: 149543 - protein, 243 aa, Unknown
  Bacterial polypetide isolated from the Sargasso Sea
MISGYFSYDIIRYIEKIPNSTKNDLRIPDTRIMRPRNLIVHDNIKKKIFFIVNVFKDEKIKNIKEKYISVENEIENMIFLSNYDFEKKSHPKENIKIKVKSNISKNKFIKNVIKAKKYIKLGDIFQVVLSQRFEAKLTKKPIEIYKKLRITNPSPFMYFFNFRDFQIIGASPEILVRLRNNKITIRPIAGTRPRGKNKKEDLFYEKDLLKDKKELSEHLMLLDLGRNDTGKVSKINSVKVTES

SEQ ID NO: 149544 - protein, 232 aa, Unknown
  Bacterial polypetide isolated from the Sargasso Sea
MKAQTGNSLDVLRTILAENTMDIPDDLPPMAAGWIGNLGYDFIREIERLGPTRVDPVGLSTSLLIRPTIMAVFDMVKNTITLVTPVRPATKAKPMAKSDIIMTISDARHRLDDAMDRLYRPLPRPEGKEIVANDHPVKSNTQPSAYLEMVSKAKDYIYAGDIFQVVLSQRFSQPFDLSPFALYRALRRTNPSPFLYFLKYDDVAIVGSSPEILVRLRKNTITIRPIAGTRPR

SEQ ID NO: 149545 - protein, 274 aa, Unknown
  Bacterial polypetide isolated from the Sargasso Sea
SQPWLDDLPSIGQLYGSWGYELINRIEPSVPINEIPENNIPYGSWMFFDQLVVFDQIKRCITAVVYADTTSSEECSIEELYLNSISKIQKTRNLMRVPLKENEFLDWNENENLNLDLESNWEKKDFEDVVLSAKEYIRKGDIFQIVISQRFHTQVNNDPFNLYRSLRMVNPSPYMSFFDFGSWYLIGSSPEVMVKAEKNKNSQIVASLRPIAGTRPRGIDNQQDLELEKELLKDPKEIAEHVMLIDLGRNDLGRVCEIGTVKVKDLMVIEKYSH

SEQ ID NO: 149546 - protein, 297 aa, Unknown
  Bacterial polypetide isolated from the Sargasso Sea
IISINHFKNELYLFEHRTEIGTGSGPESLEKLEELVKSPNVSKNTFQREGEELSNCTNEEFLKMVQSAKKHCKRGDVFQLVLSREFSQKFQGDEFTLYRALRSINPSPYLFYFDFEKFRIFGSSPEAQIVIKNRKATIYPIAGTFRRTGDDVKDAELAKKLLDDPKENAEHVMLVDLARNDLSRDSKGVSVEAYREIQFYSHVIHLVSKVTGDLLPDKNSIRLVADTFPAGTLSGAPKHMALQLINKYEKNQRGIYGGCIGFLGFNGDFNHAIIIRSFLSKNNNLYYQARCRYSYEI

SEQ ID NO: 149547 - protein, 276 aa, Unknown
  Bacterial polypetide isolated from the Sargasso Sea
SVPINEIAENNIPYGSWMFFDQLVVFDQIKRCITAVVYADTTSSKESSIEELYLQSISKIQKTRNLMRVPLRENEFLDWNENENENENENLNLDLESNWKKKDFEEAVISAKEYIRKGDIFQIVLSQRFQAQVNNDPFNLYRSLRMVNPSPYMSFFDFGSWYLIGSSPEVMVKAEKNQKSQIVASLRPIAGTRPRGIDNKQDLELEKDLLKDPKEIAEHVMLIDLGRNDLGRVCEIGTVKVKDLMVIEKYSHVMHIVSEVEGILKKNADVWDLLKA

SEQ ID NO: 149548 - protein, 122 aa, Unknown
  Bacterial polypetide isolated from the Sargasso Sea
DAYRIECGGINSRKFITHGCVKATFPAGTVSGAPKVRAMEIINELESTKRGVYAGAVGYIGYDSTLDVAIAIRTGVIKSGKLFVQAGAGVVADSIAKNEWDETNNKAKAVLRAAEIAERDFG

SEQ ID NO: 149549 - protein, 307 aa, Unknown
  Bacterial polypetide isolated from the Sargasso Sea
DPFDILRSWTKEYKSTMIDDLPSIGQLYGSWGYELINRIEPSVPINEIQENNIPDGSWMFFDQLVVFDQIKRCITAVVYADTTSSKESSIEELYLNSISKIQKTRNLMRVPLKENEFLDWNENDNLNLDLESNWKKKDFEDAVLSAKEYIRKGDIFQIVISQRFQTKVNNDPFNLYRSLRMVNPSPYMSFFDFGSWYLIGSSPEVMVKAEKNKNSQIVASLRPIAGTRPRGINNQQDLELEKDLLKDPKEIAEHVMLIDLGRNDLGRVCEIGTVKVKDLMVIEKYSHVMHIVSEVEGILKNNADVWD

SEQ ID NO: 149550 - protein, 283 aa, Unknown
  Bacterial polypetide isolated from the Sargasso Sea
MSSMLVGYFSYDIIRLIEKIPNSCSDDINIPDIRLMRPKNLIIYDNFKSKIFFIENIFEDQKIGDYQTEYNKIGNNLKELSHYGNIPLPTNFYRPARKINIKSNITKSRFKKIVRKAKTYISKGDIFQVVLSQRFKANIKKPPLEIYNSLRKLNPSPFMFYFNYDDFQILGSSPEILVRLVDGEVTIRPIAGTRPRGKNSKDDKRLTNELLNDPKELSEHLMLLDLGRNDVGKVSKANSVKVTEKFKVEKYSHVMHIVSNVIGKQKINCPFLKHFYLDFLLGL

SEQ ID NO: 149551 - protein, 296 aa, Unknown
  Bacterial polypetide isolated from the Sargasso Sea
VVYLVQLALVGPKDDAAAVYAETLAELERRAEEIQTHSKPLRAGRMTPRGEASPMPSNITREQHAEMVDRALEYIRAGDIFQVVLGQRFERTASADPFDVYRSLRAVNPSPYMVYMQAGPCILVASSPEILCRVERVSTGSKRGSDFKVTNRPLAGTRKRGATPDEDAALEADLLADQKELAEHTMLVDLGRNDVGRVAKPGSVSLDAVMEVERYSHVMHISSTVTGLLRDGMDCWDALRAALPVGTISGAPKVRAMQIIDELEPVRRGPYGGGMGYVGLDGQMDIALALRTIGRP

SEQ ID NO: 149552 - protein, 153 aa, Unknown
  Bacterial polypetide isolated from the Sargasso Sea
QIVINNKKAEIHPIAGTFKRTGDDVKDQITAKELAKDPKENSEHIMLVDLARNDLSRSGNNVKVEKNREIQFYSHVIHLVSKVTAELNKDIKSYQVVEDTFPAGTLSGAPKHKALELIEKYEKVNRNFYGGAIGFIDFDGNFNHAIIIKIILQ

SEQ ID NO: 149553 - protein, 242 aa, Unknown
  Bacterial polypetide isolated from the Sargasso Sea
IRYIEKIPNSCSDDLNIPDARILKPRTLVIHDNYKQKIYYIENCFSDEKIKNYKKKFNSIKKQINNLIFTSNYNSNLTINSSNKSIKVRSNITKKKFLENVLKAKKYIKIGDIFQVVLSQRFESKLTKNPIEIYKKLRINNPSPFMYFFNFHDFQIIGASPEILVRLRNNNITIRPIAGTRPRGKSKKEDKFFEKDLLKDKKELSEHLMLLDLGRNDAGKVSKINSIKVTEKFEIEKYSHVM

SEQ ID NO: 149554 - protein, 127 aa, Unknown
  Bacterial polypetide isolated from the Sargasso Sea
HVMHIASHVEGSIQDDLDALDALASGFPAGTVSGAPKVRAMEIIDELEKSRRGVYAGAVGYFSANGTMDTCIALRTALVKDGTMYVQAGGGVVADSDPEAEYQESINKARALFRAAQQAVEFAAQER

SEQ ID NO: 149555 - protein, 128 aa, Unknown
  Bacterial polypetide isolated from the Sargasso Sea
MVIERYSHVMHIVSNVTGRAREGMSAVDALRAALPAGTLSGAPKVRAMEIIDELEPVKRGIYGGAVGYLSWSGNMDTAIAIRTVVVKNGEAILQAGVGIVADSVPTSEWEETLSKARALMHAIAMCSE

SEQ ID NO: 149556 - protein, 301 aa, Unknown
  Bacterial polypetide isolated from the Sargasso Sea
NSFIFESVEKGSIRGRYTIIGLNPDKIWDIYNKTVKLNNNGKKTIIKTNPLKYLNKLIKEFKIEMPGQLPSMASMLVGYFSYDIIRYIEKIPNRCKDDLKIPDVRLSRPKNLVIYDNLKKKIHYVENVYADTKIKNYQETYEAIQKKFELYESFENIKLPEQFTFKSNKNLIKSNTSKNKFKSIIKKAKSYIKKGDIFQVVLSQRFERKIKKTPIEIYNHLRKSNPSPFMFYFNYKDFNMLGSSPEILVRLRKGQVTIRPIAGTRPRGRNDKEDKKYTLDLLKDKKELAEHLMLLDLVETM

SEQ ID NO: 149557 - protein, 393 aa, Unknown
  Bacterial polypetide isolated from the Sargasso Sea
MIINRSFKEFKLQHRSKKNQIIYSSKKVQSDKEVLNLIDNFLIEKNSFIFESVEKGKIKGRYTIFGKNPDKIWEFNNNSSFLIKNNKKVKLKEKPQILIENIIEDFKFKIPSGLPSISSLISGYFSYDTIRYIENIPNKCKDDLKVPDVRLLRPRTLVIHDNLKKKIFYIVNIFKDEKISNYSKKYLGIKSELSKLFTQSSKTKDKTINEKKLAKINVKSNTSKNKFLSMVNKAKKYIKIGDIFQVVLSQRFETKLTKKPLDIYKKLRIINPSPFMFFFNFNDFQIIGASPEILVRLRDNKITVRPIAGTRPRGKTMTQDKFYEKDLLKDKKELSEHLMLLDLGRNDAGKVSKVNTVKVTESFVIEKYSHVMHIVSNVIGVYNKKFSKFKSLL

SEQ ID NO: 149558 - protein, 400 aa, Unknown
  Bacterial polypetide isolated from the Sargasso Sea
MIINTSLNDFKKKHQNKKNQIVFCETKCKNNKIIENIINNFLTKKNSFIFESVEKRRIRGRYTIIGADPDKIWEFSSKKIHIIENNRKKIIKGSPYAFMKKLIENFHFPLPKNLPPLCSLLVGYFSYDIIRYIESIPDNCLDDLKIPDVRLLRPKTIIIHDNVLKKIYFIKNCFADEKINNYQEYFLELKQNINFLRNLTFDFSYKKLAKKIKNRKISVKSNISKKKFKNMVLKAKKYIKKGDIFQVVLSQRFESKLTKAPLEIYKKLRIKNPSPFMFFFNFDDFQIIGSSPEILVRLRKNKITIRPIAGTRPRGSNAKKDKFFKKQLLNDKKELSEHLMLLDLGRNDVGKVSKINTVRVTENFKIEKYSHVMHIVSNVEGSFDNKQSMLDTMLAGFPAG

SEQ ID NO: 149559 - protein, 191 aa, Unknown
  Bacterial polypetide isolated from the Sargasso Sea
MISESNFNKLAKQGYNRIPLMCEILADLDTPLSTYTKICNLKYSYLFESVEGGDKWGRYSIIGLPAKKIISVCGNKITIKENNKCIEEYNTNDPLAEIEKIQQSYKVPQIENMPRFNGGLVGYFGYETIKYIEPKLKKNEKEDPIGSPDILLMVSDEVIIFDNLSGKLFIIVHAEPEKNNAYINAKKRLNT

SEQ ID NO: 149560 - protein, 241 aa, Unknown
  Bacterial polypetide isolated from the Sargasso Sea
YEVKGDQTAIYEKLRNLNPSPHMYFMKFCDQVIIGASPELLFRLRNGEMETFPLAGTTKRGKDKLEDLKLARELLNDKKEIAEHNMLVDLHRNDLGRVAKFGTVKVRNLMDIKKYSHVQHISSEIAGIISEEEDMFSALASNFPAGTLSGAPKIEAMKIINEIEEEGRGPYGGAIGQFGFNGDCTFAIPIRSIFITGDQAYAQTCGGNVYDSDPDKEYLEIERKLAAMKTVLASFEEKEIK

SEQ ID NO: 149561 - protein, 314 aa, Unknown
  Bacterial polypetide isolated from the Sargasso Sea
MKQPNYKYKRVPVVLETFSDLETPLSVYLKLADGPYSYLLESSQGGEKWGRYSIIGLPSKTILTVRGEQIEVLHNGLVMESIKTEDPFQFIESFQNRYEIEHLAELPRFYGGLVGYFGYDAVRYVEKRIKESTPPDPIGTPDILLMVSEDIVVFDNVDNKIQYIKLVDPDIENSIVDTKKELTERANSLSNKKIRQTSKPSSGTILESDFTSETGEQPFKDAVEKIKEYTVEGDVMQVVLAQRMSIPFSLPSIDLYRALRTLNPSPYMYFMNLNEFDIVSSSPEILARLEDGKITNRPLAGTRRRGKTEKEDQH

SEQ ID NO: 149562 - protein, 353 aa, Unknown
  Bacterial polypetide isolated from the Sargasso Sea
MISKEEYNRLANDGFNIIPLIKDLNIELDSPISLYSSIKDKKNTFLLESIEGGQEWAQYSIIGLNCKDSIKISGNEILIEENGFNKSYISESPLEEIDKIIKACKPFELEGLPRFYGGYVGFFAYESSQYAEEKIKALSKKESKFKEHMPDVYLVKAEQLIVYDNFNNSVSVIFNANPNNISYEDALKELFMIETSLGEINISGELDFKEVKEIIQFESNFKKEDFISSVEKIKTYIKEGDVMQVVLAQDFFKNFDGDSFELYAALRKLNPSPYMYYLNLDECHVVGASPEILVRLEKDEITLRPIAGTRKRGKNEQQDKINEQDLLNDPKELAEHLMLIDLGRNDVGRVADI

SEQ ID NO: 149563 - protein, 149 aa, Unknown
  Bacterial polypetide isolated from the Sargasso Sea
LVDLARNDVSKVSNPSTVSVDEMMTVEKYSHVMHMTSNVIGQIKESATPIDCLKAALPAGTLSGAPKIRAMEILSELENRARGIYGGCVGYIGYNKSLDTAIIIRTALHKKDEVKVGVGAGIVFDSEPQNEWNETVAKLNVFLEALKYE

SEQ ID NO: 149564 - protein, 148 aa, Unknown
  Bacterial polypetide isolated from the Sargasso Sea
NDVGRVSQNKSVKVTEQMIIEYYSHVMHIVSNVEGLIDEKYDAVDALKAGFPAGTVSGAPKIRAMQIIEELENLNRSFYAGCMGYFDSNGDMDTCISLRSGLVKNGKLFIQAGGGVVYDSNPENEYQETINKASALMAAAEDSYKYNS

SEQ ID NO: 149565 - protein, 143 aa, Unknown
  Bacterial polypetide isolated from the Sargasso Sea
MADILLLDNIDSFTYNLADQLRTNGHNVVIYRNHIPAQTLIDRLATMKNPVLMLSPGPGAPSEAGCMPELLTRLRGKLPIIGICLGHQAIVEAYGGYVGQAGEILHGKASSIEHDGQAMFAGLANPLPVARYHSLVGSTFRQD

SEQ ID NO: 149566 - protein, 400 aa, Unknown
  Bacterial polypetide isolated from the Sargasso Sea
MKINISFKTFKNNHIKKKHQVLFKSRNCKKYFKVENLFKFLLAEKNSFIFESVEKGKIKGRYTIIGSNPDKIWDVNKDIITINKLGKKSKIKTNPLNFINKLIKDFDIKIPKNLPSMSSMLVGYFSYDIIRYIEQIPDKCIDDLKIPDVRLSRPKNLVIYDNLKKKIFYIENVYADTKISDYNEAYDSVLKKFEQYENYENIKLPDQFTFVPNKNLIKSNTSEKRFKALVKKAKNYIKKGDIFQVVLSQRFERKIFKKPIEIYNHLRRSNPSPFMFYFNYEDFNVLGSSPEILVRLRKGEVTIRPIAGTRPRGRNIKEDKKFESDLLNDKKELSEHLMLLDLGRNDVGKVARVNSVKVTEKFKVEKYSHVMHIVSNVVGKFNNQFSIFETLLSGFPAGTV

SEQ ID NO: 149567 - protein, 353 aa, Unknown
  Bacterial polypetide isolated from the Sargasso Sea
LSTWLKLSSTNSHGVFLESVEGGENLGRWSIVATKPLWEAVCYGEEIVKTWNNGKTEIHKGDPFDILKSWTKEYKSTMLEEIPSIGQLYGSWGYELINRIEPSVPINEIPENSIPHGSWMFFDQLVVFDQIKRCITAVVYADTTSSKESSIEDLYLNSISKIQETRNLMRIPLKENEFLDWNENENLNLDLESNWKKKDFEDAVISAKEYIRKGDIFQIVISQRFQTQVNNDPFSLYRSLRMVNPSPYMSFFDFGSWYLIGSSPEVMVKAKINKNSEIVASLRPIAGTRPRGIDNQQDLELEKDLLKDPKEIAEHVMLIDLGRNDLGRVCEIGTVKVKDLMVIEKYSHVMHIV

SEQ ID NO: 149568 - protein, 318 aa, Unknown
  Bacterial polypetide isolated from the Sargasso Sea
SFQTFKVKSSKELPRMSSMLVGYFSYDIIRLIENIPNKCKDDLNIPDIRLMRPKNLIIYDNVKKKIFYIENVYSEQKIHDYEYEYEKIKKTLNELNFYGNIPLPENFHINKKEIDIKSNISKSKFKNIINKAKTYIKKGDIFQVVLSQRFSAKVKKPPLEIYNTLRKSNPSPFMFYFNYDDFQVLGSSPEILVRLVNKEVTIRPIAGTRPRGKNAKEDKKFINDLLNDPKELSEHLMLLDLGRNDVGKVSKANSVKVTEKFKVEKYSHVMHIVSNVIGKLRKNLSLFETFLSGFPAGTVSGAPKIRAMEIIDELEISK

SEQ ID NO: 149569 - protein, 87 aa, Unknown
  Bacterial polypetide isolated from the Sargasso Sea
TVSGAPKIRAMEIIDNLESSKRKVYAGGIGYFSANGEFDTCIALRTAVAKKNKFYVQAGAGIVADSKPIKEYEETVNKAKALINALK

SEQ ID NO: 149570 - protein, 289 aa, Unknown
  Bacterial polypetide isolated from the Sargasso Sea
IDDIPFSGGMVGFSSFDMIRHIEKLPVPEGKEGILSASDCSYIAPTSLLIFDHLENKMALLHSGNEEERLNLRDEILSLLSKEISQSQKKKTYSEPIANIKKEIFYDAVEKAKHHIFEGDIFQIVLSIAFSGSYDLDPFDVYRAMRLINPSPYMFYCESDGLKIAGSSPEALVRLGGNKASLRPIAGTRPRGKDSEEDQSHRESLLADEKEIAEHIMLVDLARNDLGRVAKHGSIEVKPYQSIEYYSHVMHIVSGVQGHLEEEKDAFDLFAAAFPAGTLVGAPRSEPWN

SEQ ID NO: 149571 - protein, 222 aa, Unknown
  Bacterial polypetide isolated from the Sargasso Sea
NPSPYMYYLNMGDYHIVGSSPEILVRLEDNLITVRPIAGTRPRGSNDDQDSILEDELLNDPKEKAEHLMLIDLGRNDAGKVSKIGSIKLTDKMIIEKYSHVMHMVSNVTGEINDGLGMIDVLKSTFPAGTVSGAPKIRAIEIIYEQETIKRGIYAGAIGYLGWNGNMDTAIAIRTSVIKNDKLYIQCGAGIVNDSIAELEWEETMNKGKAIIQAYSNLRNKI

SEQ ID NO: 149572 - protein, 286 aa, Unknown
  Bacterial polypetide isolated from the Sargasso Sea
MFFDQIKRCITAVVYADTTSLKDSSIEELYLNSISKIQETRNLMRVPLKENEFLDWNENENLNLDLKSNWNKKDFEDAVLSAKEYIRKGDIFQIVISQRFQTQVNNDPFSLYRSLRMVNPSPYMSFFDFGSWYLIGSSPEVMVKAEKNKNGNIVASLRPIAGTRPRGIDNQQDLELEKDLLKDPKEIAEHVMLIDLGRNDLGRVCEIGTVKVKELMVIEKYSHVMHIVSEVEGILKSNADVWDLLKASFPAGTVTGAPKIRAMQLIKHLEKDPRGPYAGVYGSIDI

SEQ ID NO: 149573 - protein, 308 aa, Unknown
  Bacterial polypetide isolated from the Sargasso Sea
ICSLISGYFSYDSIRYIEKIPNNCKNDLNIPDVRLLRPRTLVIHDNLKKEIFYISNIFKDEKIKNYQSKFNEIKSDLFKLLIQSSIKNLNKPLKEKIKNIKVKSNTSKSKFLRMVNKAKKYIKHGDIFQVVLSQRFEAKLSKKPIDIYKKLRATNPSPFMFFFNFNDFQIIGASPEILVRLRDNKITVRPIAGTRPRGKTLKEDLCYEKDLLKDKKELSEHLMLLDLGRNDAGKVSKINSVKVTESFIIEKYSHVMHIVSNVIGDYNKKFSKFKSLLAGFPAGTVSGAPKIRAMEIIDELETTRRKVY

SEQ ID NO: 149574 - protein, 169 aa, Unknown
  Bacterial polypetide isolated from the Sargasso Sea
KELISDEKELAEHLMLLDLGRNDVGRVSKPGTVNVNQKMEIEKYSHIMHIVSNVTGTLDDKYDEFDALRAAFPAGTVSGAPKVRAMQLISELEPDKRGPYSGGVGYFSFNGNMDTCIAIRTMVLKDKTVYLQAGGGIVADSKVDYEYEETLNKMMALIKSVDDAERNLK

SEQ ID NO: 149575 - protein, 244 aa, Unknown
  Bacterial polypetide isolated from the Sargasso Sea
QAVLSREVSFKGNFNPFTLYRALRLINPSPYMFYMNFGDLNLIGSSPEILVQNFQDKVTIRPIAGTRKRGIDESEDLQNKIDLIGDDKEKAEHMMLVDLARNDVSKVSNPSTVSVDEMMIVEKYSHVMHMTSNVIGQIKESATPIDCLKAALPAGTLSGAPKIRAMEILSELENRARGIYGGCVGYIGYNKSLDTAIIIRTALHKKDEVKVGVGAGIVFDSEPQNEWNETVAKLNVFLEALKYE

SEQ ID NO: 149576 - protein, 120 aa, Unknown
  Bacterial polypetide isolated from the Sargasso Sea
IVSNVEGKIDNNLDALDALMAGFPAGTVSGAPKIRAMEIIEELENLNRSFYAGCMGYFDSNGDMDTCISLRTGLVKDNKLYIQAGAGIVYDSVPKNEHQEILNKASALMAAAEDSYKFDI

SEQ ID NO: 149577 - protein, 94 aa, Unknown
  Bacterial polypetide isolated from the Sargasso Sea
LPAGTLSGAPKIRAMEIINELEPSSRGIYGGAIGYISWNGNIDTAIAIRTAVIRDNKIHVGAGAGIVADSDPEKEWEECVQKSKVFLDAMEMIS

SEQ ID NO: 149578 - protein, 86 aa, Unknown
  Bacterial polypetide isolated from the Sargasso Sea
VSGAPKIRAMEIIDELEKSKRKLYAGGIGYFTSNSEFDTCIALRTALIKNNKFYVQAGAGIVADSKPEKEYAETINKAKALMRAVD

SEQ ID NO: 149579 - protein, 158 aa, Unknown
  Bacterial polypetide isolated from the Sargasso Sea
ENSEHIMLVDLARNDLSRNGSNVKVEKNREIQFFSHVIHLVSKVTANLKDTSKIFQVVMDTFPAGTLSGAPKHKALTLIEKYEKVNRNFYGGAIGYMDFNGNFNHAIIIRSFFSKNNELSYQAGAGIVIKSKPQDELQEVYNKLGALDYALKNAEDIK

SEQ ID NO: 149580 - protein, 305 aa, Unknown
  Bacterial polypetide isolated from the Sargasso Sea
EFKFETPKNLPKICSLISGYFSYDSIRYIEKIPNNCKNDLNIPDVRLLRPRTLIIHDNLKKEIFYISNIFKDEKIKNYQSKFNEIKSDLFKLLIQSSIKNLNKPLKEKIKNIKVKSNTSKSKFLKMVNKAKKYIKLGDIFQVVLSQRFEAKLSKKPIDIYKKLRVTNPSPFMFFFNFNDFQIIGASPEILVRLRDNKITVRPIAGTRPRGKTLKEDLYYEKDLLKDKKELSEHLMLLDLGRNDAGKVSKINSVKVTESFIIERYSHVMHIVSNVIGDYNKKFSKFKSLLAGFPAGTVSGAPKIRA

SEQ ID NO: 149581 - protein, 302 aa, Unknown
  Bacterial polypetide isolated from the Sargasso Sea
LLVKADQLIIFDNLTNSIRIIFNANLRNMSYSFAQARLDEIENLILNSTVNQVEKFSEITNTSEFESNFSKEEYLQAVKKVKHYIEEGDVMQVVLAQDFSANFDKDPFELYKAIRKLNPSPYMYFLNFGEFQIVGASPEILVRLENEEVTLRPIAGTRVRGNNLEEDKSNEEELLNDPKEIAEHLMLIDLGRNDVGRVSEIGTVNVTEKMIIEKYSHVMHIVSNIVGRLQTGLTSFDVLKAALPAGTLSGAPKIRAMEVINELEPSSRGIYGGAIGYVGWNGNMDTAIAIRTAVIKDNKIHV

SEQ ID NO: 149582 - protein, 286 aa, Unknown
  Bacterial polypetide isolated from the Sargasso Sea
MLVGYFSYDIIRLIEEIPDKCKDDIKIPDMRLMRPKNVIIYDNLKKKIFFVRNIFKEENISDYELKYHSIKQTFAEFQHFGKIKLPENFHRRINNNKVRSNISKAEFKKIVLKAKKYIKKGDIFQVVLSQRFESLIDKPPIEIYNSLRILNPSPFMFYFNYNDFQILGSSPEILVRLFNKKVTIRPIAGTRPRGKNKKEDKKLTSELLRDPKELAEHLMLLDLGRNDVGKVSKTNSVKVTEKFKVEKYSHVMHIVSNVVGKLKNNLSLFETFLSGFPAGTVSGAPK

SEQ ID NO: 149583 - protein, 312 aa, Unknown
  Bacterial polypetide isolated from the Sargasso Sea
VRDYISSPLALYAALDKFNSLLLESAEIDSKDSVKSLILVDCALRIVCQGNQVSVTALSNNGQQLLNYLQANVKNCASQLTDTTLTLEYHPADDTIDQASKLIADNAFSALRTCLNSIKSTTNNPFSVFLGGVFAYDMVANFEQLSDVPDGENTCPDYVFYLAETLVVIDHQKQTTELIGNVFNGPDVHANCFEVGKQLERLNTLCDHAADFSAPSQTGDCPVSVDISDEQYCQQVIKLKQHIVDGDIFQVVPSRTFSLPCPDSLHAYSQLKKQNPSPYMFYMRDEDFSLFGASPESALKYEVQSQQVEVYP

SEQ ID NO: 149584 - protein, 221 aa, Unknown
  Bacterial polypetide isolated from the Sargasso Sea
KLRVNNPSPFMFFFNFKDFQIIGSSPEILVRLRGDKITIRPIAGTRPRGINAAKDKFYKKQLLSDKKELSEHLMLLDLGRNDVGKVSKINSVKVTEQFKIEKYSHVMHIVSNVEGKFDKKQSLLDTMLGGFPAGTVTGAPKIRAMEIIDELEKSKRKMYAGAIGYFSANKNFDTCIALRTALIKNNKFYIQSGAGIVADSVPEKEYLETVNKAKALINSLS

SEQ ID NO: 149585 - protein, 299 aa, Unknown
  Bacterial polypetide isolated from the Sargasso Sea
GKIEFTYLDNNLDIEKNSETDPIKSLRKLLKNSEINREKSQPPYPILVGYLGYPMIQYIEKIKLDNPDNLNLPEAMMIRPKIAAVFDNIKDSITIMTTVYTNNNIDAEKAYANANNKINSVVDLIEQNIINEKKNNNIISKNEIKFESNYTKDEYYEIIKKAKKYIKEGDIFQVVPSQRFVCDYKLDAKDFYRSLRRLNPSPFLVNLNFDNFSLVASSPEILVRQRNGKVTIRPIAGTRKRGKNPEEDKFLSEDLLNDKKELAEHLMLLDLGRNDIGKVSKIGSVKVTEKMIIEYYSHV

SEQ ID NO: 149586 - protein, 49 aa, Unknown
  Bacterial polypetide isolated from the Sargasso Sea
DTCIALRTAIAKNNKFYVQAGAGIVADSKPLKEYDETVNKAKALLNALK

SEQ ID NO: 149587 - protein, 52 aa, Unknown
  Bacterial polypetide isolated from the Sargasso Sea
GEFDTCIALRTSVAKDGYLYAQAGAGIVADSKPINEYIETENKAKALIKAME

SEQ ID NO: 149588 - protein, 294 aa, Unknown
  Bacterial polypetide isolated from the Sargasso Sea
KNIEYIIENFKFKVPRELPPISSILSGYFSYDIIRYIENIPNSCKDDLKIPDSRILRPKTLIIHDNYKQRIYFIVNCFLDEKIVNYQKRFNQIKKEINNLIFLANYNSKISLNNKSEKINVKSNITKKKFLNNVKKAKKYIKIGDIFQVVLSQRFETKLTQNPIEIYKKLRVKNPSPFMYFFNFKDFQIIGASPEILVRLRNNKITIRPIAGTRPRGKNAKEDKFYEKDLLQDKKELSEHLMLLDLGRNDTGKVSKINTVKVTEEFVIERYSHVMHIVSNVTGVFNKKYSKFDT

SEQ ID NO: 149589 - protein, 165 aa, Unknown
  Bacterial polypetide isolated from the Sargasso Sea
FYKKDLLQDKKELSEHLMLLDLGRNDTGKVSKINTVKVTESFNVEKYSHVMHIVSNVEGEFNNKFSQFDTLLSGFPAGTVSGAPKIRAMEIIDELENTKRKVYAGGIGYFSANGDFDTCIALRTALTKDKTFYVQSGAGIVADSKPINEFKETVNKAKALLKALE

SEQ ID NO: 149590 - protein, 37 aa, Unknown
  Bacterial polypetide isolated from the Sargasso Sea
NKKIYVQAGAGIVADSNPNNEYNETLNKAKALLRALD

SEQ ID NO: 149591 - protein, 170 aa, Unknown
  Bacterial polypetide isolated from the Sargasso Sea
ELDLLSDEKETSEHLMLLDLGRNDVGKVAKKSTVSVTAKFIIEKYSHVMHLVSNVTGKLKKNISTIEALMAGFPAGTVSGAPKIRAMQIIDELESDVRGIYAGGIGYISPDGDMDTCIVLRTGIITKNKLYVQAGGGVVYDSDPELEYMETVNKAKAVLNAAEIVLGNNL

SEQ ID NO: 149592 - protein, 37 aa, Unknown
  Bacterial polypetide isolated from the Sargasso Sea
KDKFYVQAGAGIVADSRPEKEYAETVNKAKALMKAVD

SEQ ID NO: 149593 - protein, 180 aa, Unknown
  Bacterial polypetide isolated from the Sargasso Sea
RNEKEDLELESDLLADKKECAEHLMLVDLARNDIGRVSEYGSIKVSDYMSIERYSHVMHIVSQVQGTLAKDKTAYDLMKATFPAGTLSGAPKVRALQIISELENSQRGLYGGALGYFSFNGNHDSCIGIRTAVIKDQTIYIQSGAGVVADSIPKEEYIETINKAKAMFKAVSIAETLFSK

SEQ ID NO: 149594 - protein, 101 aa, Unknown
  Bacterial polypetide isolated from the Sargasso Sea
RAILPAGTLSGAPKIRAMEIIDELEPVKRGVYGGAVGYWAWNGNMDTAIAIRTAVIKDGELHVQAGGGIVADSVPALEWEETINKRRAMFRAIALAEQSAR

SEQ ID NO: 149595 - protein, 275 aa, Unknown
  Bacterial polypetide isolated from the Sargasso Sea
FNIPDVRLLRPRTLVIHVNLKKEIFYISNIFKDEKIKNYQSKFNEIKSDLFKLFIQSSIKNLNKPLKEKIKNIKVKSNTSKSKFLKMVNKAKKYIKLGDIFQVVLSQRFEAKLSKNPIDIYKKLRVTNPSPFMFFFNFNDFQIIGASPEILVRLRDNKITVRPIAGTRPRGKTLKEDLYYEKDLLKDKKELSEHLMLLDLGRNDAGKVSKINSVKVTESFIIEKYSHVMHIVSNVIGDYNKKFSKFKSLLAGFPAGTVSGAPKIRAMEIIDELET

SEQ ID NO: 149596 - protein, 301 aa, Unknown
  Bacterial polypetide isolated from the Sargasso Sea
MRPKTLIIHDNLLKKIYFIVNCFADEKITNYSRYYKDQLMKIKYLKNTIIKNNKTEKIKINKNIKPKVKSNISKKRFKKMVLEAKKYIKKGDIFQVVLSQRFETKLTKSPLEIYKKLRIVNPSPFMYFFNFDDFQIIGSSPEILVRLRKSNITIRPIAGTRPRGKTPRKDTLYKKQLLNDKKELSEHLMLLDLGRNDVGKVSEVNTVKVTEKFKVEKYSHVMHIVSNVEGKFNKKYSLLDTMLAGFPAGTVSGAPKIRAMEIIDKLEKSKRKMYAGAIGYFSANQNFDTCIALRTALIKNK

SEQ ID NO: 149597 - protein, 284 aa, Unknown
  Bacterial polypetide isolated from the Sargasso Sea
GTINGEVDPLNLIETELGKYKAYPSEDLPRFLGGAVGYLSYDTIRYFEPRIHLPDYDPIGIPESILLLTDTVIVFDHIRHVIKVVSHVRTDGNIQEKYNEAVNKIEIILKDLSKSLSVQKNDYDNNSKFVSETKVNFELPQYSEIIEKCRDYIIAGDVIQVVVSKRTSKTTQAHPFNIYRSLRKLNPSPYMYYLNFGEFNIIGASPEALVRVEDGYIYSYPLAGTSPRGDTNDQDKEFEDKLLADEKERAEHIMLVDLARNDVGRVAKTGSVEVVDLMRIVKYS

SEQ ID NO: 149598 - protein, 80 aa, Unknown
  Bacterial polypetide isolated from the Sargasso Sea
IRAMEIIDELEPTKRKVYAGGIGYFSANGDFDTCIALRTAISKNKKFYVQAGAGIVADSKPMNEYNETVNKAKALLKSLE

SEQ ID NO: 149599 - protein, 246 aa, Unknown
  Bacterial polypetide isolated from the Sargasso Sea
IEKIPNTTKNDLKIPDARILRPKNLVVFDNVKKKLFFIVNCFFDEKIKNYQTKYDQIQKEIEEMIFLANYNYKINQSETKISKIKIKSNISKKKFLSSVSKAKKYIKIGDIFQVVLSQRFETDLNKEPLDIYKKLRITNPSPFMYFFNFEDFQIIGASPEILVRLRDNKITIRPIAGTRPRGKNKKEDKFYEKDLLKDKKELSEHLMLLDLGRNDTGKVSKINSVKVTESFKIERYSHVMHIVSQC

SEQ ID NO: 149600 - protein, 54 aa, Unknown
  Bacterial polypetide isolated from the Sargasso Sea
PNNSMDTCIALRTALIKNNKLYIQAGAGIVADSNPEKEYQETVNKAKAIIEAAK

SEQ ID NO: 149601 - protein, 177 aa, Unknown
  Bacterial polypetide isolated from the Sargasso Sea
LGDIFQVVLSQRFEAKLTKKPIEIYKKLRITNPSPFMFYFNFSDFQIIGASPEILVRLRNNEITIRPIAGTRPRGKTKKEDLFYEKDLIKDKKELSEHLMLLDLGRNDTGKVSKINTVKVTESFIIEKYSHVMHIVSNVIGKYNKKFSKFKSLLAGFPAGTVSGAPKIRAMEIIDEL

SEQ ID NO: 149602 - protein, 311 aa, Unknown
  Bacterial polypetide isolated from the Sargasso Sea
LQKNFPRMSSMLVGYFSYDIIRLIEKIPNSCSNDINIPDIRLMRPKNLIIYDNLKSKIFFIENIFEDQKIEDYQTEYNKIGNNLKELSHYGNIPLPTNFYRPSKKINIKSNITKSRFKKIVRKAKTYISKGDIFQVVLSQRFKANINKPPLEIYNSLRKLNPSPFMFYFNYDDFQILGSSPEILVRLVDGEVTIRPIAGTRPRGKNSKDDKRLTNELLNDPKELSEHLMLLDLGRNDVGKVSKANSVKVTEKFKVEKYSHVMHIVSNVVGKQKNKLSLFETFLSGFPAGTVSGAPKIRAMEIIDELEMSKR

SEQ ID NO: 149603 - protein, 181 aa, Unknown
  Bacterial polypetide isolated from the Sargasso Sea
RGKNANEDLELSKDLLQDKKELAEHLMLLDLGRNDVGRVSQNKSVKVTEQMIIEYYSHVMHIVSNVEGLIDEKYDAVDALKAGFPAGTVSGAPKIRAMQIIEELENLNRSFYAGCMGYFDSNGDMDTCISLRSGLVKNGKLFIQAGGGVVNDSNPEDEYQETINKAGALMAAAEDSYKYNS

SEQ ID NO: 149604 - protein, 270 aa, Unknown
  Bacterial polypetide isolated from the Sargasso Sea
MLVGYFSYDIIRYIEKIPDRCIDDLKIPEIRLSRPKNLIIYDNLKKKIYYIENVYSDTKIKNYRETYNAILDKFNLFRDYENIKLPDEFTHKKNKYLIKSNTSKEKFISLVKKAKKYIEKGDIFQVVLSQRFERKIEKKPIEIYNHLRKSNPSPFMFYFNYKDFNILGSSPEILVRLRKNQVTIRPIAGTRPRGKNNKEDKKYKLDLLKDKKELAEHLMLLDLGRNDVGKVVKNNSIKVTEKFKVEKYSHVMHIVSNVVGKFDNKFHYSR

SEQ ID NO: 149605 - protein, 249 aa, Unknown
  Bacterial polypetide isolated from the Sargasso Sea
SDPLNFYRALRSLNPSPYMYFLDLEDLQIVSSSPEILAKLENSLVTVRPLAGTRRRGLTEAEDLELEEELLNDEKEVSEHLMLIDLGRNDIGKVCSPGSVVVSETMVVERYAHVMHIASNVQGHLKENLRAIDLLRATLPVGTLSGAPKVRAMQIIDELEPEKRGVFGGAVGYLSWNGNMDTAIAIRTGIIKNQVLYVQAGAGVVADSNAENEWQETINKARSIFHAASFAETGLDIIDKSSLRSGRNR

SEQ ID NO: 149606 - protein, 80 aa, Unknown
  Bacterial polypetide isolated from the Sargasso Sea
NQVEIYPIAGTRPRGKRPDGSIDMDLDSRIELNLREDTKEKSEHIMLVDLARNDVAKVSRPGTRYVKDLLKVDRFTLMVM

SEQ ID NO: 149607 - protein, 258 aa, Unknown
  Bacterial polypetide isolated from the Sargasso Sea
MQTSKPALELLTSDAIYRENPTALFHQLCGARPATLLLESADIDSKDDLKSLLLVDSALRITALGDTVTLQALSANGAALLDLLDNTLPSGIDNQRQPNSRILTFPPVSALLDEDARLCSLSVFDAFRLLQELVTVPPDEREAMFFGGLFAYDLVAGFENLPPLESDTACPDYCFYLAETLLVIDHQTKNTRIQSSLFTPLESEKQRLTQRIAQLRQQLNEPPAPLPVTKVESMTCDCDQSDEEYGAVVRKMQRAIRA

SEQ ID NO: 149608 - protein, 178 aa, Unknown
  Bacterial polypetide isolated from the Sargasso Sea
YRAMRLINPSPYMFYCESDGLKIAGSSPEALVRLGGNKASLRPIAGTRPRGKDSEEDQSHRESLLADEKEIAEHIMLVDLARNDLGRVAKHGSIEVKPYQSIEYYSHVMHIVSGVQGHLEEEKDAFDLFAAAFPAGTLVGAPKVRAMELIDEIEPQLRGIYGGTVGYFSKNGDMDQAI

SEQ ID NO: 149609 - protein, 73 aa, Unknown
  Bacterial polypetide isolated from the Sargasso Sea
DELEKNKRKLYAGGIGYFTPNNEFDTCIALRTALIKNNKFYVQAGAGIVADSKPEKEYMETVNKAKGLMKAVD

SEQ ID NO: 149610 - protein, 256 aa, Unknown
  Bacterial polypetide isolated from the Sargasso Sea
GKKHCYRGDVFQIVLSRRFSQGFTGDEFNVYRALRSINPSPYLFFFDYGNFKIFGSSPEAQLIIENKKAEIHPIAGTFKRTGDDKKDKETAIKLSKDPKENSEHVMLVDLARNDLSRNGTNVIVEKNREIQFFSHVIHLVSKVTGKINKNSKTFQVVADTFPAGTLSGAPKHKALELIDLYEKTARNFYGGAVGYMDFYGNFNHAIIIRSFLSKDKILYYQAGAGIVSDSIPEKELQEVYNKLGALNKALTFAEKL

SEQ ID NO: 149611 - protein, 87 aa, Unknown
  Bacterial polypetide isolated from the Sargasso Sea
TVSGAPKIRAMEIIDELETTKRKVYAGGIGYFSANGEFDTCIALRTAVAKNKKFYVQAGAGIVADSKPINEYEETVNKAKALINALR

SEQ ID NO: 149612 - protein, 275 aa, Unknown
  Bacterial polypetide isolated from the Sargasso Sea
INKKIKVKSNISKNKFKTMVLNAKKYIKKGDIFQVVLSQRFESKLTKTPLEIYKKLRLSNPSPFMFFLNFNDFQIIGSSPEILVRLRNNKVTIRPIAGTRPRGHNKKKDSLYKKELLNDKKELSEHLMLLDLGRNDVGKISKINSVKVTEKFKVEKYSHVMHIVSNVEGKFNNKFSLLDTMLAGFPAGTVTGAPKIRAMEIIDELEKSKRKMYAGAIGYFSANKMFDTCIALRTALIKNNKFYIQSGAGIVADSVPEKEYLETVNKAKALIKSLG

SEQ ID NO: 149613 - protein, 264 aa, Unknown
  Bacterial polypetide isolated from the Sargasso Sea
KFINNLLKNFKLDIPKQLPSMSSMLVGYFSYDVIRLIEKIPNKCKDDLKIPDIRISRPRNLIIYDNVLKKIYYIENIFSDTKITNYNSVYSEIINKFLLLEKYENINLPEQITYKRNNNLIKSNISKKGFKSLVIKAKRYIKQGDIFQVVLSQRFERKIYKRPLEIYNYLRKSNPSPFMFFFNYEDFKVLGSSPEILVRLRKNEITIRPIAGTRPRGKDLKSDKKYEKDLLKDKKELAEHLMLLDLGRNDVGKVSKINSVRVTE

SEQ ID NO: 149614 - protein, 106 aa, Unknown
  Bacterial polypetide isolated from the Sargasso Sea
NAIDALISGFPAGTVSGAPKIRAMEIIEELENLNRSFYGGAMGYFDSNGDMDTCISLRTGLIKNKKLYIQAGGGIVHDSNPQKEFQETINKAKALIKAAEDSYNIA

SEQ ID NO: 149615 - protein, 50 aa, Unknown
  Bacterial polypetide isolated from the Sargasso Sea
MIVKPSRDGKYDVSVQAGAGIVADSFPENEYQETINKAKGILKALACLNK

SEQ ID NO: 149616 - protein, 279 aa, Unknown
  Bacterial polypetide isolated from the Sargasso Sea
MLVGYFSYDIIRYIEKIPDRCKDDLKIPDVRILRPKNLIIYDNLKKKIFYLCNVFSDSKILNYFEEYDTIKKEFKILNFYGEINLPKKLTFKINKNKVKSNMTKKQFKNKVLKAKAYIKKGDIFQVVLSQRFERKFEKKPIEIYNYLRESNPSPFMFYFNFDDFKILGSSPEILVRLRNDFITVRPIAGTRPRGKNINQDKKFKNDLIKDKKELAEHLMLLDLGRNDVGKVSKINSVRVTESFKVEKYSHVMHIVSNVVGKFNKKVSSFEALLAGFPAG

SEQ ID NO: 149617 - protein, 291 aa, Unknown
  Bacterial polypetide isolated from the Sargasso Sea
IAEYKTPVLDGMPRFYGGYVGFFAYESAKYAENKINALQRKDSKFDVHMPDIYLVKSEKIIVYDNFNNSIQAIYNANPQKTSYEDALEIIDEIQNSIDHSGELEETSYSNTTGELEFKSNFTKNEYMSSVNKIKEYIKEGDVMQVVLAQDFYQSFEGDSFELYSALRQINPSPYMYYLNLDECEVVGSSPEILVRLEDSNITLRPIAGTRKRGANEEEDKNNEKDLLNDPKELAEHLMLIDLGRNDVGRVSEIGSVKLTEKMVIERYSHVMHIVSNVVGKLSKGLNFTDAL

SEQ ID NO: 149618 - protein, 77 aa, Unknown
  Bacterial polypetide isolated from the Sargasso Sea
MEIIDELETTKRKVYAGGIGYFSANGEFDTCIALRTAVAKKDKFYVQAGAGIVADSKPLKEYEETVNKAKALINALK

SEQ ID NO: 149619 - protein, 302 aa, Unknown
  Bacterial polypetide isolated from the Sargasso Sea
KNNDNIKIPDSVLIGPKIVAVFDNIKDKITVMTVVYPNEKKDYESAYVKAQELLNLKVNELKQNLVQKPANEIKSNLNFISNYSKEEYFSIISKAKEYIKNGDIFQVVTSQRFETNYDLEAVSLYRSLRRLNPSPYLVNLNFDEAGLVASSPELLVQLRNKKITIRPIAGTRKRGKNANEDLELSRDLLQDKKELAEHLMLLDLGRNDVGRVAKNKSVKVTEKMIIEYYSHVMHIVSNVEGLIDDSYDAVDALKAGFPAGTVSGAPKIRAMEIIEELENLNRSFYAGCMGYFDSQWRPWILV

SEQ ID NO: 149620 - protein, 301 aa, Unknown
  Bacterial polypetide isolated from the Sargasso Sea
ASDVHQGNPFDGLRHCLSPYRCANLPGLPPLGQLYGMWGYELIHWIESTVPIHPQDDTAPADGIWMLMDGILIFDQVKRLITAVAYGDLSGGCDVEDAWQLALARIADLRRRMDAPLPAVAPLQWSPNADVLPDVRSNRNRNDFEAAVESAREHIAAGDVFQLVLSQRLEASVPQSPLELYRSLRMVNPSPYMAFFDFGDWQLIGSSPEVMVQAEPAADGIHASLRPIAGTRPRGRNPLEDRELEVELLADPKERAEHVMLVDLGRNDLGRVCQPGSVTVKDLMVIERYSHVMHIVSQVEG

SEQ ID NO: 149621 - protein, 41 aa, Unknown
  Bacterial polypetide isolated from the Sargasso Sea
AIVKNNKFYVQAGAGIVADSIPEKEYEETVNKAKALINALR

SEQ ID NO: 149622 - protein, 77 aa, Unknown
  Bacterial polypetide isolated from the Sargasso Sea
GNNFDELEKTKRKVYAGGIGYFSANGEFDTCIALRTAVAKKNKFYVQAGAGIVADSKPINEYRETVNKAKALINALK

SEQ ID NO: 149623 - protein, 283 aa, Unknown
  Bacterial polypetide isolated from the Sargasso Sea
MDLKPSIDDIPFSGGMVGFSSFDMIRHFEKLPVPKGKDGILSPSDCSYIAPTSLLIFDHLENKMALLHCGNEEERINLRDEILSLLSKEITQSQKKKTYSEPIANIKKEIFYDAVEKAKHHIFEGDIFQIVLSIAFSGSYDLDPFDVYRAMRLINPSPYMFYCESDGLKIAGSSPEALVRLGGNKASLRPIAGTRPRGKDSEEDQSHRESLLEDEKEIAEHIMLVDLARNDLGRVAKHGSIEVKPYQSIEYYSHVMHIVSGVQGHLEEEKDAFDLFAAAFPAR

SEQ ID NO: 149624 - protein, 38 aa, Unknown
  Bacterial polypetide isolated from the Sargasso Sea
KKNKFYVQAGAGIVADSKPLNEYKETINKAKALLKSLE

SEQ ID NO: 149625 - protein, 216 aa, Unknown
  Bacterial polypetide isolated from the Sargasso Sea
PSPYLFYFDYGSFKIFGSSPEAQLVIKDKKAEIHPIAGTFKRTGDDTLDKEKATKLFEDDKENSEHMMLVDLARNDLSRSCSNVKVEKDREIQFYSHVIHLVSKVTGELKSSSNDIIGNTFPAGTLTGAPKHMAMKLIEKYEQHNRSFYGGAIGFIDFDNNFNHAIMIRSFLSKNQNLLLQAGAGIVSKSNRNNELNEVYNKIGALLKALEKAEEL

SEQ ID NO: 149626 - protein, 79 aa, Unknown
  Bacterial polypetide isolated from the Sargasso Sea
EKDARGPYAGVYGSIDINGALNTAITIRTMIVKPSRDGKYDVSVQAGAGIVADSFPENEYQETINKAKGILKALACLDK

SEQ ID NO: 149627 - protein, 166 aa, Unknown
  Bacterial polypetide isolated from the Sargasso Sea
NFFKKDLLQDKKELSEHLMLLDLGRNDTGKVSKINTVKVTESFNVEKYSHVMHIVSNVQGEFNNKFSKFDTLLSGFPAGTVSGAPKIRAMEIIDELENTKRKVYAGGIGYFSANGDFDTCIALRTALTKNKKFYVQSGAGIVADSKPLNEFKETVNKAKALLKALE

SEQ ID NO: 149628 - protein, 116 aa, Unknown
  Bacterial polypetide isolated from the Sargasso Sea
MHIRFQTLLGKIQKNLSIFETFLSGFPAGTVSGAPKIRAMEIIDELESSKRMLYAGGIGYFTANHEFDTCIALRTALIKDNKIYVQSGAGIVADSNPKNEYDETVNKAKALMKAIN

SEQ ID NO: 149629 - protein, 107 aa, Unknown
  Bacterial polypetide isolated from the Sargasso Sea
WDLLKASFPAGTVTGAPKIRAMQLIKHFEKDARGPYAGVYGSIDINGALNTAITIRTMIVKCSRDGKYDVSVQAGAGIVADSFPENEYQETINKAKGILKAISCLDK

SEQ ID NO: 149630 - protein, 128 aa, Unknown
  Bacterial polypetide isolated from the Sargasso Sea
RYSHVMHISSNVTGQLREDKTPMDVLRATLPVGTLSGAPKIRAMEIIDELEPVKRGIYGGAVGYLSWNGNMDTAIAIRTAVIKNDTLYVQAGGGIVADSVPNLEWKESMNKARAIFRAAAAANQLEND

SEQ ID NO: 149631 - protein, 230 aa, Unknown
  Bacterial polypetide isolated from the Sargasso Sea
LYRSLRRLNPSPYLVYLNFDKFGLVASSPELLVQLRKGKVTIRPIAGTRKRGKNANEDLKLSKDLLSDEKELAEHLMLLDLGRNDVGRVAKNKSVKVTEKMIIEHYSHVMHIVSNVEGLIDEKYDAVDALRAGFPAGTVSGAPKIRAIEIIEELENLNRSFYAGCMGYFDSNGDMDTCISLRSGLVKNKKLYVQSGGGVVYDSNPEDEYQETINKAGALMAAAKDSYKYN

SEQ ID NO: 149632 - protein, 91 aa, Unknown
  Bacterial polypetide isolated from the Sargasso Sea
FPAGTVSGAPKIRAMEIIDELETTRRKVYAGGIGYFSANGDFDTCIALRTAISKNKKFYVQSGAGIVADSKPINEFNETVNKAKALIKALE

SEQ ID NO: 149633 - protein, 88 aa, Unknown
  Bacterial polypetide isolated from the Sargasso Sea
NGVSGAPKIRAMEIIDELETTRRKVYAGGIGYFSANGEFDTCIALRTAVAKNKKFYVQAGAGIVADSKPINEYEETVNKAKALINALR

SEQ ID NO: 149634 - protein, 77 aa, Unknown
  Bacterial polypetide isolated from the Sargasso Sea
MEIIDELENTKRKVYAGGIGYFSSNGDFDTCIALRTAVSKNKKFYVQAGAGIVADSKPINEYNETLNKARALIKSLE

SEQ ID NO: 149635 - protein, 318 aa, Unknown
  Bacterial polypetide isolated from the Sargasso Sea
PIFISFKNSKGEKYSFLLESVKGGSKRGRYSLLGCDPDLIGRVNNGKSSIKYLGNNYNYKLNKNPLQGLRQLINLSKFKNVNSSVPYPSLVGYLGYPMIQFMENIKLKNNDNIKIPDATLIRPKVVAVFDNIKDIICIMTVCFPSKNVKPEKAFKDSNLLLIKTINKLEKSILNTTNKKIKKNSLRFKSNFKKDEFYTLVKKAKKYIKEGDIFQVVTSQRFETPYHLRAIDLYRSLRRLNPSPYLVNLNFDKFGIVASSPELMVQLRNKKITIRPIAGTRRRGKNISEDIVLSNDLLNDQKELAEHLMLLDLGRNDVG

SEQ ID NO: 149636 - protein, 39 aa, Unknown
  Bacterial polypetide isolated from the Sargasso Sea
AKKGKFYVQAGAGIVADSKPSKEYEETVNKAKALINALK

SEQ ID NO: 149637 - protein, 289 aa, Unknown
  Bacterial polypetide isolated from the Sargasso Sea
MPPDLPPMAAGLFGYLGYDMVRHVEHLPDVNPDPLDLPDAVMMRPSVVAIVDAVKDEVIVVSPVWAGSGQSARAAHAQAAERVMDVVADLDRAPTGARREVVGTSEMPEPVSNTTREGYAAMVEKAKDYIRAGDIFQVVPSQRWSLPFEESPFALYRSLRRTNPSPYMFYFDFGGFQVIGASPEILVQVRAGKVTIRPIAGTRKRGATPEADLALERELLADPKERAEHLMLLDLGRNDVGRVARIGTVKPTETFIIERYSHVMHIVSNVEGHLRDGVDALDALLAGLP

SEQ ID NO: 149638 - protein, 296 aa, Unknown
  Bacterial polypetide isolated from the Sargasso Sea
MIQYMEKILLKNNDNINIPDSILIRPKIVAVFDNIKDKITVMTVVYPNEKKNYETEFNEAQELLESKVNQLKENLVQETASQIKSNLKFISNYSKEEYFSIISKAKKYIEDGDIFQVVTSQRFQTEYDLEAVSLYRSLRRLNPSPYLVNLNFNEIGLVASSPELLVQLRNQKITIRPIAGTRKRGKNANEDLELSKDLLQDEKELAEHLMLLDLGRNDVGRVAKNKSVKVTQKMIIEYYSHVMHIVSNVEGLIDDKYDAVDALKAGFPAGTVSGAPKIRAMEIIEELENLNRSFYA

SEQ ID NO: 149639 - protein, 86 aa, Unknown
  Bacterial polypetide isolated from the Sargasso Sea
GELEPVRRGIYSGAVGYIGWNGNMDTAIAIRTAVIADGELHIQAGAGIVADSVPSQEWQETMNKGRAIFRAVAMAVAGLDPGALED

SEQ ID NO: 149640 - protein, 39 aa, Unknown
  Bacterial polypetide isolated from the Sargasso Sea
AKKDKFYVQAGAGIVADSVPEKEYEETVNKAKALINALR

SEQ ID NO: 149641 - protein, 314 aa, Unknown
  Bacterial polypetide isolated from the Sargasso Sea
TKIPVSREILADMETPLSVYRKLANGPYSYLFESVEGGENWARYSLIGLEASKIISIKKNIIDIQSNGEIIESFKADDPLAYIDELQRSFELKQNKNLPIFNGGLVGYFGYDCVRYIENKLVDSEPPDQIGTPDALFMISDEVAVFDNLQNKLHLIVLIESHDDEEQANARLDELENKLKISLPFEDFVKPVKSIEEKDFISGFGEQEFKHSVQKAKKYIESGDIMQVVCSQRMSIPFNADPVALYRSIRQLNPSPYMYYLNLKEFHIVGSSPEILARLEDGKITVRPIAGTRRRGKDDKDDMVMQEDMVNDPK

SEQ ID NO: 149642 - protein, 268 aa, Unknown
  Bacterial polypetide isolated from the Sargasso Sea
MSSMLVGYFSYDVIRYIEKIPNDCKDDLKVPDVRLSRPKNLIIYDNVKKKIFYVENVYADTKIKNYKKEYHAINKRFDLYEDFEKIKLPEQFTFRPNKNVIKSNTSKEKFKSLVKKAKTYIKKGDIFQVVLSQRFERKINKKPIEIYNYLRKSNPSPFMFYFNYKDFNILGSSPEILVRLRSGQITIRPIAGTRPRGKNNKEDKKYELDLLNDKKELAEHLMLLDLGRNDVGKVSKVGTVKVTEKFKVERYSHVMHIVSNVIGKFSNK

SEQ ID NO: 149643 - protein, 296 aa, Unknown
  Bacterial polypetide isolated from the Sargasso Sea
IGIPNQLPSMSSMLVGYFSYDIIRYIENIPDKCKDDLNIPDIRLARPRSLVIYDNLKKKIFYIENIYSDTKIKNYKEAYNNILKKFDLYEHYENIKLPETLTFKKNNSPIKSNITKNRFKFLVNKAKNYIRKGDIFQVVLSQRFKRKLQKKPIEIYNYLRKSNPSPFMFYFNYEDFNVLGSSPEILVRLRKNEITIRPIAGTRPRGKNSIEDKKYELELLKDKKELAEHLMLLDLGRNDVGKVAKINSVKVTEKFKVEKYSHVMHIVSNVIGKFNNKFSLFETLLSGFPAGTVSGA

SEQ ID NO: 149644 - protein, 147 aa, Unknown
  Bacterial polypetide isolated from the Sargasso Sea
MTIGRVCKENSITVPKKMVIERYSHVMHISSTIEGEIKDNLDALDALVCAMPAGTVSGAPKIRAMEIIEEIEEEKRGFYSGCVGYFSGNGDMQTAITLRSALIKNGKIHFQSGAGVVYDSVPEKEYEECLNKVQVLKKALNGIYKYL

SEQ ID NO: 149645 - protein, 309 aa, Unknown
  Bacterial polypetide isolated from the Sargasso Sea
KKKIIKGSPKKILENLIEIFKFKTPKKLPPICSLLSGYFSYDIIRYIEKIPNSCKDDLKLPDVRLMRPKILIIHDNYKKKIFFIINVFKDEKINNYKKKYDEIKSELNNLNIQSKIKNDEKLINNKPKKNIIKSNTSKNKFINMVKKAKKYIKIGDIFQVVLSQRFEAKLTKKPLNIYKKLRVTNPSPFMFFFNFHDFQIIGASPEILVRLRGKKITIRPIAGTRPRGINKKQDKFYMKDLLNDQKELAEHLMLLDLGRNDVGKVSNINTVKVTEKFIIEKYSHVMHIVSNVVGVFNKKYSKFKSLLAG

SEQ ID NO: 149646 - protein, 185 aa, Unknown
  Bacterial polypetide isolated from the Sargasso Sea
AGTRKRGKSINEDIKLSNDLLNDEKEIAEHLMLLDLGRNDVGKVAKIGTVNVTEKMIIEYYSHVMHIVSNVEGKLDLKFDAIDALISGFPAGTVSGAPKIRAMEIIEELENVSRSFYGGAMGYFDSNGDMDTCISLRTGLVKDKKLYIQAGGGIVYDSDPEKEYQETINKANALVVAAEDSYKYE

SEQ ID NO: 149647 - protein, 141 aa, Unknown
  Bacterial polypetide isolated from the Sargasso Sea
MILGKVSKINSVKVTESFKIERYSHVMHIVSNVEGVFNKKFGKFDTLLSGFPAGTVSGAPKIRAMEIIDELETTRRKVYAGGIGYFSANGDFDTCIALRTAISKDKKFYVQSGAGIVADSKPINEFKETVNKAKALIKALE

SEQ ID NO: 149648 - protein, 154 aa, Unknown
  Bacterial polypetide isolated from the Sargasso Sea
MLLDLGRNDVEKVLKIGSVNVTEKMIIEYYSHVMHIVSNVEGKLNSKFDAIDALISGFPAGTVSGAPKIRAMEIIEELENVSRSFYGGAMGYFDSNGDMDTCISLRTGLVKDKKLYIQAGGGIVYDSDPEKEFQETINKANALVFAAEDSYKYE

SEQ ID NO: 149649 - protein, 67 aa, Unknown
  Bacterial polypetide isolated from the Sargasso Sea
KRKVYAGGIGYFTAAGEFDTCIALRTAIVKGGYLYAQAGAGIVADSKPINEYIETENKAKALIKAME

SEQ ID NO: 149650 - protein, 291 aa, Unknown
  Bacterial polypetide isolated from the Sargasso Sea
PDLKPSIDEIPFSGGMVGFSSFDMIRHFEKLPVPEGKDGILSPSDCSYIAPTSLLIFDHLENKMALLHSGNEEERINLRDEILSLLRKEISQSQKKKTYSEPIANIKKEIFYDAVEKAKQHIFEGDIFQIVLSIAFSGSYDLDPFDVYRAMRLINPSPYMFYCESDGLKIAGSSPEALVRLGGNKASLRPIAGTRPRGKDSEEDQSHRKSLLADEKEIAEHIMLVDLARNDLGRVAKHGSIEVKPYQSIEYYSHVMHIVSGVQGHLEEEKDAFDLFAAAFPAGTLVGAPKV

SEQ ID NO: 149651 - protein, 124 aa, Unknown
  Bacterial polypetide isolated from the Sargasso Sea
HIVSQVEGILKNNADVWDLLKASFPAGTVTGAPKIRAMQLIKHFEKDARGPYAGVYGSIDINGALNTAITIRTMIVKPSKDGKYDVSVQAGAGIVADSFPENEYQETINKAKGILKALACLDNK

SEQ ID NO: 149652 - protein, 253 aa, Unknown
  Bacterial polypetide isolated from the Sargasso Sea
FSKKVSCTKKNNIKVKSNISKKKFKDIVLKAKKYIAKGDIFQVVLSQRFESKLTKTPLEIYKKLRVQNPSPFMFFFNFNDFQIIGSSPEILVRLRKNKITIRPIAGTRPRGTTKKKDNFYKKQLLNDKKELSEHLMLLDLGRNDTGKVSKINTVKVTEKFQIEKYSHVMHIVSNVEGTFDKKHSLLDTMLAGFPAGTVTGAPKIRAMEIIDELEKSKRKMYAGSIGYFSSNKNFDTCIALRTALIKNNKFYIQ

SEQ ID NO: 149653 - protein, 102 aa, Unknown
  Bacterial polypetide isolated from the Sargasso Sea
KFGKFDTLLAGFPAGTVSGAPKIRAMEIIDELETTRRKVYAGGIGYFSANGDFDTCIALRTAISKNKKFYVQSGAGIVADSKPINEFNETVNKAKALLKALE

SEQ ID NO: 149654 - protein, 261 aa, Unknown
  Bacterial polypetide isolated from the Sargasso Sea
QREGWYLSPSDCSYIAPTSLLIFDHLENKMALLHCGNEEERINLRDEILSLLSKEITQSQKKKTYSEPIANIKKEIFYDAVEKAKHHIFEGDIFQIVLSIAFSGSYDLDPFDVYRAMRLINPSPYMFYCESDGLKIAGSSPEALVRLGGNKASLRPIAGTRPRGKDSEEDQSHRESLLEDEKEIAEHIMLVDLARNDLGRVAKHGSIEVKPYQSIEYYSHVMHIVSGVQGHLEEEKDAFDLFAAAFPAGTLVGAPKVRAME

SEQ ID NO: 149655 - protein, 285 aa, Unknown
  Bacterial polypetide isolated from the Sargasso Sea
KLPSMASMLVGYFSYDIIRYIEKIPDKCKDDLKIPDVRLLRPKNLIIYDNLKKIIYYIENIYGDEKIKDYFEKYRNIKLNFDLYRNYEKIKIPLRLTFKKNNNKIKSNISKKRFKNIVSKAKKHIVKGDIFQVVLSQRFERKFKKTPLEIYNHLRKSNPSPFMFYFNFEDFKVLGSSPEILVRLRNSKITIRPIAGTRPRGKNKSQDQKYKKELLSDKKELAEHLMLLDLGRNDAGRVSKTNSVKVTESFSVEKYSHVMHIVSNVVGNFDKKMSIFETLLSGFPA

SEQ ID NO: 149656 - protein, 216 aa, Unknown
  Bacterial polypetide isolated from the Sargasso Sea
LIFDHLENKMALLHSGNEEERINLRDEILSLLRKEITQSQKKKTYSEPIANIKKEIFYDAVEKAKHHIFEGNIFQIVLSIAFSGSYDLDPFDVYRAMRLINPSPYMFYCESDGLKIAGSSPEALVRLGGNKASLRPIAGTRPRGKDSEEDQSHRESLLADEKEIAEHIMLVDLARNDLGRVAKHGSIEVKPYQSIEYYSHVMHIVSGVQGHLEEEK

SEQ ID NO: 149657 - protein, 183 aa, Unknown
  Bacterial polypetide isolated from the Sargasso Sea
HEELIISKDSKFEKDLLNDEKELSEHLMLLDLGRNDVGRVSRINSVNVTESFVVEKYSHVMHIVSNVEGSLLKGVDSISALLSGLPAGTVSGAPKIRAMEIIDELEKEKRGIFGGGIGYFAASGQMDFCIAIRTAILKDKILYVQSGGGVVYDSNPEAEYQETLNKAKALIRAAEDAIHFVGN

SEQ ID NO: 149658 - protein, 81 aa, Unknown
  Bacterial polypetide isolated from the Sargasso Sea
YFEKDARGPYAGVYGSIDINGALNTAITIRTMIVKPSKDGKYDVSVQAGAGIVADSSPENEYQETINKAKGILKALACLNK

SEQ ID NO: 149659 - protein, 56 aa, Unknown
  Bacterial polypetide isolated from the Sargasso Sea
TANQEFDTCIALRTALIKNKKIYVQAGAGIVADSNPKNEYNETVNKAKALLKAAIN

SEQ ID NO: 149660 - protein, 215 aa, Unknown
  Bacterial polypetide isolated from the Sargasso Sea
PSPFMYFFNFNDFQIIGASPEILVRLRNNRVTIRPIAGTRPRGKNNKEDLFFEKDLLKDKKELSEHLMLLDLGRNDTGKISKINTVKVTESFKVERYSHVMHIVSNVEGEFNNKFSKFDTLLSGFPAGTVSGAPKIRAMEIIDELENTRRKVYAGGIGYFSANGDFDTCIALRTAIAKNKKFYVQSGAGIVSDSKPLNEYKETVNKAKALIKALE

SEQ ID NO: 149661 - protein, 307 aa, Unknown
  Bacterial polypetide isolated from the Sargasso Sea
WEFNNNNSYLIQKNKKRKLNDKPDKLIEKIIEDFKFETPKNLPNICSLISGYFSYDSIRYIEKIPNNCKNDLNLPDVRLLRPRTLVIHDDLKKEIFYISNIFKDEKIKNYKNKYEEIKSDLFKLLIQSSIKNIGNKIIQKSKNIKVKSNTSKNKFLSMVNKAKKYIKLGDIFQVVLSQRFEAKLTKKPIDIYRKLRVTNPSPFMFFFNFDDFQIIGASPEILVRLRDNKITVRPIAGTRPRGKTKKEDLFYERDLLKDKKELSEHLMLLDLGRNDAGKVSKINSVKVTESFIIERYSHVMHIVSNVI

SEQ ID NO: 149662 - protein, 60 aa, Unknown
  Bacterial polypetide isolated from the Sargasso Sea
QGEMDLAITIRTGVLKDGLLTVQAGAGIVADSVPENEWLESEQKALAVLRAAEMVEKNLW

SEQ ID NO: 149663 - protein, 292 aa, Unknown
  Bacterial polypetide isolated from the Sargasso Sea
DELPPFTSGAIGYAAYDAIRYAEHLPHTPPDDLGLPDIYFALYDQLVVFDHVSKSIDVVALAKPTAKSPEAIKSAYESAKMCVNQTIEKLKQDCAWPPLHDISSLNSPSQMTQETITANRSRDDYLEAVEKAVDYIHAGDIFQVVLSRRLSIPFDDSPLELYRTLRVVNPSPFMFCLRTPSATLVGSSPEIMVRVMDRKVTVRPLAGTRPRGATPEEDVELADGLLADPKERAEHIMLIDLGRNDIGRVSELGSVELSDIMTIERYSHVMHITSNVNGKLRPEATAFDALRA

SEQ ID NO: 149664 - protein, 65 aa, Unknown
  Bacterial polypetide isolated from the Sargasso Sea
KVYAGGIGYFSANGEFDTCIALRTAVAKNKKFYVQAGAGIVADSKPKNEYEETVNKAKALINALR

SEQ ID NO: 149665 - protein, 258 aa, Unknown
  Bacterial polypetide isolated from the Sargasso Sea
SGLPKFTGGLVGYFSYDCIRMIENRLINSEPVDLLQTPDALLMISEEVAVFDNLKNRLHLIVMVESEDEETLVKAESRLDELEQKLKENYQFEEFSKPNDSVEESDFVSSFGEKEFKSAVNSVKEYIKNGDVMQVVCSQRMSIPFNSDPVALYRAVRYLNPSPYMYYLNLKDFHIVGSSPEILARLEDGDVTVRPIAGTRRRGKNNEDDLNMEKDMVNDPKEIAEHLMLIDLGRNDVGRIAEPGTVEVTEKFGIERYS

SEQ ID NO: 149666 - protein, 56 aa, Unknown
  Bacterial polypetide isolated from the Sargasso Sea
FTPSQDFDTCIALRTALIKNKKIYVQAGAGIVADSNPNNEYNETVNKAKALLKAIN

SEQ ID NO: 149667 - protein, 283 aa, Unknown
  Bacterial polypetide isolated from the Sargasso Sea
NKGSKFKEHMPEIYLVKAEKLIVYDNSDQSIQIVVNTNPLESSYEQAEATIKELEVLLSNDSEDSKDNFSKLTGELVFDSNFLKDDYLNAVDSVKKYIKEGDVMQVVLAQDFSLPFNKNPFDLYKALRALNPSPYMYYLDLEECQVVGASPEILIRLEENKVTLRPIAGTRKRGTNPEEDLANEKDLLNDPKEIAEHLMLIDLGRNDVGRVSEIGSVNVTDKMIIEKYSHVMHIVSNVEGNLSEDLDYIDALKATLPAGTLSGAPKIRAMQIINELEPSLEAL

SEQ ID NO: 149668 - protein, 148 aa, Unknown
  Bacterial polypetide isolated from the Sargasso Sea
RVCQPESVAVQDLMVIERYSHVMHIVSQVEGRLGPAHDVWDLLMAAFPAGTVSGAPKIRAMQLIHELEPDARGPYSGVYGSVDLAGALNTAITIRTMVVQPSDGGGCRVKVQAGAGVVADSQPTAEFEETLNKARGMLTALACLNPPG

SEQ ID NO: 149669 - protein, 81 aa, Unknown
  Bacterial polypetide isolated from the Sargasso Sea
KIRAMEIIDELEKSRRKVYAGGIGYFSANGEFDTCIALRTAVAKKDKFYVQAGAGIVADSVPKKEYEETVNKAKALINALR

SEQ ID NO: 149670 - protein, 164 aa, Unknown
  Bacterial polypetide isolated from the Sargasso Sea
MTKKKIAEHNMLVDLHRNDLGKVAKFGTVKVRNLMDIKKYSHVQHISSEIAGIIDEKEDMFSALASNFPAGTLSGAPKIEAMKIINEIEKEGRGPYGGAIGQFGFNGDCTFAIPIRSIFIKGEEAFAQTCGGNVYDSDPDNEYLEIERKLAAMKSVLDSFKDNL

SEQ ID NO: 149671 - protein, 288 aa, Unknown
  Bacterial polypetide isolated from the Sargasso Sea
MGYPMIQYMEKISLKNNDNINIPDSILIRPKIVAVFDNIKDTITVMTAVYPNKKKNYETEFIQAQDLLESKVNQLKENLVQEPVSQIKSNLKFISNYSKEGYFSIISKAKQYIREGDIFQVVTSQRFETEYDLEAVSLYRSLRRLNPSPYLVNLNFNGIGLVASSPELLVQLRNKKITIRPIAGTRKRGKNANEDLKLSKDLLQDEKEKAEHLMLLDLGRNDVGRVAQNKSVKVTEKMIIEYYSHVMHIVSNVEGLIDDKYDAVDALMAGFPAGTVSGAPKIRAMEIN

SEQ ID NO: 149672 - protein, 111 aa, Unknown
  Bacterial polypetide isolated from the Sargasso Sea
KEVKKKDLSFIDVLKSALPAGTLSGAPKIRAMEIINELEPSSRGIYGGAIGHISWDGDIDTAIAIRTAVIKNNKIHVGAGAGIVADSIPENEWSECLQKAHVFLDAIEIIK

SEQ ID NO: 149673 - protein, 43 aa, Unknown
  Bacterial polypetide isolated from the Sargasso Sea
RTAVAKNKKFFVQAGAGIVADSKPKNEYEETVNKAKALISALR

SEQ ID NO: 149674 - protein, 306 aa, Unknown
  Bacterial polypetide isolated from the Sargasso Sea
EDTKKECYERIELIHKKILEPLPSQKPSKKGVINFESSVKKEDYLEAIRKIKNYIVEGDVMQVVYGQEFSTKFEGSPIDLYRSLRKLNPSPYMYLMKIDDLHIVGASPEILVRLQNEEVTVRPIAGTVKRGKDSKEDKELADKLKSDPKEIAEHLMLIDLGRNDVGRIAEVGSVKTTEEMKIEKYSHVMHLVSNVVGKIKKGLTSIDVLKATFPAGTLSGAPKIRAMEIIDELEPDRRGVYGGAVGYLSWTGNMDVAIAIRTAVIQGKNLSVRAGGGIVYDSDPESEYQESLNKAMSIMKAVEEMD

SEQ ID NO: 149675 - protein, 334 aa, Unknown
  Bacterial polypetide isolated from the Sargasso Sea
KDFDIPDVYYGLYQNIIAISQFNHEAHLFCNTIEKSSNIDTIESIINNKSFSVFDFKKIGKSESEITDEEYIEYVNKAKDHCKRGDVFQLVLSRRYTQKFKGDEFNVYRALRSINPSPYLFFFDYGDYKIFGSSPEAQIVINNRKAEIHPIAGTFKRTGNDEKDQINAKELAKDPKENSEHIMLVDLARNDLSRSGNNVKVEKNREIQFYSHVIHLVSKVTADLKKNIKSYQVVEDTFPAGTLSGAPKHKALELIEKYEKVNRNFYGGAIGFIDFDGNFNHAIIIRSFFSKNNILNYQAGAGIVIDSDPEKELEEVQNKLGALDKALIEAELIK

SEQ ID NO: 149676 - protein, 465 aa, Unknown
  Bacterial polypetide isolated from the Sargasso Sea
MKIKINTYHKKIIADTITPVEVYLKIRDRFPNSILLESSDYMQTANNFSFICFNQTGFFELKNNLINLKYPGEKTKEIPLTNKSISEYLNNYINGYDVKKSKTKFISNGLFGYMSHESVKYQEKIKFSEDKDDLDIPDIYYGFYQNIIAISLFNHEAHIYCNSYNGENNIREVEDIVNAKNYSVFNYKNIGNKTSNINDDQYIEYVKIAKEHCKRGDVFQLVLSRRFNQNFEGDEFNVYRALRSINPSPYLFFFDYGSFKIFGSSPEAQIIINNGKAEIHPIAGTFKRTGDDKRDKEKANALSKDPKENSEHIMLVDLARNDLSRNGTNVKVEKNREIQFYSHVIHLVSKVTATLKDTAKIFQVVMDTFPAGTLTGAPKHKALNLIEKYEKVNRNFYGGAIGYMDFDGNFNHAIIIRSFISKNNTLSYQAGAGIVIKSNPEDELQEVYNKLGALDKALKNAEDIV

SEQ ID NO: 149677 - protein, 323 aa, Unknown
  Bacterial polypetide isolated from the Sargasso Sea
MYQNIIAISQFNHEAHLFCNTNEESSNIDTIEGILNNKSFSVFDFKKIGNSESEITDKEYIEYVNKAKDHCKRGDVFQLVLSRRYTQKFKGDEFNVYRALRSINPSPYLFFFDYGDYKIFGSSPEAQIIINNRKAEIHPIAGTFKRTGDDEKDQITAKELAKDPKENSEHIMLVDLARNDLSRSGNNVNVEKNREIQFYSHVIHLVSKVTATLKEGIKSYQVVEDTFPAGTLSGAPKHKALELIEKYEKVNRNFYGGAIGFIDFSGNFNHAIIIRSFFSKNNILNYQAGAGIVIDSDPERELEEVQNKLGALDKALIEAELIK

SEQ ID NO: 149678 - protein, 416 aa, Unknown
  Bacterial polypetide isolated from the Sargasso Sea
MITKEEYNNFKDANFTVLPISRTVSAPGDTPLSLYSKISDQKNNFLLESVEGGERWAQYSIIGFGCLDTIKVSGNTIETLINGVSNKCKVENPLLAIQEITSQHLSPNLEHLPRFHGGYVGFFAYESSQYAEAKIAMLPEKGSKFAEHMPDIMLVKAEKLIVFDNLNNSTQIIFNACLQSMTYEFACSQLDEIENLISKPISLEADNFKEITNTFEFHSNFTKAEYLAAVSTIKNYIAEGDVMQVVLAQDFSANFDLDPFDLYKAIRELNPSPYMYYLNLDECQIVGASPEILVRLENQEVTLRPMAGTRKRGKNLVEDKSNQSELLNDPKEIAEHLMLIDLGRNDVGRVSEIGSVKVTAKMIVEKYSHVMHIVSNVVGRLISGLNYFDVLKAALPAGTLSGAPKIRAMEIIHELE

SEQ ID NO: 149679 - protein, 282 aa, Unknown
  Bacterial polypetide isolated from the Sargasso Sea
MSKDDKLTYHFPREKFIKSVGVAKKYITNGDVMQVVLSQRISIDFKECPIEFYRELRKLNPSPYMYYLNFGDFHIIGSSPEILVRLENDTITVRPIAGTRPRGKTEADDTKLEKDLLNDPKEIAEHLMLIDLGRNDVGRVSEIGSVRLTDKMIIEKYSHVMHMVSNVTGKVLKTVGIIDVLKASFPAGTVSGAPKIRATEIIYELEPLKRGIYAGAIGYLGWNGNMDTAIAIRTCVIKDNKLNIQCGAGIVYDSVPELEWEETINKGKAIIQAYNNTRNRQK

SEQ ID NO: 149680 - protein, 166 aa, Unknown
  Bacterial polypetide isolated from the Sargasso Sea
EDDLLNDPKEIAEHLMLIDLGRNDVGRVSEIGTVNVTEKMIIEKYSHVMHIVSNVVGRLKAGLTSFDVLKAALPAGTLSGAPKIRAMEVINELEPSSRGIYGGAIGYVGWNGNMDTAIAIRTAVIKDKKIHVGAGAGIVADSIPENEWEECKQKSKVFIDAMEMIS

SEQ ID NO: 149681 - protein, 97 aa, Unknown
  Bacterial polypetide isolated from the Sargasso Sea
KATLPAGTLSGAPKIRAMEIINELEPSSRGIYGGAIGYISWNGNIDTAIAIRTAVIKDNFIHVGAGAGIVADSNPESEWEECLQKSRVFLDAMEMIS

SEQ ID NO: 149682 - protein, 460 aa, Unknown
  Bacterial polypetide isolated from the Sargasso Sea
ISCLLKLKKNQKYSFLLESVEGGSLRGRYSLLGCDPDIVWEVKNNKASITYLDNNYDYEISEKPIESLKNLIENSKFDKGEIEVPYPILVGYLGYPMIQYMEEINLRNTDNINIPDSVLIRPKIVTVFDNIKDSITVMTVVYPCKDKDLESIYDNAQEILEEKVNQLKESLVQTKKNQIQSDLNFISNYSKEEYFSIISQAKEYIKKGDIFQVVTSQRFETNYDLEAISLYRSLRRLNPSPYLVNLNFDNFGLVASSPELLVQLRKGKVTIRPIAGTRKRGKNANEDLELSKDLLEDQKELAEHLMLLDLGRNDVGRVAKNKSVKVTEKMIIEYYSHVMHIVSNVEGVIDERYDAVDALKAGFPAGTVSGAPKIRAMEIIEELENLNRSFYAGCMGYFDANGDMDTCISLRSGLVKDKKLYVQAGGGVVYDSNPDDEYQETLNKARALMAAARDSYKYNQ

SEQ ID NO: 149683 - protein, 382 aa, Unknown
  Bacterial polypetide isolated from the Sargasso Sea
MSLEKKNFISQYNKGLPQILKKNLIADIETPFSSLLKISKSEKYSFLLESVEGGSKRGRYSLLGCDPDLIWTVEKGKAKIKYLDHNFDYKLDQKPIHSLKELVKISKFKNNEIDVPFPTLVGYLGYPMIQYIEKIKLSNKDNIKIPDAILIRPKIVAVFDNIKDIISLMTVTYPSKKISAEKAYRKNKLLIDKTIKKLEKSILKPAQKKNKKSKLKFKSNFKKEQFYKIVNKAKEYIKNGDIFQVVPSQRFETKYNLKAVNLYRSLRRLNPSPYLVNLNFDKIGLVASSPELMVQLRNKKVTIRPIAGTRKRGKNASEDLYLSNDLLNDKKELAEHLMLLDLGRNDVGRVAKKGTVNVTEKMIIEYYSHVMHIVSNVGGKNR

SEQ ID NO: 149684 - protein, 74 aa, Unknown
  Bacterial polypetide isolated from the Sargasso Sea
IDELESSKRKLYAGGIGYFTANQDFDTCIALRTALIKNKKIYVQAGAGIVADSDPDNEYNETVNKARALLKAIN

SEQ ID NO: 149685 - protein, 63 aa, Unknown
  Bacterial polypetide isolated from the Sargasso Sea
YAGGIGYFSANGEFDTCIALRTAVAKNKNFYVQAGAGIVADSKPINEYEETVNKAKALINALR

SEQ ID NO: 149686 - protein, 77 aa, Unknown
  Bacterial polypetide isolated from the Sargasso Sea
MEIIDELENTKRKVYAGGIGYFSANGDFDTCIALRTAISKNNKFYVQAGAGIVADSKATNEYQETINKAKALLKSLE

SEQ ID NO: 149687 - protein, 79 aa, Unknown
  Bacterial polypetide isolated from the Sargasso Sea
DELTSLRGIYGGTVGYFSKNGDMDQAIAIRTIVFSDETYCFQAGAGIVADSLPENEYKEVLAKSQILRTALKMVKEGEL

SEQ ID NO: 149688 - protein, 351 aa, Unknown
  Bacterial polypetide isolated from the Sargasso Sea
IEPKLNLHSPDIPFISICQCNEIIVFDNFKGTFYIIVTTEQKTNDGYQSAKRRIKEIKSAIYSLQPSISQNINRVDKELVSTTNPDEKTFKSYVNKIKSLINDGEIMQAVLSREVSFKGNFNPFTLYRALRLINPSPYMFYMNFGDLNLIGSSPEILVQNFQDKVTIRPIAGTRKRGIDESEDLQNKIDLIGDDKEKAEHMMLVDLARNDVSKVSNPSTVSVDEMMIVEKYSHVMHMTSNVIGQIKENATPIDCLKAALPAGTLSGAPKIRAMEILSELENRARGIYGGCVGYIGYNKSLDTAIIIRTALHKKDEVKVGVGAGIVFDSEPQNEWNETVAKLNVFLEALKYE

SEQ ID NO: 149689 - protein, 365 aa, Unknown
  Bacterial polypetide isolated from the Sargasso Sea
MISKEEYIEFAENGFNIVPLIKSIEKNLDSPIKVFSKIKNKKNTFLLESIEGGEKWAQYSIIGLDCEDSIKVSDNKIEIKTALGTSLIECKEPLNELNKLIAEYKTPVLDGMPRFYGGYVGFFAYESAKYAEKRINALQRKDSKFDVHMPDIYLVKSEKIIVYDNFNNSIQAIYNANPQKTSYEDALEIIDEIQNSIDHSGELEETSYSNTTGELEFKSNFTKNEYMSSVNKIKEYIKEGDVMQVVLAQDFYQSFEGDSFELYSALRQINPSPYMYYLNLDECEVVGSSPEILVRLEDSNITLRPIAGTRKRGANEEEDKNNEKDLLNDPKELAEHLMLIDLGRNDVGRVSEIGSVKLTEKMVIE

SEQ ID NO: 149690 - protein, 141 aa, Unknown
  Bacterial polypetide isolated from the Sargasso Sea
MTIERYSHVMHITSNVNGKLLPEATAFDALRACLPAGTVSGAPKIRAMEIIDQLEPNKRGPYAGAVGYIDFCGSMDTCIALRTIVITQGNAHVQSGAGIVADSQPEKEFDETLNKAKGLVVAIEMTIQRLKGVDAPDAGKQ

SEQ ID NO: 149691 - protein, 326 aa, Unknown
  Bacterial polypetide isolated from the Sargasso Sea
MSLKINNFDVNPLLVFRTMRSKDCFYMQKKYPGDKDPYETIMGHKISETIKISGLNPINKIRKLIENTKSSTYCGENKHNGFFSYFSYECFQYFDKVPRLKKDPNDCPECLVMNPGIISTYDHKEKSIVISKKYKSSPENYANYKEDLVKIAQSIIEKSKQLNINTPEKLKGLKSKTITNKNNYLEKINKIKKEIVSGELIQCVLTQRFKKASKISDQELLEYLSMNYPSEYVYQISCNEFSISGSSPEMFLKVKNNIATIRPVAGTIGSIKGKTDKLIKKLKSSIKDKAEHIMLVDLARNDLGKVAKPGTVKVDKLMETMGLQKW

SEQ ID NO: 149692 - protein, 465 aa, Unknown
  Bacterial polypetide isolated from the Sargasso Sea
MKIKINTYHKKIFADTITPVEVYLKIRDIFPNSLLLENSDYMLANNNYSYICFNQIGHIKIKDYKVDCKFPGGTLESKELKKGEKISTVIHDYIEKFETDNSSFKFLNNGMFGFMSHESIKYFDSIEIETKKNLNIPDVYYGLYKNIIAISQYNHEAHIFCNSIDKSSNIDIIEGILNNKSFSAYNFKKIGKPESEISDEEYIEYVNKARDHCKRGDVFQLVLSRRYTQKFKGDEFNVYRALRSINPSPYLFFFDYGDFKIFGSSPEAQIVINNKKAEIHPIAGTFKRTGDDQKDQMTAKELAKDPKENSEHIMLVDLARNDLSRSGNNVKVEKSREIQFYSHVIHLVSKVTAEIKEDIKSYQVVEDTFPAGTLSGAPKHKALELIEKYEKVNRNFYGGAIGFIDFKGNFNHAIIIRSFFSKNNILNYQAGAGIVIDSKPEKELEEVKNKLGALDQALIEAEMIK

SEQ ID NO: 149693 - protein, 108 aa, Unknown
  Bacterial polypetide isolated from the Sargasso Sea
IGKQKKNLSIFNTFLSGFPAGTVSGAPKIRAMEIIDELESSKRKLYAGGIGYFTSNQDFDTCIALRTALIKDKKIYVQSGAGIVADSNPNNEYNETVNKAKALLKAIS

SEQ ID NO: 149694 - protein, 462 aa, Unknown
  Bacterial polypetide isolated from the Sargasso Sea
MYVHGKKVFLDTENTITIYNKLAKKFKDVSILESVIGGDNKGRYSIILFNVNQNIEIFHNYALINNRKKIIKSPNIFIKNIYKNLKIKTLYEQNIPLPVFIGNICFDLCKFTLPKLSYDHSKNEIGIPLAHFVKPTNLIIIDNVLNETHLIEVSNNMKIPTKSLKTLESLLKSPFYKFNKLNVKKLKKFKNHVNREDFLKKVDEIKSDIKVGEIFQAVLSQRFSNEYLIDPFNFYRALRSINPSPYLVFLNLKNYQIICSSPETMIKVKNKEITLRPIAGTRKRGKNEIEDNDLKNELLNDKKELAEHLMLVDLGRNDVGQISKNNTVKVTEQNIIEYYSHVMHIVSNVTGELKNNLTPIDVLFAGLPAGTVSGAPKIRALEILEKHEHINREFYSGSVCYIDANGDMDSCINLRTAMIKNKKIFAQSGAGIVFDSIAKNEHSECINKANALFEAYKLAHQI

SEQ ID NO: 149695 - protein, 464 aa, Unknown
  Bacterial polypetide isolated from the Sargasso Sea
MYKYKSIHKKIIVDTMTPVSIYLKLRDQFSNTILLESSDYIAKDNSYAYICCNPISKFYIKKNTLYTEFPDKSHYEKKLNANSNVFSELTSFMEKFVITEKEEKNKKFMTKGLFGYMTYDSVKFFEKIEIENKSFGDDIPDIFYSLYSEIIVINTFNNEATLISQTGDLNQLDNIEKIIKKKSINEYGIKLEGKLKSNLNDNEFIDVVKKGIKHCYRGDVFQIVLSRKFSQKFSGDEFCVYRQLRSINPSPYLFYFDYGNFKIFGSSPEAQLVINNQKAEIHPIAGTFKRTGDDLLDSKKALKLFKDDKENSEHMMLVDLARNDLSRACSEVKVEKDREIQFYSHVIHLVSKVTGKLKSHSKDIIGSTFPAGTLSGAPKHMAMKLIEKYEQHNRSFYGGAIGFIDFENNFNHAILIRSFLSKNQNLFFQAGAGIVSKSNPDDELNEVYNKVGALLKALEKAEEI

SEQ ID NO: 149696 - protein, 141 aa, Unknown
  Bacterial polypetide isolated from the Sargasso Sea
AGTVNVTEQFGIERYSHVMHMVSNVEAELEDGLSAIDLFKATCPAGTVSGAPKIRAMEIIDEFEPVKRGIYGGAIGYLSWQGNMDMAIAIRTAVIKDDVLYIQAGGGWVADSVPDLEWKESLNKGRAIFKAAEMVQEKLEG

SEQ ID NO: 149697 - protein, 361 aa, Unknown
  Bacterial polypetide isolated from the Sargasso Sea
MKLSTSFDSFKKLHNNKYNQAIYFSQNCKNYRFVENLYKFILAKKNSFIFESVEKGTVRGRYTIIGYNPDRIYNIQNNKIIEDDFKKKTIIKKNVFKYLNELFKSFKVKSSGILPNMSSMIVGYFSYDIVRLIEKIPDKCKKDIDIPDIRLMRPKNLVIYDNIKKKIFFVQNIFKEEIINDHYIKYLTIKNTFKELQHLGNISLPENFHKNKKKIKVKSNISKSKFKTIVAKAKNYIRKGDIFQVVLSQRFESQIDKPPLEIYNSLRIINPSPFMFYFNYDDFQILGSSPEILVRLLNNKITIRPIAGTRPRGKNKKQDKKLTLDLLKDPKELAEHLMLLDLGRNDVGKESERNSVHVTEK

SEQ ID NO: 149698 - protein, 145 aa, Unknown
  Bacterial polypetide isolated from the Sargasso Sea
RIAKPGTVKVTQQMEIERYSHVMHIVSHVEADIDKSFNAFDVLRSAFPAGTVTGAPKVRAMKLISEKEKYKRGPYSGAVGYFSYDGNMDTAIAIRTIVLKDNLAILQAGAGIVADSDPESEHNECLAKMGALIKALEHAENSTKR

SEQ ID NO: 149699 - protein, 204 aa, Unknown
  Bacterial polypetide isolated from the Sargasso Sea
QEKRGEDRIVTIRPLAGTRPRGNTPERDAELATELLNDPKEIAEHVMLIDLARNDVGRIAQIGSVVVTDQMVIEKYSHVQHIVSSVEGKLKPGTTNFDVLRATFPAGTLSGAPKVRAMELIDELEPVKRGLYGGAVGYLSFTGEMDLAITIRTGVIANGNLYVQAAAGVVADSVPESEWQETENKARAVLRAAEQVQDGLDSDF

SEQ ID NO: 149700 - protein, 150 aa, Unknown
  Bacterial polypetide isolated from the Sargasso Sea
LGRNDVGKVALFGSVKVTEKMIIEYYSHVMHIVSNVEGKLNSKFNAIDALISGFPAGTVSGAPKIRAMEIIEELENVSRSFYGGAMGYFDSNGDMDTCISLRTGLVKDKKLYIQAGGGIVYDSDPEKEYQETINKANALVVAAEDSYKYE

SEQ ID NO: 149701 - protein, 142 aa, Unknown
  Bacterial polypetide isolated from the Sargasso Sea
EIGTVEVTDLMSIEKYSHVMHLVSHIKGVLKHGLNPFDALRSCFPAGTLSGAPKIRAMEIISELEQQKRGPYAGAVGYFSFSGNIDTCITLRTSVIKNGTAYIQAGGGIVADSTDEDEYLETYYKSGALLKAIENAESQFNS

SEQ ID NO: 149702 - protein, 323 aa, Unknown
  Bacterial polypetide isolated from the Sargasso Sea
MTVVYPSENKHYESLYKKAQELLELKVNQLKENLVQKSAIAIKSNLNFKSNYSKDEYFSIISKAKEYINEGDIFQVVTSQRFETEYDLEAISLYRSLRRLNPSPYLVNLNFNDIGLVASSPELLVQLRNKKITIRPIAGTRKRGKNANEDLELSKDLLKDKKELAEHLMLLDLGRNDVGRVSKNKSVKVTEQMIIEYYSHVMHIVSNVEGLIDEKYDAVDALKAGFPAGTVTGAPKIRAMQIIEELENLNRSFYAGCMGYFDSNGDMDTCISLRSGLVKNGKLFIQAGGGVVYDSNPEDEYQEIINKAGALMAAAEDSYKYNS

SEQ ID NO: 149703 - protein, 202 aa, Unknown
  Bacterial polypetide isolated from the Sargasso Sea
MRSALEDSREDTNIGVIILTGEGDKAFCSGGDQRVRGDSGYKDNETGHSRLNVLDFQREIRSCPKPIVAMVAGYAIGGGHVLHVMCDLTIAADNAIFGQTGPKVGSFDGGYGSSYLARIVGQKKAREIWFLCRQYNAQQALEMGLVNSVVPLENLEEETLQWSREMLKNSPMALRCLKSAMNADCDGQAGIQELAGNATMLF

SEQ ID NO: 149704 - protein, 202 aa, Unknown
  Bacterial polypetide isolated from the Sargasso Sea
CSGGDQNVKGTGGYIGDDGVPRLNVLDLHKRIRELPKPVIAMVNGYAIGGGHVLHVVCDLTIASDNAIFGQTGPKVGSFDGGFGSSYLARHVGQKKAREIWFLCKQYSAQEALEMGMVNKVVPFDKLEETVLEWCALMQKRSPLALRMIKRSLNAELDGQHGLMQLAGDATLLYYLTEEAQEGKEAFLEKRDPNFRKYPKFP

SEQ ID NO: 149705 - protein, 159 aa, Unknown
  Bacterial polypetide isolated from the Sargasso Sea
MNSEYWKKALEFEDIIFEKSEDGIAKITINRPEVRNAFRPFTVREMQQALEDAREDSGIGVIILTGSGEKAFCSGGDQRIRGDAGYQDSETGHLRLNVLDFQRQIRSCPKPVVAMVAGYAIGGGHVLHVMCDLSIAADNAVFGQTGPKVGSFDGGYGSS

SEQ ID NO: 149706 - protein, 273 aa, Unknown
  Bacterial polypetide isolated from the Sargasso Sea
MDGARRRVAGIANHITAAPGCPMSDDDGFSRETYARADPSRGSSYERVHGNVSREPVIWIPCTPGADERTGATYELKDVIYEKSPEGIARVTINRPERRNAFTPRTVKEMRWCMDDARDDMSVGVVVLRGAGDLAFCSGGDQSARGKGGYVEAKAGGSEETPRLNVLDLQMQIRRMPKPVIASVAGYAVGGGHILHMVCDLTIAADNAVFGQTGPKVGSFDAGYGSTHMARLIGQKKAREMWFLARFYNASDALKMGLVNTVVPLAELEVETA

SEQ ID NO: 149707 - protein, 190 aa, Unknown
  Bacterial polypetide isolated from the Sargasso Sea
MNSEYWKKALEYEDIIFEKSEEGIAKITINRPEVRNAFRPLTVREMQQALEDAREDSGIGVIILTGAGEKAFCSGGDQRIRGDAGYQDSGTGHLRLNVLDFQRQIRSCPKPVVAMVAGYAIGGGHVLHVMCDLSIAADNAVFGQTGPKVGSFDGGYGSSYLARIVGQKKAREIWFLCRQYDARQALEMGL

SEQ ID NO: 149708 - protein, 180 aa, Unknown
  Bacterial polypetide isolated from the Sargasso Sea
MIKNYWETSGNYTDIKYEKSKEGIAKITINRPEVRNAFRPLTVREMRHALEDSREDTNIGVIILTGEGDKAFCSGGDQRVRGDSGYKDNETGHSRLNVLDFQREIRSCPKPVVAMVAGYAIGGGHVLHIICDLTIAADNAIFGQTGPKVGSFDGGYGSSYLARIVGQKKAREIWFLCRQV

SEQ ID NO: 149709 - protein, 215 aa, Unknown
  Bacterial polypetide isolated from the Sargasso Sea
VIILTGAGEKAFCSGGDQRIRGDAGYQDSGTGHLRLNVLDFQKQIRSCPKPIVAMVAGYAIGGGHVLHVMCDLSIAADNAVFGQTGPKVGSFDGGYGSSYLARIVGQKKAREIWFLCRQYDARQALEMGLVNTVVPLAQLEEETIQWCREMLRMSPIALRCLKAAMNADCDGQAGLQELAGNATMLFYMSEEGQEGRNAYLEKRPPDFSRFTRHP

SEQ ID NO: 149710 - protein, 275 aa, Unknown
  Bacterial polypetide isolated from the Sargasso Sea
MNSEYWKKALEFEDIIFEKSDEGIAKITINRPEVRNAFRPLTVREMQQALEDAREDSGIGVIILTGAGEKAFCSGGDQRIRGDAGYQDSGTGHLRLNVLDFQRQIRSCPKPVIAMVAGYAIGGGHVLHVMCDLSIAADNAVFGQTGPKVGSFDGGYGSSYLARIVGQKKAREIWFLCRQYDARQALEMGLVNTVVPLAQLEEETIQWCREMLRMSPIALRCLKAAMNADCDGQAGLQELAGNATMLFYMSEEGQEGRNAYLEKRPPDFSRFTRHP

SEQ ID NO: 149711 - protein, 192 aa, Unknown
  Bacterial polypetide isolated from the Sargasso Sea
MAFPSTVSIVEVGPRDGLQNEKQILSVDDKVALINLLSETGLTRIEAGSFVSPKWVPQMADSGNVFNALTKKPGIQYSALTPNLKGLEAALEAGVDEIAVFGAASESFSQKNINCTISESLQRFEPVLELAKQHSIPVRGYVSCVMGCPYEGEIAPSAVAQVSKALLDMGCYEISLGDTIGTGTPGATKALL

SEQ ID NO: 149712 - protein, 178 aa, Unknown
  Bacterial polypetide isolated from the Sargasso Sea
MVLPKKVKMVEVGPRDGLQNEAEIVPASVKVELIDRLVTAGFKSVEAGSFVSPKWIPQMAGTADVMASIVRKEGVTYSVLTPNMKGFEGAVAAKASEVAIFGAATEAFSQKNINCSIDESLERFRPVAEAAHEIGLPVRGYISCGLGCPYEGEVAPSSVAAVAAKLDSMGCYEISLSD

SEQ ID NO: 149713 - protein, 216 aa, Unknown
  Bacterial polypetide isolated from the Sargasso Sea
RQAGVVYSALTPNVKGLELALDAKASEVAIFGAASQSFSQRNINCSIEESIERFIPLMDMAKAANIPVRGYVSCVLGCPYEGEIAASEVARVSEILYKMGCYEISLGDTIGVGTPLKARKMLQAVMERVPVEKLALHFHDTYGQALANIIACIDLGVRSFDASVAGLGGCPYAKGASGNLASEDLVYMLHGLGLKTGIDLEKLALAGFGISKQLNR

SEQ ID NO: 149714 - protein, 60 aa, Unknown
  Bacterial polypetide isolated from the Sargasso Sea
AASQSFSQRNINCSIEESIERFIPLMDMAKAANIPVRGYVSCVLGCPYEGEIAASEVARV

SEQ ID NO: 149715 - protein, 92 aa, Unknown
  Bacterial polypetide isolated from the Sargasso Sea
MPQQVRLVEVGPRDGLQNEKQPISVADKVRLVDDLSAAGLSYIEVGSFVSPKWVPQMAGSAEVFAAIQQQPGVTYAALAPNLKGFEGALEAG

SEQ ID NO: 149716 - protein, 235 aa, Unknown
  Bacterial polypetide isolated from the Sargasso Sea
MSLPAKVKLVEVGPRDGLQNESHPVSSADRIRLINDLGAAGLPVIEVGSFVSPKWVPQMAGSEQVFAGINRYAGSTYTALTPNMKGFEQALTAGAQEVAVFAAASEGFSQKNINCSISESLQRFEPVLAAAAQAGIRVRGYVSCVLGCPYDGDVPASQVAAVARELYAMGCYEISLGDTIGTGTPGATRQLIARVSDVVPHAALAGHFHDTYGQALANIYASLLEGVQVFDSSVA

SEQ ID NO: 149717 - protein, 236 aa, Unknown
  Bacterial polypetide isolated from the Sargasso Sea
SPKWVPQMADSADVINALNLPNINLSALTPNLKGAHAAHDAGIKEFAIFTAASESFCKKNINCSVDESITRFSEVMNFAKEHNIRVRGYVSCVLGCPYEGDIDAKAVLDVTQKLLDLGCYEVSLGDTIGVGTAKKVTQLIELLLMHIDSNRLAVHFHDTYGQALTNIYAALSLGISTVDAAVAGLGGCPYAKGASGNVATEDVVYLLDGLGINHGIDLQRLVDAGWAITDALNKTP

SEQ ID NO: 149718 - protein, 243 aa, Unknown
  Bacterial polypetide isolated from the Sargasso Sea
MAEKISVFEVGPRDGLQNIKNEIPINKKIELINILSTTGIEKIECGSFVSAKWVPQMRGTNEIFEEIIRRDGVKYTALTPNLKGFENALHVKVDEVAVFAAASETFSQKNVNCSIDESLARFRDIFEKARKKKIPVRGYVSCVVECPYEGYVTPKRVLEVTSKLLEMGCYEVSLGDTIGKGTPKKIDELFNVICESLNPEQLAGHFHDTSDNAIKNVEVGLQYGITSFDTAIGGLGGCSYAPG

SEQ ID NO: 149719 - protein, 300 aa, Unknown
  Bacterial polypetide isolated from the Sargasso Sea
MPKAVRLVEVGPRDGLQNEKAVSLEAKVELVNRLAETGLRTIETGAFVSPKWVPQMADSAAVFAQISRTAGIQYTALTPNLQGYEAAKAAGATEVAVFGAASEAFTQKNINCSIAESLERFAPVMAQAKLDGIKVRGYVSCVVGCPYQGDVDPCEVARVAKALLDMGCYEISLGDTIGVGTPAKVNAMLDAVLEVVPVAQLAVHFHDTYGQALSNIYAALQRGIAVVDSSVAGLGGCPYAAGASGNVATEEVVYLLNGLGITTGVDLQRLAPIGWFISEQLGKAPSSKVGLALKAKCQQN

SEQ ID NO: 149720 - protein, 315 aa, Unknown
  Bacterial polypetide isolated from the Sargasso Sea
MSALDLSNLSATSVSASSDRVSLFEMGPRDGLQNEAAVPTQAKVALIESLADAGVKRIEAGSFVSPKWVPQMADSGEVLRQIRRQAGVVYSALTPNVKGLELALDAKASEVAIFGAASQSFSQRNINCSIEESIERFIPLMDMAKAANIPVRGYVSCVLGCPYEGEIAASEVARVSEILYKMGCYEISLGDTIGVGTPLKARKMLQAVMERVPVEKLALHFHDTYGQALANIIACIDLGVRSFDASVAGLGGCPYAKGASGNLASEDLVYMLHGLGLKTGIDLEKLALAGFGISKQLNRLNGSKVANAILQGAKA

SEQ ID NO: 149721 - protein, 310 aa, Unknown
  Bacterial polypetide isolated from the Sargasso Sea
MTFPTAVKIVEVGPRDGLQNEKTFVPTDVKIALVDRLSHAGFRNVEAASFVSPKWVPQMADGADVMAGIERRAGTVYSVLTPNLKGFENAVAARADEVVIFGAASEAFSQRNINCSIAESIARFEPVAKAAKDAGLRLRGSVSCTLGCPYQGEVPVASVVDVVERFAALGCDEIDIADTIGVGTPKRTREVLAAVTRVFPRERLSGHFHDTYGQALANIYAALFEGIEIFHASVAGLGGCPYAKGATGNVATEDVLYLMQGLGIDTGIDLAQVVAAGDFISNAIGRTNVSRAGRALLAKAQSAADAANCA

SEQ ID NO: 149722 - protein, 300 aa, Unknown
  Bacterial polypetide isolated from the Sargasso Sea
MRPDQIRIVEVGPRDGLQNEAQPLTPQERVALIEQLADAGLRDIEAGSFVSPRWVPQMAGSDEVLIALSERKDLRLPVLVPNKKGYELSRVAGAREIAVFGAASETFSQRNINCSIADSLARFGEVCALAKADGVVIRGYISCVLGCPYEGSVDIAQVARLAAQLAEMGCSEISLGDTIGVGTPDKARALTKACASEVGLDNLSVHFHDTYGQALANILACIEIGVTSVDAAVGGLGGCPYASGSAGNVATEDVVYLLEGLGINCSADLEQLVTITESLSRRLGHPPASRVARAQLAKRA

SEQ ID NO: 149723 - protein, 315 aa, Unknown
  Bacterial polypetide isolated from the Sargasso Sea
MSALDLSNLSATSVSASSDRVSLFEMGPRDGLQNEAAVPTQAKVALIESLADAGVKRIEAGSFVSPKWVPQMADSGDVLRQIRRQAGVVYSALTPNVKGLELALDANASEVAIFGAASQSFSQRNINCSIEESIERFIPLMDMAKAANIPVRGYVSCVLGCPYEGEIAASEVARVSEILYKMGCYEISLGDTIGVGTPLKARKMLQAVMERVPVEKLALHFHDTYGQALANITACLDLGVRSFDASVAGLGGCPYAKGASGNLASEDLVYMLHGLGLKTGIDLEKLALAGFGISKQLNRLNGSKVANAILQGAKA

SEQ ID NO: 149724 - protein, 315 aa, Unknown
  Bacterial polypetide isolated from the Sargasso Sea
MSALDLSNLSATSLSASSDRVSLFEMGPRDGLQNEAAVPTQAKVALIESLADAGVKRIEAGSFVSPKWVPQMADSGDVLRQIRRQAGVVYSALTPNVKGLELALDAKASEVAIFGAASQSFSQRNINCSIEESIERFIPLMDMAKAANIPVRGYVSCVLGCPYEGEIAASEVARVSEILYKMGCYEISLGDTIGVGTPLKARKMLQAVMERVPVEKLALHFHDTYGQALANIIACIDLGVRSFDASVAGLGGCPYAKGASGNLASEDLVYMLHGLGLKTGIDLEKLALAGFGISKQLNRLNGSKVANAILQGAKA

SEQ ID NO: 149725 - protein, 166 aa, Unknown
  Bacterial polypetide isolated from the Sargasso Sea
MFPKEVSIVEVGPRDGLQNEKQALSAEQKIELIQLLSKTGLNRIEAGSFVSPKWVPQMANSDAVFKALSPEDKIHYSALTPNLKGLEAAIEAGAKEVAVFGAASESFSQKNINCSISESLKRFEAVFDLASESKIKVRGYVSCVMGCPYEGEISPSAVTQVSKELY

SEQ ID NO: 149726 - protein, 263 aa, Unknown
  Bacterial polypetide isolated from the Sargasso Sea
LSAAGLSYVEVGSFVSPKWVPQMAGSAEVFASIQRQPGVTYAALAPNLKGFEAALAAGVEEVAVFAAASEAFSQKNINCSIKDSLERFVPLMEAAKAHGIRVRGYVSCVLGCPYEGEVAPEQVASVARELFAMGCYEISLGDTIGTGTAGKTRHLINVVGREVPRHLLAGHFHDTYGQALANIYASLEEGINVFDSSVAGLGGCPYAKGATGNVASEDVLYLLDGLGIHTGIDMDRLIAAGQRICSVLDKPNGSRVARALGRH

SEQ ID NO: 149727 - protein, 304 aa, Unknown
  Bacterial polypetide isolated from the Sargasso Sea
FQGNMDVIKLEELIKTKGKENIPVCLLTITNNSGGGQPVSMENIRAVRTLLDKYGIPLYLDACRFAENAYFIKLREPKYKDANVKDIILEMMSLAEGCTISAKKDGLVNIGGLLCTDDDLLAKKEKDLLILTEGYPTYGGLAGRDLDAMAVGLQEVMDEDYLQYRLAQSKYLGEHLMKIGYHTIQPPGGHAIYIDAKSTLDHIPSLEFPGHALAVELYKTGGIRSCEIGSVMFGKVDSNTRKEIPAKMELLRLALPRRTHTQSHIDYVIEVAKDVLERKNTIKGLKIIDQPKTLRHFSASFEFI

SEQ ID NO: 149728 - protein, 355 aa, Unknown
  Bacterial polypetide isolated from the Sargasso Sea
MCIRKLILTLKSFKLINVFFKNIYNILMYFNHKDNDIVIKVSYNPCMKFKTIIEPFKIKSVESLPITTPEEREGYLKREHWNVFGLKSQEVTVDLLTDSGTGSMSSEQWAAIMRGDESYAGSHSWQRFHDVVSDLTGYKHIIPTHQGRASEKILATITVKEGDIIPSNSHFDTTRANFEFVKAEALDLLCKEGLDLLSPSPFKGNIDLDKLEKILKEKNDKIPFVLMTITNNTGGGQPVSMENLKKVKELCGKYNKMFLLDACRFAENAWFVSQREDEYKDVEIRDITKEAFRLADGCTISLKKDGFGNIGGILAFNDDDLAEQARNLLILTEGFSTYGGLAGRDLDALAQSLKE

SEQ ID NO: 149729 - protein, 177 aa, Unknown
  Bacterial polypetide isolated from the Sargasso Sea
MILTEGFPTYGGLAGRDLDALAQGLKEITDKNYLEYRARSISYLGEKAISYGIPVVQPAGGHALYIDAKTFLPDIPPHEYPGHSVACEIYLLGGVRAVELGTLAFGVAGENGEPDTPATHELVRLAAPRRTYTQSHFDYVAEVLEKLAEKKDELKGYKIIEQPKLLRHFTAKLEPLK

SEQ ID NO: 149730 - protein, 229 aa, Unknown
  Bacterial polypetide isolated from the Sargasso Sea
MKKFQTVIEPFIIKSVDPIRMTSEKERIVALEKAKYNLFKIPAHMILIDLLTDSGTGAMSSEQWAAIMRGDESYAGSASFDRLEKTVKELFGFKHVIPAHQGRAAERILFSTICKKGDIVPNNTHFDTTRANVESQGATAIDLVIPEGLDPSNTHHFKGNMDIIKLEELIKNNKDSIPVCLLTITNNSGGGQPVSMENIRAVRTLLDKYGIPLYLDACRFAENAYFIKL

SEQ ID NO: 149731 - protein, 174 aa, Unknown
  Bacterial polypetide isolated from the Sargasso Sea
TEGFPTYGGLAGRDLDALAQGLIEITDENYLQYRARSIAYLGEKAISYGLPIVQPAGGHALYIDAKTFLPDIPPHQYPGQAVVCELYLLGGIRTAELGTFAFGVAGENGENDTPATHELVRLAAPRRTYTQSHFDYVAEVLEKLVENKDKLKGYEITEQSRFLRHFTAKLKPLS

SEQ ID NO: 149732 - protein, 460 aa, Unknown
  Bacterial polypetide isolated from the Sargasso Sea
MKKFRTVIEPFIIKSVDPIKMTSEQERVNALEKARYNLFKIPADMILIDLLTDSGTGAMSSEQWAAIMRGDESYAGSRSFERLEKTVKELFGFKHVIPAHQGRAAERILFSTICKKGDIVPNNTHFDTTRANIEFQGATAIDLVIPEGLDPSNPHPFKGNMDVIKLEELIKTKGKENIPVCLLTITNNSGGGQPVSMENIRAVRTLLDKYGIPLYLDACRFAENAYFIKLREPKYKDVNVKDIILEMMSLAEGCTISAKKDGLVNIGGLLCTDNDLLAKKEKDLLILTEGYPTYGGLAGRDLDAMAVGLQEVMDEDYLQYRLAQSKYLGEHLMKIGYDTIQPPGGHAIYIDAKSTLDHIPSLEFPGHALAVELYKTGGIRSCEIGSVMFGKVDSNTRKEIPAKMELLRLALPRRTHTQSHIDYVIEVAKDVFERKNTIKGLKIIDQPKTLRHFSASFELL

SEQ ID NO: 149733 - protein, 200 aa, Unknown
  Bacterial polypetide isolated from the Sargasso Sea
FGKYWWAYLLLNDDQLAEDAKNLLILTEGFPTYGGLAGRDLDALAQGLIEITDENYLQYRARSIAYLGEKAISYGLPIVQPAGGHALYIDAKTFLPDIPPHQYPGQAVVCELYLLGGIRTAELGTFAFGVAGENGENDTPATHELVRLAAPRRTYTQSHFDYVAEVLEKLVENKDKLKGYEITEQSRFLRHFTAKLKPLS

SEQ ID NO: 149734 - protein, 327 aa, Unknown
  Bacterial polypetide isolated from the Sargasso Sea
VSDLTGYKHIIPTHQGRASEKILATITLKEGDIIPSNSHFDTTRANFEFAQANPIDLLCEEGLDLLSPSPFKGNIDLDKLEELLKGPESEKVPFVLMTITNNTGGGQPVSMDNLKKVKDLCSKYNKMFLLDACRFAENAWFVSQREDKYKDVEIRDIAKEAFRLADGCTISLKKDGFGNIGGLLALNDDSLAEAARNLLILTEGFPTYGGLAGRDLDALAQGLKEITDKNYLEYRARSISYLGEKAISYGIPVVQPAGGHALYIDAKTFLPDIPPHEYPGHSVACEIYLLGGVRAVELGTLAFGVAGENGEPDTPATHELVRLAAPR

SEQ ID NO: 149735 - protein, 238 aa, Unknown
  Bacterial polypetide isolated from the Sargasso Sea
VLSDLTGYKHIIPTHQGRASEKILATISVKEGDIIPSNSHFDTTRANFEFAQSNPIDLLCEEGLDLLSPAPFKGNVDLEKLEELLKGPDSNKIPFVLMTITNNTGGGQPVSMDNLKKVKELCTKYNKMFLLDACRFAENAWFVSQREEEYKNVEIREIAKEAFRLADGCTISLKKDGFGNIGGVLAFNDDSLAEAARNLLILTEGFPTYGGLAGRDLDALAQGLKEITDKNYLEYRAR

SEQ ID NO: 149736 - protein, 287 aa, Unknown
  Bacterial polypetide isolated from the Sargasso Sea
SNKIPFVLMTITNNTGGGQPVSMDNLKKVKELCTKYNKMFLLDACRFAENAWFVSQREEEYKDVEIREIAKEAFRLADGCTISLKKDGFGNIGGVLALNDDSLAEAARNLLILTEGFPTYGGLAGRDLDALAQGLKEITDKNYLEYRARSISYLAEKALSYDIPVVQPAGGHALYIDAKTFLPDIPPHEYPGHSVACEIYLIGGVRAVELGTLAFGVANENGEPDTPATHELVRLAAPRRTYTQSHFDYVAEVLEKLAEKKDKLKGYKILEQPKLLRHFTARLEPLK

SEQ ID NO: 149737 - protein, 361 aa, Unknown
  Bacterial polypetide isolated from the Sargasso Sea
VFGLKSQEVTVDLLTDSGTGSMSSEQWAAIMRGDEAYAGSHSWQRFQDVVSDLTGYKHIIPTHQGRASEKILATITLKEGDIVPSNSHFDTTRANFEFAQANPIDLLCGEGLDLLSPSPFKGNIDLDKLEELLKGPESEKVPFVLMTITNNTGGGQPVSMDNLKKVKDLCLKYNKMFLLDACRFAENAWFVSQRENKYKDVEIRNIAKEAFRLADGCTISLKKDGFGNIGGLLALNDDSLAEAARNLLILTEGFPTYGGLAGRDLDALAQGLKEITDKNYLEYRARSISYLSEKAISYGIPVVQPAGGHALYIDAKTFLPDIPPHEYPGHSVACEIYLLGGVRAVELGTLAFGVAGENGEP

SEQ ID NO: 149738 - protein, 245 aa, Unknown
  Bacterial polypetide isolated from the Sargasso Sea
MNFRTIIEPFVIKSVEPLQMTTEAERIQALEEAEYNLFKIPSSLVMIDLLTDSGTGAMSNEQWAAIMRGDESYAGSPSFERLEATVKDLFGFQHVIPTHQGRAAERIFFSNMVKAGQVVPKNTHSDTTRGNIEFLGAEAVDLVIPEGLDPQKRHPFKGNMDVNKLEELIETRGPEKIPLCLQTITNNSGGGQPVSMENILSVRKVLDRFGIPLYLDECRFAENAYFIKTREMSTKTNPSKPLFVN

SEQ ID NO: 149739 - protein, 460 aa, Unknown
  Bacterial polypetide isolated from the Sargasso Sea
MDFETIIEPFKIKSVESLPITTPEERKEYLAREHSNVFGLKSQEVTIDLLTDSGTGSMSSEQWASLMRGDESYAGSKSWQRFEEVVRDLTGYKHIIPTHQGRASERILASICVKSGDIIPSNSHFDTTRANFEFAESTPVDLLCKEGLSLLDPSDFKGNVDLEKLEELLKSEDGSKVPFVLMTITNNTGGGQPVSMENLKAVKALCKKYKKMFLLDACRFAENAWFVSQREDSYKGKKVRDIAKEAFRLADGCSISLKKDGFGNIGGLLALNDDQLAEDAKNLLILTEGFPTYGGLAGRDLDALAQGLIEITDENYLQYRARSIAYLGEKAISYGLPIVQPAGGHALYIDAKTFLPDIPPHQYPGQAVVCELYLLGGIRTAELGTFAFGVAGENGENDTPATHELVRLAAPRRTYTQSHFDYVAEVLEKLVENKDKLKGYEITEQSRFLRHFTAKLKPLS

SEQ ID NO: 149740 - protein, 144 aa, Unknown
  Bacterial polypetide isolated from the Sargasso Sea
MRQLNQTGWMHNRLRMIVASFLVKDLHIDWRWGEQYFMSKLIDGDFAANNGGWQWAASTGTDAAPYFRIFNPVTQSERFDPDGVFIKRMLPELADIPKKQIHWPHPLPMWNEYVKPVVDHSKARLKTLELFHTVKKPQDEVDHE

SEQ ID NO: 149741 - protein, 216 aa, Unknown
  Bacterial polypetide isolated from the Sargasso Sea
CLVKAKAYNNDMLDDGDKGIVHWVSEILWREFYRHIIYNFPKVSKNLPFIDYTKNIPWNDDSVALQRWKDGKTGIPIVDAGIREMLATGWMHNRLRMIVAMFLSKNLLINWQEGEKFFMTKLIDGDIASNNGGWQWSASTGTDAAPYFRIMNPETQSIKFDPDGEYIKKWIPELRDCSATDVHMPANPSKYGYPEPIVDLKESRKNAIDVFSAIKS

SEQ ID NO: 149742 - protein, 243 aa, Unknown
  Bacterial polypetide isolated from the Sargasso Sea
MHENEFDIYSYDKSRINQDLWPVGESNVKTMISNFLEKKGSLYKTDRNFPSMKATSMASPYLNTGVVSSKWCLNQSRNFNFDALDEGDKGIVHWVSEILWREFYRHIIFNNPRVSKGKPFQMRYENIPWDNNSEFIEAWKNGRTGIPIVDAGIRQMIETGWMHNRLRMITAMFLSKNLLVDWKIGEEFFMKHLIDGDIASNNGGWQWSASTGTDAAPYFRIMNPETQSLRFDETGEYIRKYVK

SEQ ID NO: 149743 - protein, 212 aa, Unknown
  Bacterial polypetide isolated from the Sargasso Sea
YAAVKDNDPGSKTWLNELIWREFYQMVVYHFPYVKSGAFQKKYQHLKFPGNETLLNAWKNGQTGFPIVDAAMRCLNETGWMHNRLRMIVASFLTKILLVDWKKGERYFAWKLLDYEFASNNGGWQWASGTGCDAAPYFRIFNPTSQSKTYDEHGEFIKKWCPELNLLSSKQIHEPITAKDLPVNFELGKTYPKPIVNYKDQRLKALELYKSV

SEQ ID NO: 149744 - protein, 120 aa, Unknown
  Bacterial polypetide isolated from the Sargasso Sea
LDKGDKGIVHWLSEILWREFYRHIIFNYPRVSKGKPFQIRYENIPWENNPEFIEPWKNGRTGIPIVDAGIRQMIETGWMHNRLRMIVAMFLSKNLLVDWKIGEEFFMKHLIDGDIASNNG

SEQ ID NO: 149745 - protein, 258 aa, Unknown
  Bacterial polypetide isolated from the Sargasso Sea
ISNFLEKKGTLYKTDRNFPSMKATSMASPYLNTGVVSSKWCLNQSRNFNYDALDEGDKGIVHWVSEILWREFYRHIIFNYPRVSKGKPFQMRYENIPWENNPEFIEAWKNGRTGIPIVDAGIRQMIETGWMHNRLRMIVAMFLSKNLLVDWKIGEEFFMKHLIDGDIASNNGGWQWSASTGTDAAPYFRIMNPETQSLRFDETGEYIRRYVKELRDCPNKEVHMPSNPKDLGYVEPIVDLKTSRQKAIDVFGSIKKDN

SEQ ID NO: 149746 - protein, 302 aa, Unknown
  Bacterial polypetide isolated from the Sargasso Sea
MYGHTEYELRERVRDSNVSATFANAGKACFWFDRKAVMPPGSILSKTGGIYQIFTPFKKTWLARLREAGIRCFPKPKALAETKLQLPQWPLMKQGDGSSEAYAVDELHILEQMRQFCRDKASFYQTERDFPALDGTSSLSAYLAIGVVSAQQCISRLQLEAANDWDREKSGAAVWLSELVWRDFYHHILMAFPELIKHKAFQKDTDGIVWPNNQQLFQAWCNGQTGYPIVDAAMRQLNQTGWMHNRLRMIVASFLVKDLHIDWRWGEQYFMSKLIDGDFAANNGGWQWAASTGTDAAPYFRI

SEQ ID NO: 149747 - protein, 292 aa, Unknown
  Bacterial polypetide isolated from the Sargasso Sea
MENAEKIYLDKGYSKNLFPKRKNSKKKFLKDVSKKEDILKHANWQNKFLEHWNPSEKEALEVLKEFLYKNITNYGDQRDIPSVKGTSRLSPYLASGQIHVETIWEECEKLKIKKRGYRKFINELGWREFSYSLINYFPEMLKENLRKEFNNFPWQENKKFLIAWKKGLTGYPIVDAGMRELYETGWMHNRVRMITASFLVKHLRIHWKEGEKHFQNCLLDFNSANNTAGWQWVSGCGADAAPYFRIFNPILQGEKFDKKGEYVKRWVKELKEIPEEFIHRPWEMENKIQNFE

SEQ ID NO: 149748 - protein, 468 aa, Unknown
  Bacterial polypetide isolated from the Sargasso Sea
MRSVCWFRNDLRVEDNPALYNACLTSKSVIGIFIVTQFQWKEHDDAKVKINFWFRSLLKLRDSLEKLNIPLVILETKDYENIAETIFKFTQDNKVDNLYFNNEYPINELRRDRKVFSELKEKGIGVFNYHDQVIHAPGTLKTQSDTNFSVYSPFKRKWFAELKDEQLKLLPIPEKKEASHLKSSDISQYISQSDTSNSHYWQTGEEFIQEKIKSFLSTKGSKYKEDRNFPGIEATSKLSPYINSGIVSSKWCLVKAMENNNGFLDEGDKGIVHWVSEILWREFYKHIIYNFPKVSMGKPFISNTSNIKWNIDESALNRWKKGETGIPIVDAGMREMNETGWMHNRLRMITAMFLSKNLLINWQEGEKYFMENLVDGDIASNNGGWQWSASTGTDAAPYFRIMNPETQSLRFDPKGDYIKFWIPELKDCPISEIHMPSEPEKYGYFKPLVDLKISRQKAIEAFQDLKNL

SEQ ID NO: 149749 - protein, 312 aa, Unknown
  Bacterial polypetide isolated from the Sargasso Sea
IPIPSPVSQINISHQNEFDIYNYDKSEINQDLWPVGETNAQIMISNFLEKKGTLYKTDRNFPSMRATSMASPYLNTGVVSSKWCLNQSRNLNYAVSLAPPLKYNNALDEGDKGIVHWVSEILWREFYRHIIFNYPRVSKGKPFQMRYENIPWENNPVFIEAWKNGRTGIPIVDAGIRQMIETGWMHNRLRMIVAMFLSKNLLVDWKIGEKFFMKHLIDGDIASNNGGWQWSASTGTDAAPYFRIMNPETQSLRFDETGEYIKKYVRELRDCPNKEVHMPSNPKDLGYVEPIVDLKTSRQKAIDVFGSIKKDN

SEQ ID NO: 149750 - protein, 470 aa, Unknown
  Bacterial polypetide isolated from the Sargasso Sea
MKNLVWFRNDLRVYDNPALDAACNANNEVVAVYIVSESQWDEHNDSVNKISFWFRCLVELEKELKKINIPLIILKSDFYKDHPKKLLEFSTENNLDNIFFNIEYPVNERKRDEEVTQTFENQNKGVFSFHDQVIHKPGTLKTKAGGDFSVYSPFKRCWFAELDYAMLEEIPIPSPVSQINISHQNEFDIYNYDKSKINQDLWPVGETNIQIMISNFLEKKGTLYKTDRNFPSMKATSMASPYLNTGIVSSKWCLNQSRNFNYDSLDEGDKGIVHWVSEILWREFYRHIIFNYPRVSKGKPFQMRYENIPWENNPVFIEAWKNGRTGIPIVDAGIRQMIETGWMHNRLRMIVAMFLSKNLLVDWKIGEKFFMKHLIDGDIASNNGGWQWSASTGTDAAPYFRIMNPETQSLRFDETGEYIRKYVKELRDCPNKEVHMPSNPKDLGYVEPIVDLKTSRQKAIDVFGSIKKDN

SEQ ID NO: 149751 - protein, 477 aa, Unknown
  Bacterial polypetide isolated from the Sargasso Sea
MSNTAFSLVWLRNDLRVYDNQALFEACQAGLPVVALFVATPDSWLQHFMAPMKQDFIRRRVQQLQTELAALNIPLLAIEGSHYSALPELMQQLIDAGAEALYGHTEYELRERMRDRKVSATFANAGKACYWFDRKAVMPPGSILSKTGGIYQIFTPFKKTWLTGLREAGVRCFPKPKMMPDIKLRLPELPLMKQGDGSSLAYTVDELQVLEQMRQFCRDKAAFYQAERDFPALDGTSSLSAYLAIGVISAQQCISRLQLEAANDWDREKSGAAVWLSELVWRDFYHHILMAFPELIKHKAFQKDTDGIVWPNNPALFQAWCDGKTGYPIVDAAMRQLNQTGWMHNRLRMIVASFLVKDLHIDWRWGEQYFMSKLIDGDFAANNGGWQWAASTGTDAAPYFRIFNPVTQSERFDPDGVFIKRMLPELAEVPKKQIHWPHPLPMWSDYVKPVADHSKARLKTLELFHTVKKPQDVMDHE

SEQ ID NO: 149752 - protein, 406 aa, Unknown
  Bacterial polypetide isolated from the Sargasso Sea
MTTALFWFRKDLRLKDNIAWAKACEAHRIHPVLVLEPELISNAGSYRRRQFFLNVSALAAEIKSIGGELSVIQGPAKDVLPRYIIENNVDCIYFNADTTPFSRQRDEHIAKDISIPINTSWSGLVHPPETVLTQKGEISKVFTPFYKKWVTLPAPPSIQESRPTFVDVQQNTQDETQDLIPSTSNEGHKAAIERFERFLKVVDDYQESRNFPSEDGTSFLSSDLHFGTIGPREILHRLSPNREGHRQFIRQLAWRDWYSHLLFANQDIPNKAANPSYDSIPWRDDPEEFENWKKGQTGYPIVDAGMRQLSATGWMHNRVRMITASFLVKHLLIDWRKGEKYFRKILIDGDVAQNCGNWQWVAGTGFDAAPYFRVFNPMLQSKKFDPMGRYIRRWVQNWKVYQMPKY

SEQ ID NO: 149753 - protein, 361 aa, Unknown
  Bacterial polypetide isolated from the Sargasso Sea
MSKKSLVWIRDDLRIKDNPALSYATNNHEIVSVLYIYNSYLFDGKREAQKWWLYKSLVSLRKHLLNSNINLEIISGKEINLLKKIKKEQNLSIYWNKVYEPNQEKLEKEFIDHLEKEKINYKFFKGNILLEFQEVKKDDGTPFKVFTPFWKNAEQKYLKKNPSKPLTIKKLKKIEKIFKKTTNEKEILPIKNWYKKFENYWQPSESEALKTSKEFIKNKISKYGDTRDFPNIEGTSKISPYLKHGQIGVETLWRFCNEIKNKGKGYRKYVNELGWREFSHSLINNFPEMLEGNLRKEFDNFPWVVNKKYLQTWKKGMTGYPIVDAGMRELYETGWMHNRLRMIVASFLVKHLRIHWKEGEK

SEQ ID NO: 149754 - protein, 470 aa, Unknown
  Bacterial polypetide isolated from the Sargasso Sea
MRNLVWFRNDLRVYDNPALDAACNANNEVVAVYIVSESQWDEHNDSVNKISFWFRCLVELEKELKKINIPLIILKSDFYKDHPKKLLEFSTENNLDNVFFNIEYPVNERKRDEEVTQTFENQNKGVFSFHDQVIHKPGTLKTKAGGDFSVYSPFKRCWFAELDYAMLEEIPIPSPVSPINISHQNEFDIYNYDKSEINQDLWPVGETNVQIMISNFLEKKGTLYKTDRNFPSMKATSMASPYLNTGIVSSKWCLNQSRNFNYDALDEGDKGIVHWVSEILWREFYRHIIFNYPRVSKGKPFQMRYENIPWENNPEFIEAWKNGKTGIPIVDAGIRQMIETGWMHNRLRMIVAMFLSKNLLVDWKIGEEFFMKHLIDGDIASNNGGWQWSASTGTDAAPYFRIMNPETQSLKFDEQGEYIRKYVKELRDCSNKEVHMPSNPKDLGYVEPIVDLKTSRQKAIDVFGSLKKEN

SEQ ID NO: 149755 - protein, 470 aa, Unknown
  Bacterial polypetide isolated from the Sargasso Sea
MRNLVWFRNDLRVYDNPALDAACNANNEVVAVYIVSESQWDEHNDSVNKISFWFRCLVELEKELKKINIPLIILKSDFYKDHSKKLLEFSTENNLDNIFFNIEYPVNERKRDEEVTQTFENQNKGVFSFHDQVIHKPGTLKTKAGGDFSVYSPFKRCWFAELDYAMLEEIPIPSPVSQINISHQNEFDIHSYDKSKINQDLWPVGETNVQTMISNFLEKKGTLYKTDRNFPSMKATSMASPYLNTGVVSSKWCLNQSRNFNYDALDEGDKGIVHWVSEILWREFYRHIIFNYPRVSKGKPFQMRYENIPWENNPDFIEAWKNGRTGIPIVDAGIRQMIETGWMHNRLRMIVAMFLSKNLLVDWKIGEEFFMKHLIDGDIASNNGGWQWSASTGTDAAPYFRIMNPETQSLRFDETGEYIRKYVKELRDCPNKEVHMPSNPKDLGYVEPIVDLKTSRQKAIDVFGSIKKDN

SEQ ID NO: 149756 - protein, 390 aa, Unknown
  Bacterial polypetide isolated from the Sargasso Sea
MRNLVWFRNDLRVYDNPALDAACNDNNEVVAVYIVSESQWDEHNDSVNKISFWFRCLVELEKELKKINIPLIILKSDFYKDHPKKLLEFSTENNLDNIFFNIEYPVDERKRDEEVTQAFENQNKGAFSFHDQVIHKPGTLKTKAGGDFSVYSPFKRCWFAELDYAMLEEIPIPSPASQINISHQNEFDIYNYDKSKINQDLWPVGETNVKIMISNFLEKKGTLYKTDRNFPSMKATSMASPYLNTGVVSSKWCLNQSRNFNYDALDEGDKGIVHWVSEILWREFYRHIIFNYPRVSKGKPFQMRYENIPWENNPEFIEAWKNGRTGIPIVDAGIRQMIETGWMHNRLRMIVAMFLSKNLLVDWKIGEEFFMKHLIDGDIASNNGGWQWSA

SEQ ID NO: 149757 - protein, 145 aa, Unknown
  Bacterial polypetide isolated from the Sargasso Sea
LDAAMRQLNATGWMHNRLRMITASFLVKDLLIDWRKGEQYFMSQLIDGDLAANNGGWQWAASTGTDAAPYFRIFNPTTQGEKFDRDGEFIRQWVPELRDVPGKAIHDPWSWAEKAQVTLSYPRPIVDHKQARLATLAAYEAARKG

SEQ ID NO: 149758 - protein, 317 aa, Unknown
  Bacterial polypetide isolated from the Sargasso Sea
GRGMPESLNHFRYRLDRGNTEGVHPLVMETETKVIRAEGCARAAEQLKAKGFTPDLICAHPGWGEPLFLKAIWPDTPLLCYQEFFYNEFGFDSNFDPEFQDNRGWQEQAKLTMKNAYLHLTLEQADWNISPTHFQASSFPEHWRRRISVIHDGVDTSKAVPNSAPGPLKLPDGTLLEKGQLIVTFVNRCLEPYRGCHTFIRAIPELQRSNPEARLVIVGQTKGVSYGAACSDGEWKDRFLAEIEGQYDPSRVHFTGTLPYGQFVPLLQLSACHVYLTYPFVMSWSLLEAMACGCAVVGSNTAPVREAIRHGQNGLLV

SEQ ID NO: 149759 - protein, 264 aa, Unknown
  Bacterial polypetide isolated from the Sargasso Sea
MATGGSTNLVLHIPAMAKAAGINLAMEDFEDIAKLIPLMAKIYPNGLADVNHFHAAGGLSFMINELLNEGLLHDDVKNVSGHGMNQYRSEARLIDNDIKFSPGAVNSANQKILRPFKDPFQRTGGLKQVNGNLGSAITKVSAVEPDLRVIKAPVRIFHDQEAIKRAFKSNEFKEDTIFVVRFQGPRANGMPELHSLTPVLSTLQDRGLKVALVTDGRMSGASGKVPSAIHVTPEAANGGPISKLRDGDIVLLDADNGILEVQTE

SEQ ID NO: 149760 - protein, 305 aa, Unknown
  Bacterial polypetide isolated from the Sargasso Sea
MELSLPSRDAIAMATAVGLSHGVYDAAMCLGVCDKIVPGLVIGALSHGHIPMIMVPAGPMSSGLPNAEKTAIRQQFAQGKIGREELLKAESAAYHGPGTCTFYGTANSNQMLMEIMGLHLPGAAFEHPHSDLRNALNVAAANQSVLINRRGTSPRPLGRMLDERSFVNAIVGLHATGGSTNHTLHLPAMAAAAGIELLWDDFAKLSKVVPLLAKIYPNGLADVNHFHAAGGIGFVLRELLEAGLLDATAATVWGNSLADYVVEPRLDSNGLNHISAPKSSLDQDILRSVSAPFSLNGGLVVLSGN

SEQ ID NO: 149761 - protein, 282 aa, Unknown
  Bacterial polypetide isolated from the Sargasso Sea
CLITNVKNTESPKWLKDKLISIGQKPISAIVDVTNYVMFDINRPLHAYDADKIEKGIIVRNSKSGEKFTALDNKNYELDNGMCVISDNKGVLGLGGIIGGTRSGTEFDTKNILLESAYFKPSLTRRTAKKLNLDTDAKFRFERGIDPLSIEDGLNKAALLIKEICGGEISKIDIQKIENFKTKTIKFDPNLFMKISGFKISLNEILKILQDLGFKIKKQKKNLNLIIPSWRPDISQEIDIVEELVRICGYDKIKIIDPVKERIKSTLNQSQKLFHFLQRAIA

SEQ ID NO: 149762 - protein, 277 aa, Unknown
  Bacterial polypetide isolated from the Sargasso Sea
AALLLGICDKIVPGLLIGALRFGHLPAVFVPAGPMPSGLANKDKAAVRQRYAEGKASRDELLAAEMQAYHSPGTCTFYGTANTNQMLMEVMGLHLPGSSFVNPGTPLRDALTAEAARQATRLTPQGGSFTPLGELVDERVLVNAIVALHATGGSTNHTLHMPAIAQAAGIQLTWQDMADLSAVVPTLARVYPNGSADINHFHAAGGVALLVRELLAAGLLHEDVHTVMGRGLNRYTREPFLEDGRLTWREGAAASLDESILRPVARPFSAESGLRVM

SEQ ID NO: 149763 - protein, 273 aa, Unknown
  Bacterial polypetide isolated from the Sargasso Sea
LDTKNILLESAYFKPRSIRNTAKKLNIDTDAKFRFERGIDPLSIEDGLNKAALLIKEICGGEISKVDIQNIETFKTKIIKFDPSLFKKISGYKISVKEMLKILNDLGFKSKKEKNYLKLTIPSWRPDILQEEDIVEELVRISGYDKIKIIDPIKERTKSTLTQSQKLFHFLQRSVASKGYLEAITWSFTDSNYNHYFKGTYKEIKIVNPISSELGVLRNSIFSNLIMYMNKNLDRGFKDLSIFEIGPIFTGSDPGQQNTVVCALSAGKKSRSS

SEQ ID NO: 149764 - protein, 300 aa, Unknown
  Bacterial polypetide isolated from the Sargasso Sea
FGKIKDIKEKKISSNTKQTVKVKINNEKDQACTAFGSCLITNVKNTESPKWLKDKLISIGQKPISAIVDVTNYVMLDINRPLHAYDADKIEKGIIVRNSKSGEKFTALDNKNYELDNGMCVISDNKGVLGLGGIIGGTRSGTEFDTKNILLESAYFKPALTRRTAKKLNLDTDAKFRFERGIDPLSIEDGLNKAALLIKEICGGEISKIDIQKIENFKTKTIKFDPNLFMKISGFKISINEILKILEDLGFKIKKQKKNLNLTVPSWRPDILQEIDIVEELVRICGYDKIKIIDPVKERN

SEQ ID NO: 149765 - protein, 487 aa, Unknown
  Bacterial polypetide isolated from the Sargasso Sea
VTQGRDGMELSLFSRDVIAMSTAVSLSHDVFDGVFCLGVCDKIVPGLLIGALSFGHLPVFFLPAGPMQSGIPNKEKARIRQKFAQGLVSREDLLEAESASYHSAGTCTFYGTANSNQMLMEIMGLHLPGSSFINPYTELRDGLTGNAVETMLKQLTDDKESPCLAEVISEKTIINGLVGLLSTGGSTNHAIHIVAIAKAAGIQVTWKDMSDLSEVVPLLTRIYPNGSADVNHFQAAGGMGFLMRELASAGYLHTDVKTMLGDGLAPYMTEPRLDKDESLIMSDSNGPSKVKWVDCPANSLDEEVLRPVSNPFSKQGGLQLLTGNLGKAVIKVSAVAEEHQVVTAPAKVFNSQGALQDAYTRGELNQDFIAVLKEQGPKAKGMPELHKLTPVMATLQDQGFKVAIVTDGRMSGASGKVPAAIHLAPEAVEGGIIAKIQEGDLVTLDAPNGILKVHVSDDELAKRELEISQPSLTFGTGRELFTGFRNI

SEQ ID NO: 149766 - protein, 153 aa, Unknown
  Bacterial polypetide isolated from the Sargasso Sea
KGANWIKRHFSNHRVHILNFPGDPYPIHIDATFTPIRPGLVLNNSSRQLPEEQKKIFYNNDWEIVDAAQPAHNQPPPLCYSSVWLSMNVLVVDPKTVCVEESEVYQLEQLDKLGMEVIPVPFRDAYPFGGALHCATTDVYREGSCEDYFPKQN

SEQ ID NO: 149767 - protein, 279 aa, Unknown
  Bacterial polypetide isolated from the Sargasso Sea
MIPTNFKKLKILNQEYDVADISNITNIENLPFSHRILIENIIRQKLLGRNNNADDQVKSIIEGKIGTAINFSPNRILSHDILGKVMLVDFLAYREALENKGISQDLVQPDVPVDVVIDHSLQVDYFGSDEAKIKNLKREYERNSERFSFLRWCSKNLKKVNVIPPGVGICHQVNIEYLSKVVWREQKQDLNLIHPDTCIGTDSHTPMVNAIGVLGWGVGGVEAEISMLGKTIPMTVPEVVGVNLNNNLNEGITSTDLVLHITKLLRANKVVGSFIEFFG

SEQ ID NO: 149768 - protein, 426 aa, Unknown
  Bacterial polypetide isolated from the Sargasso Sea
IPNKEKARVRQLYAEGKVGHDELLDSESASYHSAGTCTFYGTANSNQLVVEVMGLHLPGSSFVNPGTALRDELTKAAARQVTRLTDLGTDYLPISKIVDVKAVVNGIVGLLATGGSTNHTMHLIAVARSAGFIVNWDDFADLSHATPLITRIYPNGQADINHFQQAGGMAYLIRTLLDNGLLHEDVNTVAGPGLRRYTQTPVLQDGKLVWVDGPTESSDLTVLADAAKPFKDHGGLQVLSGNVGRGVIKTSALREGTEIVQAPAVVFSSQHELDAAFKAGELNKDCVVVVRFQGPRACGMPELHKLTPPLGVLQDRGFHVALVTDGRMSGASGKVPAAIHVTPEAVDGGVIAKIQTGDMMLVDGINGVLKVLVSDEELAKRQAATRDMSDSHWGMGREMFGGMRMVITGAEQGACSLFNTEDQYHG

SEQ ID NO: 149769 - protein, 241 aa, Unknown
  Bacterial polypetide isolated from the Sargasso Sea
MRKSLLAAALLLCPAAFAATPHWEYSGEAGPAQWARLTPEFGQCAGSNQSPVNLDGLVEAELAPLQFHYLAGGRSVTNNGHTVQVDYAPGSSLELDGMRFELKQFHFHAPSENLIKGHSYPLEGHLVHANAKGELAVVAVMFEPGQANAALSQAWQVLPAKAGESHAFKEPISAEQLLPAKRDYYRFSGSLTTPPCSEGVRWLVMKQPVQVSQAQIDAFKAVMHHPNNRPVQPLHGRLVLQ

SEQ ID NO: 149770 - protein, 520 aa, Unknown
  Bacterial polypetide isolated from the Sargasso Sea
MKKMLLIICLTISTTVFAQTSSLVIGGVLDLTVPEGGSSGKALQLVAIDSIADLSVYAVGVANNGGGTDGVEANLPAVALAPGESFWFLRDTIAYRNYFGDVFGQYNVNYAIDGDVSQNGDDAIELFMISGGVETVVDLYGDPATDGSGETWEYMDAWAYRIDRTPSATFDITQWTIATPNCSDGSTTNNSSDCPYPIGVVRFTLNTSTAYGFTDSSTLVIRGSFNGWAGNDWEMENVGGDYWTYQTLDLDDTVTHEFKYVMVGESGDTWESTSNRTLTFGADVPDTALAMDFWQNGTTPPYTPTDSVDVWFRVSTAGIPDYDDCDTMYIAGTMNGWSGQPLNDENCTYWSGQYSFGVGDTIEYKFQNGLGGWESTGNRVVVVNQDTTLQWVYFNDTPPAEGPNGMIVHFTLNTSTAPGFTDSTNTIVIRGSLNGWDGVEWEMENVGGDYWTYTTDTLAANTDVNAEYKYVMIDALDNVNWESTANREFAMANSEIELFVDYWESGVTPPYTPTDSVDVW

SEQ ID NO: 149771 - protein, 46 aa, Unknown
  Bacterial polypetide isolated from the Sargasso Sea
ISNIYAREEFRHHSFFSDIATGSIVGFGLDGYEFALNKIMRGKDGS

SEQ ID NO: 149772 - protein, 117 aa, Unknown
  Bacterial polypetide isolated from the Sargasso Sea
EEIEKKLGLMASESGHELICYQSNAEHDLVEQIHLAKKENVKCIVFNPGAFTHSSIAIRDALAGVEIPFIEVHISNIYSREDFRQKSFLSDIAKGVISGLGIEGYELALDSGIKKYS

SEQ ID NO: 149773 - protein, 88 aa, Unknown
  Bacterial polypetide isolated from the Sargasso Sea
IIDFLHLNRGKVDYCILNAGALTHYSYALRDAIVGTQIPTVEVHLSNIHKRENFRKSSVIKNVCIGQFFGEGKQSYINGIKHILEIKK

SEQ ID NO: 149774 - protein, 43 aa, Unknown
  Bacterial polypetide isolated from the Sargasso Sea
PRRFRRHSYLSDIAKGVICGLGAKGYHYALESAVSSLSTIPSN

SEQ ID NO: 149775 - protein, 136 aa, Unknown
  Bacterial polypetide isolated from the Sargasso Sea
NLNLLGIREPSIYGADTLGDIENWINDELRNQNIKLQWYQSNHEGKILDRLHRAMNDKSDGIIINPGAYTHYSYAIRDAISAISIPTIEVHLSDIKSREKFRQTSVIEDACLEQISGLGKNGYLEAVYALEKYINR

SEQ ID NO: 149776 - protein, 99 aa, Unknown
  Bacterial polypetide isolated from the Sargasso Sea
DLTFFQSNNEGEIVDCIQDSMKNANGIIINAGGLSHTSVAILDALLAIKAPKIEVHISNLFIREDFRHHSFISKGVNGIICGFGANGYLLAVDGIVNLL

SEQ ID NO: 149777 - protein, 36 aa, Unknown
  Bacterial polypetide isolated from the Sargasso Sea
MPKILILNGPNLNFLGTREPEIYGKFSLSEVEEICK

SEQ ID NO: 149778 - protein, 97 aa, Unknown
  Bacterial polypetide isolated from the Sargasso Sea
SNVEGEIVNFIQETRKVHQGIIINAGGYTHTSVAILDALLAVKKPTIELHITNIYKREDFRHKSLISKAADGIICGLGADGYIMALNGIKKIINNEN

SEQ ID NO: 149779 - protein, 71 aa, Unknown
  Bacterial polypetide isolated from the Sargasso Sea
AFTHTSVAIRDALEIYKKKKIEVHISNIYKREEFRQKSLISDVVNGGIFGLGSEGYILAIIAMHKMLKNEN

SEQ ID NO: 149780 - protein, 52 aa, Unknown
  Bacterial polypetide isolated from the Sargasso Sea
FHVHKREEFRHHSYFSDIAIGALSGLGVKGYLLAAEFAVDYIEQKGNIKSGI

SEQ ID NO: 149781 - protein, 59 aa, Unknown
  Bacterial polypetide isolated from the Sargasso Sea
MSKKKVLVISGPNLNLLGTREKNIYGDVSLKEIYFKLENISVNKNLLVECKQSNSESEI

SEQ ID NO: 149782 - protein, 58 aa, Unknown
  Bacterial polypetide isolated from the Sargasso Sea
MGVEIPYVELHLSNTHAREPFRHRSYLADRAVGVVSGFGAMSYSLALQGLIDHLRQNG

SEQ ID NO: 149783 - protein, 52 aa, Unknown
  Bacterial polypetide isolated from the Sargasso Sea
MKNDILIINGPNLNMLGTREPDVYGLETLEQIEAKCISWGEQYSLHINFSPK

SEQ ID NO: 149784 - protein, 74 aa, Unknown
  Bacterial polypetide isolated from the Sargasso Sea
INPGALSHYSIAIRDAISSIHNNVNVVEVHISNIFKREKFRHHSVISEVCSSSVIGFGTEGYKLALNKFITFTE

SEQ ID NO: 149785 - protein, 144 aa, Unknown
  Bacterial polypetide isolated from the Sargasso Sea
MDNKILIINGPNLEMLGKRKESVYGNFTLKDLENELLKESETLGCNLDFFQSNIEGEIINKINGLDESYVGIIINPGGLTHTSVSLHDSLEIKTIFKIEVHLSNIYSREDFRRKSLIAPACDCSIIGMGKDGFIYALRYLIKNI

SEQ ID NO: 149786 - protein, 128 aa, Unknown
  Bacterial polypetide isolated from the Sargasso Sea
REPEIYGSKNLDDIQKELTIIANELGHKLLHFQSNSESEIVEWIHSNADDAKFLIINPGAFTHTSISIRDAILGTNISFIEIHISNIFSREEFRKESYFSDIAEGVISGLGYTGYELALRAALEMLKK

SEQ ID NO: 149787 - protein, 60 aa, Unknown
  Bacterial polypetide isolated from the Sargasso Sea
MKILVIHGPNLNLLGLREPDVYGSTTMEEINQGLLDVANSNDIEIEAFQSNAEHEIVTKL

SEQ ID NO: 149788 - protein, 142 aa, Unknown
  Bacterial polypetide isolated from the Sargasso Sea
MTILILQGPNLNLLGKKSTEIGDSLTLNKLNRAIRLHIRDKDIKLKIVQTHKEYIALNFIQRNRNQAKGLIVIPTSWAKYNQTILETINLTGLQTAVIYFNQSYSFGTSEDESILKGDNIKNFTGHPIDVTISAIDYIANIK

SEQ ID NO: 149789 - protein, 103 aa, Unknown
  Bacterial polypetide isolated from the Sargasso Sea
KYIQVNLIYFQSNIEGELINQIQNAQVDGIILNAGGYTHTSVALRDCISAVDTPVIEVHLSNIASRESFRHESLITPVSKGCIMGFGLESYELAMYYFLNRQV

SEQ ID NO: 149790 - protein, 91 aa, Unknown
  Bacterial polypetide isolated from the Sargasso Sea
EHEIVEKIHASKEDNVSKILMNPGAFTHTSISIRDALIGVGIPFYEIHISNIFAREEFRHKSYFSDIAEGVICGMGTKGYEFALKKAINSN

SEQ ID NO: 149791 - protein, 112 aa, Unknown
  Bacterial polypetide isolated from the Sargasso Sea
ERAGASLTCLQSNSEQEIIEAIHQARADGTQFIIINPAAFTHTSVALRDALAGVDIPCIEVHISNVYAREPFRQHSYISDIAEAVISGLGSFGYDCALAAVLQSLDTHSTTH

SEQ ID NO: 149792 - protein, 89 aa, Unknown
  Bacterial polypetide isolated from the Sargasso Sea
FIGRLHEARDDGTEFMIVNFGGFTHTSVAIRDAIIASEIPFIEVHLSNLFSREEYRQFSFFSDIAVGCIVGLGAQGYELALEATFKRLE

SEQ ID NO: 149793 - protein, 76 aa, Unknown
  Bacterial polypetide isolated from the Sargasso Sea
MINNSILVISGPNLNLLGNREEKYYGNISLDEIHKKIKKIGNTNNIIIECKQSNSESEIIGWIQNAKNNFKAIIIN

SEQ ID NO: 149794 - protein, 119 aa, Unknown
  Bacterial polypetide isolated from the Sargasso Sea
DIEDMCKNKCDKLNLSCVFYQSNIEGEIINKIHDAIDQNMKAIIINAAAYTHTSIAILDALKMFKGIVIEVHITNIHAREEFRQHSFISKVAQGIIAGFGEESYLMAIDYLYKLNNKKV

SEQ ID NO: 149795 - protein, 92 aa, Unknown
  Bacterial polypetide isolated from the Sargasso Sea
EGELVNIIQNSRKKFDGIIINAAAFTHTSVAIRDALDIFKKPIIELHISNIYKREEFRQKSLISDIVTGGIFGLGADGYILAIISMQKLLQE

SEQ ID NO: 149796 - protein, 154 aa, Unknown
  Bacterial polypetide isolated from the Sargasso Sea
MINKSILVISGPNLNLLGNREEKYYGNISLDDIYEKIKKIALSNDITIECKQSNSESEIIKWIQNAKNSFKAIIINAGGYTHTSVSIRDSLKLFDGLIIEIHMSNVHSREDFRHRSLISGVSSGIIIGFGEQSYYLAVNAAVDKIKGGKNYGQK

SEQ ID NO: 149797 - protein, 89 aa, Unknown
  Bacterial polypetide isolated from the Sargasso Sea
MRILLINGPNLNMLGRREQALYGSDTLDNVVKNLKNIAVSKNIELISFQSNDESEIVSFIQQNADSSQGIIINAGAMTHYALSLKDALL

SEQ ID NO: 149798 - protein, 131 aa, Unknown
  Bacterial polypetide isolated from the Sargasso Sea
LGEREQSQYGTITYEELKDICLKKSNELDIKLEFVQSNIEGEIVTLIQKAKENCDGIIINAAAFTHTSVAIRDALQIFNKIKIEVHISNIYKREEFRKKSLISDVVDGGIFGLGSNGYILAIMAMHKMIKK

SEQ ID NO: 149799 - protein, 71 aa, Unknown
  Bacterial polypetide isolated from the Sargasso Sea
INPGAFTHTSISIRDALIGVGIPFYEIHISNIFAREEFRHKSYFSDIAEGVVCGMGTKGYEFALEKAINSN

SEQ ID NO: 149800 - protein, 68 aa, Unknown
  Bacterial polypetide isolated from the Sargasso Sea
MSKNRIQFIDGPNLNMLGEREPEIYGSMTLDEVHKNVKDYITQNYKEIDVNFFQSNSEGDIVDCIQKS

SEQ ID NO: 149801 - protein, 141 aa, Unknown
  Bacterial polypetide isolated from the Sargasso Sea
MKILVINGVNLNMLGQRETDMYGDLSLSDLENNIKSINFDADIDFFQSNSEEEIIQKIHAQKQDKYDFGVFNFGAHTHTNIAIRDAILSVKFKFYEVHISNVFAREEFRHVSFFSDIAEGCIVGLGLDGYEYAIRKILKEE

SEQ ID NO: 149802 - protein, 94 aa, Unknown
  Bacterial polypetide isolated from the Sargasso Sea
NSESEIVDWILENADSALFLIINPGAFTHTSISIRDAILGTNISFIEVHISNIFSREEFRKESYFSDIAEGVISGLGFEGYELALKAVLEIIKK

SEQ ID NO: 149803 - protein, 144 aa, Unknown; identical to SEQ ID NO: 149785
  Bacterial polypetide isolated from the Sargasso Sea

SEQ ID NO: 149804 - protein, 101 aa, Unknown
  Bacterial polypetide isolated from the Sargasso Sea
NSESELVDWIQAAKGTVDGIIINAGAYSHTSIAILDALTAVALPIVEVHLSNLSKREMFRHHSYVTSAAVGLITGFGAKGYPLAVEAMSSILKANTQDMSN

SEQ ID NO: 149805 - protein, 140 aa, Unknown
  Bacterial polypetide isolated from the Sargasso Sea
MNILILQGPNLNLLGLKSSNKKSRLTLDKLNKQIRNFSKNSEINLRFLQTHKQFQAINFLQRNRNWANGILFIPTSWARDNYTILETINLIQIKTSVIYFDDDFSFGTSIEDSIFIDDKIESFTGTPIEACIQGIEYLAK

SEQ ID NO: 149806 - protein, 67 aa, Unknown
  Bacterial polypetide isolated from the Sargasso Sea
MRVLFLNGPNLNMLGEREESLYGQLTLNEINDLIQKKADNMGIKVDFFQSNEEGKLVSRIQESSGKV

SEQ ID NO: 149807 - protein, 140 aa, Unknown
  Bacterial polypetide isolated from the Sargasso Sea
MNILILQGPNLNLLGLRSKTISKRLTLDKLNKGIKNHAVSKDVKLKVNQTHKQFQAVNFLQRNRNWANGLLFIPTSWAHAEYTLFETIKIIDLPTSIVYFNEPFSLGGKEDSSILVGNNMKSFTGEPLEVCERGLDHLII

SEQ ID NO: 149808 - protein, 142 aa, Unknown
  Bacterial polypetide isolated from the Sargasso Sea
MTILILQGPNLNLLGKKSAEIGDSITLNKLNRAIRLHVRNTKIKLKIIQTHKEYIALNFIQRNRNQAKGLIVTPTSWAKYNQTILETINLSGLQTAAIYFDPPFSFGTSEDQSILKSDTIKAFTGHPIDITISAIDYIANIK

SEQ ID NO: 149809 - protein, 120 aa, Unknown
  Bacterial polypetide isolated from the Sargasso Sea
MIYSSGLNEVAKEINVELSHQQFNSEAELIEEIHLAKKDKVDFIIFNPGAFTHTSIALRDALLGVSIPFIEIHISNVFAREDFRKKSYLSDIAVGVISGHGIFGYELALMSAYNIINKGK

SEQ ID NO: 149810 - protein, 638 aa, Unknown
  Bacterial polypetide isolated from the Sargasso Sea
QNITIRGIGQFNGNPGVSVSTDGIFQSRAHSSQLGEMDLERVEVLRGPQGTLYGRNSIGGVVNLITKNPTQDMDGYVKLGYGEYDTTTAEAAFGGGISENTSFRLVVHGTEQGEGFYDCLNVGCGEQGYTDKQAFRLKIKSDLTDTVSADLMVASVETEGTPDPYGWLTDNRELAAAFGFPQIAAEPISLKPHEIYQTPTSESVNGTNMTDREYDVTSLTLKIDTELGTLTSITAKQSFDDQFNLDRDGSAGVYLDTFDISETETFTQEINLNIERDTMSLVFGLFYMDDETSRHTHFDNPQPILGFPVPSMFDFKHDKMDTESEAYFADGTFDLSDTTRLSLGVRRTTDEFTSKQDNFISILMPMPVIAAQTCDREVVTEYSSTTSRAVIQHDLSSDSNVYASLSEGYKAGGYATYECTEPYDPEEVTSLEFGFKGSLSENTSLNASLFRYDYTDFQVLQVVGIQTVTRNAGDATVNGLEIEALSNVNDSLSINYGLTLLDATYGEFLNTNGIQPQLGEQQLDGNYLTNAPKVSINLGLNYTSPMASGASLTYRANASYKSRIYFSEFNEYSQDAYTIVDLNLIWESADETMRSRFFIKNATDEDYISGYLSSATGGGRFGQWGYPRTAGIEIQRNF

SEQ ID NO: 149811 - protein, 77 aa, Unknown
  Bacterial polypetide isolated from the Sargasso Sea
VDFIVINPAAFTHTSIAIRDALLAVQSKFVEVHLSNIFSREDFRQNSYVSSISLGVISGFGHEGYLMALDALSSLNK

SEQ ID NO: 149812 - protein, 146 aa, Unknown
  Bacterial polypetide isolated from the Sargasso Sea
MSLNILFLNGPNINLLGQREQSQYGSITYEELKKKCEEKCKDLNLKIEFIQSNVEGEIVSIIQSANEKFDGIIINAAAFTHTSVAIRDALEIFKKKKIEVHISNIYKREEFRQKSLISDVVNGGIFGLGSEGYILAIIAMHKILKK

SEQ ID NO: 149813 - protein, 136 aa, Unknown
  Bacterial polypetide isolated from the Sargasso Sea
NGPNLEMLGKRKESVYENFTLKDLENELLKESESLGCSLDFYQSNIEGEIINKINGLDELYVGIIINPGGLTHTSVSLHDSLEIKSIMKIEVHLSNIYSREDFRRKSLIAPACDCSIIGMGKDGFIYALRYLTKKL

SEQ ID NO: 149814 - protein, 181 aa, Unknown
  Bacterial polypetide isolated from the Sargasso Sea
MNKKTLISSFDDDDYLSKTLKESLAEVFTDESPEGSIIIINGPNLNFLGIREIEKYGSISYEELIKKVKRRTKGNVEFFQSNSEGEIVKLIQELVKIENDKPDIVIIGLVINPGGLTHTSVTLRDALSILFMPIVEVHITDITKRENYRKTNLISDLCVKSIIGKGIDGYIEGVDFLNEKN

SEQ ID NO: 149815 - protein, 132 aa, Unknown
  Bacterial polypetide isolated from the Sargasso Sea
ALERKTNIGSTSLTDIQKKCEDYSKKIGLQVDFKQSNVEGEIVNFIQNTKDNHHGIIINAGGYTHTSVAILDALLAVKKPTIELHITNIYKREDFRHKSLISKAADGIICGLGADGYIMALDGIKKIIDNEN

SEQ ID NO: 149816 - protein, 145 aa, Unknown
  Bacterial polypetide isolated from the Sargasso Sea
MKIQIINGPNINLLGTREPHIYGSESLEDIKKWFEGEIDTTSHLVHWFQSNHEGEIIDQIHKTINAFNGIIINAGALTHYSYAIRDAIKSVNIPTVEVHLSDITSREDFRKISVISDVCINQIKGIGKNGYLKAFKLLMEHTNQE

SEQ ID NO: 149817 - protein, 81 aa, Unknown
  Bacterial polypetide isolated from the Sargasso Sea
KDNQVKCIIINPGALTHSSIALRDALTGVNIPFIEVHISNIYAREDFRQKSYLSDIAEGVISGLGVEGYELALVKAMKKFN

SEQ ID NO: 149818 - protein, 152 aa, Unknown
  Bacterial polypetide isolated from the Sargasso Sea
MINNSILVISGPNLNLLGNREEKYYGNISLDEIHEKIKQIGNSNNFTIECKQSNSESEIIELIQNAKNNFKAIVINAGGYTHTSVSIRDALKLFDELVIEIHMSNIHSREDFRHKSMISGVSSGIIIGFGDQSYYLAVNAAINKISGVNNYG

SEQ ID NO: 149819 - protein, 142 aa, Unknown
  Bacterial polypetide isolated from the Sargasso Sea
MRKIVIINGPNLNFLGKREISKYGTTTYQELVSELEEHAKKTNDLVFFQSNHEGEICDYIQKIINEKIDGVIVNPGAYTHTSVSLRDSLLLLSVPIIEVHISDIKERESFRKTNLINDICEKSFIGHGVNGYKMGIDYLNEK

SEQ ID NO: 149820 - protein, 73 aa, Unknown
  Bacterial polypetide isolated from the Sargasso Sea
AAFTHTSVAIRDALEIFKKPIIEVHISNIYKREEFRKKSLISDVVTGGIFGLNADGYILAIISMQKLIQNENR

SEQ ID NO: 149821 - protein, 73 aa, Unknown
  Bacterial polypetide isolated from the Sargasso Sea
ILMNPGAFTHTSISIRDALIGVGIPFYEIHISNIFAREEFRHKSYFSDIAEGVVCGMGTKGYEFALEKAINSN

SEQ ID NO: 149822 - protein, 47 aa, Unknown
  Bacterial polypetide isolated from the Sargasso Sea
EVHISNIYAREEFRKKSYLSDIAEGVISGLGVQGYELALEVAIKKFN

SEQ ID NO: 149823 - protein, 138 aa, Unknown
  Bacterial polypetide isolated from the Sargasso Sea
MNGPNLNLLGDREPDIYGNVSLKDIEKSLSNYGKKNNSEIYFKQTNHEGELIEFVHEASKKANAIIINPAGYSHTSVALLDALLTVKIPIIEVHISNIFKREDFRHNSYVSKAAIGVISGLGIEGYLYALKFLLDELK

SEQ ID NO: 149824 - protein, 77 aa, Unknown
  Bacterial polypetide isolated from the Sargasso Sea
MKIQIINGPNLNLLGVREKDIYGSLSFDEYFLKLKTKFKNIELFHYQSNIEGELINKIQDVGFDFDGIILNAAAYTH

SEQ ID NO: 149825 - protein, 148 aa, Unknown
  Bacterial polypetide isolated from the Sargasso Sea
MKKIIILNGPNLNLLGEREKNQYGTFTLNDIQKDCKIFAKKNDLNITFFQSNIEGEIVEKIQNSRNDQNGLIINAGGYTHTSVAIHDALKIIKIPIIELHISNIYNREDFRHKSLISSVANGVICGFGAKGYLMAIDAMKKYINDENR

SEQ ID NO: 149826 - protein, 112 aa, Unknown
  Bacterial polypetide isolated from the Sargasso Sea
VHEIDCKSFQSNSEGEIIDWLHNNCSADFLLLNPGALSHTSVGLRDAVLGVKIPFIEIHLSNVHKREEFRHHSYFSDIAIGALTGLGVKGYLLAAEFAVDYIEQKVKINSDI

SEQ ID NO: 149827 - protein, 48 aa, Unknown
  Bacterial polypetide isolated from the Sargasso Sea
MKNILLINGPNLNLLGNREPEIYGSKSLDDIENDLSVIADESGYQLLS

SEQ ID NO: 149828 - protein, 90 aa, Unknown
  Bacterial polypetide isolated from the Sargasso Sea
MSNKIIIINGPNLNLLGEREQSQYGSMNFEDLKDNCLKKAKEIGINLEFVQSNIEGELVNLIQDARENYDGMIINAAGFTHTSVAIRDAL

SEQ ID NO: 149829 - protein, 114 aa, Unknown
  Bacterial polypetide isolated from the Sargasso Sea
MKKIIIINGPNLNLLGQREDDIYGKDTLDEIKNKCEKKGKEQKLEVNFYQSNNEGEIINKIHEASSLYDGIIINPAAFTHSSIAILDSLRAINKPKIEIHLSNIYSREEYRKKS

SEQ ID NO: 149830 - protein, 149 aa, Unknown
  Bacterial polypetide isolated from the Sargasso Sea
MKNKVIVINGPNLNLLGEREKDKYGKISLQDVENNCKEFSKKNEIQIEFFQSNIEGEIVNAIQNSRDKQDGLIINAGGYTHTSVAIHDALKVLKIPIIELHITNIYNREEFRHKSLVSKVAKGIVCGFGTNGYIMALDAIKKIIEDENR

SEQ ID NO: 149831 - protein, 145 aa, Unknown
  Bacterial polypetide isolated from the Sargasso Sea
MKKILIINGPNLNLLGNREDDIYGKDSLDKIKSDCEKKGIEKKLEIIFFQSNNEGEIIDKIHEVNDKFDGLIINPAAFTHSSIAILDSLRAINKPKIEIHLSNIYSREEYRKKSITSEGVHGLICGFGGNSYLLGIEAICKLIYK

SEQ ID NO: 149832 - protein, 129 aa, Unknown
  Bacterial polypetide isolated from the Sargasso Sea
MSKASKIYVLNGPNLNLLGDREPDIYGNVSLKDIEKSLSNYGKENNSEIYFKQTNHEGELIEFVHEASKKANAIIINPAGYSHTSVALLDALLTVKIPIIEVHISNIFKREDFRHNSYVSKAAIGVISG

SEQ ID NO: 149833 - protein, 87 aa, Unknown
  Bacterial polypetide isolated from the Sargasso Sea
MNNKIIIINGPNLNLLGEREQSQYGSTTFEELKEICLNKSKELGLVADFSQSNIEGEIVNLIQNSRKNFDGIIINAAAFTHTSVAIR

SEQ ID NO: 149834 - protein, 147 aa, Unknown
  Bacterial polypetide isolated from the Sargasso Sea
MSKLIIINGPNLNLLGEREQTQYGSKDYKFLEEICLNRAKDLKINIEIKQSNVEGDIVNIIQDARKTHDGIIINAAGYSHTSVAIRDALSIFKKPIIELHISNIYKREEFRHKSLISSVVTGIICGLGINGYILAINSMHEILNNEN

SEQ ID NO: 149835 - protein, 145 aa, Unknown
  Bacterial polypetide isolated from the Sargasso Sea
MKKILIINGPNLNMLGKREKKFYGNSTLEDIKSLCENVCKKNNLKCDFFQSNNEGEIIDKIHSVEKGYDGIIINPAAYTHTSVAILDALKVNTKPKIEIHISNIYSREEYRKKSITSEAVNGLICGFGENSYALGIEAISKLIYK

SEQ ID NO: 149836 - protein, 51 aa, Unknown
  Bacterial polypetide isolated from the Sargasso Sea
MKILIINGPNLNLLGNREKDIYGENTLHDIQNLCDNECKKLIANVIFFKAT

SEQ ID NO: 149837 - protein, 145 aa, Unknown
  Bacterial polypetide isolated from the Sargasso Sea
MKKILIINGPNLNLLGNREDDIYGKDSLDKIKSDCEKKGIEKKLEIIFFQSNNEGEIIDKIHEVNDKFDGLIINPAALTHSSIAILDSLRAINKPKIEIHLSNIYSREEYRKKSITSEGVHGLICGFGGNSYILGIEAICKLIYN

SEQ ID NO: 149838 - protein, 147 aa, Unknown
  Bacterial polypetide isolated from the Sargasso Sea
MSKLIIINGPNLNLLGEREQTQYGSKDYKYLEEICLNRAKDLNIDIEMKQSNVEGDIVNIVQDARKTHDGIIINAAGYSHTSVAIRDALSIFKKPIIELHISNIYKREDFRHKSLISAVVTGIICGLGINGYILAINSMHEILKNEN

SEQ ID NO: 149839 - protein, 103 aa, Unknown
  Bacterial polypetide isolated from the Sargasso Sea
MNNKIIIINGPNLNLLGEREQSQYGSITFEKLKDICLDKSNELGLTLEFFQSNVEGEIVNLIQDSRETFDGIIINAAAFTHTSVAIRDALSIFKKPNNRVTYF

SEQ ID NO: 149840 - protein, 61 aa, Unknown
  Bacterial polypetide isolated from the Sargasso Sea
MKKILIINGPNLNLLGNREKQFYGDTTLERLENLCSNKCKENNLEMEFVQSNHEGELIEKI

SEQ ID NO: 149841 - protein, 149 aa, Unknown
  Bacterial polypetide isolated from the Sargasso Sea
MTSNIKIINGPNLNLLGEREKEEYGVSTLSEIKEQCEKFAQNNDQKLTFFQSNIEGEIVDEIQKCRKNCNGLIINAGGYTHTSVAIHDALKIIKIPIIELHITNIYNRESFRHKSLISSVAKGIICGFGVNGYTMSLTALKNLINNENK

SEQ ID NO: 149842 - protein, 69 aa, Unknown
  Bacterial polypetide isolated from the Sargasso Sea
MVLHGPNLNLLGTREPEIYGSETLDEINHRLQTEAERAGASLTCLQSNSEQEMIEAIHQARADGTQFII

SEQ ID NO: 149843 - protein, 147 aa, Unknown
  Bacterial polypetide isolated from the Sargasso Sea
MKKKLIQFIDGPNLNMLGEREPEIYGSMTLDEVHKVVKDHITQNYKNIDINFFQSNSEGDIVDCIQKSKNTASGLIINGGGFSHTSVAILDALLTIEIPKIEIHLSNLFRREDFRHHSYISKGVHGVICGFGPNSYVLAVEGMVKLI

SEQ ID NO: 149844 - protein, 148 aa, Unknown
  Bacterial polypetide isolated from the Sargasso Sea
MNNKIIIINGPNLNLLGEREQSQYGSLTFEKIKDNCIKKCEELDLVVDFTQSNIEGELVNIIQGARKKFDAMIINAAGFTHTSVAIRDALDLFKKPIIELHISNIYKREQFRQKSLISDVVTGGIFGLGTDGYILAIIAMQKILKNEN

SEQ ID NO: 149845 - protein, 44 aa, Unknown
  Bacterial polypetide isolated from the Sargasso Sea
MNILLINGPNLNLLGTREPEIYGNKTLSDIEKRFTKVAKRKNIN

SEQ ID NO: 149846 - protein, 147 aa, Unknown
  Bacterial polypetide isolated from the Sargasso Sea
MSKKFIQFVDGPNLNMLGEREPEIYGSMTLDEVHKTVKNYVAQNYKEIDVNFFQSNSEGDIVDCIQKSKNTASGLIINGGGFSHTSVAILDALLTIEIPKIEIHLSNLFRREDFRHHSYISKGVHGVICGFGPNSYVLAVEGMVKLI

SEQ ID NO: 149847 - protein, 145 aa, Unknown
  Bacterial polypetide isolated from the Sargasso Sea
ILFINGPNLNLLGEREQSQYGKITYEHLKDLCIKKSRELDIKIEFVQSNIEGEIVTWIQEAKDKQDGIIINAAGFTHTSVAIRDALQIFNKPKIELHISNIYKREEFRKKSLISDVVSGGIFGLGSNGYILAIIAVHKMLVDENK

SEQ ID NO: 149848 - protein, 148 aa, Unknown
  Bacterial polypetide isolated from the Sargasso Sea
MKNNIIVINGPNLNLLGEREQSQYGSIKYEELKNKSLNYSKGLGINVYFTQSNIEGEIVTTIQEARKKYDGLIINAAGFTHTSVAIRDALTIFKKPSIELHISNIYKREEFRQKSMISGVVTAVICGLGANGYILAINAMQELLKNGN

SEQ ID NO: 149849 - protein, 57 aa, Unknown
  Bacterial polypetide isolated from the Sargasso Sea
MTNKVIIINGPNLNLLGEREQSQYGSDTFEQLKEKCLTKSKEIGLEVNFTQSNLEGE

SEQ ID NO: 149850 - protein, 149 aa, Unknown
  Bacterial polypetide isolated from the Sargasso Sea
MNNKIIIINGPNLNLLGEREQSQYGSTTFDQLKENCSKKAQEIGLDIEFAQSNVEGELVNIIQDARKKFDGMIINAAAFTHTSVAIRDALDLFKKPIIELHLSNIYKREEFRHKSLISGVVTGGIFGLGAEGYILAIISLQKTLQNENR

SEQ ID NO: 149851 - protein, 63 aa, Unknown
  Bacterial polypetide isolated from the Sargasso Sea
MTNKIIIINGPNLNLLGEREQSQYGSDTFDQLKEKCLKKSKEIGLEVNFTQSNLEGEIVNIIQ

SEQ ID NO: 149852 - protein, 121 aa, Unknown
  Bacterial polypetide isolated from the Sargasso Sea
MNNKIIIINGPNLNLLGEREQSQYGSTSFEQLKENCLKKGKEIGLEVYFAQSNIEGELVSIIQEARKNFDGIIINAAGFTHTSVAIRDALDLFKKPIIELHISNIYKREEFRHKSLISGVV

SEQ ID NO: 149853 - protein, 107 aa, Unknown
  Bacterial polypetide isolated from the Sargasso Sea
MKKIIILNGPNLNLLGEREKNQYGSFTLQDLDKNCKDFAEKNAIKLTFYQSNLEGELVEKIQDARKNQDGLIINAGGYTHTSVAIHDALKIIKIPIIELHITNIYNR

SEQ ID NO: 149854 - protein, 148 aa, Unknown
  Bacterial polypetide isolated from the Sargasso Sea
MHKVLIINGPNLNLLGEREKDKYGKFSLKDIEKSCHSFSKNNNINLTFFQSNIEGEIVDEIQKSRNEQDCLIINAGGYTHTSVAIHDALKILKIPIVELHITNIYNREDFRHKSLISKVATSIICGFGILGYTLSLEASINLIKKNEN

SEQ ID NO: 149855 - protein, 147 aa, Unknown
  Bacterial polypetide isolated from the Sargasso Sea
MIKLIIINGPNLNLLGEREQTQYGSKDYKYLEEICLRRAKDLNIDLEMKQSNLEGDIVNIIQDARNTHDGIIINAAGYSHTSVAIRDALSIFKKPIIELHISNIYKREDFRQKSLISAVVTGIICGLGLNGYILAINSMHEILTNEN

SEQ ID NO: 149856 - protein, 56 aa, Unknown
  Bacterial polypetide isolated from the Sargasso Sea
MSHKILVINGPNLNLLGTREKEKYGQSTLGDINARCEGHAKKLGLSIEFKQSNVEG

SEQ ID NO: 149857 - protein, 97 aa, Unknown
  Bacterial polypetide isolated from the Sargasso Sea
MKKIKFIDGPNLNLLGKREPEIYGFETLDDIHKLVNAHIKEKKYDVEASFFQSNSEGEIVDCVQNSNQTSDGLIINAAGFSHTSVALLDALLAIEIP

SEQ ID NO: 149858 - protein, 141 aa, Unknown
  Bacterial polypetide isolated from the Sargasso Sea
IILNGPNLNLLGERENNQYGSVTLEEIEKRCQEFAKKNKIALTLFQSNIEGELVEKIQNSRIEQHGLIINAGGYTHTSVAIHDALKILKIPIIELHISNIYNREEFRHKSLIGKLAKGIICGFGADGYVMALNAMRTILKK

SEQ ID NO: 149859 - protein, 106 aa, Unknown
  Bacterial polypetide isolated from the Sargasso Sea
MDLLIINGPNLNLVGKREPSIYGSQTLEDIQEELSTLANRLDAKLKFFQSNSEGEMIDCIQNSVSSIDGILINAGAYTHTSIALRDALLGVAIPYVEVHLSNIYSR

SEQ ID NO: 149860 - protein, 64 aa, Unknown
  Bacterial polypetide isolated from the Sargasso Sea
MKNVLLLNGPNLNLLGKREPDIYGTESLESITDGLVHEAENLGLELISFQSNAEHELVDKIQAV

SEQ ID NO: 149861 - protein, 116 aa, Unknown
  Bacterial polypetide isolated from the Sargasso Sea
NGPNLNMLGLREKDIYGSDSLNDVEKRLAIIAEKNNCVIDFYQSNAEHELIDVIHNSLNKNVDVIIFNPAGYTHTSVALRDALLAVNIPFFEVHISDVESREDFRKKSYFSDIAEK

SEQ ID NO: 149862 - protein, 92 aa, Unknown
  Bacterial polypetide isolated from the Sargasso Sea
EGELVNFIQSIHHSLDSWVVINPGAFTHTSIALRDALNTLSAQNKIIEVHISNIEERENFRKFNLIKEFCEISIIGEGIDGYFQALDYINDK

SEQ ID NO: 149863 - protein, 147 aa, Unknown
  Bacterial polypetide isolated from the Sargasso Sea
MSKKFIQFVDGPNLNMLGEREPEIYGSLTLDEVHKTVKDHIALNYKEIDVNFFQSNSEGDIVDCIQKSKNTASGLIINGGGFSHTSVAILDALLTIEIPKIEIHLSNLFRREDFRHHSYISKGVHGVICGFGANSYVLAVEGMVKLI

SEQ ID NO: 149864 - protein, 51 aa, Unknown
  Bacterial polypetide isolated from the Sargasso Sea
MIKIIILNGPNLNLLGEREKSQYGSFTLKEIEKNCDDYSNKNDIKLSFFQS

SEQ ID NO: 149865 - protein, 147 aa, Unknown
  Bacterial polypetide isolated from the Sargasso Sea
MSKASKIYVLNGPNLNLLGDREPDIYGNVSLKDIEKSLSNYGKENNSEIYFKQTNHEGELIEFVHEASKKANAIIINPAGYSHTSVALLDALLTVKIPIIEVHISNIFKREDFRHNSYVSKAAIGVISGLGIEGYLYALKFLLDELK

SEQ ID NO: 149866 - protein, 134 aa, Unknown
  Bacterial polypetide isolated from the Sargasso Sea
MSKIIYIINGPNLNLLGKREPEKYGNFSLDKIKTLCSEKCKKYNLGLNFFQSNIEGELISNIHKAIDDGDGIIINAGALTHTSIGLLDALKMFKGPKIELHITNIYARESFRHKSFISPVVDGIIAGFGFNSYL

SEQ ID NO: 149867 - protein, 95 aa, Unknown
  Bacterial polypetide isolated from the Sargasso Sea
MNNKIIIINGPNLNLLGEREQSQYGSINIDQLKNMCAKKSKELSLNIDFLQSNIEGDLVNYIQDARKKYDGMIINAAAFTHTSVAIRDALDIFKK

SEQ ID NO: 149868 - protein, 139 aa, Unknown
  Bacterial polypetide isolated from the Sargasso Sea
MKIQIINGPNLNLLGVREKDIYGSLSFDEYFLKLKTKFKNIELFHYQSNIEGELINKIQDVGFDFDGIILNAAAYTHTSVGIADAIRGITSPVIEVHISNTKSREDFRKKSFISPHAKGVIQGFGLYSYDLAILSFLNN

SEQ ID NO: 149869 - protein, 141 aa, Unknown
  Bacterial polypetide isolated from the Sargasso Sea
MKKIVIINGPNLNLLGEREVEMYGTKTLNEIEKECCEIFKNDKLSLNFFQSNSESEIIDKIHVCKNYDGIIINAGAFTHTSIAIHDALKMVKIPKIEVHISNIYNREEFRKKSFISPVVNGIIAGFGTQVYQVAISSLKYL

SEQ ID NO: 149870 - protein, 94 aa, Unknown
  Bacterial polypetide isolated from the Sargasso Sea
MTKKILVINGPNLNLLGTREKEKYGNISLDDISEKCKLHGKKIDLEIEFKQSNVEGEIVNFIQDSRKKNDGIIINDGGYTHTSVAILDALLAVK

SEQ ID NO: 149871 - protein, 147 aa, Unknown
  Bacterial polypetide isolated from the Sargasso Sea
MSKASKIYVLNGPNLNLLGDREPDIYGNVSLKDIEKSLISYGKANNSEIYFKQTNHEGELIEFVHESSKKANAIIINPAGYSHTSVALLDALLTVKIPIIEVHISNIFRREDFRHNSYVSKAAIGVISGLGIEGYLYALKFLLDELK

SEQ ID NO: 149872 - protein, 111 aa, Unknown
  Bacterial polypetide isolated from the Sargasso Sea
MAKILVLHGPNLNLLGVREPHIYGSDNLDDINKSCKNLCTAKGHDFSFLQSNAESDLIERLHEARDDGTDFMIVNFGGFTHTSVAIRDAIIASEIPFIEVHLSNLFSRRGV

SEQ ID NO: 149873 - protein, 113 aa, Unknown
  Bacterial polypetide isolated from the Sargasso Sea
MSKLIYIINGPNLNKLGEREPSKYGSHSLEDLKTLCKEKIIKHKLKLDFFQSNSEKDIIDKIHEAQQKGDAILINAAAFTHTSIAIMDALSIFQGPIKEIHITNIHAREEFRH

SEQ ID NO: 149874 - protein, 32 aa, Unknown
  Bacterial polypetide isolated from the Sargasso Sea
MHLLLLNGPNLNLLGQREPGIYGRGTWHRSKT

SEQ ID NO: 149875 - protein, 147 aa, Unknown
  Bacterial polypetide isolated from the Sargasso Sea
MSKIIIINGPNLNLLGEREQTQYGSNDYKYLEEICQNRAKDLSISIEIKQSNVEGDIVNMIQDARKTYDGIIINAAGYSHTSVAIRDALSIFRKPIIEVHISNIYKREDFRHKSLISGVVTGIICGLGINGYILAINSMQEILKNEN

SEQ ID NO: 149876 - protein, 140 aa, Unknown
  Bacterial polypetide isolated from the Sargasso Sea
MKLTIINGPNLNLLGSRETDIYGNQDFETFFNSLRSKYSNINFEYHQSNVEGELINFIQDSRDSDGIIINAAAYTHTSVGIGDAIKAIDTKVIEVHISNTFSREEYRHNSYLSPVVDGIIIGFGLKSYELAIESFLTKDE

SEQ ID NO: 149877 - protein, 90 aa, Unknown
  Bacterial polypetide isolated from the Sargasso Sea
MNNKIIIINGPNLNLLGEREQSQYGSTSFDELKEICLNKSKELDLVADFTQSNIEGEIVNLIQNSRKNFDGIIINAAAFTHTSVAIRDAL

SEQ ID NO: 149878 - protein, 71 aa, Unknown
  Bacterial polypetide isolated from the Sargasso Sea
MKKILIINGPNLNLLGNREKKFYGDTSLERIKALCEEHCKKNDIGFDFYQSNHEGELIEKIHSVDDNFDGI

SEQ ID NO: 149879 - protein, 129 aa, Unknown
  Bacterial polypetide isolated from the Sargasso Sea
KNFYGDTSLQNIKSICADKCKKNNMEMEFFQSNHEGELIEKIHSVQSDFDGIIINPAAYTHTSIALLDALRATAKPKIEVHISNIYAREDYRRKSLTSEAVNGVICGFGEDSYLLAIEAVNKLIYNKKL

SEQ ID NO: 149880 - protein, 128 aa, Unknown
  Bacterial polypetide isolated from the Sargasso Sea
MKKIIILNGPNLNLLGEREENQYGSFTLKDIGEKCEDFARKNKINLTMYQSNIEGEIVEKIQEIRKDYDGLVINAGGYTHTSVAIHDALKILKVPIIELHISNIYNREEFRHKSLISKVAKGIICGFG

SEQ ID NO: 149881 - protein, 148 aa, Unknown
  Bacterial polypetide isolated from the Sargasso Sea
MKNNIIVINGPNLNLLGEREQSQYGTIKYDDIKNQCLEYSKKLGINVDFTQSNIEGEIVTTIQEARNKYNGLIINAAGFTHTSVAIRDALTIFKKPSIELHITNIYSREEFRHKSMISAVVTGIICGLGTNGYILAINSMHELLKNGN

SEQ ID NO: 149882 - protein, 126 aa, Unknown
  Bacterial polypetide isolated from the Sargasso Sea
MKLQIINGPNLNLLGTRETKVYGNMTFDEYFKILKKKYSNVDLHIFQSNVEGEIINKIQEVGFEYDGIILNAAAYTHTSVGIADAVRSINKPVIEVHISNTISREDYRHISFIGPHAKGIIMGFGL

SEQ ID NO: 149883 - protein, 124 aa, Unknown
  Bacterial polypetide isolated from the Sargasso Sea
MPHRIIIINGPNLNLLGEREKSHYGNFTLKELKNKCIQKSKQLDIEIEFCQSNIEGEIVTMIQDARKKYDGIIINAAGFTHSSVAIRDALEIIKKPKIELHISNIYKREEFRQKSLISGVVNGL

SEQ ID NO: 149884 - protein, 144 aa, Unknown
  Bacterial polypetide isolated from the Sargasso Sea
MSNKKIIIINGPNLNMLGEREPDVYGTESLKDLEEIIKNYLSDYKLDLDIIFFQSNSEGDIVNSIQDAGEKLDGIIINAGGLSHTSVSILDALLAIKIPKIEVHISNLFTREEFRHTSYISKGVNGIVCGFGLNGYLLAIDGIN

SEQ ID NO: 149885 - protein, 129 aa, Unknown
  Bacterial polypetide isolated from the Sargasso Sea
MDLLLINGPNLNLVGKREPSIYGSQTLEDIQEELLTLANELGANLKFFQSNSEGEMIDCIQNSVGSIDGILINAGAYTHTSIALRDALLGVAIPYVEVHLSNIYSREEFRHKSFLSDKKLALVCGFGAN

SEQ ID NO: 149886 - protein, 56 aa, Unknown
  Bacterial polypetide isolated from the Sargasso Sea
MNKIIILNGPNLNLLGEREENQYGNFTLKDIEKKCKEFAKKNNIELSLFQSNIEGE

SEQ ID NO: 149887 - protein, 105 aa, Unknown
  Bacterial polypetide isolated from the Sargasso Sea
MEILLINGPNLNLLGNRENSIYGNETLEDIEKKLFGVCKENDVSFTSFQSNAEHEIVEKIHIAKEDNVSKILINPGAFTHTSISIRDALYGVGIPFYEIHISNIF

SEQ ID NO: 149888 - protein, 63 aa, Unknown
  Bacterial polypetide isolated from the Sargasso Sea
MSNNIIIINGPNLNLLGEREQSQYGLITFDELKINCSNKAKEIGVNIDFTQSNIEGEIVTSIQ

SEQ ID NO: 149889 - protein, 145 aa, Unknown
  Bacterial polypetide isolated from the Sargasso Sea
PKVLLLNGPNLNLLGNREPEIYGSRTLKEIEEKVESILNDHNIECEFFQSNSEGEIINWIHKKCGADFMLLNPGALTHTSVGLRDALLGIEIPFIEIHLSNVYKREKFRHRSYFSDIAIGALTGLGVKGYLLAAEFAIDYIRENS

SEQ ID NO: 149890 - protein, 147 aa, Unknown
  Bacterial polypetide isolated from the Sargasso Sea
MSKASKIYVLNGPNLNLLGDREPDIYGNVSLKDIEKSLSNYGKENNSEIYFKQTNHEGELIEFVHEASKKANAIIINPAGYSHTSVALLDALLTVKIPIIEVHISNIFKREDFRHNSYVSKAAIGVISGLGIKGYLYALKFLLDELK

SEQ ID NO: 149891 - protein, 147 aa, Unknown
  Bacterial polypetide isolated from the Sargasso Sea
MSKASKIYVLNGPNLNLLGDREPDIYGNVSLKDIEKSLSNYGKENNSEIYFKQTNHEGELIEFVHEASKKANAIIINPAGYSHTSVALLDALLTVKIPIIEVHISNIFRREDFRHNSYVSKAAIGVISGLGIEGYLYALKFLLDKLK

SEQ ID NO: 149892 - protein, 146 aa, Unknown
  Bacterial polypetide isolated from the Sargasso Sea
MKNKIIVINGPNLNLLGEREKEKYGSVSLEDIKSDCSKYAKKNDVELTFVQSNVEGEIVSLIQNSRDKYSGLIINAAGYTHTSVSILDALMVLKIPIIELHITNIYNREDFRHKSLISKAATGIICGFGTKGYVMAIESMKNILKK

SEQ ID NO: 149893 - protein, 147 aa, Unknown
  Bacterial polypetide isolated from the Sargasso Sea
MSKKFIQFVDGPNLNMLGEREPEIYGSMTLDEVHKNVRDYIAQNYKEIDVNFFQSNSEGDIVDCIQKSKNTASGLIINGGGFSHTSVAILDALLTIEIPKIEIHLSNLFRREDFRHHSYISKGVHGVICGFGPNSYVLAVEGMVKLI

SEQ ID NO: 149894 - protein, 127 aa, Unknown
  Bacterial polypetide isolated from the Sargasso Sea
MKIDKVLVISGPNLNLLGTREPDIYGSTTLEIIHQNLKKIGKKNNIDVSCKQSNSESEIIKWIQKSKNYYNSIIINAGAFTHTSIAIRDALLAFDGDIIEVHLSNTFKRESFRHHSFISSISRGLIV

SEQ ID NO: 149895 - protein, 149 aa, Unknown
  Bacterial polypetide isolated from the Sargasso Sea
MTNRILIINGPNLNLLGEREQSQYGSVSFDGLKENCLKKSKELNINLDFIQSNIEGEIVTIIQDARKKYDGMIINAAGFTHTSVSIRDALDVFKKPIIELHISNIYKREEFRHKSMISGVVTGVICGLGTNGYILAINAMQELLINGNR

SEQ ID NO: 149896 - protein, 111 aa, Unknown
  Bacterial polypetide isolated from the Sargasso Sea
MSNILIINGPNLNLLGEREQSQYGSITFENLKKICLQKAKELNVNLEFNQTNIEGEIVTTIQEARNKFDGIIINAAGFTHTSVAIRDSLTIFKKPIIELHISNIYKREEFR

SEQ ID NO: 149897 - protein, 138 aa, Unknown
  Bacterial polypetide isolated from the Sargasso Sea
MGSREPEIYGSTTLKEIEEKVASILSGNEIEFESFQSNSEGEIIDWLHKRSDADFLLLNPGALSHTSVGLRDAVLGVEIPFIEIHLSNVYKREEFRHHSYFSDIAIGALAGLGVQGYLLAAEFAVDYIEQKGEKNSGN

SEQ ID NO: 149898 - protein, 62 aa, Unknown
  Bacterial polypetide isolated from the Sargasso Sea
MKKIIILNGPNLNLLGEREKEKYGVVSLESIETNCKEFAKKNGINLTFFQSNLEGEIVDEIQ

SEQ ID NO: 149899 - protein, 149 aa, Unknown
  Bacterial polypetide isolated from the Sargasso Sea
MSQKILVINGPNLNLLGTREKEKYGNISLDDIKKKCELHCKKIGLDVQFKQSNVEGEIVNFIQETQKNYSGIIINAGGYTHTSVAILDALLAVKKPTIELHITNIYKREDFRHKSLISKAADGIICGMGVDGYIMALNGIKKIITNENR

SEQ ID NO: 149900 - protein, 147 aa, Unknown
  Bacterial polypetide isolated from the Sargasso Sea
NKIIIINGPNLNLLGEREQSQYGSTTFEKLKENCFTKCEELGLELSFVQSNLEGELVNIIQESIKSYDGIIINAAGFTHTSVAIRDALDIFKKPIIELHISNIYKREEFRQKSLISDIVTGGIFGLGSDGYILAIISMEKLLKNENK

SEQ ID NO: 149901 - protein, 147 aa, Unknown
  Bacterial polypetide isolated from the Sargasso Sea
MSKLIIINGPNLNLLGEREQTQYGSKSHKHLEEICLNRAKDLKIDLEIKQSNIEGDIVNIIQDARKTHDGIIINAAGYSHTSVAIRDALSIFKKPIIELHISNIYKREEFRHKSLISAVVTGIICGLGINGYILAINSMHEILKNEN

SEQ ID NO: 149902 - protein, 116 aa, Unknown
  Bacterial polypetide isolated from the Sargasso Sea
AELQQQAERLGAELVCFQSNHEGALVDQIQQAASEVDGILINAGAFTHTSIAIRDALLGVQLPYVELHLSNVHAREEFRHGSYLADKAVGVICGFGPISYYLALEGMVAHLRSSQL

SEQ ID NO: 149903 - protein, 145 aa, Unknown
  Bacterial polypetide isolated from the Sargasso Sea
MKKIIIINGPNLNLLGNREKDVYGEISIQEIENQSKKRCDELNLELSFFQSNNEGEIINHIQSAEKEYDGLIINPAAFTHTSVALLDALRALSKPKIEIHLSNIYNREEYRRKSITSEGVNGLICGFGFWSYILAIEAINNMINS

SEQ ID NO: 149904 - protein, 72 aa, Unknown
  Bacterial polypetide isolated from the Sargasso Sea
MFILYKVSVIKLIIINGPNLNLLGEREQTQYGSKNYKYLEKICLKRAKCLNIDIEIKQSNIEGEICHIIQDA

SEQ ID NO: 149905 - protein, 75 aa, Unknown
  Bacterial polypetide isolated from the Sargasso Sea
MSKILLINGPNLNLLGTREPEIYGDTTLEEIENKLKSSAEDAGHELICLQSNAEYEIIDSIQNASKNSTDVIIIN

SEQ ID NO: 149906 - protein, 102 aa, Unknown
  Bacterial polypetide isolated from the Sargasso Sea
MTIIFILFFFLIEYKVLVSKILIINGPNLNLLGEREQSQYGNKDYNFLEEICLNRAKELKIDLDITQSNVEGEIVNIIQESRNTHDGIIIKGGGYTHTSVAI

SEQ ID NO: 149907 - protein, 70 aa, Unknown
  Bacterial polypetide isolated from the Sargasso Sea
MKKKILIINGPNLNMLGKREPEVYGKTTLKELEKKCVNESKKLDLNISFFQSNSEAEIIDEIQKSLDYDG

SEQ ID NO: 149908 - protein, 146 aa, Unknown
  Bacterial polypetide isolated from the Sargasso Sea
MIKQKNILILNGPNLNLLGIRQPEIYGSRTLKDLEEMCLSKGKACSMNIKFEQSNSESELVTYIQEAIKTSDGIIINAAAYSHTSVAILDALNSFTGYVIEVHISDISKREEFRKFSYVSLRADYVIMGKGLEGYIEALEKMQREH

SEQ ID NO: 149909 - protein, 148 aa, Unknown
  Bacterial polypetide isolated from the Sargasso Sea
MNNKIIIINGPNLNLLGEREQSQYGSTTFEELKEICLNKSKELGLVADFSQSNIEGEIVSLIQNSRENFDGIIINAAAFTHTSVAIRDALSIFKKPIIELHISNIYRREEFRQKSLISDVVTGGIFGLGTDGYILAIISMQKLLQNEN

SEQ ID NO: 149910 - protein, 147 aa, Unknown; identical to SEQ ID NO: 149865
  Bacterial polypetide isolated from the Sargasso Sea

SEQ ID NO: 149911 - protein, 146 aa, Unknown
  Bacterial polypetide isolated from the Sargasso Sea
MAKKILIINGPNLNLLGEREESKYGKTTLKEVKKNCEHHGKSIDLEIIFEQSNIEGEIVTMIQKAKGVYDGIIINAAGYTHTSVAILDALLAIKIPTIEVHITNIYNREEFRKKSLISKAANGIICGFGINGYIMALDSIKKILSK

SEQ ID NO: 149912 - protein, 97 aa, Unknown
  Bacterial polypetide isolated from the Sargasso Sea
SNSEEEIIEKIHSQKNEKYDYGIFNFGAHTHTNIAIRDAILSVKLPFYEVHISNIYAREEFRHHSFFSDIATGSIVGFGLDGYEFALNKIMRGKDGS

SEQ ID NO: 149913 - protein, 148 aa, Unknown
  Bacterial polypetide isolated from the Sargasso Sea
MKKIIILNGPNLNLLGEREKSQYGSFTLKDIEKRCKIFASENNMDLSLFQSNLEGELIEKIQESRKKEDGLIINAGGYTHTSVAILDALKILKIPIIELHISNIYNREDFRHKSLISKVAKGIICGFGENGYIMALEAMKNYLKDENR

SEQ ID NO: 149914 - protein, 35 aa, Unknown
  Bacterial polypetide isolated from the Sargasso Sea
MNILLINGPNLNLLGTREPEIYGNKTLSDIEKRFN

SEQ ID NO: 149915 - protein, 145 aa, Unknown
  Bacterial polypetide isolated from the Sargasso Sea
MTKKILIINGPNLNLLGDREESKYGKVTLEEVKKNCEFHSKSIGFEISFHQSNIEGEIVTMIQKAKGVFDGIIINGAGYTHTSVAILDALLAVKLPTIEVHITNIYNREEFRKKSLISKAAKGIICGFGIKGYIMALDSMKEVLN

SEQ ID NO: 149916 - protein, 50 aa, Unknown
  Bacterial polypetide isolated from the Sargasso Sea
MNILLINGPNLNLLGTREPEIYGNKTLSDIEKDLTKVAKEKSINLECFQK

SEQ ID NO: 149917 - protein, 124 aa, Unknown
  Bacterial polypetide isolated from the Sargasso Sea
MNNKIIIINGPNLNLLGEREQSQYGSITFNELKEICLNKSKELGLIAEFSQSNIEGQIVNIIQDSIKNFDGIIINAAAFTHTSVAIRDALSIFKKPIIELHISNIYKREEFRQKSLISDMQQEE

SEQ ID NO: 149918 - protein, 71 aa, Unknown
  Bacterial polypetide isolated from the Sargasso Sea
MKKILIINGPNLNLLGNREDDIYGKDSLDKIKSDCEKKGIEKKLEIIFFQSNNEGEIIDKIHEVNDKFDGL

SEQ ID NO: 149919 - protein, 145 aa, Unknown
  Bacterial polypetide isolated from the Sargasso Sea
MKKILIINGPNLNLLGKREDDIYGKDSLDKIKSDCEKKGIEKKLEIIFFQSNNEGELIDKIHEVNDKFDGLIINPAAFTHSSIAILDSLRAINKPKIEIHLSNIYSREEYRKKSITSEGVHGLICGFGGNSYLLGIEAICKLIYK

SEQ ID NO: 149920 - protein, 101 aa, Unknown
  Bacterial polypetide isolated from the Sargasso Sea
MKILVIHGPNLNLLGIREPEVYGSTTMEEINQGLLDKASSNNIEIEAFQSNAEHEIVTKLQDSINLIDYIIINPGALTHTSIAIRDCLLGIGVPFYEVHIS

SEQ ID NO: 149921 - protein, 121 aa, Unknown
  Bacterial polypetide isolated from the Sargasso Sea
MIKKILIINGPNLNLLGEREESKYGNATLDEVKKKCESHSKNIGFEIKFVQSNIEGEIVTMIQKAKNVFDGIIINAAGYTHTSVAILDALLAVKIPTIEVHITNIYNREEFRNKIVDKQSC

SEQ ID NO: 149922 - protein, 86 aa, Unknown
  Bacterial polypetide isolated from the Sargasso Sea
HSQKNEKYDYGIFNFGAHTHTNIAIRDAILSVKLPFYEVHISNIYAREEFRHHSFFSDIATGSIVGFGLDGYEFALNKIMRGKDGS

SEQ ID NO: 149923 - protein, 139 aa, Unknown
  Bacterial polypetide isolated from the Sargasso Sea
MKIQIINGPNLNLLGVREKDIYGSLSFDEYFLKLKTKFKNIDLFHYQSNIEGELINKIQDVGFDFDGIILNAAAYTHTSVGIADAIRGINSPVIEVHISNTKSREDFRKKSFISPHAKGVIQGFGLYSYELAILSFLNN

SEQ ID NO: 149924 - protein, 57 aa, Unknown
  Bacterial polypetide isolated from the Sargasso Sea
MNNKIIIINGPNLNLLGEREQSQYGSITFEKLKANCLKKADELNLDMEFFQSNIEGD

SEQ ID NO: 149925 - protein, 38 aa, Unknown
  Bacterial polypetide isolated from the Sargasso Sea
KYRLLKGPNLNLLGTREPEIYGSESLRDIEATLSKNSK

SEQ ID NO: 149926 - protein, 101 aa, Unknown
  Bacterial polypetide isolated from the Sargasso Sea
ISFRVTSEEEIIEKIHSQKNEKYDYGIFNFGAHTHTNIAIRDAILSVKLPFYEVHISNIYAREEFRHHSFFSDIATGSIVGFGLDGYEFALNKIMRGKDGS

SEQ ID NO: 149927 - protein, 149 aa, Unknown
  Bacterial polypetide isolated from the Sargasso Sea
MTNKIIIINGPNLNLLGEREQSQYGSDTFKELKEKCLKKSKEIGLNVNFTQSNLEGEIVEIIQEARKEYEGIIINAAGFTHTSVAIRDALSLYKKPIIELHISNIYKREEFRHKSLISDIATGGIFGLGTEGYILAIISIQKIIENENR

SEQ ID NO: 149928 - protein, 143 aa, Unknown
  Bacterial polypetide isolated from the Sargasso Sea
MHGPNLNLLGTREPGVYGHTTLAQIDQALLAQAQAAGHALDALQSNAEHVLVDRVQAARTDGTAFILINPAAFTHTSVALRDALAAVDVPFIEIHLSNPHAREPFRQHSYFSDKAVGVICGFGADSYRYAMDAALVRLQDAGA

SEQ ID NO: 149929 - protein, 82 aa, Unknown
  Bacterial polypetide isolated from the Sargasso Sea
PVYCDNPAAFTHTSVALRDAFAAVGLPFIEVHLSNVHTREPFRHKSFFSDLAQAVICGLGPRGYTAALDAALAQLGFGDNAN

SEQ ID NO: 149930 - protein, 151 aa, Unknown
  Bacterial polypetide isolated from the Sargasso Sea
MVNKKKFLVINGPNLNFLGKREPEIYGNLSLEEIQKYTEKKVNSFCKYVNIEWFQSNLEGEIVERIQKASQEALDGLVINPAAYSHTSVAILDALKLIEYKVVEVHLSNTYNRESFRHTRLTAKSSDAIIEGFGKEVYFLSIISQITEEGF

SEQ ID NO: 149931 - protein, 136 aa, Unknown
  Bacterial polypetide isolated from the Sargasso Sea
MKKILIINGPNLNLLGNREKKFYGDTTLEKIKILCDQHCKKNNIECSFFQSNHEGELIEKIHSVDSDFDGIIINPAAFTHTSIALLDALRATSKPKIEIHISNIYAREDYRRKSITSEAVNGVICGFGENGYVLAI

SEQ ID NO: 149932 - protein, 92 aa, Unknown
  Bacterial polypetide isolated from the Sargasso Sea
MSHKILVINGPNLNLLGTREKEKYGQSTLEDIRNKCESHAKKTGIIIKFEQSNVEGEIVNIIQDAKKKYDGIVINAGGYTHTSVAILDALLA

SEQ ID NO: 149933 - protein, 148 aa, Unknown
  Bacterial polypetide isolated from the Sargasso Sea
MNNKIVIINGPNLNLLGEREQSQYGSESFDKLKEKCLKKTTDLNIDAEFFQSNIEGEIVTKIQDSRKNFDGMIINAAGFTHTSVAIRDALSIFKKPIIELHISNIYKREQFRHKSLISEVVSGGIFGLGTEGYILAIISLEKMLRNEN

SEQ ID NO: 149934 - protein, 45 aa, Unknown
  Bacterial polypetide isolated from the Sargasso Sea
MNILLINGPNLNLLGTREPEIYGNKTLGDIEEEFTKVAKEKSFNL

SEQ ID NO: 149935 - protein, 146 aa, Unknown
  Bacterial polypetide isolated from the Sargasso Sea
MNNKIIIINGPNLNLLGEREQSQYGSITFSELKENCINKSKELGLNIEFTQSNIEGEIVNLIQDSIKKFDGMIINAAAFTHTSVAIRDALSVFKKPIIELHISNIYKREEFRQKSLISDVVTGGIFGLGSDGYILAIISMQKLLKQ

SEQ ID NO: 149936 - protein, 149 aa, Unknown
  Bacterial polypetide isolated from the Sargasso Sea
MKKKILVINGPNLNLLGEREKDKYGSTSLKEIEGQCLNFSKKNNLTLSFFQSNVEGEIINAIQESRKNMDGLIINAGGYTHTSVAIHDALKLLKIPIIELHITNIYNREDFRHKSLISKLATGIICGFGIKGYIMALEAIKSNLENENR

SEQ ID NO: 149937 - protein, 148 aa, Unknown
  Bacterial polypetide isolated from the Sargasso Sea
MTKKILIINGPNLNLLGEREESKYGKVTLEEVKKNCESHAKLINLQIKFDQSNIEGEIVTMIQKAKGNFDGIVINAAGYTHTSVAILDALLAVKLPTIEIHITNIYNREEFRKKSLISKAAKGIICGFGVKGYIMALDSIKEILSNKK

SEQ ID NO: 149938 - protein, 76 aa, Unknown
  Bacterial polypetide isolated from the Sargasso Sea
MNKIIILNGPNLNLLGEREKNQYGNFTLKDIEVSCKEFAEKNEITLTMYQSNIEGELGDRIQSSRNEQNGLIINAG

SEQ ID NO: 149939 - protein, 131 aa, Unknown
  Bacterial polypetide isolated from the Sargasso Sea
MNNKIIIINGPNLNLLGEREQSQYGSITFDKLKENCMNKSRELGLQIEFSQSNIEGEIVDIIQKSRKNFDGIIINAAAFTHTSVAIRDALSIYKKPIIELHISNIYKREEFRRKSLISDVVTGGIFGLGSE

SEQ ID NO: 149940 - protein, 148 aa, Unknown
  Bacterial polypetide isolated from the Sargasso Sea
MTKIIIINGPNLNLLGEREQTQYGSKDYKHLKEICSKQANDLNLDLEIKQSNIEGDIVNIIQNSRKIYDGMIINAAGYSHTSVAIRDALSIFKKPVIELHISNIYKREDFRHKSLISGVVTGIICGLGVNGYILAINSMHEILENENK

SEQ ID NO: 149941 - protein, 112 aa, Unknown
  Bacterial polypetide isolated from the Sargasso Sea
MKILVLNGPNLNMLGMREEDIYGSETLDDIEAKLKNKADSNECEVYFYQSNAEHELIDAIHTAFENGTNSIIFNPAGYTHTSVALRDAILAVKIPFYEVHISDINSREDLEK

SEQ ID NO: 149942 - protein, 145 aa, Unknown
  Bacterial polypetide isolated from the Sargasso Sea
MKKILIINGPNLNLLGKREDDIYGKDSLDKIKSDCEKKGIDKKLEIIFFQSNNEGEIIDKIQEVKDKFDGLIINPAAFTHSSIAILDSLRAIHKPKIEIHLSNIYSREEYRKKSITSEGVHGLICGFGGNSYLLGIEAICKLIYK

SEQ ID NO: 149943 - protein, 153 aa, Unknown
  Bacterial polypetide isolated from the Sargasso Sea
MTNKIIIINGPNLNLLGEREQSQYGSNTFEQLKEKCLKKSKEIGLELNFTQSNLEGEIVNIIQEARKEYTGMIINAAGFTHTSVAIRDALSLFKKPIIELHISNIYKREEFRHKSLISDIATGGIFGLGTEGYILAIISIQKIIENENRQKNY

SEQ ID NO: 149944 - protein, 145 aa, Unknown
  Bacterial polypetide isolated from the Sargasso Sea
MKKILIINGPNLNLLGNREDDIYGKDSLDKIKSDCEKKGIEKKLEIIFFQSNNEGEIIDKIHEVNDNFDGLIINPAAFTHSSIAILDSLRAINKPKIEIHLSNIYSREEYRKKSITSEGVHGLICGFGGNSYLLGIEAICKLIYK

SEQ ID NO: 149945 - protein, 75 aa, Unknown
  Bacterial polypetide isolated from the Sargasso Sea
MKKKKILLINGPNLNLLGQRESIIYGSTSFNKLNKYLKTYCLNNNCNIKLFQSNSESEIIDKIQKARNIIDGIII

SEQ ID NO: 149946 - protein, 108 aa, Unknown
  Bacterial polypetide isolated from the Sargasso Sea
MSKLIIINGPNLNLLGEREQTQYGSKDYKYLEEICSKRAKDLNIDIEIKQSNVEGDIVNIIQDARKTHDGIIINAAGYSNTSVAIRDALSIFKKPIIELHISNIYKRE

SEQ ID NO: 149947 - protein, 144 aa, Unknown
  Bacterial polypetide isolated from the Sargasso Sea
MKILVLNGPNLNMLGLREKDIYGSDSLNDIEKRLAIIAEKNNCVIDFYQSNAEHELIDVIQNSLNKKVDAIIFNPAGYTHTSVALRDALLAVKIPFFEVHISDVESREDFRKKSYFSDIAEKVFSGHGVKGYELALNEALNFNR

SEQ ID NO: 149948 - protein, 149 aa, Unknown
  Bacterial polypetide isolated from the Sargasso Sea
MNNKIIIINGPNLNLLGEREQSQYGSTTLDQLKDNCSKKGQEIGLDVEFAQSNVEGELVNIIQDARKKFDGMIINAAAFTHTSVAIRDALDLFKKPIIEIHLSNIYKREEFRHKSLISGVVTGGIFGLGAEGYILAIISLQKTLQNENR

SEQ ID NO: 149949 - protein, 144 aa, Unknown
  Bacterial polypetide isolated from the Sargasso Sea
MNKIIILNGPNLNLLGEREKEKYGNITLKNIEKNCKEFAQKNNIDLALFQSNIEGELVEEIQKARKEHHGLIINAGGYTHTSVAIHDALKILKMPIIELHITNIYNREEFRHKSLISKIATGVICGFGTDGYLMALTAMKAYLK

SEQ ID NO: 149950 - protein, 146 aa, Unknown
  Bacterial polypetide isolated from the Sargasso Sea
MSNNILIINGPNLNLLGEREQSQYGSITFEELKKNCLKKSKELNINLNFAQSNVEGEIVNLIQKARNNFDGIIINAAGFTHTSVAIRDALSIFKKPIIELHISNIYKREEFRKKSLISDVVTGGIFGIGADGYILAIIAMQKMIKK

SEQ ID NO: 149951 - protein, 131 aa, Unknown
  Bacterial polypetide isolated from the Sargasso Sea
NREKNFYGDTSLERIKSICAEECKKHKIESDFFQSNHEGEIIEKIHSVQNGFEGIIINPAAYTHTSIALLDALRATSKPKIEVHISNIYAREDYRRKSLTSEAVNGIICGFGENGYILAIEAMKKLIYSKD

SEQ ID NO: 149952 - protein, 34 aa, Unknown
  Bacterial polypetide isolated from the Sargasso Sea
MKNILLINGPNLNLLGKRDVEIYGNKTINDVEDM

SEQ ID NO: 149953 - protein, 140 aa, Unknown
  Bacterial polypetide isolated from the Sargasso Sea
MKLTIINGPNLNLLGSRETNIYGNQDFETFLNSLRSKYSKINLEYYQSNVEGELINFIQDSRDSDGIIINAAAYTHTSVGIGDAIKAIDTKVIEVHISNTFSREEYRHNSYLSPVVDGIIIGFGLNSYELAIESFLPKDE

SEQ ID NO: 149954 - protein, 149 aa, Unknown
  Bacterial polypetide isolated from the Sargasso Sea
MNNKIIIINGPNLNLLGEREQSQYGSTTFDQLKENCSKKGQEIGLDIEFAQSNIEGELVNIIQDARKKFDGMIINAAAFTHTSVAIRDALDLFKKPIIELHLSNIYKREEFRHKSLISGVVSGGIFGLGAEGYILAIISLQKSLQNENR

SEQ ID NO: 149955 - protein, 154 aa, Unknown
  Bacterial polypetide isolated from the Sargasso Sea
MYYKFIVNNIIIINGPNLNLLGEREQSQYGKITFNDLKNICLDHSKNIGVKLDFFQSNLEGEIVTKIQNARKEYDGIIINAAGYTHTSVSIRDALDIFKKPIIELHISNIYKREEFRQKSLISNIVTGIICGLGSNGYILAINAMQELLKNGNR

SEQ ID NO: 149956 - protein, 145 aa, Unknown
  Bacterial polypetide isolated from the Sargasso Sea
MKHNIIIINGPNLNLLGEREKEKYGTETLKDVEIACDKLASKNNIQLSFFQSNIEGEIVTKIQESRQKMNGLIINAGGYTHTSVAIHDALKLLKIPIIELHITNIYNREDFRHKSMISQVSNGIICGFGTKGYLMSIEAIMDLIK

SEQ ID NO: 149957 - protein, 166 aa, Unknown
  Bacterial polypetide isolated from the Sargasso Sea
MPLTVIFILIFFLIEYKVFVNKILIINGPNLNLLGEREQSQYGKKDYKSLEEICLNRAKELNIDLEITQSNVEGEIVNIIQNSRNTHDGIIINAGGYTHTSVAIRDSLNIFKKPIIELHISNIYKREDFRQKSLISDVVTGGIFGLGVDGYILAINSMQKLLQNGN

SEQ ID NO: 149958 - protein, 145 aa, Unknown
  Bacterial polypetide isolated from the Sargasso Sea
MAKILVLHGPNLNLLGVREPHIYGSDSLNDINERCRNLCAKKGHVFSSLQSNAESDFIGRLHEARDDGTEFMIVNFGGFTHTSVAIRDAIIASEIPFIEVHLSNLFSREEYRQFSFFSDIAVGCIVGLGAQGYELALEATFKRLE

SEQ ID NO: 149959 - protein, 81 aa, Unknown
  Bacterial polypetide isolated from the Sargasso Sea
MNILVLNGPNLNLLGTREPEVYGTDSLKDIEENLKSISKKHNVNIRFYQSNSENELINELHNAKQENIDAIIIKSGCFYTY

SEQ ID NO: 149960 - protein, 130 aa, Unknown
  Bacterial polypetide isolated from the Sargasso Sea
MSNKIIIINGPNLNLLGEREQSLYGSVTFDKLKEKCLKKSTELKINIEFFQSNIEGEIVNKIQDSRKNFDGMIINAAGFTHTSVAIRDALDIFKKPIIELHISNIYKREKFRHKSLISEVVSGGIFGLSP

SEQ ID NO: 149961 - protein, 148 aa, Unknown
  Bacterial polypetide isolated from the Sargasso Sea
MSSILLLNGPNLNLLGEREPDIYGDFSLEDIEKTIEKLGKENNIDTECFQSNAEHELVDKIHDAKSNGVKIILFNPGAFTHSSISLRDAILGVNIPLIEIHLSNIYGREEFREKSYFSDIALGVISGFGKHSYLMAFQAAKNYLIRED

SEQ ID NO: 149962 - protein, 154 aa, Unknown
  Bacterial polypetide isolated from the Sargasso Sea
MHYKFIVNNIIIINGPNLNLLGEREQSQYGKITFNDLKNLCLEYSKKIGIKLDFFQSNLEGEIVTKIQNARKEYDGIIINAAGYTHTSVSIRDALDIFKKPIIELHISNIYKREEFRQKSLISNVATGIICGLGSNGYILAINAMQELLKNGNR

SEQ ID NO: 149963 - protein, 63 aa, Unknown
  Bacterial polypetide isolated from the Sargasso Sea
AIRDAILSVKLPFYEVHISNIYAREEFRHHSFFSDIATGSIVGFGLDGYEFALNKIMRGKDGS

SEQ ID NO: 149964 - protein, 145 aa, Unknown
  Bacterial polypetide isolated from the Sargasso Sea
MKILVLNGPNLNMLGMREEDIYGSETLDDIEAKLKNKADSNECEVYFYQSNAEHELIDAIHTAFENGTDSIIFNPAGYTHTSVALRDAILAVKIPFYEVHISDINSREEFRKKSYFSDIAEKVFSGHGTKGYVLALEEALKNKKV

SEQ ID NO: 149965 - protein, 147 aa, Unknown
  Bacterial polypetide isolated from the Sargasso Sea
MSKILLINGPNLNLLGTREPEIYGDTSLNEVEEKLKASAEDAGHEFNCFQSNAEHEIINTIQQAKQDNIDVIIINPGPFTHTSIALRDTFLSTKIPFIEIHISNIFEREEFRKNSFLSDISIGCIIGCGVGGYGLAMRRAKNFLRDK

SEQ ID NO: 149966 - protein, 132 aa, Unknown
  Bacterial polypetide isolated from the Sargasso Sea
MSHKILVINGPNLNLLGTREKEKYGQSTLEDIKNKCESHAKKTGTMIKFEQSNVEGEIVNIIQDAKKKYDGIVINAGGYTHTSVAILDALLAVKIPTIELHITNIYKREEFRHKSLISKAADGIICGLGVSG

SEQ ID NO: 149967 - protein, 149 aa, Unknown
  Bacterial polypetide isolated from the Sargasso Sea
MKKKIIIINGPNLNLLGEREQSQYGSITFNELREKCIKKTEELNISLDFVQSNIEGEIVTYIQNARDKNDGLIINAAGFTHTSVSIRDALNIFKKPIIELHISNIYNREEFRHKSMISAVVTGIICGLGTNGYILAINAMHELLKNGNR

SEQ ID NO: 149968 - protein, 149 aa, Unknown
  Bacterial polypetide isolated from the Sargasso Sea
MSDNLQILVINGPNLNMLGKRETDIYGTRTLDQITSDLEKKINDKSLSLDFFQSNHEGEILDFMHKNNNKVDGCIINAGALTHSSTALHDAIKSVDFPCVEVHMSNIYSRKESWRQKSLIAPAVIGTVQGFGEESYKAALELLVQYIRN

SEQ ID NO: 149969 - protein, 164 aa, Unknown
  Bacterial polypetide isolated from the Sargasso Sea
MTVIFILFFFLIEYKVFVNKILIINGPNLNLLGEREQSQYGKKDYNFLKEICFKRAKELGIKLEIQQSNVEGEIVNIIQEARNIHDGIIINAGGYTHTSVAIRDSLNIFKKPIIELHISNIYKREDFRHKSLISDVVTGGVFGLGMDGYILAINSMQKLLQNGN

SEQ ID NO: 149970 - protein, 149 aa, Unknown
  Bacterial polypetide isolated from the Sargasso Sea
MTNRILIINGPNLNLLGEREQSQYGSVSFDQLKEKCLNKSKELNINLDFIQSNIEGEIVTIIQDARKKYDGMIINAAGFTHTSVSIRDALDIFKKPIIELHISNIYKREEFRHKSMISGVVTGVICGLGANGYILAINAMQELLKNGNR

SEQ ID NO: 149971 - protein, 144 aa, Unknown
  Bacterial polypetide isolated from the Sargasso Sea
MKKIIILNGPNLNLLGEREKSQYGDCTLKDVEKSCEEFAVENNLKIFFFQSNIEGELVEKIQESRKDQDGLIINAGGYTHTSVAIHDALKILKLPIIELHISNIYNREEFRHKSLISNVANGVICGFGTDGYIMALNAMIKYLK

SEQ ID NO: 149972 - protein, 163 aa, Unknown
  Bacterial polypetide isolated from the Sargasso Sea
MKITIINGPNLNLLGTRETDIYGSQNFESYLDSLKSLFGGVDIDYFQSNIEGEIINFIQNSKNSDGIILNAAAYTHTSVGIADAVKSIECKVVEVHISNTFSREEFRHNSYLSPVVDGIIIGFGLDSYRLALKVYLKVNDFIICISNSFHQSFTHCWVRVNSI

SEQ ID NO: 149973 - protein, 113 aa, Unknown
  Bacterial polypetide isolated from the Sargasso Sea
MSQKILVINGPNLNLLGTREKEKYGQSSLEDIKKKCKSHADKLGLDIEFKQSNVEGEIVNFIQETRQKYNGIIINAGGYTHTSVAILDALLAVKKPTIELHITNIYKREDFRH

SEQ ID NO: 149974 - protein, 106 aa, Unknown
  Bacterial polypetide isolated from the Sargasso Sea
MKILVLNGPNLNLLGIREEDIYGNETLQDLEHKLKEIADEVNAEISFYQSNAEHDLINAIHDAYKADVELIIFNPAAFTHTSVALRDALLGVRIPFYEVHISDIKT

SEQ ID NO: 149975 - protein, 146 aa, Unknown
  Bacterial polypetide isolated from the Sargasso Sea
MSSLIYIINGPNLNLLGQREPSIYGTHTLKDIENNCLEIAKKNNIKIKFLQSNAEHEIINWIHNAREDASGIIINPAAYSHTSIAILDALTLFEEHIIEVHISNIHKRESFRHNSYVSQKSTAVIAGFGIDGYKIALEKMINLCSN

SEQ ID NO: 149976 - protein, 148 aa, Unknown
  Bacterial polypetide isolated from the Sargasso Sea
MNKILIINGPNLNLLGEREQSQYGTTTFNDLKQMCQKTSEDIGIKLDFKQSNIEGELVNIIQEARNDYKGLIINAAGFTHTSVAIRDALSIFKNPIIELHISNIYKREEFRHKSLISGVVTGIICGLGVNGYILAINAMHDLLSNGNR

SEQ ID NO: 149977 - protein, 149 aa, Unknown
  Bacterial polypetide isolated from the Sargasso Sea
MKKKIIIINGPNLNLLGEREQSQYGSITFIQLKKKCLEKTKELNLDLNFTQSNIEGEIVTIIQNARNEYDGMIINAAGFTHTSVSIRDALDIYKKPIIELHISNIYKREEFRHKSMISSVVTGMICGLGANGYILAINAMHELLKNGNR

SEQ ID NO: 149978 - protein, 144 aa, Unknown
  Bacterial polypetide isolated from the Sargasso Sea
MKILIVNGVNLNMLGKRETDLYGNETLKDLENRLNSLESGADLHFFQSNSEEEIIEKIHSQKNEKYDYGIFNFGAHTHTNIAIRDAILSVKLPFYEVHISNIYAREEFRHHSFFSDIATGSIVGFGLDGYEFALNKIMRGKDGS

SEQ ID NO: 149979 - protein, 106 aa, Unknown
  Bacterial polypetide isolated from the Sargasso Sea
MNILLLNGPNLNMLGQREPDKYGTQTLQDIVDDLQAQAASSNVTLSHFQSNAEFELIDRVHAAMGTVDAIIINPAAFTHTSVALRDALLSVNIPFIEVHLSNVHAR

SEQ ID NO: 149980 - protein, 149 aa, Unknown
  Bacterial polypetide isolated from the Sargasso Sea
MTNKIIIINGPNLNLLGEREQSQYGSDTFEQLKEKCLTKSKEIGLEVNFTQSNLEGEIVNIIQQARKEYTGMIINAAGFTHTSVAIRDALSLFKKPIIELHISNIYKREEFRQKSLISDIATGGIFGLGTEGYILAIISIQKIIENENR

SEQ ID NO: 149981 - protein, 146 aa, Unknown
  Bacterial polypetide isolated from the Sargasso Sea
MKILLINGPNLNLLGSRETEKYGDLSLKELESKLRSIAEDQDCELHCFQSNSEEKIINEIHGAGVENIGVIIINPAAFTHTSIAIRDAFLAVDIPFYEVHITDIKSRESFRHHSYFEDIAIEQISGKGISGYEDAVNKAIKKFRSS

SEQ ID NO: 149982 - protein, 143 aa, Unknown
  Bacterial polypetide isolated from the Sargasso Sea
MGKIVIINGPNLNFLGQREIDKYGTTTYKELISELEDYTNNKDELIFYQSNHEGEICEFIQNIFNNETIDGLIINPGGYTHTSVAIRDSLLLLNLPIVEVHMTDIRKRENFRKTNLIYDVCEKSFVGLGIEGYKKGIDYINEK

SEQ ID NO: 149983 - protein, 147 aa, Unknown
  Bacterial polypetide isolated from the Sargasso Sea
MSKLIIINGPNLNLLGEREQTQYGSKDYKYLEEICQKRAKYLKIDIEIKQSNIEGDIVNIIQDARKTHDGIIINAAGYSHTSVAIRDALSIFKKPIIELHISNIYKREDFRHKSLISAVVTGIICGLGINGYILAINSMHEILKNEN

SEQ ID NO: 149984 - protein, 145 aa, Unknown
  Bacterial polypetide isolated from the Sargasso Sea
MKKILIINGPNLNLLGNREDDIYGKDSLDKIKSDCENKGTEKKLEIIFFQSNNEGEIIDKIHEVNDKFDGLIINPAAFTHSSIAILDSLRAINKPKIEIHLSNIYSREEYRKKSITSEGVDGLICGFGGNSYLLGIEAICKLIYK

SEQ ID NO: 149985 - protein, 146 aa, Unknown
  Bacterial polypetide isolated from the Sargasso Sea
MKILVIHGPNLNLLGLREPDVYGLTTMEEINQGLLDIANSNDIEIEAFQSNAEHEIVTKLQESINQIDYIIINPGALTHTSIAIRDCLLGIGVPFYEVHISNIFAREEFRHKSFFSDIASGIICGLGTQGYELALSHIIKSFKDKK

SEQ ID NO: 149986 - protein, 149 aa, Unknown
  Bacterial polypetide isolated from the Sargasso Sea
MTEKILVINGPNLNLLGSREKEKYGNTSLQDIQKRCADHASKINLDIDFKQSNVEGEIVNFIQDANKKYKGIIINAGGYTHTSVAILDALLAVKKPTIELHITNIYKREDFRHKSLISKAADGIICGLGVEGYIMALNGIKNLIKNENR

SEQ ID NO: 149987 - protein, 146 aa, Unknown
  Bacterial polypetide isolated from the Sargasso Sea
MKKIIIINGPNLNLLGNREQKIYGDKSLDEIEKISKQKSSSLNIDCFFCQSNDEGEIINHIHSVESSYDGLIINPAAFTHTSVALLDALRSINKPKIEIHLSNIYTREEYRKKSITSEGVDGLICGFGSLSYILAIEALSNLIYNK

SEQ ID NO: 149988 - protein, 148 aa, Unknown
  Bacterial polypetide isolated from the Sargasso Sea
MKNDILIINGPNLNMLGTREPDVYGLETLEQIEAKCISWGKQYSLHVNFSQSNEEGKIVNLIQQAPDSFSAIIINAGAYTHTSIAIHDALKGCDLPIIEVHLSNIFKRESFRHNSYISGTAEGLICGFGSESYHLAIIASANLLKSQN

SEQ ID NO: 149989 - protein, 142 aa, Unknown
  Bacterial polypetide isolated from the Sargasso Sea
MKVLFINGPNLNMLGTREEDVYGSLTLDQINEKILSKANELKIDTDFFQSNVEGNLVSKIQESSDFDYIVINPAAFTHTSIAIRDALLSIKAKFIEVHLSNIYSREDFRHNSYVSSIAIGVISGFGFHGYLMALDYILSLKD

SEQ ID NO: 149990 - protein, 139 aa, Unknown
  Bacterial polypetide isolated from the Sargasso Sea
MKIQIINGPNLNLLGVREKDIYGSLSFDEYFLKLKTKFKNIDLFNYQSNIEGELINKIQDVGFDFDGIILNAAAYTHTSVGIADAIRGITSPVIEVHISNTKSREDFRKKSFISPHAKGVIQGFGLYSYDLAILSFLNN

SEQ ID NO: 149991 - protein, 149 aa, Unknown
  Bacterial polypetide isolated from the Sargasso Sea
MNNKIIIINGPNLNLLGEREQSQYGSTSYDQLKVNCSEKAQEIGLDVEFTQSNVEGELVNIIQDARKKFDGMIINAAAFTHTSVAIRDALDLFKKPIIELHLSNIYKREEFRHKSLISGVVSGGIFGLGTDGYILAIISLQKTLQNENR

SEQ ID NO: 149992 - protein, 149 aa, Unknown
  Bacterial polypetide isolated from the Sargasso Sea
MYYKLTVNDIIIINGPNLNLLGEREQSQYGSITFEELKKECLKKSKELNINLKFTQSNIEGEIVNHIQEARNNCDGIIINAAGFTHTSVAIRDALSIFKKPIIELHISNIYKREEFRQKSLISGVVTGGIFGIGSDGYILAIIAMQKLL

SEQ ID NO: 149993 - protein, 144 aa, Unknown
  Bacterial polypetide isolated from the Sargasso Sea
MKILIINGPNLNMLGSRETDVYGNKSLSDLESMLVGKKHDVNLEFFQSNSEKEIIEKIHSQKTENYSYGIFNFGAFTHTSIAIRDAILSVKLPFYEVHISNVYAREEFRHKSFFNDIAVGSIVGFGFDGYEFALDKIMRGKDGS

SEQ ID NO: 149994 - protein, 113 aa, Unknown
  Bacterial polypetide isolated from the Sargasso Sea
MIQKILVINGPNLNLLGTREKEKYGNSTLADIQKKCESYSKKIGLEVDFKQSNVEGEIVNLIQNTKDKHKGIIINAGGYTHTSVAILDALLAVKKPTIELHITNIYKREDFRH

SEQ ID NO: 149995 - protein, 132 aa, Unknown
  Bacterial polypetide isolated from the Sargasso Sea
MKLTIINGPNLNLLGSRETDIYGNQDFETFLESLKSKYPKINLEYHQSNVEGELINFIQDSRDSDGIIINAAAYTHTSVGIGDAIKAIDTKVIEVHISNTFSREEYRHNSYLSPVVDGIIIGFGLKKLRISN

SEQ ID NO: 149996 - protein, 149 aa, Unknown
  Bacterial polypetide isolated from the Sargasso Sea
MTNKIIIINGPNLNLLGEREQSQYGSDTFEQLKEKCLKKSKEIGLDVRFTQSNLEGEIVNIIQEARKEYSGIIINAAGFTHTSVAIRDALSLFKKPIIELHISNIYKREEFRHKSLISDIATGGIFGLGTEGYILAIISIQKIIENENR

SEQ ID NO: 149997 - protein, 90 aa, Unknown
  Bacterial polypetide isolated from the Sargasso Sea
MISSIHKAQTDNIDLIIFNPGAFTHTSIALRDALLGVNIPFFEVHISNIFSREEFRKKSYLSDIAEGVITGHGVYGYSLALMSAVNKYKK

SEQ ID NO: 149998 - protein, 146 aa, Unknown; identical to SEQ ID NO: 149987
  Bacterial polypetide isolated from the Sargasso Sea

SEQ ID NO: 149999 - protein, 47 aa, Unknown
  Bacterial polypetide isolated from the Sargasso Sea
MSKKIIQFIDGPNLNLLGSREPEIYGSMTLEDIHVMINDHIRKNKLD

SEQ ID NO: 150000 - protein, 45 aa, Unknown
  Bacterial polypetide isolated from the Sargasso Sea
MSKLIIINGPNLNLLGEREQTQYGSKDYKHLKEICPNRAKDLNIE

SEQ ID NO: 150001 - protein, 106 aa, Unknown
  Bacterial polypetide isolated from the Sargasso Sea
QATASKEEAEKLAGLLSLDAETTAALQEYPTKGSLEPVIPTDPLIYRFYEIMQVYGMPLKDVIQEHFGDGIMSAIDFTIDVDKVEDPKGDRVKIVMCGKFLPYKKW

SEQ ID NO: 150002 - protein, 132 aa, Unknown
  Bacterial polypetide isolated from the Sargasso Sea
MAAPTQATVTATLMAAKKAKGLSFADLEAAMGLDEVWVASLFYGQATASKEEAEKLAELLSLDPAMTAAIQEFPTKGSLEPVIPTDPLIYRFYEIMQVYGMPLKDVIQEKFGDGIMSAIDFTLDVEKVEDPK

SEQ ID NO: 150003 - protein, 144 aa, Unknown
  Bacterial polypetide isolated from the Sargasso Sea
MSLTATLMAAKKAKGMSFADLEAAMGLDEVWVASLFYGQATASKEEAEKLAGLLSLDAETTAALQEYPTKGSLEPVIPTDPLIYRFYEIMQVYGMPLKDVIQEKFGDGIMSAIDFTLDVDKVEDPKGDRVKITMCGKFLPYKKW

SEQ ID NO: 150004 - protein, 150 aa, Unknown
  Bacterial polypetide isolated from the Sargasso Sea
MAAPSADTITATLLAAKKAKGIAFSELGRLLGRDEVWVASLFYGQSTASVAEAQQLAEVLNLDPAITEALQSYPTKGSLEPVIPTDPLIYRFYEIMQVYGMPMKDVIQEKFGDGIMSAIDFTLNIDKVEDPAGDRVKVTMCGKFLPYKKW

SEQ ID NO: 150005 - protein, 128 aa, Unknown
  Bacterial polypetide isolated from the Sargasso Sea
SFEDLGKLINRDEVWVASLFYGQATASVEEANILIKALDLQSELEDQLITPPVKGCLDPVIPTDPLIYRFYEIMQVYGLPMKDVIQEKFGDGIMSAIDFSIEVDKVEDPKGDRVLVKMCGKFLPYKKW

SEQ ID NO: 150006 - protein, 144 aa, Unknown
  Bacterial polypetide isolated from the Sargasso Sea
MSLTATLMAAKKAKGMSFADLEAAMGLDEVWVASLFYGQATASKEEAEKLAGLLSLDAETTAALQEYPTKGSLDPVIPTDPLIYRFYEIMQVYGMPLKDVIQEKFGDGIMSAIDFTLDVDKVEDPKGDRVKITMCGKFLPYKKW

SEQ ID NO: 150007 - protein, 132 aa, Unknown
  Bacterial polypetide isolated from the Sargasso Sea
EEQLSWAQLAEVIGHSKEWSTAALLGQMTLTEAQAKAVGAALDLPEEAVMLLQVTPYKGSLPTSVPTDPLIYRFYELISVYGTTFKALIHEEFGDGIMSAIDFNMDLTREPDPKGDRVRIVMSGKFLPYKTY

SEQ ID NO: 150008 - protein, 129 aa, Unknown
  Bacterial polypetide isolated from the Sargasso Sea
GLDWAALGQGIGMSPVWTTSACLGMNSMPKAQADALCEMLELPAEVSTALQAFPHKHWDKAVPTDPLIYRFYEMINVYGETIKELIHEEFGDGIMSAIDFSMDISRVADPKGDRVQIVLNGKFLPYRSW

SEQ ID NO: 150009 - protein, 107 aa, Unknown
  Bacterial polypetide isolated from the Sargasso Sea
MSKIKKIKGRQIFDSRGNPTIEVDITLEDGSFGRASVPSGASTGAYEAYELRDGEKTLSGKTVLKAVEGINTEISNVLCGMEASAQEEIDNKMIELDSTNNKSRLGA

SEQ ID NO: 150010 - protein, 159 aa, Unknown
  Bacterial polypetide isolated from the Sargasso Sea
KNIELFGESLTGQEMIQTLNEWASRFPLICIEDGLHEEAWEFWPELTQALGNLCLTLGDDFLCTNPGRIRKAVETSACNALLLKLNQVGTLSEGAEACRLAREASWKVVVSARSGETEDDWLADLAFGWAADYIKVGSITQSERLSKYNRLLEIESSYD

SEQ ID NO: 150011 - protein, 114 aa, Unknown
  Bacterial polypetide isolated from the Sargasso Sea
MSSILNIIAYEILDSRGIPTLYTEVELENGVKGAASVPSGASTGVHEALELRDKDNKRFNGKGVLDNIRIINSLIFDALAGLDARRQKDIDKLLIDLDGTKNKKKLGANTILSV

SEQ ID NO: 150012 - protein, 42 aa, Unknown
  Bacterial polypetide isolated from the Sargasso Sea
MFHTDLGNRRSTIADLSVGMCSGQIKTGSISRTDRTSKYNQF

SEQ ID NO: 150013 - protein, 87 aa, Unknown
  Bacterial polypetide isolated from the Sargasso Sea
MSKIIRVVARQVYDSRGNPTIEAEVFSNNLSASAICPSGASTGTFEAYEKRDKSNKKYLGKSVLIPVATVNRLISKKLKNLNIHDQE

SEQ ID NO: 150014 - protein, 61 aa, Unknown
  Bacterial polypetide isolated from the Sargasso Sea
MSKIKKIKGRQIFDSRGNPTIEVDITLEDGSFGRASVPSGASTGAYEAYELRDGEPTLSGK

SEQ ID NO: 150015 - protein, 73 aa, Unknown
  Bacterial polypetide isolated from the Sargasso Sea
MSKISNVNAIQVFDSRGIPTIACEIKLDNGISASAMVPSGASTGSKEAIELRDSDSIITEKEFIMRFQILNNK

SEQ ID NO: 150016 - protein, 164 aa, Unknown
  Bacterial polypetide isolated from the Sargasso Sea
HFYKEEKYELDGESLSGQEMIQTLNEWASRFPLVSIEDGIHEEAWEFWPKLTQALDNLCLTLGDDFLCTNPGRIRRAVETSACNALLLKLNQVGTVSEGAEACRLAREAGWKVVVSARSGETEDDWLADLAFGWAADFIKVGSITQSERLAKYNRLLEIESSYD

SEQ ID NO: 150017 - protein, 64 aa, Unknown
  Bacterial polypetide isolated from the Sargasso Sea
MSKIKRVVARQVYDSRGNPTIEAEVFSNNLSASAICPSGASTGTFEAYEKRDKINKKYLGKSVL

SEQ ID NO: 150018 - protein, 35 aa, Unknown
  Bacterial polypetide isolated from the Sargasso Sea
MTRSDRVAKYNQLIRIEEALKGKSQYAGNSILKQN

SEQ ID NO: 150019 - protein, 117 aa, Unknown
  Bacterial polypetide isolated from the Sargasso Sea
MSPPDETAVFDSLDLVIDTVVAREVLDSRGTPTVEAEVLLEGGAGGRAIVPSGASTGAHEAHELRDGDAMRYFGKGVNQAVSNVEERLAPALCGLSALDQGAVDAAMNELDGSANKS

SEQ ID NO: 150020 - protein, 48 aa, Unknown
  Bacterial polypetide isolated from the Sargasso Sea
MKIKNILSRSVLDSRGNPTIEVDVQLADHSIGRAIVPSGASTGKFEAV

SEQ ID NO: 150021 - protein, 55 aa, Unknown
  Bacterial polypetide isolated from the Sargasso Sea
MSKITKIKARQVFDSRGNPTIEAEVFSKNYSASAICPSGASTGSYEAYEKEIQII

SEQ ID NO: 150022 - protein, 33 aa, Unknown
  Bacterial polypetide isolated from the Sargasso Sea
RSDRLAKYNQLIRIEEELGDTAVYAGHSILKSK

SEQ ID NO: 150023 - protein, 156 aa, Unknown
  Bacterial polypetide isolated from the Sargasso Sea
MSKITKVVSRQIFDSRGIPTIETEIFCGKVSSKAICPSGASTGSYEAFEKRDISNKKYLGKSVFSAVTNVNKIISKKILNKNVHNQELIDSILIKLDGTKQKNKLGANAILSVSIAVKKLSAKLKRIPLYKNFLIKKNFKLPFPLMNIIKWGCACQ

SEQ ID NO: 150024 - protein, 241 aa, Unknown
  Bacterial polypetide isolated from the Sargasso Sea
NKNFLLYFYNNPIIQLLIGFPLILFIFINVNNIIYFQNKNEILLFLLPIVLCLFVFVLTSFRKTRFLGEPHRYIEYCSIFIIAYYVTNFNNNRYIASLLIVLYVFSIIVTTILSLRIKEVKQNEEKSIVKVKEYIYHQSKNNTYKIFCNNLNVTKQLLDIKNLFFWGFTNSKKIGNYSFEDIYEEYPIVSDKIVADLIAKYKIDLALFDNSTSFNISKNKILLNNFDFVFAAGSLNLYKLK

SEQ ID NO: 150025 - protein, 42 aa, Unknown
  Bacterial polypetide isolated from the Sargasso Sea
CTARASANALDLPLYRYLGGSIIQSPSSPINECNKWWCTCTK

SEQ ID NO: 150026 - protein, 75 aa, Unknown
  Bacterial polypetide isolated from the Sargasso Sea
MSKISRVKARQVFDSRGNPTIEAEVFVNNYSSSSICPSGASTGSYEVHEKRDKSNKKYLGKSVYKAINIINKKIS

SEQ ID NO: 150027 - protein, 67 aa, Unknown
  Bacterial polypetide isolated from the Sargasso Sea
MAKIKKIIGRQVFDSRGNPTVEAELFSEIGSTLAIVPSGASPGTHEAYELRDKKNNEYLGKSVFKAV

SEQ ID NO: 150028 - protein, 61 aa, Unknown
  Bacterial polypetide isolated from the Sargasso Sea
MSKITKVIARQVYDSRGNPTIEAEVFANNMKARAICPSGASTGSHEAYEKRDFLDKKIFRK

SEQ ID NO: 150029 - protein, 279 aa, Unknown
  Bacterial polypetide isolated from the Sargasso Sea
FNVPIKLIKDAAAAVHQFDDPPDDLAAPESLLSAQSDADASQLAAVASIDAAAESALQVTLAAEANNLVAAKNYTVAVSAKAGAAAREAARIEAATEDLLSAKAAATAAYNQALAAKADAASSETAAQSRLSDVRATKSAAEAAEKSAAAAAIASSAAAATLSEAKVVHEVTVAEAAAAASALASVASAQSIDPEAYSAVDQANTRAQNALAKSVAALEDAEEAATAAATASTEAAAQSVLATTAAAGVNEAVAEAAYGAAQVARTQAETAVASALSAK

SEQ ID NO: 150030 - protein, 88 aa, Unknown
  Bacterial polypetide isolated from the Sargasso Sea
MKIKDIKAYELLDSRGNPTVGVEVFLSDESVGLALVPSGASTGKYEAIEKRDSQKDRYLGRGVLVAVNNIHNDILPLLRDKDASDLFG

SEQ ID NO: 150031 - protein, 107 aa, Unknown
  Bacterial polypetide isolated from the Sargasso Sea
MSKISKVVARQVFDSRGNPTIETEVFVKDISASAICPSGASTGTYEAFEKRDINNKKYLGKSVLKPVEFINKVISNKLKNFNVHQQEKIDNLLIRLDGTKQKKRVGA

SEQ ID NO: 150032 - protein, 77 aa, Unknown
  Bacterial polypetide isolated from the Sargasso Sea
MIDKILNIYSRQVLDSRGNPTIYTLVKTSSGNTGFSYVPSGASTGSKEALELRDNDPKYFNGKSVLSAVKNVTDEIG

SEQ ID NO: 150033 - protein, 43 aa, Unknown
  Bacterial polypetide isolated from the Sargasso Sea
MSKISRVKARQVFDSRGNPTIEAEVFSKNLSASAICPSGASTG

SEQ ID NO: 150034 - protein, 65 aa, Unknown
  Bacterial polypetide isolated from the Sargasso Sea
MSKIKRIIARQVYDSRGNPTIEAEVFSNNLSASAICPSGASTGTFEAYEKRDKSNKKYLGKSVLI

SEQ ID NO: 150035 - protein, 44 aa, Unknown
  Bacterial polypetide isolated from the Sargasso Sea
MHIKSIDAIEILDSRGVPSIHTSVVLNSGHKGEAMVPSGASTGK

SEQ ID NO: 150036 - protein, 54 aa, Unknown
  Bacterial polypetide isolated from the Sargasso Sea
MGVSARSGETEDDWLADLAFGWAADYIKVGSITQSERLAKYNRLLEIESSYDGS

SEQ ID NO: 150037 - protein, 141 aa, Unknown
  Bacterial polypetide isolated from the Sargasso Sea
MSKIKRVVARQVYDSRGNPTIEAEVFSNSLSASAICPSGASTGTFEAYEKRDKSNKKYLGKSVLIPVATVNKLISKKLKNQNIHDQERIDSILIKLDGTKQKSKLGANTILAVSMATKKLSAKVKKIPLYKNFIVKKNFKL

SEQ ID NO: 150038 - protein, 139 aa, Unknown
  Bacterial polypetide isolated from the Sargasso Sea
MNKITKVIARQVFDSRGNPTIEAEVFSKNISASSICPSGASTGTYEAYEKRDKSNKKYLGKSVLKPVSFINKIISKKLKNQNVHSQERIDHILIKLDGTKQKSKIGANAILAISMAVKKLSAKIRKIPLYKSFTVKKNF

SEQ ID NO: 150039 - protein, 93 aa, Unknown
  Bacterial polypetide isolated from the Sargasso Sea
MGSEVYHNLKGVIKKKYGQDACNVGDEGGFAPNILDNTEGLDLVVEAIEKAGYTGAAPPSRVTACPSTTCLSRGLLRACPGGRCFAPRVTQAR

SEQ ID NO: 150040 - protein, 159 aa, Unknown
  Bacterial polypetide isolated from the Sargasso Sea
MSGEKYNYKEQSLTPEEQVDFVLGLIEEYNLHSVEDPLDQEDYESWASLTKQTDALIIGDDLYVTNSDRLAKGIEMKSTNSILIKPNQIGTLTDTQKTVDLADEADMATVISHRSGETTDSTIAHLGVAFGSHAIKTGIMGGERIAKLNELVRISEQLR

SEQ ID NO: 150041 - protein, 84 aa, Unknown
  Bacterial polypetide isolated from the Sargasso Sea
MSKIKRVIARQIYDSRGNPTIEAEVFTNNLSASAICPSGASTGTYEAYEKRDKTNKKYLGKSVLKPVNIINKIISKKLKNINVH

SEQ ID NO: 150042 - protein, 45 aa, Unknown
  Bacterial polypetide isolated from the Sargasso Sea
YLAVGTNSNQIKTGSLARSERISKYNQLIRIEEDLGRLAKMNKID

SEQ ID NO: 150043 - protein, 92 aa, Unknown
  Bacterial polypetide isolated from the Sargasso Sea
MSSIFKVHARQIFDSRGNPTIEVDLITENGVLGRSSVPSGASTGEHEAVEKRDGGKDYMGKGVKSAVKTVNEILAQKLISLSVFDQKGIDEL

SEQ ID NO: 150044 - protein, 53 aa, Unknown
  Bacterial polypetide isolated from the Sargasso Sea
MSHPSSLAISQVHAREILDSRGFPTLEAEVTLQNGIVGRAAVPSGASTGKREA

SEQ ID NO: 150045 - protein, 115 aa, Unknown
  Bacterial polypetide isolated from the Sargasso Sea
MSKISSIKSIQVLDSRGLPTVACRITLENSLTAGVMIPSGASTGNKEAIELRDNRYEYMGKGVIDAVNNINEKIKPLLIGIDPSDQEQIDTMLIELDGTPDKSNIGANAILAAYL

SEQ ID NO: 150046 - protein, 335 aa, Unknown
  Bacterial polypetide isolated from the Sargasso Sea
MSRIVTDLRSPGMRDRDAMFMRRFREVERVFLTVTSQAGFDEIRTPTLEPLHLFTSANALTPQALEEAYSFIDWDGWSGERVVMRPDVTISVARWYVENRDADGSGRVAYVQPAFRFTDRGDRERWQCGVEGIGSDQSVSDVSMIRTAIEFLEHVGVERISISLAHSKLLRTLLEGGGFSAGEIIDFHESLIDGAAEQIISTSRLPAEIQNCLSLLVHPEATSVDFARNAHSVISSVVEEAASSMEELIAITSALEELGIPFQLQPAAVRPYEYYSGITFNISGETIGVTDKSMSSWILGGRYDSLIESLGGGSVPAIGWAFDIDTFCQQVTGSD

SEQ ID NO: 150047 - protein, 59 aa, Unknown
  Bacterial polypetide isolated from the Sargasso Sea
AREAGWKVVVSARSGETEDDWLADLAFGWAADYIKVGSITQSERLAKYNRLLEIESSYD

SEQ ID NO: 150048 - protein, 379 aa, Unknown
  Bacterial polypetide isolated from the Sargasso Sea
YHIAEDMVNGPEAIAFNDEGKMYTANEDGRIIVLSRDGTNPYDFAQTGGRPLGLKFDSQGNLIVADAYEGLLSIDTTGEITTLTTECNSLPFLLTDDLDISSNGIIYFSDASSVNNLANNGDDWGEPNGRLLAYDPQTEETSLLLDSLYFANGVVLAPDESYVLVNESSLGRVRRYWLTGANTGETEVFSYISGNVDWEGWVVPDNITYNDEGIFWVATYFGPIIGIDIFGQIVYELNFDFNLFGENTSVIQYNDSLYLGTLHDFFIGMIPLPEELLSDHNVPQLVTSGYQLNQNYPNPFNPITTLRYDIPEHSHVNIIIYDMIGREVKTLVNQFQDAGYKSVVWDATNDFGQPVSGGIYIYQIQAGSYISANKMVLLK

SEQ ID NO: 150049 - protein, 83 aa, Unknown
  Bacterial polypetide isolated from the Sargasso Sea
MSKISKIIARQVFDSRGNPTIETEVFVKNVSASAICPSGASTGTYEAFEKRDINNKKYLGKSVLKPVEFINKVISNKLKNFNV

SEQ ID NO: 150050 - protein, 204 aa, Unknown
  Bacterial polypetide isolated from the Sargasso Sea
MIYEFRTYQIKTGSLQKVMSLFKDKIEGRNTISKLGAFWYTEIGQLNQIIHVWPYESMEHRNASREEAINKKLWPPDSAEYMVKMNTEFWKPVSFSPKWEDRNIGPFFEMRIYTYPFNEIHKMLPAWEEKIEARNSLAPLVGAFVSEVGDVNKFMHIWAYKSLQHRTEAREKFSSIGWPPKSDVKAPIFQENKIVMPSDFSPIQ

SEQ ID NO: 150051 - protein, 52 aa, Unknown
  Bacterial polypetide isolated from the Sargasso Sea
MATIVDIHAREIIDSRGNPTVEVDLSLDDGAFGRASVPSGASTGSFEAMELR

SEQ ID NO: 150052 - protein, 219 aa, Unknown
  Bacterial polypetide isolated from the Sargasso Sea
MLERFDMRALTADEGGLAPSFENSIQVLEEACSAIERAGLKPGQEMHLAVDVASSHFYKEAKYELDGESLTGQEMIQTINEWASRFPLVSIEDGLHEEAWEFWPELTQALDNLCLTLGDDFLCTNPGRIRRAIETSACNALLLKLNQVGTLSEGAEACRLAREAGWKVVVSARSGETEDDWLADLAFGWAADYIKVGSITQSERLAKYNRLLEIESSYD

SEQ ID NO: 150053 - protein, 76 aa, Unknown
  Bacterial polypetide isolated from the Sargasso Sea
MKSHIKNIYSREILDSRGNPTVEVDLVLENDILARAAVPSGASTGDFEAMELRDNNKNRYMGKGVLAAVIMSIMNT

SEQ ID NO: 150054 - protein, 76 aa, Unknown
  Bacterial polypetide isolated from the Sargasso Sea
MTKIKDIKARQIFDSRGNPTVEVDVITHDNIIGRAAVPSGASTGEHEAVELRDGGNDYMGKGVSMAVSNVNSTIRE

SEQ ID NO: 150055 - protein, 43 aa, Unknown
  Bacterial polypetide isolated from the Sargasso Sea
MSAILDIQAREILDSRGNPTVEVDVVLEDGSVGRASVPSGAST

SEQ ID NO: 150056 - protein, 33 aa, Unknown
  Bacterial polypetide isolated from the Sargasso Sea
VFDSRGNPTVEAEVFQIIFIIINMSIWSFHRNI

SEQ ID NO: 150057 - protein, 94 aa, Unknown
  Bacterial polypetide isolated from the Sargasso Sea
KQKSKLGANTILAVSMAVKKLSAKIKKLPLFKTFLVKKNFRLPYPLMNVINGGAHANNGLRIQEFMIRPDKAKSIQESIRICFLVINNLKKLIK

SEQ ID NO: 150058 - protein, 99 aa, Unknown
  Bacterial polypetide isolated from the Sargasso Sea
MTTIKSITAIEILDSRGNPTVGCTVTLDDNIQATAYVPSGASTGQHEAYELRDEENDRYFGKGVRNAVANVNQVINEALINTDWETLWEFDKALIGLDG

SEQ ID NO: 150059 - protein, 60 aa, Unknown
  Bacterial polypetide isolated from the Sargasso Sea
IISHRSGDSEDTFIADLAVGTDSNQIKTGSLARSERVSKYNQLIRIEEELGKSSKMNKVN

SEQ ID NO: 150060 - protein, 73 aa, Unknown
  Bacterial polypetide isolated from the Sargasso Sea
MSKNQPKIQKLHARQILDSRGNPTIEVEVSLEGCYGRAAVPSGASTGQFEAIELRDNNREFHGKGVNKAINNF

SEQ ID NO: 150061 - protein, 95 aa, Unknown
  Bacterial polypetide isolated from the Sargasso Sea
EARQVLDSRGNPTVEAEVFLECGASGRAIVPSGASTGAHEAHELRDGGSKYMGKGVLNPVNKIHETISPALCGFSALDPTVVDKLMIEIDGTLNK

SEQ ID NO: 150062 - protein, 78 aa, Unknown
  Bacterial polypetide isolated from the Sargasso Sea
MSKIVSVKAREILDSRGVPTVEVETALDSGVIGRASIPSGASTGAYEAIELRDGDPKRYNGKGTLKAVNNINTEIQSL

SEQ ID NO: 150063 - protein, 149 aa, Unknown
  Bacterial polypetide isolated from the Sargasso Sea
MSKITKVFARQVFDSRGNPTVEAEVFSKNYSCSSICPSGASTGSFEAHEKRDNNKKNYNGKSVFKAVKIINTVIAKKLINKNVHDQEKIDHTLLKLDGTKQKTKLGANSMLAVSMAVKKLSAKIKKIPLYKNFLVKKNFLLPFPNDEYN

SEQ ID NO: 150064 - protein, 254 aa, Unknown
  Bacterial polypetide isolated from the Sargasso Sea
GEQVSIQDVLIVPNAESIKDSLASVYEVYQSAADGMLERFDMRALTADEGGLAPSFENSIQVLEEACSAIERAGLKPGQEMHLAVDVASSHFYKESKYELDGESLTGQEMIQTLNEWASRFPLVSIEDGLHEEAWEFWPELTQALGNLCLSLGDDFLCTNPGRIRKAVETSACNALLLKLNQVGTLSEGAEACRLAREAGWKVVVSARSGETEDDWLADLAFGWAADYIKVGSITQSERLAKYNRLLEIESSYD

SEQ ID NO: 150065 - protein, 103 aa, Unknown
  Bacterial polypetide isolated from the Sargasso Sea
MSKITKVVARQVFDSRGNPTVEAEIFVKNLSSSSICPSGASTGTYEAFEKRDKVNKKYLGKSVFIPIKYINTVISKKLKNQNIHNQEKIDHTLIKLDGTKQKK

SEQ ID NO: 150066 - protein, 68 aa, Unknown
  Bacterial polypetide isolated from the Sargasso Sea
MAKITNVKGRQVFDSRGNPTVEAEVFLDNDISATAISPSGASTGAFEAHELRDQDKNNFLGKSVKKAV

SEQ ID NO: 150067 - protein, 52 aa, Unknown
  Bacterial polypetide isolated from the Sargasso Sea
ADLAVGMGMGQIKTGSISRTDRTCKYNQLLRIEEELGTRAKIANLSYLGIPR

SEQ ID NO: 150068 - protein, 148 aa, Unknown
  Bacterial polypetide isolated from the Sargasso Sea
MSRITKVIARQVFDSRGNPTVEAEVFSKNISSSSICPSGASTGSYEAHEKRDLNKKNYNGKSVYKAVKIINTIIAKKLKNQKVHNQEKIDHILLKLDGTKQKIKLGANSMLAVSMAVKKLSSKIKKIPLYKNFLVKNKKGLPYPLMNI

SEQ ID NO: 150069 - protein, 130 aa, Unknown
  Bacterial polypetide isolated from the Sargasso Sea
IAAIEKNVSLFKYLGNSKKSELPIPLLNIINGGVHAKNNLDIQEFMIRPDKAKSFTEAMRISFLVIQNLKSMLDVTNVGDEGGFAPNLQSDEEAIKIIINSIEKSGFKPGEDISICLDVAANELKEPKTI

SEQ ID NO: 150070 - protein, 68 aa, Unknown
  Bacterial polypetide isolated from the Sargasso Sea
NFSESLRMGTEIFHSLKSLLDQKGLSTAVGDEGGFAPNLSSSEEAGDLLLEAIQKAGFKPGEQVSLAL

SEQ ID NO: 150071 - protein, 124 aa, Unknown
  Bacterial polypetide isolated from the Sargasso Sea
MNKKIKSINARHILDSRANPTIEVEVTTSDNIKGRAAVPSGASTGALEAHELRDNDPSFNGMGVNKAIENVKTIISDTLLGEDVTDQSNIDNKLIELDGTDNKNNLGANAILAVSMASMRASAR

SEQ ID NO: 150072 - protein, 138 aa, Unknown
  Bacterial polypetide isolated from the Sargasso Sea
MAKIKNVIGRQVFDSRGNPTVEAEIFLDNGSSATAISPSGASTGAYEAHELRDKDQNKFLGKSVINAVNNINSKISNKLKNLNPNQQENIDKILLELDGSENKTNLGANATLAVSLANAKCAAIVNNPSLYKSFGCIL

SEQ ID NO: 150073 - protein, 159 aa, Unknown
  Bacterial polypetide isolated from the Sargasso Sea
MSKITKVIARQVFDSRGNPTIEAEVYCKNISASSICPSGASTGTYEAYEKRDKTNKKYLGKSVLKPVSFINKVISKKLRNQNVHDQERIDHLLIKLDGTKQKSNIGANAILSISMAVKKLSAKKRKIPLYKSFIVKKNYKLPYPLMNIINGGAHANNGL

SEQ ID NO: 150074 - protein, 61 aa, Unknown
  Bacterial polypetide isolated from the Sargasso Sea
MNVIDKIFGRQILDSRGNPTVEVEITLDNGIKSRASVPSGASTGEHEAIEKRDNVSSKYLG

SEQ ID NO: 150075 - protein, 76 aa, Unknown
  Bacterial polypetide isolated from the Sargasso Sea
MPKISYIRARQILDSRGTPTVEVDMALEGQKLVRSSVPSGASTGSYEAVELRDNTKDFLGKGVSKAVENINKIIAN

SEQ ID NO: 150076 - protein, 50 aa, Unknown
  Bacterial polypetide isolated from the Sargasso Sea
MAKIKKVKGRQVFDSRGNPTVEAEVFSENRSAFAIVPSGASTGTHEAFEL

SEQ ID NO: 150077 - protein, 68 aa, Unknown
  Bacterial polypetide isolated from the Sargasso Sea
KELCSSYPIYSIEDGMSEDDWLGWKCLTDEIGEKIQLVGDDLFVTNIDRLKKGIDENIANSILIKLNQ

SEQ ID NO: 150078 - protein, 153 aa, Unknown
  Bacterial polypetide isolated from the Sargasso Sea
MSRISKVVARQIFDSRGNPTIEAQVYCNKISASSICPSGASTGTYEAFEKRDFNNKRYLGKSVFKAINIVNTLISKKLKNQNIHNQEKIDHILIKLDGTKHKKKLGANSTLAVSMAVKKLSAKLKKIPLYKTFTSKKNFLLPYPLMNIINGGA

SEQ ID NO: 150079 - protein, 97 aa, Unknown
  Bacterial polypetide isolated from the Sargasso Sea
MPKIKNIIGREILDSRGNPTIECDITLEDNSFGRASVPSGASTGIHEALELRDKDKNRYSGKGVLKAINNINNKILPEIKNKNFDNIKSFDNFLINL

SEQ ID NO: 150080 - protein, 70 aa, Unknown
  Bacterial polypetide isolated from the Sargasso Sea
MAKIKKVKGRQVFDSRGNPTVEVEIYSDADLYASAIVPSGASTGTYEAYELRDKKNKDYLGKSVFKQLRM

SEQ ID NO: 150081 - protein, 63 aa, Unknown
  Bacterial polypetide isolated from the Sargasso Sea
PSPSPSPPPPPSPLPLTLGQIKTGAPCRSDRNAKYNQLMRIEEELGADAVYAGATWRKPSWMA

SEQ ID NO: 150082 - protein, 100 aa, Unknown
  Bacterial polypetide isolated from the Sargasso Sea
KLSAKVKKIPLYKNFIVKKNFKLPFPLMNIINGGAHADNGLRIQEFMIRPDKAKSFNDAVRMCFLVINNLKVLLKKAGHSINVGDEGGFAPMISDNESAL

SEQ ID NO: 150083 - protein, 157 aa, Unknown
  Bacterial polypetide isolated from the Sargasso Sea
MNIKIKSISARHILDSRANPTIEVEVTTSDNIKGRAAVPSGASTGALEAHELRDNDPSFNGMGVNKAIENVKTIISDTLIGVDVTDQSNIDNKLIELDGTDNKNNLGANAILAVSMASMRASANQQNKQLFELFPKYLRTTFSTCSFYEYSQWRCTR

SEQ ID NO: 150084 - protein, 66 aa, Unknown
  Bacterial polypetide isolated from the Sargasso Sea
MSIIKQVKAREIIDSRGNPTIEVDVYLNSGDYGRASVPSGASTGKHEALELRDCNSKIFQGKGVSK

SEQ ID NO: 150085 - protein, 274 aa, Unknown
  Bacterial polypetide isolated from the Sargasso Sea
GGISASASLPSGASTGGSEAVELRDGNPNRFRGLGCLNAVSNLQQVLAPALEGESFSSQAALDHNLQELDGTSDKSNLGANTLLAVSLAFARATACSRKMSLHQYFSEILGVKPGMPRLTVNLFSGGKHAGEQVSIQDVLIVPNAESIKDSLALVYEVYQSAADGMLERFGMRALTADEGGLAPSFENSIQVLEEACSAIERAGLKPGQEMHLAVDVASSHFYKELKYELDGESLTGQEMIQILNEWASRFPLVSIEDGLHEEAWEFWPELTQV

SEQ ID NO: 150086 - protein, 104 aa, Unknown
  Bacterial polypetide isolated from the Sargasso Sea
MSKITKVIARQVYDSRGNPTVEAEVFANNMKARAICPSGASTGSHEAFEKRDVKNKKYLGKSVFKAVNLINTKISKKLKNQNIHNQEKIDYILIKIDGTKQKKK

SEQ ID NO: 150087 - protein, 173 aa, Unknown
  Bacterial polypetide isolated from the Sargasso Sea
MQIKSIDAIEILDSRGVPSIHTSVVLNSGHKGDAMVPSGASTGKKEAFELRDNDGRFDGKGTKKAIENIKNFIQPALMGKPIEDQKELDQIMINLDGTRQKKKIGANSILSVSLACTRAAANAMNLPLYDYIRILFNSKSDKGSTLSIPKPMLNIFNGGAHSNNRIDIQEFMI

SEQ ID NO: 150088 - protein, 71 aa, Unknown
  Bacterial polypetide isolated from the Sargasso Sea
MSKIKKLIGREILDSRGNPTIEVDVHLASGQIGRAAVPSGASTGQHEAIELRDNDLSRFGGKGVLNVIDNI

SEQ ID NO: 150089 - protein, 78 aa, Unknown
  Bacterial polypetide isolated from the Sargasso Sea
LTETFSAMDLAFKNNFVAIISHRSGETGDHFIADLAVATSSAHIKTGSASRSDRMEKYNQLLRIEEHLGGQAKYLPIK

SEQ ID NO: 150090 - protein, 104 aa, Unknown
  Bacterial polypetide isolated from the Sargasso Sea
MGALQQKQGKLEAAEKSYRDALRCDPNDASAHNNLGILLEKQGKLAAAENSFREALRCDPDYAIAHYNLGILLEQQGKLAAAENSFREALRCNPDYAIAHINLG

SEQ ID NO: 150091 - protein, 44 aa, Unknown
  Bacterial polypetide isolated from the Sargasso Sea
MAVGTNSNQIKTGSLARSERVAKYNQLIRIEEKLGKSAKMNKIV

SEQ ID NO: 150092 - protein, 101 aa, Unknown
  Bacterial polypetide isolated from the Sargasso Sea
SLRMGTEIFHSLKSLLDQKGLSTAVGDEGGFAPNLSSSEEAGDLLLEAIQKAGFKPGEQVSLALDAASTEFYRDGIYKYEGKSLNSSEMISYLSKLVSNYP

SEQ ID NO: 150093 - protein, 89 aa, Unknown
  Bacterial polypetide isolated from the Sargasso Sea
ILIKPNQIGTISETLEVIKFANIIGYKTIISHRSGDSEDTFISDLAVGTNSNQIKTGSLSRSERVSKYNRLIRIEEELGNKTKMNNINL

SEQ ID NO: 150094 - protein, 31 aa, Unknown
  Bacterial polypetide isolated from the Sargasso Sea
GSLARSERVAKYNRLLRIEEELGNQAKMAKI

SEQ ID NO: 150095 - protein, 216 aa, Unknown
  Bacterial polypetide isolated from the Sargasso Sea
MANITSVKAIQILDSRGLPTVSCRVETDDGLSAISKVPSGASTGEREALELRDGGNEYLGKGVLRAVKNINTKLADVLIGMDARNQFEIDQALIDQDGTPAKKNLGANAVLAASIATLRSGAKSAKLPLYEHVNNLYCSKFKANKQLSLPTPMLNIINGGEHANNNIDIQEFMVMPIGAGSFNECMQWAIEIYGALKSLLASKGLSTAVGDEGGFA

SEQ ID NO: 150096 - protein, 126 aa, Unknown
  Bacterial polypetide isolated from the Sargasso Sea
MSKITKVVARQVFDSRGNPTVEAEVFSKNISASSICPSGASTGSFEAYEKRDINRKDYNGKSVFAAVKIINSIIAKKLKNQSVHNQEKIDHILLKLDGTKQKLKLGANSMLTVSMAVKKLSSKIKK

SEQ ID NO: 150097 - protein, 146 aa, Unknown
  Bacterial polypetide isolated from the Sargasso Sea
MSEIKSLLAREILDSRGVPTVEVDTILENGFFGRASVPSGASTGAYEAIELRDKDNSRHNGRGTLKAVNNINTEVRSLILGKDCQNQSEIDESLIKLDGTNNKSRLGANALLGVSMSVGKAAAAENQRPLFSNLSTGLAKLLPVLM

SEQ ID NO: 150098 - protein, 63 aa, Unknown
  Bacterial polypetide isolated from the Sargasso Sea
MTKIKKIFARQILDSRGNPTIEVDVISSDNLLGRASVPSGASTGSNEAIELRDGDKKYSGKGV

SEQ ID NO: 150099 - protein, 211 aa, Unknown
  Bacterial polypetide isolated from the Sargasso Sea
KLISKKLKNQNIHDQERIDSILIKLDGTKQKTKLGANTILAVSMAVKKLSAKVKKIPLFKNFIVKKKFKLPFPLMNIINGGAHADNGLRIQEFMIRPDKAKSFNEAVRMCFLVINNLKVLLKKAGHSINVGDEGGFAPMISDNESALKLLVQAIKKSGFKNGKDISICLDVAANELIKKGKYSIHSKNYISVDQSIKKYLQLIKKYQIKSI

SEQ ID NO: 150100 - protein, 157 aa, Unknown; identical to SEQ ID NO: 150083
  Bacterial polypetide isolated from the Sargasso Sea

SEQ ID NO: 150101 - protein, 150 aa, Unknown
  Bacterial polypetide isolated from the Sargasso Sea
MSKILKVHGLQVFDSRGIPTVSCKITLENGLSAISMAPSGASTGSKEALELRDSEERYAGKGVFKAIDNINNVLGPLIVGKDPCHQNEIDNILISCDGTVDKSKMGANAILAVSLAVAMVASKLKQKPLYEHFAEIYKDISGNVPKKTIP

SEQ ID NO: 150102 - protein, 71 aa, Unknown
  Bacterial polypetide isolated from the Sargasso Sea
DSRGNPTVEAEVTLKEGTTGLASVPSGAPTGSREAVESRDGDKDIHLGKGVPEAVKNINTEIQSALKNQDI

SEQ ID NO: 150103 - protein, 36 aa, Unknown
  Bacterial polypetide isolated from the Sargasso Sea
SLSRTDRTAKYNQLLRIEEALQGKAKYAASSILNNN

SEQ ID NO: 150104 - protein, 86 aa, Unknown
  Bacterial polypetide isolated from the Sargasso Sea
MSIITKVIARQVFDSRGNPTVEAEVFSKNISSSSICPSGASTGSFEAYEKRDLNKKNYNGKSVFKAVKIINTIIAKKLKNQNVHSQ

SEQ ID NO: 150105 - protein, 86 aa, Unknown
  Bacterial polypetide isolated from the Sargasso Sea
MGKIKNIKSRQVFDSRGNPTVEAEIFSDNDNHVLAIVPSGASTGTYEAFELRDKEDKNYLGKSVFKAIENINGPILKALKNIDLSD

SEQ ID NO: 150106 - protein, 52 aa, Unknown
  Bacterial polypetide isolated from the Sargasso Sea
AGQIKTGSASRTDRVSKYNQLLRIEEELGERARYPGTSIWSSISSPTKTGAS

SEQ ID NO: 150107 - protein, 34 aa, Unknown
  Bacterial polypetide isolated from the Sargasso Sea
MSRSDRVAKYNQLIRIEEELATLVPNNKLSKYIN

SEQ ID NO: 150108 - protein, 57 aa, Unknown
  Bacterial polypetide isolated from the Sargasso Sea
MANIKLVKGRQVFDSRGNPTVEAEVFLDNGISSTAISPYGASTGAFEAYELRDHNNN

SEQ ID NO: 150109 - protein, 42 aa, Unknown
  Bacterial polypetide isolated from the Sargasso Sea
VGTNSNQIKTGSLARSERIAKYNQLIRIEEDLGRSAKMNKID

SEQ ID NO: 150110 - protein, 110 aa, Unknown
  Bacterial polypetide isolated from the Sargasso Sea
MVKIKNIKGRQVFDSRGNPTVEAEIFSDNMSSLAIVPSGASTGSHEAFELRDKQNKNYLGKSVLNAVENINGPILKALKEIDVEDQTKIDNILIELDRTEQKKKLGANAI

SEQ ID NO: 150111 - protein, 78 aa, Unknown
  Bacterial polypetide isolated from the Sargasso Sea
MNNKITNVFARYVLDSRANPTVEVEITLDDGSWGRAAVPSGASTGTLEAHELRDNSKEFNGKGVTKAVENVNKVISKG

SEQ ID NO: 150112 - protein, 68 aa, Unknown
  Bacterial polypetide isolated from the Sargasso Sea
MLKLIGYNTIISHRSGDSEDTFIADLAVGTNSNQIKTGSLARSERVSKYNQLIRIEEILGKNSRMNKI

SEQ ID NO: 150113 - protein, 165 aa, Unknown
  Bacterial polypetide isolated from the Sargasso Sea
FYKEEKYELDGESLSGQEMIQTLNEWASCFPLVSIEDGLHEEAWEFWPELTQALDNLCLTLGDDFLCTNPGRIRKAVKSSACNALLLKLNQVGTLSEGAEACRLAREAGWKVVVSARSGETEDDWLADLAFGWAADYIKVGSITQSERLAKYNRLLEIESSYDLS

SEQ ID NO: 150114 - protein, 77 aa, Unknown
  Bacterial polypetide isolated from the Sargasso Sea
MSTIVDVHARQILDSRGNPTVEVDVCLADGTFGRAAVPSGASTGVHEAWEKRDADNSTYLGKGVLEAVENVNNRIAE

SEQ ID NO: 150115 - protein, 151 aa, Unknown
  Bacterial polypetide isolated from the Sargasso Sea
MKIQSIEGFEVIDSRGNPTVAAKVNLDNSASGIALVPSGASTGQHEANEKRDEDETRYLGKGVLSAVESINKEISGLLKGKDAEDLLANDRTLIESDGTENKNNFGANAILAVSMACAKAASNSKKIPLHKFINSKYSEFCNKEVVASLPI

SEQ ID NO: 150116 - protein, 92 aa, Unknown
  Bacterial polypetide isolated from the Sargasso Sea
MKIDQLKFYEIIDSRGNPTVACKIFSRKFSSISMVPSGASTGSKEAQEIRDNDKKRFFGKGLKEVIKKTEHQIFDAISQKNLLDQQEIDNGL

SEQ ID NO: 150117 - protein, 70 aa, Unknown
  Bacterial polypetide isolated from the Sargasso Sea
RFAQKIGYTTIISHRSGDSEDTFIADLAVGTNSNQIKTGSLCRSERVAKFNQLLRIEADLIKSNNMAKLK

SEQ ID NO: 150118 - protein, 334 aa, Unknown
  Bacterial polypetide isolated from the Sargasso Sea
MEGEIFNSQAALDHRLQELDGTSDKSNLGANTLLAVSLAFARATACSRKISLHQYFSENLGVKPGMPRLTVNLFSGGKHAGEQVSIQDVLIVPNAESIKDSLASVYEVYQSAADGMLEHFNMRALTADEGGLAPSFENSIQVLEEACSAIERAGLIPGQEMHLAVDVASSHFFKEEKYELDGESLSGQEMIQTLNEWASRFPLVSIEDGLHEEAWEFWPELTQSLDNLCLSLGDDFLCTNPGRIRKAVETSACNALLLKLNQVGTLSEGAEACRLAREAGWKVVVSARSGETEDYWLADLAFGWAADYIKVGSITQSERLAKYNRLLEIESSYD

SEQ ID NO: 150119 - protein, 42 aa, Unknown
  Bacterial polypetide isolated from the Sargasso Sea
MAKISQIIGREILDSRGNPTVEADVILNNGVQSRYSVPSGAS

SEQ ID NO: 150120 - protein, 87 aa, Unknown
  Bacterial polypetide isolated from the Sargasso Sea
VPETLDAINLSKKTGFGTIISHRSGETEDTTIADLSVACGVGQIKTGSASRTDRICKYNQLLRIEQQLLDKSNYPGLELLGIREKQV

SEQ ID NO: 150121 - protein, 43 aa, Unknown
  Bacterial polypetide isolated from the Sargasso Sea
IADLAVGLGIGQIKTGAPCRSDRVAKYNRLLWIEEESSNILLK

SEQ ID NO: 150122 - protein, 259 aa, Unknown
  Bacterial polypetide isolated from the Sargasso Sea
MATDLTRIEKLSALEILDSRGRPTIKCFCTFEGGISASASVPSGASTGGSEAVELRDGNPNRFRGLGCLNSVSNLQQVLAPALEGESFSSQVALDHSLQELDGTSDKSNLGANTLLAVSLAFARATACSRKMSLHQYFSEILGVKPRMPRLTVNLFSGGKHAGEQVSIQDVLIVPNAESIKDSLASVYEVYQSAADGMLERFDMRALTADEGGLAPSFENSIQVLEEACSAIERAGLKPRQEMHLALDVASSHFYKEAK

SEQ ID NO: 150123 - protein, 214 aa, Unknown
  Bacterial polypetide isolated from the Sargasso Sea
MNPKIAEVTQRIIERSKETRKAYLEKIEDARRQGPHRGVLSCGNLAHGFAACGTSEKADLRSMTKANVAIVSAYNDMLSAHQPYETYPALIKEAVKEVGSVAQFAGGVPAMCDGVTQGQSGMDLSLMSRDNIAQGAAIALSHNMFDSTLMLGICDKIVPGLLMGALTFGHLPTVFVPAGPMPSGLPNKEKARVRQEFAEGKVGRDALLEAESQS

SEQ ID NO: 150124 - protein, 171 aa, Unknown
  Bacterial polypetide isolated from the Sargasso Sea
MKPKKVNKIVEEVTKNIIKRSKSNRLKYLQKLNAAKDLNIRRDLLSCGNIAHSIAGCSSSEKKEIISGEKPNIAIVSAYNDMLSAHKPYENYPSIIKKVIHRNNGTCQFAGGVPAMCDGITQGQAGMELSLFSRDVIAQATAIALSHNVFDGAIMLGICDKIVPGLLMGCL

SEQ ID NO: 150125 - protein, 253 aa, Unknown
  Bacterial polypetide isolated from the Sargasso Sea
MHPVVARVTERIVQRSADTRGAYLAGVDAMIARKPAQDRMGCANLAHAYAALPGSDKFKVTVEKAPNIGIVTAYNDMLSAHQPYQGYPAILRDEAAKLGATVQVAGGVPAMCDGVTQGTPGMELSLFSRDAIAMATAVALSHDVFDGALLLGVCDKIVPGLLIGALHYGHLPCVFVPAGPMGTGLSNKDKSKVREQYAQGLVGRDELLKAESAAYHSPGTCTFYGTANSNQMLLEAMGLHVPGAAFESPGTQA

SEQ ID NO: 150126 - protein, 247 aa, Unknown
  Bacterial polypetide isolated from the Sargasso Sea
MPLNKTLLKVTDRITERSKDSREKYVGRMRSALERGPRRAHLSCGNQAHAYAAMGADKETLANKRVPNIGIVSAYNDMLSAHQPFYNFPDLIKQEARNQGATAQVAGGVPAMCDGITQGEAGMELSLFSRDVIAMSAGIALSHNTFDSTIYLGVCDKIVPGLVMAAATFGFLPAIFLPAGPMTSGLPNDEKSLIRQKFATGEIGRAELMSAEMKSYHGPGTCTFYGTANSNQMLMEFMGLQLPGSSF

SEQ ID NO: 150127 - protein, 292 aa, Unknown
  Bacterial polypetide isolated from the Sargasso Sea
MKPRKVNRIVEEVTKDIIKRSKSNRLKYLQRLNAAKDLNIRRDLLSCGNIAHSVAGCSSSEKKEIISGEKPNIAIVSAYNDMLSAHKPYENYPSLIKNVIQKNNGTCQFAGGVPAMCDGITQGQAGMELSLFSRDVIAQATAIALSHNVFDGAIMLGICDKIVPGLLMGCLSFGHLPVIFIPAGPMTTGINNSEKKSARENYVNKKISKSELLEVESKAYHSPGTCTFYGTANTNQLLLEFMGLMLPGAAFINPNNKLRTLFSEWASKRIVEISSSKEKNKCIGEMIDEKSI

SEQ ID NO: 150128 - protein, 318 aa, Unknown
  Bacterial polypetide isolated from the Sargasso Sea
CPQPKSRAIYLQRLEKARLKGPHRSVLSCGNLAHGFAACNQQDKGDLRSLTKANIGIVSSYNDMLSAHQPYEQYPALIKQAVSEVGSVAQFAGGVPAMCDGVTQGQPGMELSLLSRDIIAMSAAVGLSHNMFDGGLMLGICDKIVPGLFMAAMSFGHLPFVFVPAGPMPSGIPNKEKARVRQLYAEGKVGKEELLAAESASYHSAGTCTFYGTANSNQLVVEIMGLHLPGASFVNPGTQLRDELTKAAARQVTRLTDLGTDYLPAGKMIDAKSVVNGIVGLLATGGSTNHTMHLIAMARSAGFIVNWDDFAELSAATP

SEQ ID NO: 150129 - protein, 295 aa, Unknown
  Bacterial polypetide isolated from the Sargasso Sea
AALDAGGTAQFAGGVPAMCDGVTQGQDGMELSLFSRDTIALSTAVALSHQMFDAALYLGVCDKIVPGLVIGALSFGHLPAVFVPAGPMTTGISNDEKARTRQLYAEGKLSRADLLEAESKSYHGAGTCTFYGTANSNQMLMEVMGLHLPGTAFINPNTPLREALTRESARQALKLVFSGDQYTPIADVLDERAFVNGIVGLLATGGSTNHTLHLVAMARAAGILLTWDDFNDLSGVIPLLARVYPNGKADVNEFQAAGGLSIVIRELIDAGLLHDDVTTIMGKGLRRHAQEPFLD

SEQ ID NO: 150130 - protein, 638 aa, Unknown
  Bacterial polypetide isolated from the Sargasso Sea
MVSPHSQLLKVTQRVIERSKPTRESYLARIEHAQGKFPARGALSCANLAHGFAGLVGNDKLVIKQVREPNIGIVSSYNEMLSAHAPYKNYPDIIKEAARENGGVAQFAGGVPAMCDGVTQGNAGMELSLFSREVIAMSTAVALTHNMFDAALCLGICDKIVPGLLIGALQFGHLPTIFVPAGPMGSGLSNDDKAKTRQLFATGQCGRDALLEAEAAAYHSQGTCTFYGTANSNQMLMEVMGLHLPGSAFVHPHTALRDALTAQAARRVLDLTVERGNYTPIGHVVDEKAVVNGIVALLATGGSTNHTLHLVAIARAAGIVIDWNDFDTLSQAVPLLAKIYPNGKADVNHFHAAGGVAFLVRNLLEGGLLHEDVNTVAGKGLKHYTQEPKLIDGKLQWVPGADKSEDTAVLRGIKEPFQPDGGLRLMQGKLGRGVIKISAVAAQHRKVKAPAIVFDSQEAVQAAFDNGELKRDFIAVVRFQGARANGMPELHRLTPLLGVLQDQGFHVALVTDGRMSGASGKVPAVIHLSPEALLQGPIGKVRTGDMLVIDADAGVLDIEIDAAEWAARPEAVPQHQAENEVGFGRELFGVFRAAAAPAELGASVFGPMVGERAAHHGEPAQAHTKAHGNAHTSTTRAS

SEQ ID NO: 150131 - protein, 608 aa, Unknown
  Bacterial polypetide isolated from the Sargasso Sea
MHSVVQSVTDRIIARSKASREAYLAALNDARNHGVHRSSLSCGNLAHGFAACNPDDKNSLRQLTKANIGIITAFNDMLSAHQPYETYPELLKKACQEVGSVAQVAGGVPAMCDGVTQGQPGMELSLLSREVIAMATAVGLSHNMFDGALLLGICDKIVPGLLIGALSFGHLPMLFVPAGPMKSGIPNKEKARIRQQFAQGKVDRAQLLEAEAQSYHSAGTCTFYGTANSNQLMLEVMGLQLPGSSFVNPDDPLREALNKMAAKQVCRLTELGTQYSPIGEVVNEKSVVNGIVALLATGGSTNLTMHIVAAARAAGIIVNWDDFSELSDAVPLLARVYPNGHADINHFHAAGGMAFLIKELLDAGLLHEDVNTVAGFGLRRYTQEPKLLDGELRWVDGPTISLDTEVLTSVATPFQNNGGLKLLKGNLGRAVIKVSAVQEKHRVVEAPAVVIDDQNKLDALFKSGALDRDCVVVVKGQGPKANGMPELHKLTPLLGSLQDKGFKVALMTDGRMSGASGKVPAAIHLTPEAIDGGLIAKVQDGDLIRVDALTGELSLLVSDAELAARTAAEIDLRHSRYGMGRELFGALRSNLSSPETGARSTSAIDELY

SEQ ID NO: 150132 - protein, 331 aa, Unknown
  Bacterial polypetide isolated from the Sargasso Sea
MNPKIAEVTQRIIERSKETRKAYLEKIESARRQGPHRGVLSCGNLAHGFAACGTSEKSDLRSMTKANVAIVSAYNDMLSAHQPYETYPALIKDAVQEVGSVAQFAGGVPAMCDGVTQGQSGMDLSLMSRDNIAQGAAIALSHNMFDSALMLGICDKIVPGLLMGALTFGHLPTVFVPAGPMPSGLPNKEKARVRQEFAEGKVGRDALLEAESQSYHSAGTCTFYGTANSNQLVVEMMGLHLPGSSFVNPGTPLRDALTKAAAVQATRLTDLGDNYTPIGHIVDAKAIVNGLVGLLATGGSTNHTMHLIAVARAAGYIVNWDDFSDISNAVP

SEQ ID NO: 150133 - protein, 608 aa, Unknown
  Bacterial polypetide isolated from the Sargasso Sea
MHSVVQSVTDRIIARSKASREAYLAALNDARNHGVHRSSLSCGNLAHGFAACNPDDKNALRQLTKANIGIITAFNDMLSAHQPYETYPDLLKKACQEVGSVAQVAGGVPAMCDGVTQGQPGMELSLLSREVIAMATAVGLSHNMFDGALLLGICDKIVPGLLIGALSFGHLPMLFVPAGPMKSGIPNKEKARIRQQFAQGKVDRAQLLEAEAQSYHSAGTCTFYGTANSNQLMLEVMGLQLPGSSFVNPDDPLREALNKMAAKQVCRLTELGTQYSPIGEIVNEKSIVNGIVALLATGGSTNLTMHIVAAARAAGIIVNWDDFSELSDAVPLLARVYPNGHADINHFHAAGGMAFLIKELLDAGLVHEDVNTVAGFGLRRYTQEPKLLDGELRWVDGPTVSLDTEVLTSVATPFQNNGGLKLLKGNLGRAVIKVSAVQPQHRVVEAPAVVIDDQNKLDALFKSGALDRDCVVVVKGQGPKANGMPELHKLTPLLGSLQDKGFKVALMTDGRMSGASGKVPAAIHLTPEAIDGGLIAKVQDGDLIRVDALTGELSLLVSDTVLAARTAAEIDLRHSRYGMGRELFGALRSNLSSPETGARSTSAIDELY

SEQ ID NO: 150134 - protein, 618 aa, Unknown
  Bacterial polypetide isolated from the Sargasso Sea
MTSLHPTLAKVTERVIARSQSTRSAYLQRIDGAQGKFPARGALSCANLAHGFAGLEGNDKFSIKAIREPNIGIVSSYNEMLSAHAPYKDFPEIIKAAARENGGVAQFAGGVPAMCDGVTQGNPGMELSLFSREAIAMGTAIALTHNMFDAALCLGICDKIVPGLLIGALQFGHLPTIFVPAGPMTSGLSNDDKAKIRQQFATGQVGRDALLEAESAAYHGHGTCTFYGTANSNQMLMELMGLHLPGSAFVHPHTPLRTALTAEAARRVLDLTVERGHYTPIGHVIDEKAIVNGIVALLATGGSTNHTLHLVAIARAAGILIDWNDFDELSAVVPLLAKIYPNGKADVNHFHAAGGVAFLVRNLLEGGLLHEDVTTVAGKGLAHYTKEPKLIDGKLTWVDGAAESHDTKVLRGIRDPFQPDGGLRLMQGRLGRGVIKISAVAPEHRKVTAPAIVFDSQEAVQEAFDRGELKRDFVAVVRFQGARANGMPELHRLTPLLGVLQDQGFHVALVTDGRMSGASGKVPAVIHVSPEALLAGPLGKVKTGDTLVIDAEAGVLDIEVDAAEWQARLVAQPLHQAENEVGFGRELFGVFRAAAAPAEQGASVFGALVGETAAHVAA

SEQ ID NO: 150135 - protein, 345 aa, Unknown
  Bacterial polypetide isolated from the Sargasso Sea
MNPVIQQVTDRIAARSEKSRALYLQRMEQARAKGPHRGALACGNLAHGFAACSSQEKTDLRSLTKANIGIISSYNDMLSAHQPYEAYPAIIKAAAAEVGSVAQFAGGVPAMCDGVTQGQPGMELSLLSRDIIAMSAAVGLSHNMFDGGMMLGICDKIVPGLLMAALSFGHLPFVFVPAGPMPSGIPNKEKARVRQLYAEGKVGHDELLDSESASYHSAGTCTFYGTANSNQLVVEVMGLHLPGASFVNPGTPLRDELTKAAARQVTRLTDLGTDYLPIAHIVDVKAVVNGIVGLLATGGSTNHTMHLIAVARSAGFIVNWDDFAELSHATPLVTKIYPNGQADIN

SEQ ID NO: 150136 - protein, 536 aa, Unknown
  Bacterial polypetide isolated from the Sargasso Sea
PRRAHLSCGNQAHAYAAMGADKETLANKRVPNIGIVSAYNDMLSAHQPFYNFPDLIKQEARNHGATAQVAGGVPAMCDGITQGEAGMELSLFSRDVIAMSAGIALSHNAFDSTIYLGVCDKIVPGLIMAAATFGFLPAIFLPAGPMTSGLPNDEKSLIRQKFATGEIDRAELMSAEMKSYHGPGTCTFYGTANSNQMLMEFMGLQLPGSSFVNPGTPLREALTKYGTQKALDISFSSSEFCPAYEILNEKAFVNGIVGLMATGGSTNLVLHIPAMAKAAGINLAMEDFEDIAKLIPLMAKIYPNGLADVNHFHAAGGLSFMINELLNEGLLHDDVKNVSGHGMNQYRNEARLIDNEIKFIKGAVTSANQKILRPLKDPFQRTGGLKQVNGNLGSAITKVSAVEPDLRVIKAPVQIFHDQEAIKTAFKNNEFKEDTIFVVRFQGPRANGMPELHSLTPVLSALQDRGLKVALVTDGRMSGASGKVPSAIHVTPEAANGGPISKLRDGDIVLLDADNGILEVQTENFESRSSVSIDLS

SEQ ID NO: 150137 - protein, 222 aa, Unknown
  Bacterial polypetide isolated from the Sargasso Sea
MVYENIIVERKDSIGIITLNRPKALNALSADLTRELEAALRDLDNDDAVGCMILTGSDKAFAAGADIKEMQSKTFMDVYLQDFITVAWEHVAKVRKPIIAAVSGYALGGGCEMAMMCDFIIAADNAKFGQPEITIGTIPGAGGTQRLTRMVGKSKAMEMCLTGRMMDAEEAERAGLVSRVVPLADLMPEVMKVAHRISELSRPAIMMAKESVNKSYEMSLAE

SEQ ID NO: 150138 - protein, 258 aa, Unknown
  Bacterial polypetide isolated from the Sargasso Sea
MVYENIIVERKDSIGIITLNRPKALNALSADLTRELEVALRDLDNDAAVGCMVLTGSEKAFAAGADIKEMQSKTFMDAYLQDFITVAWEHVAKVRKPIIAAVSGYALGGGCEMAMMCDFIIAADNAKFGQPEITIGTIPGAGGTQRLTRLVGKSKAMEMCLTGRMMDAEEAERAGLVSRVVPLADLMPEVMKVAQRISELSRPAIMMAKESVNKSYEMSLAEGIKFERRLFHSTFATDDQKEGMAAFSEKREPNFKNR

SEQ ID NO: 150139 - protein, 183 aa, Unknown
  Bacterial polypetide isolated from the Sargasso Sea
MRKGKVERNTKETKISCEVNLDGTGQSKISTQIGFLDHMLELLSHHSLIDINLKCEGDTNVDLHHSVEDTAYAIALAINKALDDKKGINRYGFSYVPMDECLSRCVIDLSGRPELVWNVNLGLKKIGEMDTELFHEFFKAFSNESKCNLHIENLYGKNNHHIIESCFKAFAKSLRLAVEMITE

SEQ ID NO: 150140 - protein, 196 aa, Unknown
  Bacterial polypetide isolated from the Sargasso Sea
MKRKAKISRKTKETSIEVDLNIDGKGKYKIDTGIGFFNHMLEQLSKHSMIDLKLKAKGDTHIDLHHTTEDTGIAVGECLKKASKNFRGIKRYSHALLPMDETLTRVAIDVSNRPYLIWNVKLKVEKLGEMDTELFKEFFQAFSQAAGITLHIENIYGDNSHHIIESCFKGLARSLRSALEIDPRNKKGIPSTKGSL

SEQ ID NO: 150141 - protein, 117 aa, Unknown
  Bacterial polypetide isolated from the Sargasso Sea
MRTANIVRKTKETSITVDVNLDGTGEYDIKTGVGFLDHMLEQVSKHSLIDLKIKATGDIHIDLHHTTEDTGIAIGEAIKKHLEKKSIKRYASETVPMDETFSKVSLDISTDLIWFGM

SEQ ID NO: 150142 - protein, 135 aa, Unknown
  Bacterial polypetide isolated from the Sargasso Sea
FDLHHTTEDVGIAIGECIKKASNKFKGIKRYAHAMIPMDETLSRVAIDVSNRPYLIWKVNLKVEKLGEMDTELFKEWFQAFSQSAGVTLHMENIYGDNSHHIIESCFKGLARTLRSALEIDPRTKNVIPSTKGSL

SEQ ID NO: 150143 - protein, 51 aa, Unknown
  Bacterial polypetide isolated from the Sargasso Sea
AGVTLHIDNLRGLNAHHQMETVFKAFGRALRMAVELDERAAGQIPSTKGSL

SEQ ID NO: 150144 - protein, 176 aa, Unknown
  Bacterial polypetide isolated from the Sargasso Sea
IWMVKASTNKKPKLGFLDHMLEQLSKHSLIDIKLYVKGDTHIDLHHSTEDAGIALGEAIKKAGKNFKGIKRYSSALIPMDETLTRVAIDISGRPYLVWNVNLKVEKLGEMDTELFKEWFQAFSQSAGITLHVENIYGDNSHHKIESCFKALAKALKDALTIDKRIKNIVPSTKGKI

SEQ ID NO: 150145 - protein, 172 aa, Unknown
  Bacterial polypetide isolated from the Sargasso Sea
MRKGQVDRNTKETKISCSINLDGMGISNISTGIGFFDHMLDLFVHHSLIDMDLKTIGDTNVDLHHSVEDTAYAIALATTKALDDKKGINRYGFFYVPMDECLSRCVIDFSGRPELIWKVNLGLDKIGEMDTELFLEFFKAFTNEAKCNLHIENIYGKNNHHIIESCFKALQK

SEQ ID NO: 150146 - protein, 135 aa, Unknown
  Bacterial polypetide isolated from the Sargasso Sea
IDLHHTTEDTGIAIGECLKKASKKFIGIRRYAHAMIPMDETLTRVALDVSNRPYLIWKVDLKVEKLGEMDTELFKEWFQAFSQSAGITLHIENLYGDNSHHKIESCFKGLARSLRAALEIDPKNKKVVPSTKGSL

SEQ ID NO: 150147 - protein, 162 aa, Unknown
  Bacterial polypetide isolated from the Sargasso Sea
IGFLDHMLDLWTFHGLFNLKLTCKGDLEIDTHHTTEDIAIALGSALYKAVGEKKGIVRYGFSYVPMDEALIRVALDLSGRPEFVFFGEFLQSSIGNLDTQMIRHFFKSLAIYSRMTLHMSILYGINDHHKCEGLFKALGRALRQAVEIDPRRIGVASSKGVL

SEQ ID NO: 150148 - protein, 298 aa, Unknown
  Bacterial polypetide isolated from the Sargasso Sea
GLGTDSFPQKDFDLAHNAMMGIFESQGVTFDDVLICPHFDEDNCTCRKPKLGMVKDYLQQGKVDFTRSYVIGDRMTDVQLAENMGIKALQYNRDNLDWNTVQKTILASSRIAEVVRTTSETDIRVRVDLDSQEKSAIHTGLGFFDHMLDQIAVHGGFQLNVSVDGDLHIDDHHSVEDTALAIGEALKKALGDKRGIGRFGFALPMDECRAECIMDISNRPHLKFEAEFSRDQVGEMATEMVPHFFYSLAQSMGLSLHLSTSEGNAHHQVESLFKVFGRALRQAIALKGDALPSSKGAL

SEQ ID NO: 150149 - protein, 85 aa, Unknown
  Bacterial polypetide isolated from the Sargasso Sea
MKRKAKILRKTKETNISVEANIDGKGKYNIKTGIGFLDHMLEQLSKHSLIDLNIKAKGDTHIDLHHTTEDSGIAIGEAIKKAAGN

SEQ ID NO: 150150 - protein, 196 aa, Unknown
  Bacterial polypetide isolated from the Sargasso Sea
MARKAKINRKTKETNIVVEANLDGKGSYKIDTKIGFLNHMIEQLSKHSLIDLKIKAQGDTHIDLHHTTEDTGIAVGECIKKALGSSKGIKRYAHALIPMDETLTRVTMDISNRPYLIWKVKLKVEKLGEMDTELFKEWFQAFSQAAGITLHVENVYGDNSHHIIESCFKGLARSLREAIEIDKRIKNKVPSTKGVL

SEQ ID NO: 150151 - protein, 135 aa, Unknown
  Bacterial polypetide isolated from the Sargasso Sea
MRSAKVQRKTKETDIFCEITIDGSGKSEVSTGIGFFDHMLEIFSHHSLIDLKLKATGDTHVDLHHTVEDTAYVLAQAITKSIGEKRGINRYGFYYITMDDSLSRTVIDFSGRPEFVWKVSLGLKKIGEMDTELFQ

SEQ ID NO: 150152 - protein, 135 aa, Unknown
  Bacterial polypetide isolated from the Sargasso Sea
IDLHHTTEDTGIAIGEALKKAAKKFVGIRRYAHRVIPMDETLTRVAIDVSNRPYLIWKVKLKVEKLGEMDTELFKEWFQAFSQSAGITLHVENIYGDNSHHIIESCYKGLARSLRDALEMDPRNKKSIPSTKGSL

SEQ ID NO: 150153 - protein, 170 aa, Unknown
  Bacterial polypetide isolated from the Sargasso Sea
MERKAQIHRKTSETDIHLDFQIDGEGQSSCQSGIAFLDHMLDLFATHGLFTLTVKAEGDLEVDAHHTTEDIGICLGLAFKEAIGDAKGIYRYASGLIPMDESLCQMAIDISNRPHLSFKGDLAKTKVGDFDVELVEEFFTAFVSNARVSLHIDILSGTNLHHMIEALFQS

SEQ ID NO: 150154 - protein, 134 aa, Unknown
  Bacterial polypetide isolated from the Sargasso Sea
DLHHTTEDTGIAIGECLKKASKKFVGIKRYAHAMIPMDETLTRVAIDVSNRPYLIWKVKLKVEKLGEMDTELFKEWFQAFSQAAGITLHIENIYGDNSHHIIESCFKGLARSLRAALEMDPRNKTTIPSTKGSL

SEQ ID NO: 150155 - protein, 69 aa, Unknown
  Bacterial polypetide isolated from the Sargasso Sea
MARKGKVSRKTKETSINVEVNIDGKGKYQIDTGIGFLDHMLEQLSKHSLIDLKVKAKGDTHIDLHHTTE

SEQ ID NO: 150156 - protein, 148 aa, Unknown
  Bacterial polypetide isolated from the Sargasso Sea
MATNSFYKPTSGNILPRYAGIATFMRLPYVPLEQAKDVNIGLIGVPWDGGTTNRAGARHGPRQIRDLSTMARNVNHSSGIQPFELANCADLGDAPVNPIDLIDSLNKIEEFFRAVHAQNIIPLSAGGDHLATLPIMRGIVTGEPLGMV

SEQ ID NO: 150157 - protein, 157 aa, Unknown
  Bacterial polypetide isolated from the Sargasso Sea
MLEQLSKHSSMDMNINAKGDTHIDLHHTTEDTGIAIGECLKKASKKFVGIKRYAHAMIPMDETLTRVAIDVSNRPYLIWKVKLKVEKLGEMDTELFKEWFQAFSQAAGITLHVENIYGDNSHHIIESCFKGLARSLRAALEMDPRNKTTIPSTKGSL

SEQ ID NO: 150158 - protein, 93 aa, Unknown
  Bacterial polypetide isolated from the Sargasso Sea
MPQSRTAIIERKTRETLVKVKLNLDGEGISETNTGIGFLDHMLDQLAFHGLMDLEVSCKGDLYIDSHHTTEDIGIALGQALKEALGKKREFDV

SEQ ID NO: 150159 - protein, 99 aa, Unknown
  Bacterial polypetide isolated from the Sargasso Sea
DETMSRVSIDVSIRPYLIWRVQFSRPKLGEMDTELFKEWFQAFAQNAGVTLHVENAYGENNHHIVEACYKGLARALRDAIESDPRSSADVPSTKGVLNA

SEQ ID NO: 150160 - protein, 154 aa, Unknown
  Bacterial polypetide isolated from the Sargasso Sea
QLSKHSSIDLNLKAKGDTHIDLHHTTEDTGIAIGECLKKASKNFIGIKRYAHALLPMDETLTRVAIDVSNRPYLIWNVKLKVEKLGEMDTELFKEWFQAFSQSAGITLHVENIYGDNSHHIIESCFKGLARSLRSALEIDPRNKKTIPSTKGSL

SEQ ID NO: 150161 - protein, 71 aa, Unknown
  Bacterial polypetide isolated from the Sargasso Sea
MARQGEIHRVTGETDVKVRLDLDGSGQCQASTGVPFLDHMLHQISSHSLIDLDVNAVGDTHIDDHHTNEDV

SEQ ID NO: 150162 - protein, 80 aa, Unknown
  Bacterial polypetide isolated from the Sargasso Sea
MKRKAKINRKTKETNISVAVNLDGKGKYKIKTGIGFLDHMLEQLSKHSLIDLEVKAKGDTHIDLHHTTEDTGIAIGEAIK

SEQ ID NO: 150163 - protein, 139 aa, Unknown
  Bacterial polypetide isolated from the Sargasso Sea
VILILNLHHTTEDTGIAIGEALKKALKKSVGIKRYAHAMIPMDETLSRVAIDISNRPYLIWKVNLKVEKLGEMDTELFKEWFQAFSQAAGITLHVENIYGDNSHHIIESCYKGLARSLRTALEIDPRNKKTIPSTKGSL

SEQ ID NO: 150164 - protein, 166 aa, Unknown
  Bacterial polypetide isolated from the Sargasso Sea
STQIGFFDHMLELLSHHSLIDIDLKCEGDTNVDLHHSVEDTAYAIALAINKALNDKKGINRYGFSYVPMDECLSRCVIDLSGRPELVWNVNLGLKKIGEMDTELFHEFFKAFSNESKCNLHIENLYGKNNHHIIESCFKAFAKSLRLAVEIDNRRKDNIPSSKGTL

SEQ ID NO: 150165 - protein, 69 aa, Unknown
  Bacterial polypetide isolated from the Sargasso Sea
MKRKAKITRKTKETSISVAVNLDGKGKYKIKTGIGFLDHMLEQLSKHSLIDLEIKAKGDTHIDLHHTTE

SEQ ID NO: 150166 - protein, 135 aa, Unknown
  Bacterial polypetide isolated from the Sargasso Sea
MSRKAAVKRKTNEVEVIIDLNIDGKGIYEINTGIPFFDHMLEQLSKHGFFDLRIIANGDTEIDFHHTVEDVGICLGEAFESALGDKKSINRYGHFSVPFDETLSSSTIDLSGRPFFIFNVEMSSGKVGEFDVELT

SEQ ID NO: 150167 - protein, 178 aa, Unknown
  Bacterial polypetide isolated from the Sargasso Sea
MRKGIVERNTKETKISCSVNLDGSGKANISTGIGFFDHMLELFVHHSLIDMDLKTAGDTNVDFHHSVEDTAYAIAIATIKALGEKKGIKRYGFCYIPMDECLSRCVLDFSGRPELVWKVNLGLEKIGDMDTELFIEFFKAFTNESKCNLHIENLYGQNNHHIIESCFKAFAKSYRMAV

SEQ ID NO: 150168 - protein, 126 aa, Unknown
  Bacterial polypetide isolated from the Sargasso Sea
DIGIALGQALKEALGEKKGIRRYGHAFIPMDEALLRAVLDCSGRPDFVFNGEFGRYNLGDLDTQMIPHFFKSLAFNCGLTLHLSILYGSNDHHKCEGLFKAFARAFSDAVTLNPRRMGVSSTKGTL

SEQ ID NO: 150169 - protein, 87 aa, Unknown
  Bacterial polypetide isolated from the Sargasso Sea
MARKGKVSRKTKETSINVEVNIDGKGKYQIDTGIGFLDHMLEQLSKHSLIDLKVKAKGDTHIDLHHTTEDTGIAIGEALKKAAKKFV

SEQ ID NO: 150170 - protein, 148 aa, Unknown
  Bacterial polypetide isolated from the Sargasso Sea
SIDLKLKAKGDTHIDLHHTTEDTGIAIGECLKKASKKFVGIKRYAHALIPMDETLTRVALDVSNRPYLIWNVKLKVEKLGEMDTELFKEWFQAFSQAAGITLHVENIYGDNSHHIIESCFKGLARSLRAALEMDPRNKKTIPSTKGSL

SEQ ID NO: 150171 - protein, 108 aa, Unknown
  Bacterial polypetide isolated from the Sargasso Sea
MDISSPPLDEALVQVTLDCSGRPHLSYDLQLKAPRIGNYDTELVREFFIAFVNNSGITLHINQIRGSNSHHIVEACFKAFSRAMRMATEIDLRRSDSIPSSKGMLEKK

SEQ ID NO: 150172 - protein, 157 aa, Unknown
  Bacterial polypetide isolated from the Sargasso Sea
MLEQLSKHSSIDMNIKVKGDTHIDLHHTTEDSGIAIGEALKKALKKSIGIRRYAHAMIPMDETLSRVAIDISNRPYLIWKVNLKVEKLGEMDTELFKEWFQAFSQAAGITLHVENIYGDNSHHIIESCFKGLARSLRTALEIDPRNRKTIPSTKGSL

SEQ ID NO: 150173 - protein, 154 aa, Unknown
  Bacterial polypetide isolated from the Sargasso Sea
ALAKHSLIDLEVKAKGDTHIDLHHTTEDTGIAIGEAIKKAAGKRKGITRYASTMIPMDETLSRVSIDVSNRPYLIWKVNLPVEKLGEMDTELFKEWFQAFSQSAGVTLHVENIYGDNSHHKIESCYKGLARSLKDALAIDKRIKNSIPSTKGSI

SEQ ID NO: 150174 - protein, 82 aa, Unknown
  Bacterial polypetide isolated from the Sargasso Sea
MKQKRIVKIERETKETKIKLELNLEGSGISDVKTGIGFLDHMLDLWTFHGLFNLKLTCKGDLEIDTHHTTEDIAIALGNALD

SEQ ID NO: 150175 - protein, 195 aa, Unknown
  Bacterial polypetide isolated from the Sargasso Sea
MRNGKVERNTKETKISCEVNLDGVGQSNITTQIGFFDHMLELLSHHSLIDIDLKCEGDTNVDLHHSVEDTAYAIALAINKALDDKKGINRYGFSYVPMDECLSRCVIDLSGRPELVWNVNLGLKKIGEMDTELFHEFFKAFSNESKCNLHIENLYGNNNHHIIESCFKAFAKSLRFAVEIDNRRKDNIPSSKGTL

SEQ ID NO: 150176 - protein, 87 aa, Unknown
  Bacterial polypetide isolated from the Sargasso Sea
MKRKAKISRKTKETKIDVDINIDGKGKFKIDTGIGFLDHMLEQLSKHSSIDLKVKAKGDTHIDLHHTTEDTGIAIGECLKKAFKKIW

SEQ ID NO: 150177 - protein, 193 aa, Unknown
  Bacterial polypetide isolated from the Sargasso Sea
KGNINRKTKETNISCSVNLDGTGQSKISTGIGFFDHMLELMSHHSLIDIDLKVKGDTHVDLHHTIEDSGYVIAQSILKALGKKQGIKRYGFFYVPMDDCLSRCVLDFSGRPELVWKVKLGLKKIGEMDTELFHEFFKAFTNEAKINLHIENLYGKNNHHIIESCFKAFAKSLRISVEVDEKIKNLIPSSKGSL

SEQ ID NO: 150178 - protein, 137 aa, Unknown
  Bacterial polypetide isolated from the Sargasso Sea
MRTSTIERITNETKVNLVLNLDGVGRGKINTNIPFFDHMLEQLTFHSLVDLELNARGDIDIDFHHSVEDCGICLGKAFLEALGDKKGINRYGFFLLPMDDALIRVALDFSGRSFLSWKVNFPTNRVGNFDLELVREF

SEQ ID NO: 150179 - protein, 156 aa, Unknown
  Bacterial polypetide isolated from the Sargasso Sea
LEQLSKHSSMDMDIKAKGDTHIDLHHTTEDTGIAIGECLKKASKKFVGIKRYAHAMIPMDETLTRVAIDVSNRPYLIWKVKLKVEKLGEMDTELFKEWFQAFSQAAGITLHVENIYGDNSHHIIESCFKGLARSLRAALEMDPRNKNTIPSTKGSL

SEQ ID NO: 150180 - protein, 88 aa, Unknown
  Bacterial polypetide isolated from the Sargasso Sea
MKRKAKITRKTKETSISVSVNLDGKGKYKIKTGIGFLDHMLEQLSKHSLIDLEVNAKGDTHIDLHHTTEDTGIAIGEAIKKAAGNRKG

SEQ ID NO: 150181 - protein, 110 aa, Unknown
  Bacterial polypetide isolated from the Sargasso Sea
MTRKAKILRKTKETTISAEVNLDGKGNYKIKTQIGFLDHMLEQLSKHSLIDIKLNVKGDTHIDLHHSTEDTGIALGEAIKKAAGKFKGIKRYSSTLIPMDETLTRVAIDV

SEQ ID NO: 150182 - protein, 149 aa, Unknown
  Bacterial polypetide isolated from the Sargasso Sea
SLIDLKVKAKGDTHIDLHHTTEDTGIAIGEALKKAAKKFIGIKRYAHTVIPMDETLTRVAIDVSNRPYLIWKVKLKVEKLGEMDTELFKEWFQAFSQSAGITMHVENIYGDNSHHIIESCYKALARSLRAALEMDPRNKKSIPSTKGSL

SEQ ID NO: 150183 - protein, 148 aa, Unknown
  Bacterial polypetide isolated from the Sargasso Sea
FNRYEVVAKGDTHIDLHHTTEDTGIAIGEAIKKAAGNLKGIKRFSSKIIPMDETLTRVSMDISNRPYLIWKVDLKVEKLGEMDTELFKEWFQAFSQAAGITLHVENIYGDNSHHKIESCFKALARSLREALEIDKRIKNILPSTKGKL

SEQ ID NO: 150184 - protein, 160 aa, Unknown
  Bacterial polypetide isolated from the Sargasso Sea
MKQKRIVKIERETKETKIKLELNLEGSGISDVKTGIGFLDHMLDLWTFHGLFNLKLTCKGDLEIDTHHTTEDIAIALGNALDKALGEKKGIVRYGFSYVPMDEALLRVALDLSGRPEFVFSGEFLQTSIGNLDTQMIRHFFKSLAMTSRMTMHMSILYGI

SEQ ID NO: 150185 - protein, 119 aa, Unknown
  Bacterial polypetide isolated from the Sargasso Sea
MDGTGSAKVNTGLGFFDHMLTLVAGHALIDLDVHCSGDLHVDGHHSVEDVGRAFGTALKECLGDRSGIWRYGHAIVPMDESLVTAAVDLGGRSTCVIDVVFPAPTIGTFDTELVEVFWE

SEQ ID NO: 150186 - protein, 163 aa, Unknown
  Bacterial polypetide isolated from the Sargasso Sea
IGFFDHMLELFVHHSLIDMNLSTVGDVSVDLHHSVEDTAYAIAQSTIKALGEKKGINRYGFFYVPMDECLSRCVIDFSGRPELVWKVNLGLEKIGEMDTELFIEFFKAFSNEAKCNLHIENLYGQNNHHIIESCFKAFAKSYRIAVELDLRRKDKIPSSKGTL

SEQ ID NO: 150187 - protein, 150 aa, Unknown
  Bacterial polypetide isolated from the Sargasso Sea
HSSMDMNIKAKGDTHIDLHHTTEDTGIAIGECLKKASKKFVGIKRYAHAMIPMDETLTRVAIDVSNRPYLIWKVKLKVEKLGEMDTELFKEWFQAFSQAAGITLHVENIYGDNSHHIIESCFKGLARSLRAALEMDPRNKTTIPSTKGSL

SEQ ID NO: 150188 - protein, 102 aa, Unknown
  Bacterial polypetide isolated from the Sargasso Sea
MSRKAKILRKTKETNISVEVNLDGKGKYQIKTKIGFLDHMLEQLSKHSLIDMKIIAKGDTHIDLHHTTEDSGIAIGEAIKKAAGNLKGIKRYSAKYIPMDEH

SEQ ID NO: 150189 - protein, 135 aa, Unknown
  Bacterial polypetide isolated from the Sargasso Sea
MKRKAKINRKTKETSISVDMNIDGKGKYKIDTGIGFLNHMLEQLSKHSSIDMNIKAKGDTHIDLHHTTEDSGIAIGECLKKASNKFKGIRRYSHALIPMDEALTRVVIDVSNRPYLIWNVKLKVEKLGEMDTELL

SEQ ID NO: 150190 - protein, 102 aa, Unknown
  Bacterial polypetide isolated from the Sargasso Sea
MKRKAKISRKTKETNINVDLNIDGKGKYKIETGIGFLNHMLEQLSKHSSMDINLKAKGDTHIDLHHTTEDTGIAIGECLKKASKKFVGIKRYAHAMIPMEKH

SEQ ID NO: 150191 - protein, 129 aa, Unknown
  Bacterial polypetide isolated from the Sargasso Sea
MDKAKRFSKKSRETEETQIVVSVDIDGSGNYKIDTGNGMFDHLLAQISRHGLIDLDISAKGDTHVGWHHLVEDTAIVCGKALKEAVGDGVAINRVGNTYMPLDEALVLTVVDYSGRGYSVIDAPLTESD

SEQ ID NO: 150192 - protein, 198 aa, Unknown
  Bacterial polypetide isolated from the Sargasso Sea
ITKRILSKGRTATVVRTTRETDISVSVDLDNKGGNSISTGVGFFDHMLDQIATHGGFSLQVSVKGDLHIDDHHSVEDTALALGQALKQAIGNKRGINRFGFVLPMDECRAECTLDLSGRPLLKFDADLGTGLVGELNLEMVPHFFRSLSDAMLMTLHLSVSPGNKHHMVEGLFKAFGRALGQAILKSGDALPSSKGVL

SEQ ID NO: 150193 - protein, 96 aa, Unknown
  Bacterial polypetide isolated from the Sargasso Sea
MKRKAKISRKTKETNINVDLNIDGKGKYKIETGIGFLNHMLEQLSKHSSMDINIKAKGDTHIDLHHTTEDTGIAIGECLKKASKKFVGIKRYAHAL

SEQ ID NO: 150194 - protein, 95 aa, Unknown
  Bacterial polypetide isolated from the Sargasso Sea
MRTAKINRKTKETDILCEINLDGTGKNDISTNIGFLDHMLEIFSHHSLVDLKLRAKGDIHVDLHHTVEDTAYVLAQATNKALGEKEALIDMVFFI

SEQ ID NO: 150195 - protein, 157 aa, Unknown
  Bacterial polypetide isolated from the Sargasso Sea
MLEQLSKHSSMDMNIKAKGDTHIDLHHTTEDTGIAIGECLKKASKKFVGIKRYAHAMIPMDETLTRVAIDVSNRPYLIWKVKLKVEKLGEMDTELFKEWFQAFSQAAGITLHIENIYGDNSHHIIESCFKGLARSLRAALEMDPRNKTTIPSTKGSL

SEQ ID NO: 150196 - protein, 50 aa, Unknown
  Bacterial polypetide isolated from the Sargasso Sea
ESKISSGIGFFDHMLEIFSQHSLIDVELKVDGDTHVDFHHTVEDSAYALS

SEQ ID NO: 150197 - protein, 135 aa, Unknown
  Bacterial polypetide isolated from the Sargasso Sea
MYLHHTTEDTGIAIGECLKKASNKFVGIKRYAHAMIPMDETLTRVAIDVSNRPYLIWKVKLKVEKLGEMDTELFKEWFQAFSQAAGVTLHVENIYGDNSHHIIESCFKGLARSLRAALEMDPRNKTTIPSTKGSL

SEQ ID NO: 150198 - protein, 80 aa, Unknown
  Bacterial polypetide isolated from the Sargasso Sea
MKRKAKINRKTKETNISVVVNLDGKGKYKIKTGIGFLDHMLEQLAKHSLIDLEVKAKGDTHIDLHHTTEDTGIAIGEAIK

SEQ ID NO: 150199 - protein, 98 aa, Unknown
  Bacterial polypetide isolated from the Sargasso Sea
MTRKAKIIRKTKETNISVAVNIDGKGKYNIKTGIGFLDHMLEQLSKHSLIDIEVKAKGDTHIDLHHTTEDTGIAIGEAIKKAANNRKGITRYASTMIP

SEQ ID NO: 150200 - protein, 235 aa, Unknown
  Bacterial polypetide isolated from the Sargasso Sea
KVDLARSYVIGDRQTDIGLAQNLCCEGILYDGSWPAIVTKLTTANREGRVTRNTKETQIDVAINLDQTKNGSIETGLGFFDHMLDQIRTHANIGLNIKAKGDLHIDEHHLVEDIGIALGVALKQALGTKSQIARYGFALPMDECKAEAQIDLSGRASFVLNANFSREKAGDLDVQMVEHFFKSLSDNAAISLILSVSDGNCHHQVEGLFKAFSRALRMAVAQDTTQQTASSKGCL

SEQ ID NO: 150201 - protein, 191 aa, Unknown
  Bacterial polypetide isolated from the Sargasso Sea
EVKEKLRETEIVCSINLDGVGKANTKTGVGFFDHMLEIFSHHSLIDIDLQANGDTHVDFHHTIEDSGYVLAQSIINALGDKRGIKRYGFFYVPMDECLSRCVIDFSGRPELVWKVDLGLKKIGEMDTELFHEFFKAFSNESKCNLHIENFYGTNNHHIIESCFKSFAKSIRIAIEVDERIKGVIPSSKGTI

SEQ ID NO: 150202 - protein, 145 aa, Unknown
  Bacterial polypetide isolated from the Sargasso Sea
MNIKAKGDTHIDLHHTTEDTGIAIGEALKKALKKSIGIRRYAHAMIPMDETLSRVAIDISNRPYLIWKVNLKVEKLGEMDTELFKEWFQAFSQAAGITLHVENIYGDNSHHIIESCFKGLARSLRTALEIDPRNSKSIPSTKGSL

SEQ ID NO: 150203 - protein, 195 aa, Unknown
  Bacterial polypetide isolated from the Sargasso Sea
MRKGKVERNTKETKISCEVNLDGVGQSKISTQIGFFDHMLELLSHHSLIDIGLKCEGDTNVDLHHSVEDTAYAIALAINKALDDKKGINRYGFSYVPMDECLSRCVIDLSGRPEFVWNVNLGLKKIGKMDTELFHEFFKAFSNESKCNLHIENMYGKNNHHIIESCFKAFAKSLRFAVEIDNRRKDNIPSSKGTL

SEQ ID NO: 150204 - protein, 196 aa, Unknown
  Bacterial polypetide isolated from the Sargasso Sea
MTDRKASIERKTKETEIEVTVSLDGGNSSIDTGIPFFTHMLEQLAKHSGMGLFVKSIGDLEVDAHHTVEDVGISIGEAFNNALGEKLGIRRFSSVSVPLDEALIDVALDISGRAFCNYEIDFPGEKILGDPPFDPQLMEEFWRAFTAASKVTLHISLVRGKNTHHIVEATFKGVARALRDAVKIEGADLPSTKGSL

SEQ ID NO: 150205 - protein, 204 aa, Unknown
  Bacterial polypetide isolated from the Sargasso Sea
MCRGIRVSNRRATVNRKTGETEITMTFDLEGTGKYEVSTGNGFLDHMLAQMPRHGLFDLEVKAIGDVETGWHHLVEDCGIVFGQVFAKALGSPVGIIRMAHSYVPLDETLARVVIDLSGRPHAQINTGLEDVMVETLPGDLIGHFLESFAYEAKVNLHAEVITGQSPHHKAEAIFKGLARALRQAVSIDERAPDAIPSTKDSLG

SEQ ID NO: 150206 - protein, 195 aa, Unknown
  Bacterial polypetide isolated from the Sargasso Sea
MRKGKVERNTKETKIICEVNLDGTGQSKILTQIGFFDHMLELLSHHSLIDLDLKCEGDTNVDLHHSVEDTAYAIALAINKALDDKKGINRYGFSYVPMDECLSRCVIDLSGRPELVWNVNLGLKKIGEMDTELFNEFFKAFSNESKCNLHIENLYGKNNHHIIESCFKAFAKSLRFAVEIDNRRKDNIPSSKGTL

SEQ ID NO: 150207 - protein, 154 aa, Unknown
  Bacterial polypetide isolated from the Sargasso Sea
MSLSKNLYKELSLVTSNAAIAAFHFIGKNDKNAADKAAVDVMRKMLNDMDINGKIVIGEGELDEAPMLYLGEALGDKKGIPIDIAVDPVEGTNFVAKNMPGGLSVIAISNKGDLFNAPETYMDKIAISKDIPNECVDLDFSIEKNISNISDTKK

SEQ ID NO: 150208 - protein, 157 aa, Unknown
  Bacterial polypetide isolated from the Sargasso Sea
MLEQLSKHSLMDLKVKAKGDTHIDLHHTTEDTGIAIGEALKKAAKKFVGIKRYAHRLIPMDETLTRVAIDVSNRPYLIWKVKLKVEKLGEMDTELFKEWFQAFSQSAGITLHVENIYGDNSHHIIESCYKGLARSLRDALEMDPRSKKSIPSTKGSL

SEQ ID NO: 150209 - protein, 139 aa, Unknown
  Bacterial polypetide isolated from the Sargasso Sea
EILTFDLHHTTEDTGIAIGEALKKAAKKFVGIKRYAHRVIPMDETLTRVAIDVSNRPYLIWKVKLKVEKLGEMDTELFKEWFQAFSQSAGITLHVENIYGDNSHHIIESCYKGLARSLRDALEMDPRNKKSIPSTKGSL

SEQ ID NO: 150210 - protein, 91 aa, Unknown
  Bacterial polypetide isolated from the Sargasso Sea
MKRKGKISRKTKETSISVHLNIDGKGKYKIDTGIGFLNHMLEQLSKHSSIDMNIKAKGDTHIDLHHTTEDTGIAIGEALKKALKKSVGIRR

SEQ ID NO: 150211 - protein, 200 aa, Unknown
  Bacterial polypetide isolated from the Sargasso Sea
NDIQKSLLASSRIAEVVRTTSETDIRVRVDLDSQAKSTIQTGMGFFDHMLDQIATHGGFELNLTTDGDLHIDDHHSVEDTALALGEALKKALGDKRGIGRFGFALPMDECRAECIMDISNRPHLKFDAEFSRDQVGEMATEMVPHFFYSLAQSMGLSLHLSTSEGNAHHQVESLFKVFGRALRQAITRQGDALPSSKGAL

SEQ ID NO: 150212 - protein, 197 aa, Unknown
  Bacterial polypetide isolated from the Sargasso Sea
MKQKRIAKIERITSETKIKLELNLDGSGKADVKTGIGFLDHMLDLWVFHGLFNLKLTCKGDLEIDAHHTTEDIALALGSALAEAVGEKKGIVRYGFSYLPMDESLLRVALDLSGRPEFVFSGEFVQSSIGSLDTQMIRHFFKSLAISSGMTLHMSILYGINDHHKCEGLFKALGRALRQAVEIDTRRTGVPSTKGIL

SEQ ID NO: 150213 - protein, 142 aa, Unknown
  Bacterial polypetide isolated from the Sargasso Sea
MREAKVERKTKETKINASVVLDGSGIYKIDTGIGFLDHMLEQLSRHSLIDLKVKAIGDLHIDFHHTTEDTGIVIGEALDKALGDRSGITRYGFALVPLDEALTRVVVDCSNRPGLVWKVGFSRPKVGEMDTELFKEWFQGFA

SEQ ID NO: 150214 - protein, 89 aa, Unknown
  Bacterial polypetide isolated from the Sargasso Sea
MKRKAKISRKTKETSISVDLNIDGKGKYKVDTGIGFLNHMLEQLSKHSSIDLTLKAKGDTHIDLHHTTEDTGIAIGECLKKASKNFIGI

SEQ ID NO: 150215 - protein, 195 aa, Unknown
  Bacterial polypetide isolated from the Sargasso Sea
MRKGKVERNTKETKISCEINLDGVGQSKISTQIGFFDHMLELLSHHSLIDIDLKCEGDTNVDLHHSVEDTAYAIALAINKALDDKKGINRYGFSYVPMDECLSRCVIDLSGRPELVWNVNLGLKKIGEMDTELFHEFFKAFSNESKCNLHVENLYGKNNHHIIESCFKAFAKSLRFAVEIDNRRKDNIPSSKGTL

SEQ ID NO: 150216 - protein, 90 aa, Unknown
  Bacterial polypetide isolated from the Sargasso Sea
MSILSGRPGLFYEVEYVRSRVGDFDLDLLREFFQGLVNHGMLTLHLDNLKGANAHHQAETLFKGFGRALRMALSVDEKNIGHIPSTKGTL

SEQ ID NO: 150217 - protein, 78 aa, Unknown
  Bacterial polypetide isolated from the Sargasso Sea
MKRKANILRKTKETSIKVDLNIDGKGKYKIDTGIGFLNHMLEQLSKHSSIDLSVKAKGDTHIDLHHTTEDTGIAIGEC

SEQ ID NO: 150218 - protein, 96 aa, Unknown
  Bacterial polypetide isolated from the Sargasso Sea
EALSRVVLDFSGRPGLHMKVDFVKDTVGDIEVDMFEHFFQSLCNHAFLTLHIENFTGDNTHHQIETIFKAFGRALRMALSIDPRQENAIPSTKGSL

SEQ ID NO: 150219 - protein, 140 aa, Unknown
  Bacterial polypetide isolated from the Sargasso Sea
KGDTHIDLHHTTEDTGIAIGECLKKASKKFVGIKRYAHAMIPMDETLTRVAIDVSNRPYLIWKVKLKVEKLGEMDTELFKEWFQAFSQAAGITLHIENIYGDNSHHIIESCFKGLARSLRAALEMDPRNKTTIPSTKGSL

SEQ ID NO: 150220 - protein, 196 aa, Unknown
  Bacterial polypetide isolated from the Sargasso Sea
MKRKANISRKTKETNISVDLNIDGKGKYKVDTGIGFLDHMLEQLSKHSSMDMNIKAKGDTHIDLHHTTEDTGIAIGECLKKASKKFVGIKRYAHAMIPMDETLTRVAIDVSNRPYLIWKVKLKVEKLGEMDTELFKEWFQAFSQAAGITLHVENIYGDNSHHIIESCFKGLARSLRAALEMDPRNKTTIPSTKGSL

SEQ ID NO: 150221 - protein, 196 aa, Unknown
  Bacterial polypetide isolated from the Sargasso Sea
MKRKGKISRKTKETSISVDLNIDGKGKYKIDTGIGFLNHMLEQLSKHSSIDMNIKAKGDTHIDLHHTTEDTGIAIGEALKKALKKSIGIRRYAHAMIPMDETLSRVAIDISNRPYLIWKVNLKVEKLGEMDTELFKEWFQAFSQAAGITLHVENIYGDNSHHIIESCFKGLARSLRAALEIDPRNSKSIPSTKGSL

SEQ ID NO: 150222 - protein, 196 aa, Unknown
  Bacterial polypetide isolated from the Sargasso Sea
MKRKAKISRKTKETSISVDLNIDGKGKYKIDTGIGFLDHMLEQLSKHSSMDMNIKAKGDTHIDLHHTTEDTGIAIGECLKKASKKFIGIKRYAHAMIPMDETLTRVAIDVSNRPYLIWKVNLKVEKLGEMDTELFKEWFQAFSQAAGITLHVENIYGDNSHHIIESCYKGLARSLRAALEMDPRNKNTIPSTKGSL

SEQ ID NO: 150223 - protein, 190 aa, Unknown
  Bacterial polypetide isolated from the Sargasso Sea
VKRKTKETEITCEINIDGTGQNEISTGIGFFDHMLEIFSHHSLIDLKIKAEGDTHVDLHHTVEDTAYALANAINKSIGEKKGINRYGFFYITMDESLSRTVIDFSGRPEFVWKVDLGLKKIGEMDTELFHEFFKAFANEAKCNLHIENLYGDNNHHIIESCFKSFARSVRYALIIDQKIKDKIPSSKGTL

SEQ ID NO: 150224 - protein, 196 aa, Unknown
  Bacterial polypetide isolated from the Sargasso Sea
MKRKAEISRKTKETKIDVAINIDGKGKFKIDTGIGFLDHMLEQLSKHSSIDLKVKAKGDTHIDLHHTTEDTGIAIGECLKKASKKFVGIKRYAHAMIPMDETLTRVALDVSNRPYLIWKVDLKVEKLGEMDTELFKEWFQAFSQAAGITLHIENLYGDNSHHKVESCFKGLARSLRSALEIDPRNKNVIPSTKGSL

SEQ ID NO: 150225 - protein, 167 aa, Unknown
  Bacterial polypetide isolated from the Sargasso Sea
IKTKIGFLDHMLEQLAKHSLIDMKINAKGDTHIDLHHTTEDTGIAIGEAIKKAAGNRKGIKRYATTNIPMDETLTRVSLDISNRPYLIWNVDLKVEKLGEMDTELFKEWFQAFAQSAGITLHVENIYGENSHHKIESCFKALARSLKEALEIDKRIKNSIPSTKGTI

SEQ ID NO: 150226 - protein, 195 aa, Unknown
  Bacterial polypetide isolated from the Sargasso Sea
MRTASIERNTKETKIDCKLNIDGTGVSRINTGIGFFDHMLEIFSHHSLIDVELSVDGDTHVDFHHTVEDTAYALSDAINKAIGDKKGINRYGFFYITMDESLSRTVIDFSGRPELVWKVELGLEKIGEMDTELFKEFFKAFTNNAKCNLHIENFYGTNNHHIIESCFKSFARSVRAALTIDERIKNIIPSSKGVL

SEQ ID NO: 150227 - protein, 182 aa, Unknown
  Bacterial polypetide isolated from the Sargasso Sea
MKRKANISRKTKETSISVDLNIDGKGQYKIDTGIGFLNHMLEQLSKHSSIDMKIKAKGDTHIDLHHTTEDTGIAIGECLKKASKKFIGIKRYAHAMIPMDETLTRVAIDVSNRPYLIWKVKLKVEKLGEMDTELFKEWFQAFSQAAGITLHVENMYGDNSHHIIESCFKGLARSLRAALEID

SEQ ID NO: 150228 - protein, 125 aa, Unknown
  Bacterial polypetide isolated from the Sargasso Sea
MKRKAKINRKTKETNISVAVNLDGKGKYKIKTGIGFLDHMLEQLAKHSLIDLEVKAKGDTHIDLHHTTEDTGIAIGEAIKKAAGNRKGITRYASTMIPMDETLSRVSIDVSNRPYLIWKVNLPVE

SEQ ID NO: 150229 - protein, 150 aa, Unknown
  Bacterial polypetide isolated from the Sargasso Sea
MSSLRQSEIKRKTNETDISVFINLDGNGISEIDTGIPFLDHMLHQISSHGLFDLKIKAIGDTHIDDHHTNEDVGIALGKAFSKALGERKGISRFGHFFAPLDEALVQVTLDCSGRPHLSYDLQLKAPRIGNYDTELVREFFIAFVNNSGI

SEQ ID NO: 150230 - protein, 196 aa, Unknown
  Bacterial polypetide isolated from the Sargasso Sea
MKRKAKISRKTKETSISVDLNIDGKGKYKVDTGIGFLNHMLEQLSKHSSMDMNIKAKGDTHIDLHHTTEDTGIAIGECLKKASKKFIGIKRYAHAMIPMDETLTRVAIDVSNRPYLIWKVKLKVEKLGEMDTELFKEWFQAFSQAAGITLHIENIYGDNSHHIIESCFKGLARSLRAALEMDPRNKNTIPSTKGSL

SEQ ID NO: 150231 - protein, 195 aa, Unknown
  Bacterial polypetide isolated from the Sargasso Sea
MRKSFIERNTKETKIICKTNLDGSGISDISTGIGFFDHMLEIFSHHSLIDLELKAEGDTHVDLHHTVEDASYSIAQSIVKSLGDKKGISRYGFYYIPMDECLSRCVIDFSGRPELVWSVKLGLEKIGEMDTELFEEFFKAFANEAKCNLHIENLYGKNNHHIIESCFKAFARSIKEAVRVDERIKNIIPSSKGIL

SEQ ID NO: 150232 - protein, 196 aa, Unknown
  Bacterial polypetide isolated from the Sargasso Sea
MARKAKIIRKTKETNISVAVNIDGKGKYNIKTGIGFLDHMLEQLSKHSLIDIEVKAKGDTHIDLHHTTEDTGIAIGEAIKKAAGNRKGITRYASTMIPMDETLSRVSIDISNRPYLIWKVNLAVEKLGEMDTELFKEWFQAFSQSAGVTLHIENIYGDNSHHKIESCFKGLARSLKDALEIDKRIKNSVPSTKGSL

SEQ ID NO: 150233 - protein, 95 aa, Unknown
  Bacterial polypetide isolated from the Sargasso Sea
MRKVSESRKTKETDISLSLNLDGSGMSNLKANLPFLEHMLDQTTRYSSIDLDLDAKGDLEIDAHHTVEDIGITLGSAFDKALGDKKGIQRFGYAY

SEQ ID NO: 150234 - protein, 196 aa, Unknown
  Bacterial polypetide isolated from the Sargasso Sea
MKRKAKISRKTKETSISVDLNIDGKGKYKVDTGIGFLDHMLEQLSKHSSIDMNIKAKGDTHIDLHHTTEDSGIAIGECLKKASKKFIGIKRYAHAMIPMDETLTRVALDVSNRPYLIWKVKLKVEKLGEMDTELFKEWFQAFSQAAGITLHVENIYGDNSHHIIESCFKGLARSLRAALEMDPRNKNTIPSTKGSL

SEQ ID NO: 150235 - protein, 180 aa, Unknown
  Bacterial polypetide isolated from the Sargasso Sea
MKRKAKISRKTKETSISVDLNIDGKGKYKVDTGIGFLDHMLEQLSKHSSMDMNIKAKGDTHIDLHHTTEDAGIAIGECLKKASKKFVGIKRYAHAIIPMDETLTRVAIDVSNRPYLIWKVKLKVEKLGEMDTELFKEWFQAFSQAAGITLHVENIYGDNSHHIIESCFKGLARSLRAAWR

SEQ ID NO: 150236 - protein, 144 aa, Unknown
  Bacterial polypetide isolated from the Sargasso Sea
VGDLHIDFHHTTEDTGIVIGEAVKRALGDRAGITRYGSALVPLDEALTRCVVDCSNRPYLVWKVGFNRPKLGEMDTELFREWFQAFAQAAGLTLHVDNLYGENNHHIIEASFKALARALRQAVTMDPRAEGVVPSTKGTLSDQD

SEQ ID NO: 150237 - protein, 188 aa, Unknown
  Bacterial polypetide isolated from the Sargasso Sea
ERKTRETLVKVKLNLDGEGTSETNTGIGFLDHMLDQLAFHGLMDLAVSCEGDLHIDSHHSTEDIGIAVGQALKEALGEKKGIRRYGHAYIPMDEALLRAVLDCSGRPDFVFNGEFGRYNLGDLDTQMIPHFFKSLAFNCGLTLHLSILYGSNDHHKCEGLFKAFARALSEAVTLDPRRMGVSSTKGTL

SEQ ID NO: 150238 - protein, 174 aa, Unknown
  Bacterial polypetide isolated from the Sargasso Sea
MRKASIDRNTKETKISCSVNLDGIGKSEISTGIGFFDHMLEIVSHHSLIDINLKAEGDTHVDLHHTVEDVGYVLSQSILKALDKKLGIKRYGFYYIPMDECLSRCVLDFSGRPELVWKVSLDLEKVGEMDTELFHEFFKAFSNEAKCNLHVENLYGKNNHHIIESCFKAFARSL

SEQ ID NO: 150239 - protein, 196 aa, Unknown
  Bacterial polypetide isolated from the Sargasso Sea
MKRKAKISRKTKETNINVELNIDGKGKYKVDTGIGFLDHMLEQLSKHSSMDINIKAKGDTHIDLHHTTEDTGIAIGECLKKASKKFVGIKRYAHAMIPMDETLTRVAIDVSNRPYLIWKVKLKVEKLGEMDTELFKEWFQAFSQSAGITLHVENIYGDNSHHIIESCFKGLARSLRAALEMDPRNKTTIPSTKGSL

SEQ ID NO: 150240 - protein, 196 aa, Unknown
  Bacterial polypetide isolated from the Sargasso Sea
MKRKAKISRKTKETNISVDLNIDGKGKYKVDTGIGFLDHMLEQLSKHSSMDMKIKAKGDTHIDLHHTTEDTGIAIGECLKKASKKFVGIKRYAHAMIPMDETLTRVAIDVSNRPYLIWKVKLKVEKLGEMDTELFKEWFQAFSQAAGITLHVENIYGDNSHHIIESCFKGLARSLRAALEMDPRKRTTIPSTKGSL

SEQ ID NO: 150241 - protein, 161 aa, Unknown
  Bacterial polypetide isolated from the Sargasso Sea
FLDHMLEQLSKHSLIDLKVKAKGDTHIDLHHTTEDTGIAIGEALKKAAKKFVGIKRYAHTVIPMDETLTRVAIDVSNRPYLIWKVKLKVEKLGEMDTELFKEWFQAFSQSAGITMHVENIYGDNSHHIIESCYKALARSLRAALEMDPRNKKSIPSTKGSL

SEQ ID NO: 150242 - protein, 127 aa, Unknown
  Bacterial polypetide isolated from the Sargasso Sea
MKRKAKISRKTKETNISVDLNIDGKGKYKVDTGIGFLDHMLEQLSKHSSIDMNIKAKGDTHIDLHHTTEDTGIAIGECLKKASKKFVGIKRYAHAMIPMDETLTRVAIDVSNRPYLIWKVKLKVEKL

SEQ ID NO: 150243 - protein, 196 aa, Unknown
  Bacterial polypetide isolated from the Sargasso Sea
MKRKAKISRKTKETNISVDLNIDGKGKYKVDTGIGFLDHMLEQLSKHSSMDMNIKAKGDTHIDLHHTTEDTGIAIGECLKKASKKFVGIKRYAHSMIPMDETLTRVAIDVSNRPYLIWKVKLKVEKLGEMDTELFKEWFQAFSQAAGITLHVENIYGDNSHHIIESCFKGLARSLRAALEMDPRNKTTIPSTKGSL

SEQ ID NO: 150244 - protein, 178 aa, Unknown
  Bacterial polypetide isolated from the Sargasso Sea
EVNIDGKGKYQIDTGIGFLDHMLEQLSKHSLIDLKVKAKGDTHIDLHHTTEDTGIAIGEALKKAAKKFVGIKRYAHRLIPMDETLTRVAIDVSNRPYLIWKVKLKVEKLGEMDTELFKEWFQAFSQSAGITLHVENIYGDNSHHIIESCYKGLARSLRDALEMDPRSKKSIPSTKGSL

SEQ ID NO: 150245 - protein, 138 aa, Unknown
  Bacterial polypetide isolated from the Sargasso Sea
MIRKAHLERVTKETDIRVNINIDGKNNYKINSGIGFLDHMLEQLSKHSFIDIDLTAKGDLHIDYHHTTEDTGYAIGKAIDEAIGDRRGITRFAHAYIPMDETLTRVAIDFSGRPYLIWKVFFTQNKLGDMDTELFKEW

SEQ ID NO: 150246 - protein, 167 aa, Unknown
  Bacterial polypetide isolated from the Sargasso Sea
MRSIDLERNTKETQIKLSLNLDGSGSADLSVELPFFAHMLDQLVRHGDFDLQLNAIGDLEIDAHHTVEDIGIILGEAFNSALGDKKGIKRFGSAYAPLDESLSRVVVDFSGRPGLFWDVEFKREFINDFDLQLLEEFFHGFTNKALATIHVDNLKRGKCSSPSRNNI

SEQ ID NO: 150247 - protein, 161 aa, Unknown
  Bacterial polypetide isolated from the Sargasso Sea
MKRKAKISRKTKETNISVDLNIDGKGKYKVDTGIGFLDHMLEQLSKHSSMDMNIKAKGDTHIDLHHTTEDTGIAIGECLKKASKKFVGIKRYAHAMIPMDETLTRVAIDVSNRPYLIWKVKLKVEKLGEMDTELFKEWFQAFSQAAGITLHIENIYGDNSH

SEQ ID NO: 150248 - protein, 186 aa, Unknown
  Bacterial polypetide isolated from the Sargasso Sea
TKETNISVEVNLDGKGKYKIKTKIGFLDHMLEQLAKHSLIDMKISAKGDTHIDLHHTTEDTGIAIGEAIKKAAGNRKGIKRYATTNVPMDETLTRVSLDISNRPYLIWNVDLKVEKLGEMDTELFKEWFQAFAQSAGITLHVENIYGENSHHKIESCFKALARSLKEALEIDKRIKNSIPSTKGTI

SEQ ID NO: 150249 - protein, 135 aa, Unknown
  Bacterial polypetide isolated from the Sargasso Sea
MNRKAKITRKTKETSISVTVNLDGKGKYKIKTGIGFLDHMLEQLSKHSLIDLDVKAKGDKHVDLHHTTEDTGIAIGEAIKKAAGNRKGITRYASTMIPMDETLSRVSIDVSNRPYLIWKVDLPVEKLGEMDTELS

SEQ ID NO: 150250 - protein, 185 aa, Unknown
  Bacterial polypetide isolated from the Sargasso Sea
MARKGKVSRKTKETSINVELNIDGKGKYQIDTGIGFLDHMLEQLSKHSLIDLKVKAKGDTHIDLHHTTEDTGIAIGEALKKAAKKFVGIKRYAHRVIPMDETLTRVAIDVSNRPYLIWKVKLKVEKLGEMDTELFKEWFQAFSQSAGITMHVENIYGDNSHHIIESCYKGLARSLRDALEMDPQK

SEQ ID NO: 150251 - protein, 196 aa, Unknown
  Bacterial polypetide isolated from the Sargasso Sea
MKRKAKISRKTKETNISIDLNIDGKGKYKVDTGIGFLDHMLEQLSKHSSMDMNIKAKGDTHIDLHHTTEDTGIAIGECLKKASKKFVGIKRYAHAMIPMDETLTRVAIDVSNRPYLIWKVKLKVEKLGEMDTELFKEWFQAFSQAAGITLHVENIYGDNSHHIIESCFKGLARSLRAALEMDPRNKTTIPSTKGSL

SEQ ID NO: 150252 - protein, 196 aa, Unknown
  Bacterial polypetide isolated from the Sargasso Sea
MKRKAEISRKTKETKIDVALNIDGKGKFSIDTGIGFLDHMLEQLSKHSSIDLKVKAKGDTHIDLHHTTEDTGIAIGECLKKASKKFVGIKRYAHAMIPMDETLTRVALDISNRPYLIWKVDLKVEKLGEMETELFKEWFQAFSQAAGITLHIENLYGDNSHHKVESCFKGLARSLRSALEIDSRNKDVIPSTKGSL

SEQ ID NO: 150253 - protein, 186 aa, Unknown
  Bacterial polypetide isolated from the Sargasso Sea
MPRKGKVSRKTKETSISVEVNIDGKGQYKIDTGIGFLDHMLEQLSKHSLIDLKVKAKGDTHIDLHHTTEDTGIAIGEALKKAAKKFVGIKRYAHRVIPMDETLTRVAIDVSNRPYLIWKVKLKVEKLGEMDTELFKEWFQAFSQSAGITLHVENIYGDNSHHIIESCYKGLARSLRDALEMDPRNK

SEQ ID NO: 150254 - protein, 134 aa, Unknown
  Bacterial polypetide isolated from the Sargasso Sea
MSRKGKISRKTKETSISVEVNIDGKGKYQIDTGIGFLDHMLEQLSKHSLIDLKVKAKGDTHIDLHHTTEDTGIAVGEALKKAAKKFVGIKRYAHRLIPMDETLTRVAIDVSNRPYLIWKVKLKVEKLGEMDTEL

SEQ ID NO: 150255 - protein, 141 aa, Unknown
  Bacterial polypetide isolated from the Sargasso Sea
MARKAKISRKTKETSISVSVNLDGKGKYKIKTGIGFLDHMLEQLSKHSLIDLEVNAKGDTHIDLHHTTEDTGIAIGEAIKKAAGNRKGIKRYASTMIPMDETLSRVSIDVSNRPYLIWKVNLAVEKLGEMDTELFKEWFQA

SEQ ID NO: 150256 - protein, 178 aa, Unknown
  Bacterial polypetide isolated from the Sargasso Sea
MKRKAKISRKTKETNISVDLNIDGKGKYKVDTGIGFLDHMLEQLSKHSSMDMNIKAKGDTHIDLHHTTEDTGIAIGECLKKASKKFVGIKRYAHAMIPMDETLTRVAIDVSNRPYLIWKVKLKVEKLGEMDTELFKEWFQAFSQAAGITLHVENIYGDNSHHIIESCFKGLARSLRAA

SEQ ID NO: 150257 - protein, 136 aa, Unknown
  Bacterial polypetide isolated from the Sargasso Sea
MKRKAEITRKTKETRIDVAINIDGKGKFKIDTGIGFLDHMLEQLSKHSSIDLNVKAKGDTHIDLHHTTEDTGIAIGECLKKASKKFVGIKRYAHAMIPMDETLTRVALDVSNRPYLIWKVDLKVEKLGEMDTELFK

SEQ ID NO: 150258 - protein, 126 aa, Unknown
  Bacterial polypetide isolated from the Sargasso Sea
MKRKASITRKTKETKIDVDINIDGKGKYKIKTGIGFLDHMLEQLSKHSSIDIKLKAKGDTHIDLHHTTEDTGIAIGECLKKASKNFVGIKRYAHALLPMDETLTRVAIDVSNRPYLIWNVKLKVEK

SEQ ID NO: 150259 - protein, 196 aa, Unknown; identical to SEQ ID NO: 150224
  Bacterial polypetide isolated from the Sargasso Sea

SEQ ID NO: 150260 - protein, 196 aa, Unknown
  Bacterial polypetide isolated from the Sargasso Sea
MKRKAKISRKTKETNISVDLNIDGKGKYKVDTGIGFLDHMLEQLSKHSSMDMNIKAKGDTHIDLHHTTEDTGIAIGECLKKASKKFVGIKRYAHAMIPMDETLTRVAIDVSNRPYLIWKVKLKVEKLGEMDTELFKEWFQAFSQAAGITLHIENIYGDNSHHIIESCFKGLARSLRAALEMDPRNKTTIPSTKGSL

SEQ ID NO: 150261 - protein, 196 aa, Unknown
  Bacterial polypetide isolated from the Sargasso Sea
MKRKAKISRKTKETSISVDLNIDGKGKYKVDTGIGFLNHMLEQLSKHSSMDMNIKAKGDTHIDLHHTTEDTGIAIGECLKKASKKFVGIKRYAHAMIPMDETLTRVAIDVSNRPYLIWNVKLKVEKLGEMDTELFKEWFQAFSQAAGITLHVENIYGDNSHHIIESCFKGLARSLRVALEMDPRNKNTIPSTKGSL

SEQ ID NO: 150262 - protein, 174 aa, Unknown
  Bacterial polypetide isolated from the Sargasso Sea
DGKGKYQIDTGIGFLDHMLEQLSKHSLIDLKIKAKGDTHIDLHHTTEDTGIAIGEALKKAAKKFVGIKRYAHTVIPMDETLTRVAIDVSNRPYLIWKVKLKVEKLGEMDTELFKEWFQAFSQSAGITMHVENIYGDNSHHIIESCYKALARSLRAALEMDPRNKKSIPSTKGSL

SEQ ID NO: 150263 - protein, 196 aa, Unknown
  Bacterial polypetide isolated from the Sargasso Sea
MIRKAKILRKTKETNISVEVNLDGKGKYQVKTKIGFLDHMLEQLSKHSLIDLKIVAKGDTHIDLHHTTEDSGIAIGEAIKKAAGNLKGIRRYASNTIPMDETLTRVSLDISNRPYLIWRVDLKVEKLGEMDTELFREWFQAFSQSAGITLHVENLYGENSHHKIESCFKALARSLKDAFELDKRVKNILPSTKGKL

SEQ ID NO: 150264 - protein, 104 aa, Unknown
  Bacterial polypetide isolated from the Sargasso Sea
MARKAKINRKTKETNIIVEANLDGIGSYKIDTKIGFLNHMLEQLSKHSLIDLKISARGDTHIDLHHTTEDTGIATGECIKKALGSSKGIKRYAHALIPMDETLT

SEQ ID NO: 150265 - protein, 114 aa, Unknown
  Bacterial polypetide isolated from the Sargasso Sea
MKRKAKISRKTKETSISVDLNIDGKGKYKVDTGIGFLDHMLEQLSKHSSMDMNIKAKGDTHIDLHHTTEDTGIAIGECLKKASKKFIGIKRYAHAMIPMDETLTRVAIDVSNRP

SEQ ID NO: 150266 - protein, 191 aa, Unknown
  Bacterial polypetide isolated from the Sargasso Sea
MRTASIERNTKETKILCKINVDGIGVSKISSGIGFFDHMLEIFSHHSLIDIELSVDGDTHVDFHHTVEDTAYALSEALNKAIGDKKGINRYGFYYITMDESLSRTVIDFSGRPELIWKVQLGLEKIGEMDTELFKEFFKAFSNNAKCNLHIENFYGTNNHHIIESCFKSFARSIRLALTIDERTKNIIPSS

SEQ ID NO: 150267 - protein, 162 aa, Unknown
  Bacterial polypetide isolated from the Sargasso Sea
MARKGKVSRKTKETSINVEVNIDGKGKYQIDTGIGFLDHMLEQLSKHSLIDLKVKAKGDTHIDLHHTTEDTGIAIGEALKKAAKKFVGIKRYAHAMIPMDETLSRVAVDVSNRPYLIWKVKLKVEKLGEMDTELFKEWFQAFSQSAGITLHIENIYGDNSHH

SEQ ID NO: 150268 - protein, 195 aa, Unknown
  Bacterial polypetide isolated from the Sargasso Sea
MRKSKINRKTSETSISVEINLDGKGKFKISTGIGFLDHMLEQLSKHSLIDINLKAKGDLKVDDHHTTEDTGIALGEAVSKALGNKISIKRFGTAFIPMDETLTRVSLDLSNRPYLIWKVKFTNKEVGKMDSELFKEWFQAFSQAAGLTLHIENLYGDNNHHIIETCYKGLARSLRDAISVDPREKGRIPSTKGKL

SEQ ID NO: 150269 - protein, 196 aa, Unknown
  Bacterial polypetide isolated from the Sargasso Sea
MKRKGKISRKTKETSISVDLNIDGKGKYKIDTGIGFLNHMLEQLSKHSSIDMNIKAKGDTHIDLHHTTEDTGIAIGEALKKASKKFVGIKRYAHAMIPMDETLTRVAIDVSNRPYLIWKVKLKVEKLGEMDTELFKEWFQAFSQAAGITLHVENIYGDNSHHIIESCFKGLARSLRTALEMDPRNKKSIPSTKGSL

SEQ ID NO: 150270 - protein, 196 aa, Unknown
  Bacterial polypetide isolated from the Sargasso Sea
MKRKAKISRKTKETNISVDLNIDGKGKYKVDTGIGFLDHMLEQLSKHSSMDMNIKAKGDTHIDLHHTTEDTGIAIGECLKKASKKFVGIKRYAHAMIPMDETLTRVAIDVSNRPYLIWKVKLKVEKLGEMDTELFKEWFQAFSQAAGITLHVENIYGDNSHHIIESCFKGLARSLRAALEMDPRNKTTIPSTKGSL

SEQ ID NO: 150271 - protein, 191 aa, Unknown
  Bacterial polypetide isolated from the Sargasso Sea
YNKKNKRDKNFDVELNIDGKGQYKIDTGIGFLDHMLEQLSKHSSIDLKVKAKGDTHIDLHHTTEDTGIAIGECLKKASKKFIGIKRYAHSMIPMDETLTRVALDVSNRPYLIWKVDLKVEKLGEMDTELFKEWFQAFSQSAGITLHIENLYGDNSHHKVESCFKGLARSLRAALEIDPKNKKVVPSTKGSL

SEQ ID NO: 150272 - protein, 196 aa, Unknown
  Bacterial polypetide isolated from the Sargasso Sea
MSRKAKITRKTKETSISVAVNLDGKGKYKIKTGIGFLDHMLEQLSKHSLIDLEVKAKGDTHIDLHHTTEDTGIAIGEAIKKAAGNRKGITRYASTMIPMDETLSRVSIDVSNRPYLIWKVNLPVEKLGEMETELFKEWFQAFSQSAGVTLHIENIYGDNSHHKIESCYKGLARSLKDALAIDNRIKNSIPSTKGSI

SEQ ID NO: 150273 - protein, 196 aa, Unknown
  Bacterial polypetide isolated from the Sargasso Sea
MARKGKISRKTKETSISVEVNIDGKGQYQIDTGIGFLDHMLEQLSKHSLIDLKVKAKGDTHIDLHHTTEDTGIAIGEALKKAAKKFVGIKRYAHRLIPMDETLTRVAIDVSNRPYLIWKVKLKVEKLGEMDTELFKEWFQAFSQSAGITLHVENIYGDNSHHIIESCYKGLARSLRDALEMDPRSKKSIPSTKGSL

SEQ ID NO: 150274 - protein, 182 aa, Unknown
  Bacterial polypetide isolated from the Sargasso Sea
MSRKAKILRKTKETNISVEVNLDGKGKYQIKTKIGFLDHMLEQLSKHSLIDMKVIAKGDTHIDLHHTTEDSGIAIGEAIKKAAGNLKGIRRFSSITIPMDETLTRVSMDISNRPYLIWKVDLKVEKLGEMDTELFKEWFQAFSQAAGITLHIENLYGDNSHHKIESCFKALARSLREALQID

SEQ ID NO: 150275 - protein, 126 aa, Unknown
  Bacterial polypetide isolated from the Sargasso Sea
MREFTFKRDTKETKISIKVNLDGSGVNKIDTGIAFFDHMLQQISTHSLIDIELKCDGDLKVDMHHTVEDVGIALGESIKNALGDKKGIKRFAYSYVSFDETLTRSVLDLCNRPYFIWNVKTSLEKV

SEQ ID NO: 150276 - protein, 196 aa, Unknown
  Bacterial polypetide isolated from the Sargasso Sea
MSRKAKITRKTKETSISVAVNLDGKGKYKIKTGIGFLDHMLEQLSKHSLIDLEVKAKGDTHIDLHHTTEDTGIAIGEAIKKAAGNRKGITRYASTMIPMDETLSRVSIDVSNRPYLIWKVNLPVEKLGEMDTELFKEWFQAFSQSAGVTLHIENIYGENSHHKIESCYKGLARSLKDALAIDKRIKNSIPSTKGSI

SEQ ID NO: 150277 - protein, 196 aa, Unknown
  Bacterial polypetide isolated from the Sargasso Sea
MARKGKISRKTKETNISVEVNIDGKGKYQIDTGIGFLDHMLEQLSKHSLIDLKVKAKGDTHIDLHHTTEDTGIAIGEALKKAAKKFVGIKRYAHRLIPMDETLTRVAIDVSNRPYLIWKVKLKVEKLGEMDTELFKEWFQAFSQSAGITLHVENIYGDNSHHIIESCYKGLARSLRDALEMDPRSKKSIPSTKGSL

SEQ ID NO: 150278 - protein, 196 aa, Unknown
  Bacterial polypetide isolated from the Sargasso Sea
MARKGKVSRKTKETNINVEVNIDGKGKYQIETGIGFLDHMLEQLSKHSLIDLKVKAKGDTHIDLHHTTEDTGIAIGEALKKAAKKFVGIKRYAHTVIPMDETLTRVAIDVSNRPYLIWKVKLKVEKLGEMDTELFKEWFQAFSQSAGITMHVENIYGDNSHHIIESCYKALARSLRVALEMDPRNKKSIPSTKGSL

SEQ ID NO: 150279 - protein, 196 aa, Unknown
  Bacterial polypetide isolated from the Sargasso Sea
MSRKAKITRKTKETSISVAVNLDGKGKYKIKTGIGFLDHMLEQLSKHSLIDLDVKAKGDTHIDLHHTTEDTGIAIGEAIKKAAGNRKGITRYASTMIPMDETLSRVSIDVSNRPYLIWKVNLPVEKLGEMDTELFKEWFQAFSQSAGVTLHIENIYGENSHHKIESCYKGLARSLKDALAIDKRIKNSIPSTKGSI

SEQ ID NO: 150280 - protein, 187 aa, Unknown
  Bacterial polypetide isolated from the Sargasso Sea
MRTAEYKRDTKETSISVDINIDGTGKYDIKTGIGFLDHMLEQLSKHSLIDMKIKATGDIHIDYHHTTEDTGIAIGECLSKALGNRQGITRYAHSYIPMDETLSRVALDLSNRPYLIWKVQFSAPKITSSQGDFDTELFKEWFQAFAQASGTTLHVENIYGENNHHIIESCFKALARSLRNAVAINKR

SEQ ID NO: 150281 - protein, 155 aa, Unknown
  Bacterial polypetide isolated from the Sargasso Sea
MARKGKVSRKTKETSINVEVNIDGKGKYQIDTGIGFLDHMLEQLSKHSLIDLKVKAKGDTHIDLHHTTEDTGIAIGEALKKAAKKFVGIKRYAHTVIPMDETLTRVAIDVSNRPYLIWKVKLKVEKLGEMDTELFKEWFQAFSQSAGITMHVENI

SEQ ID NO: 150282 - protein, 156 aa, Unknown
  Bacterial polypetide isolated from the Sargasso Sea
MKRKGKISRKTKETSINVDLNIDGKGKYKIDTGIGFLNHMLEQLSKHSSIDMIIKAKGDTHIDLHHTTEDTGIAIGEALKKALKKSVGIRRYAHAMIPMDETLSRVALDISNRPYLIWNVNLKVEKLGEMDTELFKEWFQAFSQAAGITLHVENIY

SEQ ID NO: 150283 - protein, 189 aa, Unknown
  Bacterial polypetide isolated from the Sargasso Sea
VRKTNETDISIQLNIDGIGKSEIDTGISFFDHMLDQLAKHSLMDLKIKAKGDIDIDYHHTVEDVGICLGETLKRCLGDKKGINRYASVLLPMDDALAQVAVDFSGRPYLFWEVNFPTSKVGNFDTELFSEFFQSFTMNAGITLHIKMVHGINSHHIGEAIFKGVAQSIKTALSIDPRKPRIIPSTKGSL

SEQ ID NO: 150284 - protein, 105 aa, Unknown
  Bacterial polypetide isolated from the Sargasso Sea
MKRKAKIARKTKETSISVELNIDGKGKYKIDTGIGFLNHMLEQLSKHSSIDMNVKAKGDTHIDLHHTTEDTGIAIGECLKKASKNFVGIKRYAHALLPMDETLTR

SEQ ID NO: 150285 - protein, 162 aa, Unknown
  Bacterial polypetide isolated from the Sargasso Sea
MKRKAKIRRKTKETNINVDLNIDGKGKYKIETGIGFLNHMLEQLSKHSSIDINLKAKGDTHIDLHHTTEDTGIAIGECLKKASKKFVGIKRYAHAMIPMDETLTRVAIDVSNRPYLIWKVKLKVEKLGEMDTELFKEWFQAFSQAAGITLHVENIYGDNSHH

SEQ ID NO: 150286 - protein, 117 aa, Unknown
  Bacterial polypetide isolated from the Sargasso Sea
MREAKVARKTKETDIEVLVNIDGTGVYDVDTGIGFLDHMLEQLSRHSLMDLTVRAKGDLHIDYHHTTEDTGIAIGEAIHQAMGERRGIVRYASATIPMDETLTRASIDISERPYLIW

SEQ ID NO: 150287 - protein, 120 aa, Unknown
  Bacterial polypetide isolated from the Sargasso Sea
GILFLDHMIHQISSHGLFDLKIKAIGDTHIDDHHTNEDIGIALGKAFSKALGERKGINRFGHFFAPLDEALVQITLDCSGRPHLSYDLQLKAPKIGNYDTELVREFFIAFVNNSRHYFAY

SEQ ID NO: 150288 - protein, 145 aa, Unknown
  Bacterial polypetide isolated from the Sargasso Sea
MREAKVNRGTSETEVNVELNLDGTGKTDLSTGLPFLEHMLDQIGRHGMIDLKVTAKGDLHIDDHHTIEDIGITLGEALNKAVGDKKGIKRYGHSYVPLDEALSRVVLDFSGRPGLHMKVDFVKDTVGGIDVNMFEHFFQSLCNHA

SEQ ID NO: 150289 - protein, 196 aa, Unknown
  Bacterial polypetide isolated from the Sargasso Sea
MKRKAKISRKTKETNINVELNIDGKGKYKVDTGIGFLDHMLEQLSKHSSMDMNIKAKGDTHIDLHHTTEDTGIAIGECLKKASKKFVGIKRYAHAMIPMDETLTRVAIDVSNRPYLIWKVKLKVEKLGEMDTELFKEWFQAFSQSAGITLHVENIYGDNSHHIIESCFKGLARSLRAALEMDSRNKTTIPSTKGSL

SEQ ID NO: 150290 - protein, 196 aa, Unknown
  Bacterial polypetide isolated from the Sargasso Sea
MARKGKVSRKTKETSINVEVNIDGKGKYQIDTGIGFLDHMLEQLSKHSLIDLKVKAKGDTHIDLHHTTEDTGIAIGEALKKAAKKFVGIKRYAHTVIPMDETLTRVAIDVSNRPYLIWKVKLKVEKLGEMDTELFKEWFQAFSQSAGITMHVENIYGDNSHHIIESCYKALARSLRAALEMDPRNKKSIPSTKGSL

SEQ ID NO: 150291 - protein, 169 aa, Unknown
  Bacterial polypetide isolated from the Sargasso Sea
MKRKAKISRKTKETNISVDLNIDGKGKYKVDTGIGFLDHMLEQLSKHSSMDMNIKAKGDTHIDLHHTTEDTGIAIGECLKKASKKFVGIKRYAHAMIPMDETLTRVAIDVSNRPYLIWKVKLKVEKLGEMDTELFKEWFQAFSQAAGITLHIENIYGDNSHHIIESCFK

SEQ ID NO: 150292 - protein, 187 aa, Unknown
  Bacterial polypetide isolated from the Sargasso Sea
KTKETNISVEVNLDGKGKYQIKTKIGFLDHMLEQLSKHSLIDININAKGDTHIDLHHTTEDTGIALGEAIKKAAGKMKGIKRYATTYIPMDETLTRVSMDISNRPYLIWNVDLKVEKLGEMDTELFKEWFQAFSQSAGITLHVENIYGDNSHHKIESCFKALARSLKEALEIDKRIKKSIPSTKGSI

SEQ ID NO: 150293 - protein, 174 aa, Unknown
  Bacterial polypetide isolated from the Sargasso Sea
MKRKAKIARKTKETNISVDLNIDGKGKYKVDTGIGFLDHMLEQLSKHSSMDLTVKAKGDTHIDLHHTTEDTGIAIGECLKKASKKFVGIKRYAHILLPMDETLTRVAIDVSNRPYLIWNVKLKVEKLGEMDTELFKEWFQAFSQAAGITLHVENIYGDNSHHIIESCYKGLART

SEQ ID NO: 150294 - protein, 196 aa, Unknown; identical to SEQ ID NO: 150279
  Bacterial polypetide isolated from the Sargasso Sea

SEQ ID NO: 150295 - protein, 143 aa, Unknown
  Bacterial polypetide isolated from the Sargasso Sea
MKRKAKISRKTKETNISVDLNIDGKGKYKVDTGIGFLDHMLEQLSKHSSMDMNIKAKGDTHIDLHHTTEDTGIAIGECLKKASKKFVGIKRYAHAMIPMDETLTRVAIDVSNRPYLIWKVKLKVEKLGEMDTELFKEWFQAFS

SEQ ID NO: 150296 - protein, 191 aa, Unknown
  Bacterial polypetide isolated from the Sargasso Sea
MRSSSVERNTKETKIFCKTNIDGTGESKISTGIGFFDHMLEIFSHHSLIDVELKVDGDIHVDFHHTVEDSAYALSEAINKSIGDKRGISRYGFFYITMDESLSRTVIDFSGRPELVWNVELGLEKIGEMDTELFKEFFKAFTNNAKCNLHIENFYGTNNHHIIESCFKSFARSIRSALAIDERAKNRIPSS

SEQ ID NO: 150297 - protein, 196 aa, Unknown
  Bacterial polypetide isolated from the Sargasso Sea
MKRKAKITRKTKETSINVDLNIDGKGKYKVDTGIGFLNHMLEQLSKHSSIDMNIKAKGDTHIDLHHTTEDTGIAIGECIKKASKKFIGIKRYAHAMIPMDETLTRVAIDVSNRPYLIWKVKLKVEKLGEMDTELFKEWFQAFSQSAGITLHVENIYGDNSHHIIESCFKGLARSLRTALEMDPRNKKTIPSTKGSL

SEQ ID NO: 150298 - protein, 179 aa, Unknown
  Bacterial polypetide isolated from the Sargasso Sea
VSVNLDGKGKYKIKTGIGFLDHMLEQLSKHSLIDLEVNAKGDTHIDLHHTTEDTGIAIGEAIKKAAGARKGIRRYASTMIPMDETLSRVSIDVSNRPYLIWKVNLKVEKLGEMDTELFKEWFQAFSQSAGVTLHVENIYGENSHHKIESCYKGLARSLKDALEVDKRIKNSIPSTKGSI

SEQ ID NO: 150299 - protein, 196 aa, Unknown
  Bacterial polypetide isolated from the Sargasso Sea
MTRKGKVSRKTKETSISVDVNIDGKGKYQIDTGIGFLDHMLEQLSKHSLIDLKVKAKGDTHIDLHHTTEDTGIAIGEALKKAAKKFVGIKRYAHSIIPMDETLSRVAVDVSNRPYLIWKVKLKVEKLGEMDTELFKEWFQAFSQSAGITLHIENIYGDNSHHIIESCYKGLARSLRAALEMDPRNKKGIPSTKGSL

SEQ ID NO: 150300 - protein, 153 aa, Unknown
  Bacterial polypetide isolated from the Sargasso Sea
MARKAKINRKTKETSIVVEANLDGKGSYKIDTKIGFLNHMLEQVSKHSLIDLKVLAKGDTHIDLHHTTEDTGIAIGECIKKALKSSKGIKRFAHALIPMDETLTRVSIDVSNRPYLIWKVKLKVEKLGEMDTELLKEWFQAFSQASGITLHIE

SEQ ID NO: 150301 - protein, 162 aa, Unknown
  Bacterial polypetide isolated from the Sargasso Sea
MSRKAKILRKTKETNISVEVNLDGKGKYQIKTKIGFLDHMLEQLAKHSLIDMKINAKGDTHIDLHHTTEDTGIAIGEAIKKAAGNRKGIKRYATTNIPMDETLTRVSLDISNRPYLIWNVDLKVEKLGEMDTELFKEWFQAFAQSAGITLHVENIYGENQSS

SEQ ID NO: 150302 - protein, 196 aa, Unknown; identical to SEQ ID NO: 150260
  Bacterial polypetide isolated from the Sargasso Sea

SEQ ID NO: 150303 - protein, 154 aa, Unknown
  Bacterial polypetide isolated from the Sargasso Sea
SHGLFDLKIKAIGDTHIDDHHSNEDVGIALGKAFSKALGERKGISRFGHFFAPLDEALVQVTLDCSGRPHLSYDLQLKAPKIGNYDTELVREFFIAFVNNSGITLHINQIRGSNSHHIVEACFKAFSRAMRMATEIDPRRSDSIPSSKGVLEKQ

SEQ ID NO: 150304 - protein, 196 aa, Unknown
  Bacterial polypetide isolated from the Sargasso Sea
MKRKAKISRKTKETNISVDLNIDGKGKYKVDTGIGFLDHMLEQLSKHSSMDMNIKAKGDTHIDLHHTTEDTGIAIGECLKKASKKFVGIKRYAHSMIPMDETLTRVAIDVSNRPYLIWKVKLKVEKLGEMDTELFKEWFQAFSQAAGITLHIENIYGDNSHHIIESCFKGLARSLRAALEMDPRNKTTIPSTKGSL

SEQ ID NO: 150305 - protein, 196 aa, Unknown
  Bacterial polypetide isolated from the Sargasso Sea
MKRKAKISRKTKETSIAVDLNIDGKGKYKIDTGIGFLDHMLEQLSKHSSMDMNIKAKGDTHIDLHHTTEDTGIAIGECLKKASKKFIGIKRYAHAMIPMDETLTRVAIDVSNRPYLIWKVKLKVEKLGEMDTELFKEWFQAFSQAAGITLHVENIYGDNSHHIIESCFKGLARSLRVALEMDPRNKNTIPSTKGSL

SEQ ID NO: 150306 - protein, 196 aa, Unknown
  Bacterial polypetide isolated from the Sargasso Sea
MKRKAKISRKTKETSISVDLNIDGKGKYKVDTGIGFLNHMLEQLSKHSSMDMNIKAKGDTHIDLHHTTEDTGIAIGECLKKASKKFVGIKRYAHAMIPMDETLTRVAIDVSNRPYLIWKVNLKVEKLGEMDTELFKEWFQAFSQAAGITLHVENIYGDNSHHIIESCFKGLARSLRAALEMDPRNKNTIPSTKGSL

SEQ ID NO: 150307 - protein, 127 aa, Unknown
  Bacterial polypetide isolated from the Sargasso Sea
MSKQNINKNSDQLARLGAVTRQTPETEILVEVNLDGTGIYDIETGIGFLDHMLEQLSRHSLIDLKVRASGDLHIDFHHTTEDSGYAVGEAISQALGERRGIRRYGFALVPMDETLTRVALDASNRPY

SEQ ID NO: 150308 - protein, 196 aa, Unknown
  Bacterial polypetide isolated from the Sargasso Sea
MRRKGKISRKTKETSISVDLNIDGKGKYKIDTGIGFLNHMLEQLSKHSSIDMNIKAKGDTHIDLHHTTEDTGIAIGEALKKALKKSVGIRRYAHAMIPMDETLSRVAIDISNRPYLIWKVNLKVEKLGEMDTELFKEWFQAFSQAAGITLHVENIYGDNSHHIIESCYKGLARSLRTALEIDPRNRKTIPSTKGSL

SEQ ID NO: 150309 - protein, 149 aa, Unknown
  Bacterial polypetide isolated from the Sargasso Sea
MKRKAKISRKTKETNINVDLNIDGKGKYKIETGIGFLNHMLEQLSKHSSMDISLKAKGDTHIDLHHTTEDTGIAIGECLKKASRKFVGIKRYAHALIPMDETLTRVALDVSNRPYLIWKVKLKVEKLGEMDTELFKEWFQAFSQAAGIT

SEQ ID NO: 150310 - protein, 169 aa, Unknown
  Bacterial polypetide isolated from the Sargasso Sea
YKIDTGIGFLDHMLEQLSKHSSIDLKVKAKGDTHIDLHHTTEDTGIAIGECLKKASKKFIGIKRYAHAMIPMDETLTRVALDVSNRPYLIWKVDLKVEKLGEMDTELFKEWFQAFSQAAGVTLHIENLYGDNSHHKVESCFKGLARSLRAALEIDPKNKKVVPSTKGSL

SEQ ID NO: 150311 - protein, 196 aa, Unknown
  Bacterial polypetide isolated from the Sargasso Sea
MKRKAKISRKTKETSISVEVNIDGKGKYKIDTGIGFLNHMLEQLSKHSLIDLSVKAKGDTHIDLHHTTEDVGIAIGECIKKASNKFKGIKRYAHAMIPMDETLSRVAIDVSNRPYLIWKVKLKVEKLGEMDTELFKEWFQAFSQSAGVTLHMENIYGDNSHHIIESCFKGLARTLRSALEIDPRTKNVIPSTKGSL

SEQ ID NO: 150312 - protein, 195 aa, Unknown
  Bacterial polypetide isolated from the Sargasso Sea
MRIAETNRQTKETKILCKVNLDGIGTNNINTGIGFFDHMLEIFSHHSLVDLELSASGDTHVDFHHTVEDSGYAIAQSITKALGEKKGIRRFGFFYTPMDECLSRCVVDFSGRPELQWKVDLGLKKIGEMDTELFHEFFKAFVNESKCNLHIENLYGENNHHIIESCFKSFAKSIRVAIEIDSRIKNIIPSSKGTL

SEQ ID NO: 150313 - protein, 196 aa, Unknown
  Bacterial polypetide isolated from the Sargasso Sea
MKRKAKINRKTKETSISVDLNIDGKGKYKVDTGIGFLNHMLEQLSKHSSMDMNIKAKGDTHIDLHHTTEDTGIAIGECLKKASKKFVGIKRYAHAMIPMDETLTRVAIDVSNRPYLIWKVNLKVEKLGEMDTELFKEWFQAFSQAAGITLHVENIYGDNSHHIIESCFKGLARSLRAALEMDPRNKNTIPSTKGSL

SEQ ID NO: 150314 - protein, 126 aa, Unknown
  Bacterial polypetide isolated from the Sargasso Sea
MKRKAKIARKTKETNISVDLNIDGKGKYKVDTGIGFLDHMLEQLSKHSSMDLAVKAKGDTHIDLHHTTEDTGIAIGECLKKASKKFVGIKRYAHILLPMDETLTRVAIDVSNRPYLIWNVKLKVEK

SEQ ID NO: 150315 - protein, 206 aa, Unknown
  Bacterial polypetide isolated from the Sargasso Sea
IFYISLILGQFMRTASVQRNTKETKIACKINVDGTGISKITSGIGFFDHMLEIFSHHSLIDIELIVDGDTHVDFHHTVEDTAYALSESINKAIGDKKGINRYGFFYITMDESLSRTVIDFSGRPELVWKVELGLEKIGEMDTELFKEFFKAFTNNSKCNLHIENFYGTNNHHIIESCFKSFARSVRAALTIDERTKSIIPSSKGVL

SEQ ID NO: 150316 - protein, 196 aa, Unknown; identical to SEQ ID NO: 150260
  Bacterial polypetide isolated from the Sargasso Sea

SEQ ID NO: 150317 - protein, 194 aa, Unknown
  Bacterial polypetide isolated from the Sargasso Sea
VERNTKETQISASVDLDGTGKYDVSTGIGFLDHMMEQLSRHSLIDLTLRAQGDLHIDFHHTTEDTGYAVGEAVSRALGDRAGIVRYGSALIPMDETLTRVALDCSNRPYLVWNVGFSRSKLGEMDTELFHEWFKAFAQSAGLTLHVDTLYGENNHHIVESCYKGLARALMAAIAIDPRKADAVPSTKGVLGGSL

SEQ ID NO: 150318 - protein, 171 aa, Unknown
  Bacterial polypetide isolated from the Sargasso Sea
MKRKAKISRKTKETSISVDLNIDGKGKYKVDTGIGFLDHMLEQLSKHSSMDMNIKAKGDMHIDLHHTTEDTGIAIGECLKKASKKFLGIKRYAHAMIPMDETLTRVAIDVSNRPYLIWKVKLKVEKLGEMDTELFKEWFQAFSQAAGITLHVENIYGDNSHHIIESCFKGL

SEQ ID NO: 150319 - protein, 196 aa, Unknown
  Bacterial polypetide isolated from the Sargasso Sea
MARKGKVSRKTKETNISVEVNIDGKGQYKIDTGIGFLDHMLEQLSKHSLIDLKVKAKGDTHIDLHHTTEDTGIAIGEALKKAAKKFIGIKRYAHRVIPMDETLTRVAIDVSNRPYLIWKVKLKVEKLGEMDTELFKEWFQAFSQSAGITLHVENIYGDNSHHIIESCYKGLARSLRDALEMDPRNKKSIPSTKGSL

SEQ ID NO: 150320 - protein, 176 aa, Unknown
  Bacterial polypetide isolated from the Sargasso Sea
NIDGKGKYKIDTGIGFLNHMLEQLSKHSSIDMNIKAKGDTHIDLHHTTEDTGIAIGEALKKALKKSIGIRRYAHAMIPMDETLSRVAIDISNRPYLIWKVNLKVEKLGEMDTELFKEWFQAFSQAAGITLHVENIYGDNSHHIIESCYKGLARSLRTALEIDPRNKKTIPSTKGSL

SEQ ID NO: 150321 - protein, 196 aa, Unknown
  Bacterial polypetide isolated from the Sargasso Sea
MSRKAKIIRKTKETNISVEVNLDGKGKYQIKTKIGFLDHMLEQLSKHSLIDIKVVAKGDTHIDFHHTTEDTGIAIGEAIKKAAGNLKGIKRFSSTTIPMDETLTRVSMDISNRPYLIWKVDLKVEKLGEMDTELFKEWFQAFSQAAGITLHVENIYGDNSHHKIESCFKALAKSLREALEIDKRVKNILPSTKGKL

SEQ ID NO: 150322 - protein, 154 aa, Unknown
  Bacterial polypetide isolated from the Sargasso Sea
MARKGKISRKTKETSISVEVNIDGKGKYQIDTGIGFLDHMLEQLSKHSLIDLKVKAKGDTHIDLHHTTEDTGIAIGEALKKAAKKFVGIKRYAHRLIPMDETLTRVAIDVSNRPYLIWKVKLKVEKLGEMDTELFKEWFQAFSQSAGITLHVKI

SEQ ID NO: 150323 - protein, 177 aa, Unknown
  Bacterial polypetide isolated from the Sargasso Sea
MKRKGKISRKTKETSISVDLNIDGKGKYKIDTGIGFLNHMLEQLSKHSSIDMNIKAKGDTHIDFHHTTEDTGIAIGEALKKALKKSVGIRRYAHAMIPMDETLTRVAIDVSNRPYLIWKVTLKVEKLGEMDTELFKEWFQAFSQAAGITLHVENIYGDNSHHIIESCFKRIARSLRT

SEQ ID NO: 150324 - protein, 136 aa, Unknown
  Bacterial polypetide isolated from the Sargasso Sea
MKRKAKIARKTKETNISVDLNIDGKGKYKVDTGIGFLDHMLEQLSKHSSMDLTVKAKGDTHIDLHHTTEDTGIAIGECLKKASKKFVGIKRYAHILLPMDETLTRVAIDVSNRPYLIWNVKLKVEKLGEMDTELFK

SEQ ID NO: 150325 - protein, 196 aa, Unknown; identical to SEQ ID NO: 150270
  Bacterial polypetide isolated from the Sargasso Sea

SEQ ID NO: 150326 - protein, 117 aa, Unknown
  Bacterial polypetide isolated from the Sargasso Sea
WGERKGISRFGHFFAPLDEALVQVTLDCSGRPHLSYDLQLKAPRIGNYDTELVREFFIAFVNNSGITLHINQMRGSNSHHIVEACFKAFSRAMRMATEIDPRRSDSIPSSKGMLEKQ

SEQ ID NO: 150327 - protein, 196 aa, Unknown
  Bacterial polypetide isolated from the Sargasso Sea
MARKGKISRKTKETSISVEVNIDGKGKYQIDTGIGFLDHMLEQLSKHSLIDLKVKAKGDTHIDLHHTTEDTGIAIGEALKKAAKKFVGIKRYAHRLIPMDETLTRVAIDVSNRPYLIWKVKLKVEKLGEMDTELFKEWFQAFSQSAGITLHVENIYGDNSHHIIESCYKGLARSLRDALEMDSRSKKSIPSTKGSL

SEQ ID NO: 150328 - protein, 189 aa, Unknown
  Bacterial polypetide isolated from the Sargasso Sea
ERNTKETKIFCKINIDGTGQSKISSGIGFFDHMLEIFSHHSLIDLELKVDGDTHVDFHHTVEDTAYALSEAINKSIGDKKGINRYGFFYITMDESLSRTVIDFSGRPELIWKVELGLEKIGEMDTELFKEFFKAFTNNVKCNLHIENFYGTNNHHIIESCFKSFARSIRTALTIDERTKNIIPSSKGIL

SEQ ID NO: 150329 - protein, 156 aa, Unknown
  Bacterial polypetide isolated from the Sargasso Sea
MKRKAKISRKTKETNISVDLNIDGKGKYKVDTGIGFLDHMLEQLSKHSSIDMNIKAKGDTHIDLHHTTEDTGIAIGECLKKASKKFVGIKRYAHAMIPMDETLTRVAIDVSNRPYLIWKVKLKVEKLGEMDTELFKEWFQAFSQAAGITLHVENIY

SEQ ID NO: 150330 - protein, 197 aa, Unknown
  Bacterial polypetide isolated from the Sargasso Sea
MREGRITRETKETSIDVRINLDGTGVYDISTGIGFLDHMLEQLARHSLMDLYVRAEGDLHIDFHHTTEDTGIAIGQAIDKGLGNRAGITRFGSAYIPMDETLSRIALDISARPYLIWRVEFSKPKLGEMDTELFKEWFQAFAQAAGITLHVENLYGENNHHIVESCFKGLARSLRTAIKIDARVSDLVPSTKGSLGG

SEQ ID NO: 150331 - protein, 170 aa, Unknown
  Bacterial polypetide isolated from the Sargasso Sea
KYKIKTGIGFLDHMLEQLSKHSLIDLDVKAKGDTHIDLHHTTEDTGIAIGEAIKKAAGNRKGITRYASTMIPMDETLSRVSIDVSNRPYLIWKVNLPVEKLGEMDTELFKEWFQAFSQSAGITLHIENIYGENSHHKIESCYKGLARSLKDALAIDKRIKNSIPSTKGSI

SEQ ID NO: 150332 - protein, 192 aa, Unknown
  Bacterial polypetide isolated from the Sargasso Sea
AKINRKTKETNISVEANIDGKGSYKIDTRIGFLNHMLEQLSKHSLIDLKVLAKGDTHIDLHHTTEDTGIAIGECIKKAIQSSKGIKRFAHALIPMDETLTRVAVDVSNRPYLIWKVKLKVEKLGEMDTELFKEWFQAFSQAAGVTLHVENIYGDNSHHIIESCYKGLARSLREALEVDKRIKNKIPSTKGTL

SEQ ID NO: 150333 - protein, 154 aa, Unknown
  Bacterial polypetide isolated from the Sargasso Sea
MKRKAKISRKTKETNISVDLNIDGKGKYKVDTGIGFLDHMLEQLSKHSSMDMNIKAKGDTHIDLHHTTEDTGIAIGECLKKASKKFVGIKRYAHAMIPMDETLTRVAIDVSNRPYLIWKVKLKVEKLGEMDTELFKEWFQAFSQAAGITLHVEN

SEQ ID NO: 150334 - protein, 179 aa, Unknown
  Bacterial polypetide isolated from the Sargasso Sea
MKRKAKISRKTKETSISVDLNIDGNGKYKVDTGIGFLNHMLEQLSKHSSMDMNIKAKGDTHIDLHHTTEDTGIAVGECLKKASKKFIGIKRYAHAMIPMDETLTRVAIDVSNRPYLIWKVNLKVEKLGEMDTELFKEWFQAFSQAAGITLHVENIYGDNSHHIIESCFKGLARSLRAAL

SEQ ID NO: 150335 - protein, 190 aa, Unknown
  Bacterial polypetide isolated from the Sargasso Sea
VSRKTKETSINVEVNIEGKGKYQIDTGIGFLDHMLEQLSKHSLIDLKVKAKGDTHIDLHHTTEDTGIAIGEALKKAAKKFVGIKRYAHTVIPMDETLTRVAIDVSNRPYLIWKVKLKVEKLGEMDTELFKEWFQAFSQSAGITMHVENIYGDNSHHIIESCYKALARSLRAALEMDPRNKKSIPSTKGSL

SEQ ID NO: 150336 - protein, 172 aa, Unknown
  Bacterial polypetide isolated from the Sargasso Sea
MARKGKVSRKTKETSINVEVNIDGKGKYQIDTGIGFLDHMLEQLSKHSLIDLKVKAKGDTHIDLHHTTEDTGIAIGEALKKAAKKFVGIKRYSHTVIPMDETLTRVAIDVSNRPYLIWKVKLKVEKLGEMDTELFKEWFQAFSQSAGITLHVENIYGDNSHHIIESCYKALA

SEQ ID NO: 150337 - protein, 124 aa, Unknown
  Bacterial polypetide isolated from the Sargasso Sea
MKRKGKINRKTKETSISVDLNIDGKGNYKIDTGIGFLDHMLEQLSKHSSIDMNIKAKGDTHIDLHHTTEDTGIAIGEALKKASKKFMGIKRYAHAIIPMDETLTRVAIDISNRPYLIWKVKLKV

SEQ ID NO: 150338 - protein, 128 aa, Unknown
  Bacterial polypetide isolated from the Sargasso Sea
MKRKAKISRKTKETNISVDLNIDGKGKYKVDTGIGFLDHMLEQLSKHSSMDMNIKAKGDTHIDLHHTTEDTGIAIGECLKKASKKFVGIKRYAHAMIPMDETLTRVAIDVSNRPYLIWKVKLKVEKLG

SEQ ID NO: 150339 - protein, 196 aa, Unknown
  Bacterial polypetide isolated from the Sargasso Sea
MKRKAKISRKTKETSISVDLNIDGKGKYKVDTGIGFLNHMLEQLSKHSSIDMNIKAKGDTHIDLHHTTEDTGIVIGECLKKASKKFIGIKRYAHAMIPMDETLTRVAIDVSNRPYLIWKVKLKVEKLGEMDTELFKEWFQAFSQAAGITLHVENIYGDNSHHIIESCFKGLARSLRVALEMDPRNKNTIPSTKGSL

SEQ ID NO: 150340 - protein, 196 aa, Unknown
  Bacterial polypetide isolated from the Sargasso Sea
MKRKAKISRKTKETNINVDLNIDGKGKYKIETGIGFLNHMLEQLSKHSSIDINLKAKGDTHIDLHHTTEDTGIAIGECLKKASKKFVGIKRYAHAMIPMDETLTRVALDVSNRPYLIWKVKLKVEKLGEMDTELFKEWFQAFSQAAGITLHVENIYGDNSHHIIESCFKGLARSLRTALEMDPRNKKYIPSTKGSL

SEQ ID NO: 150341 - protein, 195 aa, Unknown
  Bacterial polypetide isolated from the Sargasso Sea
MRSASTERNTKETKIACKINIDGTGVSKINTGIGFFDHMLEIFSHHSLMDVELSVDGDTHVDFHHTVEDTAYALSDAINKAIGDKKGINRYGFFYITMDESLSRTVIDFSGRPELVWKVELGLEKIGEMDTELFKEFFKAFTNNAKCNLHIENFYGTNNHHIIESCFKSFARSVRIALTIDERIKNIIPSSKGVL

SEQ ID NO: 150342 - protein, 163 aa, Unknown
  Bacterial polypetide isolated from the Sargasso Sea
MRKNSTERNTKETKISCSVDLDGIGDYKISTGIGFFDHMLEIFSHHSLIDLVVNVRGDTHVDLHHTVEDTSYALASSITSALGDKKGINRYGFFYIPMDECLSRCVIDFSGRPELVWNVSLGIKKLGEMDTELFHEFFKSFANEAKCNLHIENLYGKKHHHIV

SEQ ID NO: 150343 - protein, 193 aa, Unknown
  Bacterial polypetide isolated from the Sargasso Sea
MKRKANITRKTKETSIKVDLNIDGKGKYKIDTGIGFLNHMLEQLSKHSSIDLNVKAKGDTHIDLHHTTEDTGIAIGECIKKASKNFVGIKRYAHALLPMDETLTRVAIDMSNRPYLIWNVKLKVEKLGEMDTELFKEWFQAFSQAAGITLHVENIYGDNSHHIIESCYKGLARSLRTALELDPKNKNTVPSTK

SEQ ID NO: 150344 - protein, 77 aa, Unknown
  Bacterial polypetide isolated from the Sargasso Sea
VPFTRSIVGGFDVDLFREFFQGFVNHAQVTLHVDNLKGDNSHHQIETVFKAFGRALRMALTPDSRMSGMIPSTKGSL

SEQ ID NO: 150345 - protein, 117 aa, Unknown
  Bacterial polypetide isolated from the Sargasso Sea
MKRKAKIIRKTKETSINVDLNIDGKGKYKVDTGIGFLNHMLEQLSKHSSIDMNIKAKGDTHIDLHHTTEDTGIAVGECLKKASKKFVGIKRYAHAMIPMDETLTRVAIDVSNRPYLI

SEQ ID NO: 150346 - protein, 163 aa, Unknown
  Bacterial polypetide isolated from the Sargasso Sea
MKRKAKISRKTKETNISVDLNIDGKGKYKVDTGIGFLDHMLEQLSKHSSMDMNIKAKGDTHIDLHHTTEDTGIAIGECLKKASKKFVGIKRYAHAMIPMDETLTRVAIDVSNRPYLIWKVKLKVEKLGEMDTELFKEWFQAFSQAAGITLHVENIYGDNSHHI

SEQ ID NO: 150347 - protein, 164 aa, Unknown
  Bacterial polypetide isolated from the Sargasso Sea
GIGFLDHMLEQLSKHSSMDMNIKAKGDTHIDLHHTTEDTGIAIGECLKKASKKFIGIKRYAHAMIPMDETLTRVAIDVSNRPYLIWKVKLKVEKLGEMDTELFKEWFQAFSQAAGITLHIENIYGDNSHHIIESCFKGLARSLRAALEMDPRNKTTIPSTKGSL

SEQ ID NO: 150348 - protein, 167 aa, Unknown
  Bacterial polypetide isolated from the Sargasso Sea
MKRKAKINRKTKETNISVAVNLDGKGKYKIKTGIGFLDHMLEQLAKHSLIDLEVKAKGDTHIDLHHTTEDTGIAIGEAIKKAAGNRKGITRYASTMIPMDETLSRVSIDVSNRPYLIWKVNLPVEKLGEMDTELFKEWFQAFSQSAGVTLHIENIYGENSHHKIESC

SEQ ID NO: 150349 - protein, 196 aa, Unknown
  Bacterial polypetide isolated from the Sargasso Sea
MARKAKINRKTKETSIAVEANLDGKGSYKIDTKIGFLNHMLEQLSKHSLIDLKIIAKGDTHIDLHHTTEDTGIAIGECIKKALGASKGIKRYAHALIPMDETLTRVTIDVSNRPYLVWKVKLKVEKLGEMDTELFKEWFQAFSQSAGITLHVENIYGDNSHHIIESCFKGLARSLRGAIEVDKRIKNKVPSTKGVL

SEQ ID NO: 150350 - protein, 196 aa, Unknown
  Bacterial polypetide isolated from the Sargasso Sea
MNRKAKITRKTKETSISVAVNLDGKGKYKIKTGIGFLDHMLEQLSKHSLIDLEVKAKGDTHIDLHHTTEDTGIAIGEAIKKAAGNRKGITRYASTMIPMDETLSRVSIDVSNRPYLIWKVNLPVEKLGEMDTELFKEWFQAFSQSAGVTLHIENIYGENSHHKIESCYKGLARSLKDALAIDKRIKNSIPSTKGSI

SEQ ID NO: 150351 - protein, 196 aa, Unknown
  Bacterial polypetide isolated from the Sargasso Sea
MKRKAKISRKTKETNISVDLNIDGKGKYKVDTGIGFLDHMLEQLSKHSSMDMNIKAKGDTHIDLHHTTEDTGIAIGECLKKASKKFIGIKRYSHAMIPMDETLTRVAIDVSNRPYLIWKVKLKVEKLGEMDTELFKEWFQAFSQAAGITLHVENIYGDNSHHIIESCFKGLARSLRAALEMDPRNKTTIPSTKGSL

SEQ ID NO: 150352 - protein, 126 aa, Unknown
  Bacterial polypetide isolated from the Sargasso Sea
MKRKVKISRKTKETSISVDLNIDGKGKYKIDTGIGFLNHMLEQLSKHSSIDMSIKAKGDTHIDLHHTTEDTGIAIGEALKKALKKSVGIRRYAHAMIPMDETLSRVAIDISNRPYLIWKVKLKVEK

SEQ ID NO: 150353 - protein, 136 aa, Unknown
  Bacterial polypetide isolated from the Sargasso Sea
MSRKAKITRKTKETSISVAVNLDGKGKYKIKTGIGFLDHMLEQLSKHSLIDLEVKAKGDTHIDLHHTTEDTGIAIGEAIKKAAGNRKGITRYASTMIPMDETLSRVSIDVSNRPYLIWKVNLQVEKLGEMDTELFK

SEQ ID NO: 150354 - protein, 164 aa, Unknown
  Bacterial polypetide isolated from the Sargasso Sea
MSSPRQSEIKRKTNETDISVFINLDGKGISEIDTGIPFLDHMLHQISSHGLFDLKIKAIGDTHIDDHHTNEDVGIALGKAFSKALGERKGISRFGHFFAPLDEALVQVTLDCSGRPHLSYDLQLKAPRIGNYDTELVKEFFIALVNTAVLLCILIKYKVVIHIT

SEQ ID NO: 150355 - protein, 196 aa, Unknown
  Bacterial polypetide isolated from the Sargasso Sea
MSRKAKITRKTKETNISAEVNLDGKGKYQIKTRIGFLDHMLEQLSKHSLIDIKLIAKGDTHIDLHHTTEDTGIVIGEAIKKAAGNRKGIRRYSSTLIPMDETLTRVSMDVSNRPYLIWKVDLKVEKLGEMDTELFKEWFQAFSQSAGITLHIENIYGDNSHHKIESCFKALARSLRDALEIDKRIKNILPSTKGKL

SEQ ID NO: 150356 - protein, 197 aa, Unknown
  Bacterial polypetide isolated from the Sargasso Sea
MSQSRTASIERKTQETVVRVKLNLDGEGTSETNTGIGFLDHMLDQLAFHGLMDLAVSCEGDLHIDSHHTTEDIGIALGQALKEALGEKKGIRRYGHALIPMDEALLRAVLDCSGRPDFVFNGEFGRYNLGDLDTQMIPHFFKSLAFNCGLTLHLSILYGSNDHHKCEGLFKAFARAFSDAVTLDPRRLGVSSTKGTL

SEQ ID NO: 150357 - protein, 196 aa, Unknown
  Bacterial polypetide isolated from the Sargasso Sea
MKRKAKISRKTKETSISVDLNIDGKGKYKVDTGIGFLNHMLEQLSKHSSIDLNLKAKGDTHIDLHHTTEDTGIAIGECLKKASKNFIGIKRYAHALLPMDETLTRVAIDVSNRPYLIWNVKLKVEKLGEMDTELFKEWFQAFSQSAGITLHVENIYGDNSHHIIESCFKGLARSLRSALEIDPRNKKTIPSTKGSL

SEQ ID NO: 150358 - protein, 155 aa, Unknown
  Bacterial polypetide isolated from the Sargasso Sea
MKRKASITRKTKETKIDVELNIDGKGQYKIDTGIGFLDHMLEQLSKHSSIDLKVKAKGDTHIDLHHTTEDTGIAIGECLKKASKKFIGIKRYAHAMIPMDETLTRVALDVSNRPYLIWKVDLKVEKLGEMDTELFKEWFQAFSQSAGITLHIENL

SEQ ID NO: 150359 - protein, 196 aa, Unknown
  Bacterial polypetide isolated from the Sargasso Sea
MKRKAKIIRKTKETSISVAVNLDGKGKYKIKTGIGFLDHMLEQLSKHSLIDLEVKAKGDTHIDLHHTTEDTGIAIGEAIKKAAGSRKGIIRYASTMIPMDETLSRVSIDISNRPYLIWKVNLAVEKLGEMDTELFKEWFQAFSQSAGITLHIENIYGDNSHHKVESCYKGLARSLKDALAIDERIKNSIPSTKGSI

SEQ ID NO: 150360 - protein, 196 aa, Unknown
  Bacterial polypetide isolated from the Sargasso Sea
MKRRGKISRKTKETSISVDINIDGKGKYKIDTGIGFLNHMLEQLSKHSSIDMNIKAKGDTHIDLHHTTEDSGIAIGEALKKALKKSVGIRRYAHAMIPMDETLSRVALDISNRPYLIWKVNLKVEKLGEMDTELFKEWFQAFSQAAGITLHIENIYGDNSHHIIESCFKGLARSLRTALEIDPRNKKSIPSTKGSL

SEQ ID NO: 150361 - protein, 186 aa, Unknown
  Bacterial polypetide isolated from the Sargasso Sea
TKETSISVDLNIDGKGKYKVDTGIGFLNHMLEQLSKHSSIDLILKAKGDTHIDLHHTTEDTGIAIGECLKKASKNFIGIKRYAHALLPMDETLTRVAIDVSNRPYLIWNVKLKVEKLGEMDTELFKEWFQAFSQSAGITLHVENIYGDNSHHIIESCFKGLARSLRSALEIDPRNKKTIPSTKGSL

SEQ ID NO: 150362 - protein, 143 aa, Unknown
  Bacterial polypetide isolated from the Sargasso Sea
MARKAKINRKTKETNILVETNLDGKGSYKIDTKIGFLNHMLEQLSKHSLIDLKVSAKGDTHIDLHHTTEDTGIAIGESIKKALGSSKGIKRYAHALIPMDETLTRVTMDVSNRPYLIWKVKLKVEKLGEMDTELFKEWFQAFS

SEQ ID NO: 150363 - protein, 196 aa, Unknown
  Bacterial polypetide isolated from the Sargasso Sea
MSRKGKVSRKTKETSINVEVNIDGKGKYQIDTGIGFLDHMLEQLSKHSLIDLKVNAKGDTHIDLHHTTEDTGIAIGEALKKAAKKFVGIKRYAHALIPMDETLSRVAVDVSNRPYLIWKVKLKVEKLGEMDTELFKEWFQAFSQSAGITLHIENIYGDNSHHIIESCYKGLARSLRAALEMDPRNKKSIPSTKGSL

SEQ ID NO: 150364 - protein, 196 aa, Unknown
  Bacterial polypetide isolated from the Sargasso Sea
MARKGKVSRKTKETSINVEVNIDGKGKYQIDTGIGFLDHMLEQLSKHSLIDLKVKAKGDTHIDLHHTTEDTGIAIGEALKKAAKKFVGIKRYAHSVIPMDETLTRVSIDVSNRPYLIWKVKLKVEKLGEMDTELFKEWFQAFSQSAGITMHVENIYGDNSHHIIESCYKALARSLRAALEMDPRSKKSIPSTKGSL

SEQ ID NO: 150365 - protein, 196 aa, Unknown
  Bacterial polypetide isolated from the Sargasso Sea
MSRKAKILRKTKETNISVEVNLDGKGKYQIKTNIGFLDHMLEQLSKHSLIDMKVIAKGDTHIDLHHTTEDSGIAIGEALKKAAGNLKGIKRFSSTIIPMDETLTRVSIDISNRPYLIWKVDLKVEKLGEMDTELFKEWFQAFSQAAGITLHVENIYGENSHHKIESCFKALAKSLREALEIDKRIKNILPSTKGKL

SEQ ID NO: 150366 - protein, 196 aa, Unknown
  Bacterial polypetide isolated from the Sargasso Sea
MKRKAKISRKTKETNISVSVNLDGKGKYKIKTGVGFLDHMLEQLSKHSLIDLEVNAKGDTHIDLHHTTEDTGIAIGEAIKKAAGNRKGITRYASTMIPMDETLSRVSIDISNRPYLIWKVDLPVEKLGEMDTELFKEWFQAFSQSAGITLHVENIYGDNSHHKIESCYKGLARSLKDALAIDKRIKNSIPSTKGSI

SEQ ID NO: 150367 - protein, 196 aa, Unknown
  Bacterial polypetide isolated from the Sargasso Sea
MKRKAKIARKTKETNISVDLNIDGKGKYKVDTGIGFLDHMLEQLSKHSSMDLTVKAKGDTHIDLHHTTEDTGIAIGECLKKASKKFVGIKRYAHILLPMDETLTRVAIDVSNRPYLIWNVKLKVEKLGEMDTELFKEWFQAFSQAAGITLHVENIYGDNSHHIIESCYKGLARTLRAALELDPRNKSTIPSTKGSL

SEQ ID NO: 150368 - protein, 196 aa, Unknown
  Bacterial polypetide isolated from the Sargasso Sea
MKRKAKITRKTKETSISVVVNLDGKGKYKVKTGIGFLDHMLEQLSKHSLIDLEVKAKGDTHIDLHHTTEDTGIAIGEAIKKAAGNRRGITRYASTMIPMDETLSRVSIDVSNRPYLIWKVDLAVEKLGEMDTELFKEWFQAFSQSAGVTLHVENIYGDNSHHKVESCYKGLARSLKDALAIDKRIKNSIPSTKGSI

SEQ ID NO: 150369 - protein, 196 aa, Unknown
  Bacterial polypetide isolated from the Sargasso Sea
MSRKAKIQRKTKETNISVEVNLDGKGKYQIKTKIGFLDHMLEQLSKHSLIDMKISAKGDTHIDLHHTTEDTGIAIGEAIKKAAGNLKGIKRYSTTHIPMDETLTRVSLDVSNRPYLIWNVDLKVEKLGEMDTELFKEWFQAFSQSAGITLHVENVYGDNSHHKIESCFKALARSLKEALEIDKRIKNSIPSTKGSI

SEQ ID NO: 150370 - protein, 196 aa, Unknown
  Bacterial polypetide isolated from the Sargasso Sea
MSRKAKILRKTKETNIAAEVNLDGKGKYQIDTKIGFLDHMLEQLSKHSIIDIKLIAKGDTHIDLHHTTEDSGIVLGEAIKKAAGNRKGIKRYASALIPMDETLTRVSMDISNRPYLIWKVGLKVEKLGEMDTELFKEWFQAFSQSAGITLHVENIYGDNSHHIIESCFKALAISLRDALEVDKRIKNILPSTKGKL

SEQ ID NO: 150371 - protein, 196 aa, Unknown
  Bacterial polypetide isolated from the Sargasso Sea
MKRKAKLSRKTKETNINVDLNIDGKGKYKIETGIGFLNHMLEQLSKHSSMDINLKAKGDTHIDLHHTTEDTGIAIGECLKKASKKFVGIKRYAHAMIPMDETLTRVAIDVSNRPYLIWKVKLKVEKLGEMDTELFKEWFQAFSQAAGITLHVENIYGDNSHHIIESCFKGLARSLRAALEMDPRNKNTIPSTKGSL

SEQ ID NO: 150372 - protein, 195 aa, Unknown
  Bacterial polypetide isolated from the Sargasso Sea
MDRIAKVKRETNEVKVDVELNIDGTGDYSIDTGIPFFDHMLEQLSKHGYFDLKIKAVGDTEIDFHHTVEDVGITLGQAFDDALGDKKSIQRYGFSSIPFDETLSSSVIDLCNRPFFVFNVELPSSKVGEFDVELTKEFFQSFANNIKANLHIELKYGGNNHHIIESIFKSVAKSLDSATLIDPRSSSIPSTKGNL

SEQ ID NO: 150373 - protein, 123 aa, Unknown
  Bacterial polypetide isolated from the Sargasso Sea
MTESNRTATIERDTSETQIQLKLDLDGTGVSKIETGIPFFEHMLTQISKHGMLDLEIVAQGDIEVDAHHTVEDVGIVFGQALAKAAGDKSGIFRYGHAYVPLDEALSRVVVDLIGTTRSLLRS

SEQ ID NO: 150374 - protein, 147 aa, Unknown
  Bacterial polypetide isolated from the Sargasso Sea
MSFLRQSEIKRKTNETDISVFINLDGNGISEIDTGIPFLDHMLHQISSHGLFDLKIKAIGDTHIDDHHTNEDVGIALGKAFSKALGERKGISRFGHFFAPLDEALVQVTLDCSGRPHLSYDLQLKAPRIGNYDTELVREFFIAFVNN

SEQ ID NO: 150375 - protein, 131 aa, Unknown
  Bacterial polypetide isolated from the Sargasso Sea
MRTAEYKRDTKETSISVDINIDGTGKYDIKTGIGFLDHMLEQLSKHSLIDMKIKATGDTHIDYHHTTEDTGIAIGECLSKALGNRQGITRYAHSYIPMDETLSRVALDLSNRPYLIWKVKFSAPKITFFSR

SEQ ID NO: 150376 - protein, 201 aa, Unknown
  Bacterial polypetide isolated from the Sargasso Sea
MSSLRQSEIKRKTNETDISVFINLDGNGISEIDTGIPFLDHMLHQISSHGLFDLKIKAIGDTHIDDHHTNEDVGIALGKAFSKALGERKGISRFGHFFAPLDEALVQVTLDCSGRPHLSYDLQLKAPRIGNYDTELVREFFIAFVNNSGITLHINQIRGSNSHHIVEACFKSFSRAMRMATEIDPRRSNSIPSSKGMLEKQ

SEQ ID NO: 150377 - protein, 196 aa, Unknown
  Bacterial polypetide isolated from the Sargasso Sea
MKRKAKISRKTKETSINVDLNIDGKGKYNIETGIGFLNHMLEQLSKHSSMDLTLKAKGDTHIDLHHTTEDTGIAIGECLKKASKKFVGIKRYAHALIPMDETLTRVAIDVSNRPYLIWNVKLKVEKLGEMDTELFKEWFQAFSQAAGITLHVENIYGDNSHHIIESCFKGLARSLRAALEMDPRNKNTIPSTKGSL

SEQ ID NO: 150378 - protein, 196 aa, Unknown
  Bacterial polypetide isolated from the Sargasso Sea
MKRKAKIARKTKETNISVDLNIDGKGKYKVDTGIGFLDHMLEQLSKHSSMDLTVKAKGDTHIDLHHTTEDTGIAIGECLKKASKKFIGIKRYAHILLPMDETLTRVAIDVSNRPYLIWNVKLKVEKLGEMDTELFKEWFQAFSQAAGITLHVENIYGDNSHHIIESCYKGLARTLRAALELDPRNKSTIPSTKGSL

SEQ ID NO: 150379 - protein, 196 aa, Unknown
  Bacterial polypetide isolated from the Sargasso Sea
MKRKAKISRKTKETNISVDLNIDGKGKYKVDTGIGFLDHMLEQLSKHSSMDMNIKAKGDTHIDLHHTTEDTGIAIGECLKKASKKFVGIKRYAHAMIPMDETLTRVAIDVSNRPYLIWKVKLKVEKLGEMDTELFKEWFQAFSQAAGVTLHVENIYGDNSHHIIESCFKGLARSLRAALEMDPRNKTTIPSTKGSL

SEQ ID NO: 150380 - protein, 196 aa, Unknown
  Bacterial polypetide isolated from the Sargasso Sea
MKRKAKISRKTKETSIAVDLNIDGKGKYKIDTGIGFLDHMLEQLSKHSSMDMNIKAKGDTHIDLHHTTEDTGIAIGECLKKASKKFIGIKRYAHAMIPMDETLTRVAIDVSNRPYLIWKVNLKVEKLGEMDTELFKEWFQAFSQAAGITLHVENIYGDNSHHIIESCFKGLARSLRAALEMDPRNKKSIPSTKGSL

SEQ ID NO: 150381 - protein, 199 aa, Unknown
  Bacterial polypetide isolated from the Sargasso Sea
MRKASINRTTKETSISVDINLDGQGQYEISTGIGFLDHMLEQLAKHSLIDMKVIARGDTHIDYHHTTEDTGIAIGECIAKALSDRKGISRYAHFYIPMDETLSRVSLDLSNRPYLIWNVEFSAAKITSSQGDFDTELFKEWFQAFSQASGTTLHVENLYGVNNHHIIESCFKALARSLRKAVSIDDRQSNVVPSTKGQL

SEQ ID NO: 150382 - protein, 196 aa, Unknown; identical to SEQ ID NO: 150270
  Bacterial polypetide isolated from the Sargasso Sea

SEQ ID NO: 150383 - protein, 196 aa, Unknown
  Bacterial polypetide isolated from the Sargasso Sea
MKRKASITRKTKETKIDVELNIDGKGQYKIDTGIGFLDHMLEQLSKHSSIDLKVKAKGDTHIDLHHTTEDTGIAIGECLKKASKKFIGIKRYAHAMIPMDETLTRVALDVSNRPYLIWKVDLKVEKLGEMDTELFKEWFQAFSQSAGITLHIENLYGDNSHHKVESCFKGLARSLRAALEIDPKNKKVIPSTKGSL

SEQ ID NO: 150384 - protein, 187 aa, Unknown
  Bacterial polypetide isolated from the Sargasso Sea
MKRKGKISRKTKETSISVDLNIDGKGKYKIDTGIGFLNHMLEQLSKHSSIDMNIKAKGDTHIDLHHTTEDTGIAIGEALKKASKKFVGIKRYAHAMIPMDETLTRVAIDVSNRPYLIWKVKLKVEKLGEMDTELFKEWFQAFSQAAGITLHVENIYGDNSHHIIESCFKGLARSLRTAWKWIQEIKN

SEQ ID NO: 150385 - protein, 156 aa, Unknown
  Bacterial polypetide isolated from the Sargasso Sea
MLDQLAFHGLVDLEVSCEGDLRIDSHHTTEDIGIALGQALKEALGEKKGIRRYGHAYIPMDEALLRVVLDCSGRPDFVFNGEFGRYNLGDLDTQMIPHFFKSLAFNCGLTLHLSILYGSNDHHKCEGLFKAFARALSDAVTLDPRRMGVSSTKGTL

SEQ ID NO: 150386 - protein, 199 aa, Unknown
  Bacterial polypetide isolated from the Sargasso Sea
MRTAEYKRDTKETSISVDINIDGTGKYDIKTGIGFLDHMLEQLSKHSLIDMKIKATGDTHIDYHHTTEDTGIAIGECLSKALGNRQGITRYAHSYIPMDETLSRVALDLSNRPYLIWKVKFSAPKITSSQGDFDTELFKEWFQAFAQASGTTLHVENIYGENNHHIIESCFKALARSLRNAVAINEREGMNIPSTKGQL

SEQ ID NO: 150387 - protein, 196 aa, Unknown
  Bacterial polypetide isolated from the Sargasso Sea
MPRKAKINRKTKETIITVESNIDGTGSYKIDTKIGFLNHMLEQLSKHSLIDLKISAKGDTHIDLHHTTEDTGIAIGECVKKAVGSAKGIRRYAHALIPMDETLTRVTIDVSNRPYLIWKVKLKVEKLGEMDTELFKEWFQAFSQAAGITLHVENIYGDNSHHIIESCFKGLARALREALEVDKRIKNKIPSTKGKL

SEQ ID NO: 150388 - protein, 119 aa, Unknown
  Bacterial polypetide isolated from the Sargasso Sea
MKRKAKISRKTKETNISVAVNLDGKGKYKIKTGIGFLDHMLEQLAKHSLIDLEVKAKGDTHIDLHHTTEDTGIAIGEAIKKAAGNRKGITRYASTMIPMDETLSRVSIDVSNRPYLIWK

SEQ ID NO: 150389 - protein, 196 aa, Unknown
  Bacterial polypetide isolated from the Sargasso Sea
MKRKGKISRKTKETSISVDLNIDGKGKYKIDTGIGFLNHMLEQLSKHSSIDMSIKAKGDTHIDLHHTTEDTGIAIGEALKKALKKSVGIRRYAHAMIPMDETLSRVAIDISNRPYLIWKVNLKVEKLGEMDTELFKEWFQAFSQAAGITLHVENIYGDNSHHIIESCYKGLARSLRTALEIDPRNKKTIPSTKGSL

SEQ ID NO: 150390 - protein, 195 aa, Unknown
  Bacterial polypetide isolated from the Sargasso Sea
MRTSSVERNTKETKIFCKTNIDGTGESKISTGIGFFDHMLEIFSHHSLVDVELSVDGDTHVDFHHTVEDSAYALSEAINRSIGNKRGISRYGFFYITMDESLSRTVIDFSGRPELVWKVELGLEKIGKMDTELFKEFFKAFANNAKCNLHIENFYGTNNHHIIESCFKSFARSVRSALTIDERTKNIIPSSKGIL

SEQ ID NO: 150391 - protein, 88 aa, Unknown
  Bacterial polypetide isolated from the Sargasso Sea
DCSGRPGLEYNANYPRARIGEFDVDLIFEFFQGFVNHAMMTLHIDNIRGRNSHHIAETIFKAFGRSLRVAVEIDPVMKDVLPSTKGSL

SEQ ID NO: 150392 - protein, 116 aa, Unknown
  Bacterial polypetide isolated from the Sargasso Sea
MRSIDLERNTKETQIKLSLNLDGSGSADLSVELPFFAHMLDQLVRHGDFDLQLNAIGDLEIDAHHTVEDIGIILGEAFNSALGDKKGIKRFGSAYAPLDESLSRVVVDFSGRPGLF

SEQ ID NO: 150393 - protein, 161 aa, Unknown
  Bacterial polypetide isolated from the Sargasso Sea
FLDHMLEQLSKHSSIDINLKAKGDTHIDLHHTTEDTGIAVGECLKKASNKFIGIKRYAHAMIPMDETLTRVAVDVSNRPYLIWKVDLKVEKLGEMDTELFKEWFQAFSQAAGITLHIENLYGENSHHKIESCFKGLARSLRSALEIDPRNKKVIPSTKGSL

SEQ ID NO: 150394 - protein, 196 aa, Unknown
  Bacterial polypetide isolated from the Sargasso Sea
MKRKAKISRKTKETSISVDLNIDGKGKYKIDTGIGFLNHMLEQLSKHSSMDLNVKAKGDTHIDLHHTTEDTGIAIGECLKKASKKFIGIKRYAHILLPMDETLTRVAIDVSNRPYLIWNVKLKVEKLGEMDTELFKEWFQAFSQAAGITLHVENIYGDNSHHIIESCYKGLARTLRAALEMDPKNKNTIPSTKGSL

SEQ ID NO: 150395 - protein, 199 aa, Unknown
  Bacterial polypetide isolated from the Sargasso Sea
MRTANYKRETKETSINVEINIDGTGSYNVKTGIGFLDHMLEQFSKHSLIDMNIKATGDTHIDYHHTTEDTGIAIGECLSKALGNRQGINRYAHSYIPMDETLSRVALDLSNRPYLIWNVKFSAPKITSSQGDFDTELFKEWFQAFAQASGTTLHVENIYGENNHHIIESCFKALARSLRLAVQVNEREGNIVPSTKGQL

SEQ ID NO: 150396 - protein, 196 aa, Unknown
  Bacterial polypetide isolated from the Sargasso Sea
MKRKAKISRKTKETNISVDLNIDGKGKYKVDTGIGFLDHMLEQLSKHSSMDMNIKAKGDTHIDLHHTTEDTGIAIGECLKKASKKFVGIKRYANAMIPMDETLTRVAIDVSNRPYLIWKVKLKVEKLGEMDTELFKEWFQAFSQAAGITLHIENIYGDNSHHIIESCFKGLARSLRAALEMDPRNKTTIPSTKGSL

SEQ ID NO: 150397 - protein, 196 aa, Unknown
  Bacterial polypetide isolated from the Sargasso Sea
MTRKGKITRKTKETSINVEVNIDGKGKYQIDTGIGFLDHMLEQLSKHSLIDLKVKAKGDTHIDLHHTTEDTGIAIGEALKKAAKKFVGIKRYAHRVIPMDETLTRVAIDVSNRPYLIWKVKLKVEKLGEMDTELFKEWFQAFSQSAGITMHVENIYGDNSHHIIESCYKALARSLREALEMDPRNKKSIPSTKGSL

SEQ ID NO: 150398 - protein, 196 aa, Unknown
  Bacterial polypetide isolated from the Sargasso Sea
MKRKGKISRKTKETSISVDLNIDGKGKYKIDTGIGFLNHMLEQLSKHSSIDMNIKAKGDTHIDLHHTTEDTGIAIGEALKKASKKFIGIRRYAHAMIPMDETLTRVAIDVSNRPYLIWKVKLKVEKLGEMDTELFKEWFQAFSQAAGITLHVENIYGDNSHHIIESCFKGLARSLRTALEMDPRNKKTIPSTKGSL

SEQ ID NO: 150399 - protein, 196 aa, Unknown; identical to SEQ ID NO: 150367
  Bacterial polypetide isolated from the Sargasso Sea

SEQ ID NO: 150400 - protein, 130 aa, Unknown
  Bacterial polypetide isolated from the Sargasso Sea
MKRKAKITRKTKETSISVAVDLDGKGKYKIKTGIGFLDHMLEQLSKHSLIDLKVEAKGDTHIDLHHTTEDTGIAIGEAIKKAAGNRKGITRYASSMIPMDETLSRVSIDVSNRPYLIWKVNLPVEKLGEM

SEQ ID NO: 150401 - protein, 195 aa, Unknown
  Bacterial polypetide isolated from the Sargasso Sea
MRTSSVERNTKETRIYCKTNVDGTGESKISTGIGFFDHMLEIFSHHSLIDVELSVDGDTHVDFHHTVEDSAYALSEAINKSIGNKTGISRYGFFYITMDESLSRTVIDFSGRPELVWKVELGLEKIGEMDTELFKEFFKAFANNAKCNLHIENFYGTNNHHIIESCFKSFARSVRSALTIDKRTKNIIPSSKGIL

SEQ ID NO: 150402 - protein, 196 aa, Unknown; identical to SEQ ID NO: 150367
  Bacterial polypetide isolated from the Sargasso Sea

SEQ ID NO: 150403 - protein, 196 aa, Unknown
  Bacterial polypetide isolated from the Sargasso Sea
MKRKANISRKTKETSISVDLNIDGKGQYKIDTGIGFLNHMLEQLSKHSSIDMKIKAKGDTHIDLHHTTEDTGIAIGECLKKASKKFIGIKRYAHAMIPMDETLTRVAIDVSNRPYLIWKVKLKVEKLGEMDTELFKEWFQAFSQAAGITLHVENIYGDNSHHIIESCFKGLARSLRAALEIDPKNKKTIPSTKGSL

SEQ ID NO: 150404 - protein, 196 aa, Unknown
  Bacterial polypetide isolated from the Sargasso Sea
MKRKGKISRKTKETSISVDLNIDGKGKYKIDTGIGFLNHMLEQLSKHSSIDMNIKAKGDTHIDLHHTTEDTGIAIGEALKKALKKSIGIRRYAHAMIPMDETLSRVAIDISNRPYLIWKVNLKVEKLGEMDTELFKEWFQAFAQAAGITLHVENIYGDNSHHIIESCFKGLARSLRTALEIDPRNKKTIPSTKGSL

SEQ ID NO: 150405 - protein, 145 aa, Unknown
  Bacterial polypetide isolated from the Sargasso Sea
ATGDTYIDYHHTTEDTGIAIGECLSKALGNRQGITRYAHSYIPMDETLSRVALDLSNRPYLIWKVQFSTPKITSSQGDFDTELFKEWFQAFAQASGTTLHVENIYGENNHHIIESCFKALARSLRNAVAINEREGMNIPSTKGQL

SEQ ID NO: 150406 - protein, 203 aa, Unknown
  Bacterial polypetide isolated from the Sargasso Sea
MSGKRKAKVTRTTTETKIWAEVNLDGSGNYKITTGIGFLDHMLEQLSKHSLIDIKLEAEGDLHIDAHHTTEDSGYVIGEAIGKALGSRVGINRFAHAEIPMDESLSSVTLDVSGRPFLEWKVVMPNSRLGEMDTELFKEWFRAFAQAAGITIHVRNAYGENSHHIIESCFKALGRSLREAVEIDKRNDSAIPSTKGSIGGREG

SEQ ID NO: 150407 - protein, 126 aa, Unknown
  Bacterial polypetide isolated from the Sargasso Sea
MKRKAKISRKTKETSIAVDLNIDGKGKYKIDTGIGFLDHMLEQLSKHSSMDMNIRAKGDTHIDLHHTTEDTGIAIGECLKKASKKFIGIKRYAHAMIPMDETLTRVAIDVSNRPYLIWKVKLKVGK

SEQ ID NO: 150408 - protein, 196 aa, Unknown
  Bacterial polypetide isolated from the Sargasso Sea
MKRKGKISRKTKETSISVDLNIDGKGKYKIDTGIGFLNHMLEQLSKHSSIDMNIKAKGDTHIDLHHTTEDTGIAIGEALKKALKKSVGIRRYAHAMIPMDETLSRVAIDISNRPYLIWKVKLKVEKLGEMDTELFKEWFQAFSQAAGITLHVENIYGDNSHHIIESCFKGLARSLRTALEMDPRNKKSIPSTKGSL

SEQ ID NO: 150409 - protein, 196 aa, Unknown
  Bacterial polypetide isolated from the Sargasso Sea
MKRKAKISRKTKETSISVDLNIDGKGKYKVDTGIGFLNHMLEQLSKHSSMDMNIKAKGDTHIDLHHTTEDTGIAIGECLKKASKKFIGIKRYAHAMIPMDETLTRVAIDVSNRPYLIWKVNLKVEKLGEMDTELFKEWFQAFSQAAGITLHVENIYGDNSHHIIESCFKGLARSLRAALEMDPRNKNTIPSTKGSL

SEQ ID NO: 150410 - protein, 183 aa, Unknown
  Bacterial polypetide isolated from the Sargasso Sea
MKRKAKISRKTKETSISVDLNIDGKGTYKVDTGIGFLNHMLEQLSKHSSIDLTLKAKGDTHIDLHHTTEDTGIAIGECLKKASKNFVGIKRYAHALLPMDETLTRVAIDVSNRPYLIWNVKLKVEKLGEMDTELFKEWFQAFSQSAGITLHVENIYGDNSHHIIESCFKGLARSLRSALEIDP

SEQ ID NO: 150411 - protein, 197 aa, Unknown
  Bacterial polypetide isolated from the Sargasso Sea
MPKSRTAIIERKTRETLVKVKLNLDGEGTSETNTGIGFLDHMLDQLAFHGLMDLAVSCEGDLHIDSHHTTEDIGIALGQALKESLGEKKGIRRYGHAYIPMDEALLRAVLDCSGRPDFVFNGEFGRYNLGDLDTQMIPHFFKSLAFNCGLTLHLSILYGSNDHHKCEGLFKAFARAFSDAVTLDPRRMGVSSTKGTL

SEQ ID NO: 150412 - protein, 196 aa, Unknown
  Bacterial polypetide isolated from the Sargasso Sea
MKRKASITRKTKETKIDVELNIDGKGQYKIDTGIGFLDHMLEQLSKHSSIDLKVKAKGDTHIDLHHTTEDTGIAIGECLKKASKKFIGIKRYAHAMIPMDETLTRVALDVSNRPYLIWKVDLKVEKLGEMDTELFKEWFQAFSQSAGITLHIENLYGDNSHHKVESCFKGLARSLRAALEIDPKNKKVVPSTKGSL

SEQ ID NO: 150413 - protein, 195 aa, Unknown
  Bacterial polypetide isolated from the Sargasso Sea
MRKQSLKRSTKETIINCSVNIDGTGKNSISTKIGFFDHMLEIFSNHSLIDLKLNAKGDVGVDLHHTVEDCGLVLGESINKALKDKKGIRRYGFFYVPMDECLTRSVIDFSGRSELVWSVKLGLKKLGEMDTELFEEFFKSFAKASNSNLHITNIYGKNNHHIIESCFKAFARSVRMAIEIDKKIKNKIPSSKGIL

SEQ ID NO: 150414 - protein, 152 aa, Unknown
  Bacterial polypetide isolated from the Sargasso Sea
MKRKGKISRKTKETSISVDLNIDGKGKYKIDTGIGFLNHMLEQLSKHSSIDMNIKAKGDTHIDLHHTTEDTGIAIGEALKKALKKSVGIRRYAHAMIPMDETLSRVAIDISNRPYLIWKVNLKVEKLGEMDTELFKEWFQAFSHAAGITLTC

SEQ ID NO: 150415 - protein, 182 aa, Unknown
  Bacterial polypetide isolated from the Sargasso Sea
SISVDLNIDGKGKYKINTGIGFLDHMLEQLSKHSSMDMKIKAKGDTHIDLHHTTEDTGIAIGECLKKASKKFLGIKRYAHAMIPMDETLTRVAVDVSNRPYLIWKVKLKVEKLGEMDTELFKEWFQAFSQAAGITLHVENIYGDNSHHIIESCFKGLARSLRAALEMDSRNKNTIPSTKGSL

SEQ ID NO: 150416 - protein, 196 aa, Unknown
  Bacterial polypetide isolated from the Sargasso Sea
MSRKAKIQRKTKETNISVEVNLDGKGKYQIKTKIGFLDHMLEQLSKHSLIDMKINAKGDTHIDLHHTTEDTGIAIGEAIRKAAGNLKGVKRYATTYIPMDETLTRISLDISNRPYLIWNVELKVEKLGEMDTELFKEWFQAFSQSAGVTLHVENIYGDNSHHKIESCYKGLARSLKDALAIDKRIKNSIPSTKGSI

SEQ ID NO: 150417 - protein, 196 aa, Unknown; identical to SEQ ID NO: 150260
  Bacterial polypetide isolated from the Sargasso Sea

SEQ ID NO: 150418 - protein, 196 aa, Unknown
  Bacterial polypetide isolated from the Sargasso Sea
MKRKAKIVRKTKETNINVDLNIDGKGKYKIETGIGFLNHMLEQLSKHSSIDINLKAKGDTHIDLHHTTEDTGIAIGECLKKASKKFVGIKRYAHAMIPMDETLTRVAIDVSNRPYLIWKVKLKVEKLGEMDTELFKEWFQAFSQAAGVTLHVENIYGDNSHHIIESCFKGLARSLRAALEMDPRNKNTIPSTKGSL

SEQ ID NO: 150419 - protein, 196 aa, Unknown; identical to SEQ ID NO: 150270
  Bacterial polypetide isolated from the Sargasso Sea

SEQ ID NO: 150420 - protein, 124 aa, Unknown
  Bacterial polypetide isolated from the Sargasso Sea
MSRKAKILRKTKETNIAADVNLDGKGKYQIKTKIGFLDHMLEQLSKHSLIDIKLIAKGDTHIDLHHTTEDSGIVLGEAIKKAAGNRKGIRRYASAVIPMDETLTRVSIDISNRPYLIWKVDLKV

SEQ ID NO: 150421 - protein, 196 aa, Unknown
  Bacterial polypetide isolated from the Sargasso Sea
MARKGKVSRKTKETSINVELNIDGKGKYQIDTGIGFLDHMLEQLSKHSLIDLKVKAKGDTHIDLHHTTEDTGIAIGEALKKAAKKFVGIKRYAHRVIPMDETLTRVAIDVSNRPYLIWKVKLKVEKLGEMDTELFKEWFQAFSQAAGITMHVENIYGDNSHHIIESCYKALARSLREALEMDPRSKKSIPSTKGSL

SEQ ID NO: 150422 - protein, 196 aa, Unknown; identical to SEQ ID NO: 150276
  Bacterial polypetide isolated from the Sargasso Sea

SEQ ID NO: 150423 - protein, 196 aa, Unknown
  Bacterial polypetide isolated from the Sargasso Sea
MKRKAKISRKTKETNINVDLNIDGKGKYKIETGIGFLNHMLEQLSKHSSMDINLKAKGDTHIDLHHTTEDTGIAIGECLKKASKKFVGIKRYAHALIPMDETLTRVALDVSNRPYLIWKVKLKVEKLGEMDTELFKEWFQAFSQAAGITLHVENIYGDNSHHIIESCFKGLARSLRAALEMDPRNKNTIPSTKGSL

SEQ ID NO: 150424 - protein, 196 aa, Unknown
  Bacterial polypetide isolated from the Sargasso Sea
MSRKAKIIRKTKETNISVAVNIDGKGKYKIKTGIGFLDHMLEQLSKHSLIDLEVKAQGDTHIDLHHTTEDTGIAIGEAIKKAAGNRKGITRYASTMIPMDETLSRVSIDISNRPYLIWKVSLPVEKLGEMDTELFKEWFQAFSQSAGITLHIENIYGENSHHKIESCYKGLARSLKDALAIDKRIKNSVPSTKGSI

SEQ ID NO: 150425 - protein, 196 aa, Unknown; identical to SEQ ID NO: 150412
  Bacterial polypetide isolated from the Sargasso Sea

SEQ ID NO: 150426 - protein, 47 aa, Unknown
  Bacterial polypetide isolated from the Sargasso Sea
GYDNAAKIAKTALKNNTTLKHETLKTGLISEKDYNKIVDPKKMIYPA

SEQ ID NO: 150427 - protein, 105 aa, Unknown
  Bacterial polypetide isolated from the Sargasso Sea
MKLRKEFDSIGPINVPKDKYWGASTQRSKKYFDIGEFLVRPILIKSIAIIKKAAAIVHSKEKQILPNISKAIIKASNEVISGKLEQHFPLKVWQTGSGTQTNMNV

SEQ ID NO: 150428 - protein, 78 aa, Unknown
  Bacterial polypetide isolated from the Sargasso Sea
MSYRIEKDTIGEIKVPSDKYWGAQTERSRNNFKIGPSGSMPIEIIHAFAVLKKAAAITNSKLGVLEEKKMKLISQVCD

SEQ ID NO: 150429 - protein, 265 aa, Unknown
  Bacterial polypetide isolated from the Sargasso Sea
DALPVTVGSEFGAYVTSLTNARNEIIASQKELAQVALGGTAVGTGANTPKGYRKAVITELARVSKLPLKPQKDMQYSLQSKFPVANASSALKNFAIELGKVSNDIRLMASGPVAGLSELGIPAVHAGSSIMPGKVNPSLAECMNMICFSVIGNDTTVSFAAQAGQFELNVMLPGMLKAVLDSTDMLTNFLPIFSANLIDGLTANQTKLRENIENSPVIVTLLTPKIGYLKSAELFKESLKSGKTIRELVVSKKLMTDKEVTSLMS

SEQ ID NO: 150430 - protein, 83 aa, Unknown
  Bacterial polypetide isolated from the Sargasso Sea
MTKNFRIEKDSMGTIEVPMEALWGAQTQRSIINFSIGEELIPIELIYSLTLIKKAASIANFNLGLIDKSKKDLIVEACTEILD

SEQ ID NO: 150431 - protein, 137 aa, Unknown
  Bacterial polypetide isolated from the Sargasso Sea
KVNPTQCEALTQVCLHIFGNNTAISIAGSQGHFQLNVFNPMMAFNFLQSVKLMTDAAISFEKNCLDGLEARHENIKLNLERSLMLVTALAPKIGYDKAAELAKLAHKNNTTLKEEALKSGYVDEVEFDSLVDPKKMI

SEQ ID NO: 150432 - protein, 110 aa, Unknown
  Bacterial polypetide isolated from the Sargasso Sea
MKLRKEFDSIGSVNVPNDKLWGASTQRSNKFFNIGKILVSISIVKSIAIIKRSAAIVHAKDKLIDNKISKAIIRASDEVIKGKLDDNFPLKVWQTGSGTQTNMNVNEVML

SEQ ID NO: 150433 - protein, 125 aa, Unknown
  Bacterial polypetide isolated from the Sargasso Sea
MGNDVSITFAGASGNFELNVYRPVMAYNILESIKLLSDASESFTKNTVIGIEPNINRINDNLYNSLMLVTALNPKIGYDKAAAVAKNSYKKNISLKESAMQLGYLTGEEFDKLVQPKDMIFPSKK

SEQ ID NO: 150434 - protein, 107 aa, Unknown
  Bacterial polypetide isolated from the Sargasso Sea
LNVFKPLFAYNIIESSKILGDACLSFAKNCIDGLKPNKKKIERFLKDSLMLVTALNSKIGYYKAAEIANKAYKEDIRLKEACIQLNYLSEKEFDKYVNPERMTKNEG

SEQ ID NO: 150435 - protein, 53 aa, Unknown
  Bacterial polypetide isolated from the Sargasso Sea
MTKNFRIEKDSMGTIEVPIQALWGAQTQRSIINFSIGEELIPIELIYSLTLIK

SEQ ID NO: 150436 - protein, 260 aa, Unknown
  Bacterial polypetide isolated from the Sargasso Sea
TLGSEFAAYVTSLTNARDEIVASQKELAQVALGGTAVGTGANTPKGYRNVVITELARVSKLPLKPQKDMQYSLQSKFPVANASSALKNFAIELSKVSNDIRLMASGPVAGLSELGIPAVHAGSSIMPGKVNPSLAECMNMICFSVIGNDTTVSFAVQAGQFELNVMLPGMLKAILDSTDMLTNFLPIFSANLVDGLTANQTKLRENIENSPVIVTLLTPKIGYLKSAELFKESLKSGKTIRELVVSKKLMTDKEVTALMS

SEQ ID NO: 150437 - protein, 57 aa, Unknown
  Bacterial polypetide isolated from the Sargasso Sea
MLVTALAPKIGYDNAAKIAKAALKNKTTLKNEALKSGLINEKDYNKIVDPKKMIYPA

SEQ ID NO: 150438 - protein, 88 aa, Unknown
  Bacterial polypetide isolated from the Sargasso Sea
MSDSANGFAKYCIKGLKADKKRIKFLLNNSLMLVTALSPKIGYDNAAKVAKKAHANGTTLKEEALKTGLISEKEFIKIVDPKKMTRPR

SEQ ID NO: 150439 - protein, 90 aa, Unknown
  Bacterial polypetide isolated from the Sargasso Sea
DLLSDSTKNFAIYCIRGLKADKKKIKQHLDNSLMMVTALAPYIGYDNAAKIAKNALKNNTNLREEAIKTKLITAREYDKIVDPKKMINPS

SEQ ID NO: 150440 - protein, 98 aa, Unknown
  Bacterial polypetide isolated from the Sargasso Sea
MTKNFRIEKDSMGTIEVPMEALWGAQTQRSIINFSIGEELIPIELIYSLTLIKKAASIANFNLGLIDKRKKDLIVEACTEILDGLHDSQFPLKVWQTR

SEQ ID NO: 150441 - protein, 127 aa, Unknown
  Bacterial polypetide isolated from the Sargasso Sea
MKYRIEKDTMGEVKVPHDALWGAQTQRALENFKISGIKFAFPFGRSFIEAIGIIKFAAASSNQKLKLLDARKAQAIKIAAKEVMSGKHDNQFPLDVFQTGSGTSTNMNANEVNSNLASKRARIKSML

SEQ ID NO: 150442 - protein, 48 aa, Unknown
  Bacterial polypetide isolated from the Sargasso Sea
MGKFRIENDSIGEIRVPTDKYWGAQTQRSIINFPIGWEKQPEAIIKAL

SEQ ID NO: 150443 - protein, 297 aa, Unknown
  Bacterial polypetide isolated from the Sargasso Sea
LGRTYKEMKNTDKSKEWFKEAAKYLNTYYGQLSFMEINPKEKFTLPTQEKEDEKFKKEFYKNPLIQNIKLLKELDRAEYSKHFLKHLASINIEKGSEILAGELAIEIGRYDYAIQIAKKASYEKRFFDQLNYPIIQTPDIVNKKAMPKSELVLSVIRQESEFDSDATSYVGARGLMQLMTYTAKLVAKQAKLSYSKSKLKNPDYNIKLGSYYLAGLLEQYEGSYPFALAAYNAGPKRVKYWKKINGDPQKGKISYVDWIELIKFKETRNYVQRVLENINVYKYMIYGKPVIIYNFFE

SEQ ID NO: 150444 - protein, 103 aa, Unknown
  Bacterial polypetide isolated from the Sargasso Sea
MKYRKEFDSIGSINVPSDKYWGASTQRSKKYFDIGDFLVRPVLIKSIAIVKKSAAIVNFRNKSIEKKICSAIVRASNEIIQGKLADNFPLKVWQTGSGTQTNM

SEQ ID NO: 150445 - protein, 51 aa, Unknown
  Bacterial polypetide isolated from the Sargasso Sea
SPKIGYDNAAKIAKNALKNKTTLKAEALKSGLINEREYNKIVDPNKMIKPD

SEQ ID NO: 150446 - protein, 44 aa, Unknown
  Bacterial polypetide isolated from the Sargasso Sea
MPGKVNPTQCEAISMVCAQIIGNDMAVSFAGAKGHFELNVFKPL

SEQ ID NO: 150447 - protein, 117 aa, Unknown
  Bacterial polypetide isolated from the Sargasso Sea
EYAVSMANSSGTLQMNEYKPLIGFNILTSLKLLKNAIDNFRIKLVDGMEPNQKKMKLNLENSLMLVTAIVPKIGYEKAAEIANLAFKESINLKEATLKLGYLNEDEFNEAMDINSMI

SEQ ID NO: 150448 - protein, 25 aa, Unknown
  Bacterial polypetide isolated from the Sargasso Sea
DEIANDIRFLGSGPRAGYGGINLTS

SEQ ID NO: 150449 - protein, 77 aa, Unknown
  Bacterial polypetide isolated from the Sargasso Sea
CIKGLKADKKTIKNYLDNSLMLVTALSPKVGYDNAAKIAKKAHKNGTTLKEEAIKSGLIKEKEYDKIVNPKNMIAPK

SEQ ID NO: 150450 - protein, 49 aa, Unknown
  Bacterial polypetide isolated from the Sargasso Sea
KIGYDNAAKIAKRALKNNTKLKDETLKTGLITENEYDRIVNPINMTYPK

SEQ ID NO: 150451 - protein, 282 aa, Unknown
  Bacterial polypetide isolated from the Sargasso Sea
TGRTHLMDAMPVDFAEELYAWSSQLKSSKEMLLIIEKKLLELPQGGTAVGSGINAHKNFSKYFAQEMTKLLGKGKKCVPSKNFYHELSAQDCSVQLSGELKNLALVLMKISNDLRWMNSGPLAGLSEIELKALQPGSSIMPGKVNPVIPEAVAMASADVIGNDVSITVAAQSGNFQLNVMLPVIAYNLLKSINLLSGAMNVLSKNTISSFKVNKKNLEVSLSKNPILVTALNPIIGYEKSAFIVKKAYKENRPIIDVAAEETDIPKAKLAKLLDPSKLAKGG

SEQ ID NO: 150452 - protein, 291 aa, Unknown
  Bacterial polypetide isolated from the Sargasso Sea
LSLNNLALETGAGSLTLAGPLSLSNNGQLNSTAGTITLSSGGSAASGATVSIPGSTLVLQSGLSLSGSTLKASGTTFTTNNNTIALNGSILEVQGTQDLTGVVPDNSSTLRLGANATINDSSALSVGTLDLANFALTLDDQMAGLTVGQAVTLDAATEQIISGAADLSLGGGITVSNGILSSTGGTLSASSFSAGAAAKVNILGGTLILPAGGTAVSGAAITTSNAAISLTGTLVVADTLTSTGTNLSLTGDAILSSTAPLSLATLSTNGKDFKLANATTDLTLTDSFTLS

SEQ ID NO: 150453 - protein, 101 aa, Unknown
  Bacterial polypetide isolated from the Sargasso Sea
MKTRKEYDSIGGIDVPVDKYWGPSTQRSNKYFDIGEILVEPIVIKTIAIIKKAIAKVNAENGDLNKKISNAIIKASNEVISGKLKDNFPLKVWQTGSGTQT

SEQ ID NO: 150454 - protein, 57 aa, Unknown
  Bacterial polypetide isolated from the Sargasso Sea
MLVTALAPHIGYDNAAKIAKSALKKGTTLREEALKTNLISKKDFDIIVDPKKMIYPK

SEQ ID NO: 150455 - protein, 316 aa, Unknown
  Bacterial polypetide isolated from the Sargasso Sea
YRSGSNTSSTLRLGANANIDSSSALSVGTLDLANFALTLDDQMAGLTVGQAVTLDAATEQIISGDADLSLSGGITVSNGILSSTGGTLSASGFSAGAAAKVNILGGTLILPAGGTAVSGAAITTSNAGISLTGTLAVADTLTSTSTNLSLTGDAILSSTAPISLATLSTNGKDFKLANATTDLTLANNFTLSSGKLSTQGGDLIFAGSANISDNASLDATVTTGTAGKLEFKQGGTASGTINAGNGTFKLGADYKVDGTLITGNGTTWDLGTSKLDLSAGSLVLGGNVVLDNVITNNQTRFELAEDATVTRNAGFT

SEQ ID NO: 150456 - protein, 83 aa, Unknown
  Bacterial polypetide isolated from the Sargasso Sea
KNFALYCVKGIKANKKKIQEHLDNSLMLVTALAPHIGYDNAATIAKTALKNNTTLKYETLKTGLINEKEYNKIVDPKKMIYPA

SEQ ID NO: 150457 - protein, 235 aa, Unknown
  Bacterial polypetide isolated from the Sargasso Sea
MPISDFTEFLKNSDEYQNLYNSINKTKSNIQIQTIDESVAFLCSSIASDYQRPTLIICPSAFHAINLQENLSAWTSSNILRFPEVENLPYERIISDKETSMSRIDTITKITNSNHFPLVVSSVSAICQQTIESSTLILSSKELMRNQKITMEELTRFLQQTGYEFESTVTDQGTFSRRGGILDIFPVGSDNPYRIEFWGNEIDSIRRFDPETQKSISEINEFQLFPANEISPFFS

SEQ ID NO: 150458 - protein, 189 aa, Unknown
  Bacterial polypetide isolated from the Sargasso Sea
GAQLKTLAVSLLKIVNDLRWMNSGPNGGLAEIQLAALQPGSSIMPGKVNPVIEESMAMVCAQVIGYDTSISVGGLSGNFELNVMLPMVAHSLLESIRLLANASHNLAERSVSRIEVREDHINSLTGKNPILVTTLNPLIGYDLAAKIAKKAFAENRPLKSVAMEMCDLSEEELDKALDPSKMTKGGFVD

SEQ ID NO: 150459 - protein, 75 aa, Unknown
  Bacterial polypetide isolated from the Sargasso Sea
MTKNFRIEKDSMGTIEVPIEALWGAQTQRSIINFSIGEELIPIELIYSLTLIKKAASIANFNLGLIDKRKKDLIV

SEQ ID NO: 150460 - protein, 309 aa, Unknown
  Bacterial polypetide isolated from the Sargasso Sea
KKLMPALNLLIETLEKKAESVEGITKTGRTHLMDAMPVDMSDELNAWNTQLKCSRESIAVVLEKLLLLPQGGTAVGSGINAHKRFSKEFSKELSKLTGFKTKPSKDFFRNLSAQDLSVQLSGELKNLATILLKISNDLRWMNSGPLSGISEIELQALQPGSSIMPGKVNPVIPEAVAMAAADVIGNDVSITVAAQSGNFQLNVMLPVIAYCNLKSVNILAGSMNVLAKKAIKTFKVNHKKIDESLSRNPILVTALNPVIGYQKAAAIAKRAYKESRPVIDIAHEETGISISRLKKLLDPSKLAKGGIKS

SEQ ID NO: 150461 - protein, 270 aa, Unknown
  Bacterial polypetide isolated from the Sargasso Sea
EIKKLVVKYNSELRKICFAHCPERVLPGNIIFEIKNSPRIVGGSNKKDSKEVKKFYSTFVNGEIIETSSNIAEMCKLTENSFRDVNIAFANELSIICDKNNMNVNEVIKIANLHPRVNVLNPGIGVGGHCIPVDPWFLIHDFQNETKLLQSARLVNTNKTEYVIKAIIREIHAFSKKMNKKPIISFLGLSYKPNTGDIRESPAINIIKEIKLHINQYFIVDPFVDKFLGKKLTILDEAINNSDLIIKLVAHDCFLDLEKNKISYNIIDFT

SEQ ID NO: 150462 - protein, 48 aa, Unknown
  Bacterial polypetide isolated from the Sargasso Sea
IGYDNAAKIAKRALKNKTTLRHETLKTGLINEKEYDKVINPRKMIYPS

SEQ ID NO: 150463 - protein, 284 aa, Unknown
  Bacterial polypetide isolated from the Sargasso Sea
RTHLMDAMPIDFADELSAWSSQLKNSLNSLKLIEARLLELPQGGTAVGTGINAHKRFAKLFAQEITKLSGNKYKSVASNNFFHELSSQDTAVQLSGELKNLAVGLMKISNDLRWMNSGPLAGLSEIELQALQPGSSIMPGKVNPVIPEAVTMVSADVIGNDVSITVAAQAGNYQLNVMLPVVAYNLLKSINLLSGACDVLANKAIKTFKVNKKNLESSLAKNPILVTALNPIIGYKKAAEIAKKAYEENRPIIDVAAEETKLSVARLKKLLDPAKLSKGGIHES

SEQ ID NO: 150464 - protein, 213 aa, Unknown
  Bacterial polypetide isolated from the Sargasso Sea
MGKGNKCVPSKNFYHELSAQDCSVQLSGELKNLALILMKISNDLRWMNSGPLAGLSEIELKALQPGSSIMPGKVNPVIPEAVAMASADVIGNDVSITVAAQSGNFQLNVMLPVVAYNLLKSINLLSGAMNVLSKNAISSFKVNKKNLEVSLSKNPILVTALNPIIGYEKAAFIAKKAYKENRQIIDVAAEETDIPKAKLAKLLDPSKLAKGGI

SEQ ID NO: 150465 - protein, 52 aa, Unknown
  Bacterial polypetide isolated from the Sargasso Sea
LSPKIGYDNAAKIAKKAYKNGTTLKEEAINSGLITEKEYTKIVDPKKMISPY

SEQ ID NO: 150466 - protein, 148 aa, Unknown
  Bacterial polypetide isolated from the Sargasso Sea
MHQQAGGGGAHFPLVVEDGADGASGGGVQIRCIRQHDVGTLAAALHKGAFQIGFPGALHQMLADLGGAGEGDAVDVHVHGQRLAHGVTKARQHVEDTVGDARLLRQTRDAQGGEGGFLGGFEDHRVAGGERRAQLPAGHHQGEVPGHD

SEQ ID NO: 150467 - protein, 141 aa, Unknown
  Bacterial polypetide isolated from the Sargasso Sea
NPVIEESTAMVCAQVIGYDSAISVGGLSGNFELNVMLPMVANSLLESIRLLAAACRNLAQRSVSRIIVREEYIQSLVGRNPILVTTLNPLIGYDLAAKIAKTAFAENRPLLEVAKELCDLPEDELIKALDPAKMTQGGLME

SEQ ID NO: 150468 - protein, 162 aa, Unknown
  Bacterial polypetide isolated from the Sargasso Sea
GLGEIMLAALQPGSSIMPGKVNPVIEESMAMVCAQVIGYDTAISIGGLSGNFELNVMLPMVSHSLLESIRLLSNASKNLAFRSVSKIIVREDHIQSLIDKNPILVTALNPLIGYDLASKIAKKAYKENRSLKEVALEMCDLSESELDKALNPSKMVKGGFLK

SEQ ID NO: 150469 - protein, 115 aa, Unknown
  Bacterial polypetide isolated from the Sargasso Sea
MTDQFRTEKDSMGEFQVPINAKYGASTARAVENFPISNLRFSRSFIKALGEIKKACAKVNQNNKLLDKNFADSIIDAAQQVIDGDHDKDFVVDIFQTGSGTSTNMNANEIISKIA

SEQ ID NO: 150470 - protein, 156 aa, Unknown
  Bacterial polypetide isolated from the Sargasso Sea
GLGDLKIPALQPGSSIMPGKVNPVIPEMMMQVSAQVIGNDTTITFSSANGNFELNTMLPVMAYNLLESIALLTTGVSVFGEKLIKDLEANTQKLNEDTQKNSILVTALVPKLGYDVAAEVAKEAMENGLTIKDVLLGKELMSEGDIDDLLDIEKLI

SEQ ID NO: 150471 - protein, 123 aa, Unknown
  Bacterial polypetide isolated from the Sargasso Sea
GNDFSTTIAGANGHLELNVFKPLIANNIIESSRILGDACLSFSEKCINGIKPNKKQIKKFVSNSLMLVTALNTKIGYYKAAEIASKAYEEDTTLRQAAIDLKYLSGKEFDEIVDPKKMTNNGG

SEQ ID NO: 150472 - protein, 122 aa, Unknown
  Bacterial polypetide isolated from the Sargasso Sea
MKFRTESDTLGKVQIPSESLWGPQTQRSINNFKIGKPGSMPIEIVYAYAILKKACSKSNHELGVIEKDKMILINKACQEIIDGKYDEQFPLVIWQTGSGTQTNMNLNEVITNIAHRLEGKDL

SEQ ID NO: 150473 - protein, 117 aa, Unknown
  Bacterial polypetide isolated from the Sargasso Sea
NTAISIAGSQGHFQLNVFNPMMAFNFLQSVKLMTDAAISFEKNCLDGLEARHENIKLNLERSLMLVTALAPKIGYDKAAELAKLAHKNNTTLKEEALKSGYVNEVEFGSLVDPKKMI

SEQ ID NO: 150474 - protein, 143 aa, Unknown
  Bacterial polypetide isolated from the Sargasso Sea
MPGKVNPTQCEALTMVCVQAMGMHNTISLAGSQGHFELNAYKPVIGHNIIELIHLLSSGMDNFNDKCLKGIKPNLKNIKSGLDNSLMLVTALAPEIGYSKAADLAKLAHKKNISLIEANKILKYMDSKRIKLVLDPKKMISPS

SEQ ID NO: 150475 - protein, 492 aa, Unknown
  Bacterial polypetide isolated from the Sargasso Sea
MGGGGSLTLPNALTMTAGSAIETKTFDLTLSSALQLGTGSITSTGGTLSFAGGLTVGGTGSMSVLDSILSVNQNLNFNSASFESSVLDLQGATTLTSNGLVSFKKANLNNKVLTLGSAGTHLKLTDSGETLSLNNLALETGAGSLTLAGPLSISNNGQLNSTGGTITLSSGGSAASGAAVSIPNSTLVLQSGLSLNGSTLKASGTTFTTNNNTIALNGSILEVEGTQDLSGVVPDTSSTLRLGANATINDSSLLSVGTLDLANFALTLNDQMGGLTVGQAVTLDAATEQIISGDADLSLNSGITVSNGILSSTGGALSASSFSAGAAAKVNVLGGTLSLPAGGTAVSGAAITTSGATISMAGTLAVADTLTSTNTNLSLTGDGILSSTAPISLATLSTNGKDFKLANDTTDLTLANNFTLLSGKLSTQGGDLIFAGSANISSGATLDASVNTGTAGKLEFKQGGTTSGTINAGNGTFQIGADYKLDGTLITG

SEQ ID NO: 150476 - protein, 246 aa, Unknown
  Bacterial polypetide isolated from the Sargasso Sea
MSCEEISYLPIGGTAIGTGINSPKKFSRSVCQELNKIYSEMKIKFKPLEIKGEMMSSQNHILTLSSALTRYASTLLKIANDIRWMNSGPISGLSEISLKALQPGSSIMPGKVNPVLSESIMMAATQVNGNHSTIVQASSSGNFQLNTMLPLIAHNIIESLYLMINSTFSMIDLIDSFTVNETSVNENLLRNPIIATKLNQVIGYDLASKVVKEAYRTNSSIFDVAEKMTTLTKTELIKILDPKKLI

SEQ ID NO: 150477 - protein, 155 aa, Unknown
  Bacterial polypetide isolated from the Sargasso Sea
MIENSLSGAVINKPTSEEIESRKPKKTNLKVRVETDTMGEIEVPADRYYGAQTARSLINFDIGEDRMPRSVIRAFGILKQAAAETNVKLGVLEGDIGKLISETCEEVISGNLDSHFPLRIWQTGSGTQTNMNANEVVANRAIEISGGKLGSKSPV

SEQ ID NO: 150478 - protein, 165 aa, Unknown
  Bacterial polypetide isolated from the Sargasso Sea
DGWVVAQYSGLNELKIPALQPGSSIMPGKVNPVIPEMMMQVSAQVIGNDTAITFAAANGNFELNTMLPVMAHNVLESIAILSTSTKVFGEKLIKGLEANTEKLEGNIQKNSILVTALVPKLGYDTAAEVAKEAMSNDRTIKEVLLEKELLSEAEIDELLDIEKLI

SEQ ID NO: 150479 - protein, 49 aa, Unknown
  Bacterial polypetide isolated from the Sargasso Sea
KIGYDNAAKIAKKALKNKTTLKHETLKTGLIGEKEYDRIVNPKKMINPG

SEQ ID NO: 150480 - protein, 130 aa, Unknown
  Bacterial polypetide isolated from the Sargasso Sea
MISRFFTFEEHATLIEGAYHFPLVVLSLMVAVFASFMAFNVAGQAAITEDKLRRNTLLGTGSVALGGGIWSMHFLGMTAFDLCLPVDYDPLITGLSAVPGIAAAWVALHLLTKSRISLAEIILGGVLVGA

SEQ ID NO: 150481 - protein, 833 aa, Unknown
  Bacterial polypetide isolated from the Sargasso Sea
LEIGGSGTLKLGGNLVVTGTFNFNDGATTTFAGNKIDVSGGTLKLAGTHSLNSITTNDQTKLQINNSANVSRTDSGTSTVGSLTYIQSGSSGSPSLSVSNMGLTVSSATQVSGASLIHSNGILTFQSAPSLSNSSSLSVSNGELVLANGGTVNGSSLQLSASKFKSTGSVSVTNGGTFVLNGTSSVVLQGDTTLNQAGSVSWPDLDLGGKKLTLGSTVGSFTVQKALNIANGESLVSSGSSVINLSDTLTVANGGKLTSGIGNVQISGALTLNGEIEQGGGIINLTQGGTVGATGKLDASDSDGVNFGSTLNIANGGKLTSGTGNVQISGALTLNGEIEQGGGIINLTQGGTVGATGKLDVSDSELKLGGALNVSGTLVANEDSKWSGWSGTLDLTAGTLEAAGGSLSLTQFSTGGGTTLKLSADTEITSTGDYTFGTVNLSGKKLTMGGNGGLTLPNALTMTAGSAIETKTSDLTLSSALQLGTGAITSTGGTISLDGGATLSNSGQLDVSGTNLKVKQALNLSGGTFTSNTSSVLDLQTAATFTSSSPVSFKKVNLNNKVLTLGSAGTHLKLTDSNETLSLNNLALETGAGSLTLAGPLSLSNNGQLNSTAGTITLSSGGSAASGATVSIPGSTLVLQSGLSLSGSTLKASGTTFTTNNNAVSLNGSILEVQGTQDLSGVVPNTSSTLRLGANATINDSSALSVGTLDLANFALTLDDQMAGLTVGQAVTLDAATEQIISGDADLSLGGGITVSNGILSSTGGTLSASSFSAGAAAKVNILGGTLILPAGGTAVSGAAITTSNAAISLKGTLAVADTLTSTSTNLSLTGDA

SEQ ID NO: 150482 - protein, 48 aa, Unknown
  Bacterial polypetide isolated from the Sargasso Sea
MKNKKRTESDSLGEKKIDSSRYWGAQTQRSKENFQIGNEKMPIEIIQA

SEQ ID NO: 150483 - protein, 99 aa, Unknown
  Bacterial polypetide isolated from the Sargasso Sea
SAIHESISLLSEVAESFTLNALDGLKANKQKIKENLDKSLMLVTALAPKIGYEKAAEIAKKALKENISLKQSAKALGHLSEQEFDKIVKPELMVAPKKA

SEQ ID NO: 150484 - protein, 72 aa, Unknown
  Bacterial polypetide isolated from the Sargasso Sea
MTKNFRIEKDSMGRIEVPIEALWGAQTQRSIINFSIGEELIPIELIYSLTLIKKAASIANFNLGLIDKRKKD

SEQ ID NO: 150485 - protein, 313 aa, Unknown
  Bacterial polypetide isolated from the Sargasso Sea
MDLTKKLYPALDGLIIAIENKAETLKGTIKTGRTHLMDAMPIDFSAELNAWSSQLRSSKEMLNILEKKLLELPQGGTAVGSGINAHKQFSKCFAQEISKLSRSNYKFIPSKNFYHELSAQDCSVQLSGELKNLALILMKISNDLRWMNSGPLTGLAEIELKALQPGSSIMPGKVNPVIPEAVAMASADVIGNDVSITVASQSGNFQLNVMLPVIAYNLLKSINLLSGAMNVLSKKAISSFKVNHENLAVSLSKNPILVTALNPIIGYEKATSIAKKAYKENRPIIDVAAEETDIPKSKLKRLLDPAKLSKGGT

SEQ ID NO: 150486 - protein, 279 aa, Unknown
  Bacterial polypetide isolated from the Sargasso Sea
MDAMPVDFSDELLAWSSQLHASRKMLSVIEERFLELPQGGTAVGSGINAHKQFAKFFAQELTKLSGNKCKCVPSGNFFHELSAQDSSVQLSGELKNLAVILMKIANDLRWMNSGPLAGLSEIELQALQPGSSIMPGKVNPVIPEAVTMVSADVVGNDASITVAAQAGNFQLNVMLPVIAYNLLKSINLLAGAMNVLSTKAIKTFKVNKKNLEASLSRNPILVTALNPIIGYEKAAEIAKKAYKSGRPIIEVANEETDLSVAQLKKLLDPSKLTKGGISK

SEQ ID NO: 150487 - protein, 223 aa, Unknown
  Bacterial polypetide isolated from the Sargasso Sea
CPKGFCEESIKSISDDTNLMFYKSKNNFSIMASHDRLAQVMSQIKILAGALFKISNDIKILSSGPRSGIYELIIPQNEPGSSIMPGKVNPTQCEALSMVCTQIMGLEYAVSMANSSGTLQMNEYKPLIGFNILTSLKLLKNVIENFRIKLVDGMEPNQKKMKLNLENSLMLVTAIVPKVGYEKAAEIANLAFKESLNLKEATLKLGYLNEDEFDEAMNINSMI

SEQ ID NO: 150488 - protein, 225 aa, Unknown
  Bacterial polypetide isolated from the Sargasso Sea
KAKFSELACQHISKLSGIDVYETDNHFLAQSSLDGALTTSGVLRGLAVSLQKIANDIRLMGSGPRSGISELSLPAVQPGSSIMPGKVNPVIPEAIIQASSQVIACDTALVQSGQGGYFELNTMLPFAAHNLLQAVSLLSNSVEVFAAKCIDGLEATDKGPELLMSGLMLATTLAPVIGYEKAARIAKEAHKSGQTVLETSLDLTDLSEEELIEILNPEKMVKPSD

SEQ ID NO: 150489 - protein, 141 aa, Unknown
  Bacterial polypetide isolated from the Sargasso Sea
GKVNPTQSEAVTMVCVKVIGNHNGITMAGSHGHFELNVFKPLIIHNILQSIEIMSDSSKTFALYCVKGIKADKKRIKYLLDNSLMLITALAPRIGYDKAAQIAKTAHQKGTTLKQEVIKSGLIKETDYDRIMNPLKMTKPK

SEQ ID NO: 150490 - protein, 237 aa, Unknown
  Bacterial polypetide isolated from the Sargasso Sea
MKYRIEKDSLGEVKVPSKALWGAQTQRAVNNFPISGIKMDFPFTKSFVSSLGLIKDAAAKANLRLKLISSKKSKAISRAAKEVWQEKHHHEFPIDVFQTGSGTSSNMNANEVISNLASKYAKLDVNANDDVNMSQSSNDVIPTAIKISSHMDLTKKLYPALDKLIITIEKKAISLRGTIKTGRTHLMDAMPVDFAEELYTWSSQLQSSKEMLLTIEKKLLELPQGGTAVGSGINAHK

SEQ ID NO: 150491 - protein, 115 aa, Unknown
  Bacterial polypetide isolated from the Sargasso Sea
MSDKKFRIEKDSMGELNVPADSKWGPQTQRAVDNFQISDYKMPTGFIRSLALLKWGLANANKDLNLLSKEKASAIADSAMEIYQGDHMKEFPVDVFQTGSGTSTNMNMNEVISHL

SEQ ID NO: 150492 - protein, 98 aa, Unknown
  Bacterial polypetide isolated from the Sargasso Sea
IHNIIQSIHLMADSTKSFTLYCVKGIKADKKRIKYLLDSSLMLVTALSPKIGYDNAAKIAKRALKNKTTLKYEAIKSGLINDKEYDKIVDPKKMLGPI

SEQ ID NO: 150493 - protein, 202 aa, Unknown
  Bacterial polypetide isolated from the Sargasso Sea
LICSHKYESLASHDVFIEVMSGIEILTSALFKMANDIRVLASGPRSGISEIILPANEPGSSIMPGKINPTQCEALSMVCAHVIGLRNSVTFACTQGHFQLNVYNPLIIHNTLDAIRLIGEAMASFRANCLKGLKINKKRINELLNRSLMLVTPLTKVIGYDLASKVALNAYNKNISLMQSCLELTNLSEKDFKEYTDPKKMV

SEQ ID NO: 150494 - protein, 216 aa, Unknown
  Bacterial polypetide isolated from the Sargasso Sea
ESIKLISDETNLMFYKSKNNFSIMASHDRLAQIMSQIKILAGALFKISNDIKILSSGPRSGIYELIIPQNEPGSSIMPGKVNPTQCEALSMVCTQIMGLEYSVSMANSSGTLQMNEYKPLIGFNILTSLKLLKNVIENFRIKLVDGMEPNKKIMTLNLENSLMLVTAIVPKVGYEKATEIANLAFKESLNLKEATIKLGYLNEDEFDEAMNINSMI

SEQ ID NO: 150495 - protein, 66 aa, Unknown
  Bacterial polypetide isolated from the Sargasso Sea
KLLLDNSLMLVTALSPKIGYDNAAKIAKLAHKNGTTLKDEAIKSGLINEKEFLKVVNPLKMIKPNN

SEQ ID NO: 150496 - protein, 49 aa, Unknown
  Bacterial polypetide isolated from the Sargasso Sea
MIFFKTGSGTSTNMNMNEVISEVAKRVHKKSIHPNDDVNMSQSSNDVIP

SEQ ID NO: 150497 - protein, 185 aa, Unknown
  Bacterial polypetide isolated from the Sargasso Sea
MKYRTEKDTMGEVNVPHDALWGAQTQRALENFKISGIKFAFPFGRSFIEALGVIKFAAAASNQKLKLLDSRKAKAIKIAAKEVLSGNHDSQFPLDIFQTGSGTSTNMNANEVIANLASKKARIKINANDHVNMSQSSNDVIPTAICISALLDTQRQLLPSLSSLIRVIDKKALSLKGQVKTGRTH

SEQ ID NO: 150498 - protein, 133 aa, Unknown
  Bacterial polypetide isolated from the Sargasso Sea
TQIEALSMICAQVIGNSTTVDIAGSNGHFQLNAYKPVIAYNIIQSINLMSDGINSFNKNCLRGIKPNKKNISNHLKNSLMLVTALNKSIGYDNAAKIAKKAFIENLTLKEAAIKLGLISEKDFDRIVDPKKMI

SEQ ID NO: 150499 - protein, 134 aa, Unknown
  Bacterial polypetide isolated from the Sargasso Sea
MSDKKFRIEKDSMGELNVPADSKWGPQTQRAVDNFQISDYKMPTGFIRSLALLKWGLANANKDLNLLSKEKASAIADSAMEIYKGDHIKEFPVDVFQTGSGTSTNMNMNEVISHLASSESNAIHPNDDVNMAKA

SEQ ID NO: 150500 - protein, 57 aa, Unknown
  Bacterial polypetide isolated from the Sargasso Sea
NSLMLVTALNKSIGYDNAAKIAKKAFNENLTLKEAALKLKLISEKDFDKIVDPKKMV

SEQ ID NO: 150501 - protein, 65 aa, Unknown
  Bacterial polypetide isolated from the Sargasso Sea
QEHLDNSLMLVTALTPHIGYDNAAKIAKTALKNNTTLKYETLKTGLINEKNYNRIVNPKKMIYPD

SEQ ID NO: 150502 - protein, 223 aa, Unknown
  Bacterial polypetide isolated from the Sargasso Sea
PAFADEVSKLSGESMREAENHFEAQSTVDAPVEMSGQLKTIAVGLLKIVNDLRWMNSGPNAGLGEIQLAALQPGSSIMPGKVNPVIEESTAMVCAQVIGYDSAISVGGLSGNFELNVMLPMVAHSLLESIRLLAATSRNLAQRSVSRIIVREEHIQSLVGRNPILVTTLNPLIGYDLAAKIAKTAFAENRPLLEVAKEICDLPEDELKKALDPTKMTQGGLVE

SEQ ID NO: 150503 - protein, 112 aa, Unknown
  Bacterial polypetide isolated from the Sargasso Sea
SHGHFELNVFKPLIAHNILQSIDLLSDSSKNFAIYCVNGIKANKEKIKEYLDNSLMLVTALAPHIGYDKASKIAKSALKNKTTLKEEALKSKLIGEKEYDKIVDPKKMLSPS

SEQ ID NO: 150504 - protein, 184 aa, Unknown
  Bacterial polypetide isolated from the Sargasso Sea
VMSGIEILTSALLKMQNDIRVLASGPRSGISELILPANEPGSSIMPGKINPTQCEALSMVCAHVIGLRNSITLACTQGHFQLNVYNPLIIHNTLDSINLISEAMCSFNKNCLKGLKVNKKRVNELLNRSLMLVTPLTKVIGYDLASKVALNAYNKNISLKESCIELTDLSEEEFNKYTDPNKMI

SEQ ID NO: 150505 - protein, 257 aa, Unknown
  Bacterial polypetide isolated from the Sargasso Sea
TAIKVSAYKDLTEKLYPALEKLIIEIEKKEAAFKGIIKTGRTHLMDAMPIEVSQELSAWSSQLKNTKKTLVFLEKRLLEMPLGGTAVGTGINAHPRFAKTFAKELSTLIGGKCKAIASENFFHELSAQDTAVQVSGELKNLAVVLMKISNDLRWMNSGPLAGLSEIELKALQPGSSIMPGKVNPVIPEAVAMASADVIGNDVTITIAAQSGNFQLNVMLPVIAYNLLKSMALLTGSMKVLADKTIKSFKVNKKTLES

SEQ ID NO: 150506 - protein, 101 aa, Unknown
  Bacterial polypetide isolated from the Sargasso Sea
MKTRKEYDSIGGINVPVDKYWGASTQRSKKYFDIGEFKVRPTLIKSIAIIKKSAAIVHKNTKQIDSKIANAIIKASDEVIKGKLDEHFPLKVWQTGSGTQT

SEQ ID NO: 150507 - protein, 132 aa, Unknown
  Bacterial polypetide isolated from the Sargasso Sea
MPNKKRTEFDTLGIKKIDSQKLWGAQTQRSLENFKIGNDKMPKEIIVALGQQKKAAVLANHNLGLLSKKLSSAIIKACDQVINLNLIDEFPLSVWQTGSGTQTNMNANEVISNYAIKILKGKNWIKIPYPSK

SEQ ID NO: 150508 - protein, 132 aa, Unknown
  Bacterial polypetide isolated from the Sargasso Sea
AVTMVCVKVIGNHTGITIAGSQGQFELNVFKPLIAHNILQSIDLISDSSKNFAKYCVKGIKANKDKIKKDLDNSLMLVTALAPIIGYDKAASIAKKALKNNTTLKTEIIKSGLMTEKEYKKIVDPRKMTQPA

SEQ ID NO: 150509 - protein, 227 aa, Unknown
  Bacterial polypetide isolated from the Sargasso Sea
TGINCPKGFCEESIKSISDDTNLMFYKSKNNFSIMASHDRLAQVMSQIKILAGALFKISNDIKILSSGPRSGIYELIIPQNEPGSSIMPGKVNPTQCEALSMVCTQIMGLEYAVSMANSSGTLQMNEYKPLIGFNILTSLKLLKNVIENFRIKLVDGMEPNQKRMKLNLENSLMLVTAIVPKVGYEKAAEIANLAFKESLNLKEATIKLGYLNEDEFDEAMSINSMI

SEQ ID NO: 150510 - protein, 72 aa, Unknown
  Bacterial polypetide isolated from the Sargasso Sea
KANKKKIQEHLDNSLMLVTALAPHIGYDNAAKIAKRALKNNTTLKLETLKTGLISERDYKKIVDPKKMIYPT

SEQ ID NO: 150511 - protein, 74 aa, Unknown
  Bacterial polypetide isolated from the Sargasso Sea
PNQERIEYNLYNSLMLVTALNPHIGYDKASEVAKKAFKDKSTLREAIIELGYLTGDEFDEFINPADMIQPKKKD

SEQ ID NO: 150512 - protein, 207 aa, Unknown
  Bacterial polypetide isolated from the Sargasso Sea
FVSSLGIIKDAAARANNKLKLLTNKKARAISKASKEVWQEKHHQEFPIDVFQTGSGTSSNMNANEVIATLASKFSGEEVSPNDDVNMSQSSNDVVPTAIKISAHMDLTKKLYPSLESLINSIDKKATSVRGVIKTGRTHLMDAMPIDFADELSAWSSQLNTSLKSLKFIERRLLELPQGGTAVRTGINAHTRFAKLFAQEITNLSWN

SEQ ID NO: 150513 - protein, 196 aa, Unknown
  Bacterial polypetide isolated from the Sargasso Sea
MAKKGYREESDSIGIVYVPRKALYGAQTQRAIDNFPISGIRMDFPFTKSFVSSLGLIKDAAARANNTLKLLPNKKARSISKASKEVWQEKHHKEFPIDVFQTGSGTSSNMNANEVIANLASAFSGEEVSPNDDVNMSQSSNDVIPTAIKISAYMDLSKKLYPNLENLINEIDKKAFSHRGIIKTGRTHLMDAMPID

SEQ ID NO: 150514 - protein, 175 aa, Unknown
  Bacterial polypetide isolated from the Sargasso Sea
GYARQIEVGIQRIESALVNMQELPMGGTAVGTGINTHSKFAEKFALEISKLTGESFREAENHFEAQATVDAPVELGAQLKTIAVSLMKIVNDLRWMNSGPNGGLGEIQLAALQPGSSIMPGKVNPVIEESMAMVCAQVIGYDTSISIGGLSGNFELNVMLPMVAYSLLESIRLWQ

SEQ ID NO: 150515 - protein, 62 aa, Unknown
  Bacterial polypetide isolated from the Sargasso Sea
LDNSLMLVTALAPKIGYDNAAKIAKKALKNNTKLKYETIKSGLINEKEYDKIVNPIKMTSPN

SEQ ID NO: 150516 - protein, 134 aa, Unknown
  Bacterial polypetide isolated from the Sargasso Sea
MSDKKFRIEKDSMGELNVPADSKWGPQTQRAVDNFQISDYKMPTGFIRSLALLKWGLANANKDLNLLSKEKASAIADSAMEIYRGDHMKEFPVDVFQTGSGTSTNMNMNEVISHLASSESNPIHPNDDVNMGQS

SEQ ID NO: 150517 - protein, 252 aa, Unknown
  Bacterial polypetide isolated from the Sargasso Sea
SQAQVDLSCEEISYLPIGGTAIGTGINAPKMFAKNVCNELNKIYKELKIKFKPLLVKGEMMSSQNHILTLSSSLTRYASCLTKIANDIRWMNSGPISGLSEISLKPLQPGSSIMPGKINPVISESILMAAAHVNGNHVTIMQASSSGSFQLNTMLPVIAHNIIESLYLMINCTFSMIELIDSFSVNEDRVKDNLFRNPIIATKLNQVIGYDLASKIVKEAYKTNSSIFDIAEKMTSLTKSELIKILDPKKLI

SEQ ID NO: 150518 - protein, 83 aa, Unknown
  Bacterial polypetide isolated from the Sargasso Sea
KNFALYCVKGLKADKKRIKQYLDNSLMLVTALAPHIGYDNAAKIAKNALKNNTTLKEEALKTKLIKSNEYDKIVDPKKMINPY

SEQ ID NO: 150519 - protein, 80 aa, Unknown
  Bacterial polypetide isolated from the Sargasso Sea
SQFCIKGIKADLKKISEDLNNSLMLVTALAPKIGYDNAAKIAKSALKNKTTLKFEAIKTGLISENDFDKIVDPRKMTYPG

SEQ ID NO: 150520 - protein, 82 aa, Unknown
  Bacterial polypetide isolated from the Sargasso Sea
NFAIYCVKGIKANKKKIQEHLDNSLMLVTALAPHIGYDNAAKIAKTALKNNTTLKYETLKTGLITEKDYKKIVDPKKMIYPA

SEQ ID NO: 150521 - protein, 44 aa, Unknown
  Bacterial polypetide isolated from the Sargasso Sea
SGTQTNMNVNEVISNRAIQMMGGKMGTKKPIHPNDHVNKSQSTN

SEQ ID NO: 150522 - protein, 277 aa, Unknown
  Bacterial polypetide isolated from the Sargasso Sea
KALGGAQTQRAVNNFPISGIKMDFPFTKSFVSSLGLIKDAAAKTNLRLKLLSSKKSKAISKAAKEVWQEKHHHEFPIDVFQTGSGTSSNMNANEVIANLATKYAKLDIKPNDDVNMSQSSNDVIPTAIKISAHMDLTKKLYPALDKLIAVIEKKAKSLRGTIKTGRTHLMDAIPIDFAEELYAWSSQLKSSKKMLLTLEKKLLELPQGGTAVGSGINAPKQFSRYFAQEMTKLLGNKIKCVKSENFYHELSAQDCSVQLSGELKNLSVILMKISNDL

SEQ ID NO: 150523 - protein, 75 aa, Unknown
  Bacterial polypetide isolated from the Sargasso Sea
KGLKADKKKIQHYLDNSLMLVTALAPKIGYDNAAKIAKKAIKNNTSLKEEALKTGLISKKDYDLIVDPKKMINPS

SEQ ID NO: 150524 - protein, 78 aa, Unknown
  Bacterial polypetide isolated from the Sargasso Sea
MKKNKAFRIEHDSLGEVKVPKKALWGAQTQRAIENFPISGIKFRFPFGRSFIKALGAIKHSAAVANQDLGILTIKKSN

SEQ ID NO: 150525 - protein, 77 aa, Unknown
  Bacterial polypetide isolated from the Sargasso Sea
CISGLKADKNRIKHLVENSLMLVTALSPRIGYDNAAKIAKNALKNKTTLKVEALKSGLINEREYNIIVDPNKMIKPD

SEQ ID NO: 150526 - protein, 103 aa, Unknown
  Bacterial polypetide isolated from the Sargasso Sea
FKPLIAHNILQSIDLLADSTKNFALYCIKGLKADREKISKYLNDSLMLVTALAPHIGYDNAAKIAKKAHKNKTTLKTEVLKTGLINEKQYDKIVDPKKMIYPA

SEQ ID NO: 150527 - protein, 107 aa, Unknown
  Bacterial polypetide isolated from the Sargasso Sea
MSHRMERDSLGPIEVPSDKYYGAQTQRSLDNFKIGNQRFPREFIRAYGILKKSAATVNHSYGNLEDSIKNAIHKAADEVIEGKLDDHFPLVVWQTGSGTQTNMNFNE

SEQ ID NO: 150528 - protein, 94 aa, Unknown
  Bacterial polypetide isolated from the Sargasso Sea
MSEDYRIEKDSMGEVRVPVKALYGAQTQRAMENFPISGICISRSLIHALGVIKQAAAKVNAELGNIPKDVAHAIQLAAQEVIDGKLDDHFPVDI

SEQ ID NO: 150529 - protein, 218 aa, Unknown
  Bacterial polypetide isolated from the Sargasso Sea
MTTSTETRIEQDSMGELEVPADALYGAQTQRAVNNFPVSGQSMPEAFIRALITVKKAAAQANVALDTLDSDTGEAICQACDQLLNEPQLMAHFPVDIFQTGSGTSTNMNANEVIARVASQQSGLSVHPNDHVNYGQSSNDIIPTTIHVSAALALKQELLPSLSHLYRVIGNKASELKDVCKTGRTHMMDAMPVRMDQSLSGWQAQIGQQIKALNAHQP

SEQ ID NO: 150530 - protein, 75 aa, Unknown
  Bacterial polypetide isolated from the Sargasso Sea
KGIKANKKKIQEHLDNSLMLVTSLAPHIGYDNAAKIAKTALKNNTTLKHETLKTGLIQEKDYDKIVDPKKMIYPT

SEQ ID NO: 150531 - protein, 119 aa, Unknown
  Bacterial polypetide isolated from the Sargasso Sea
GNNLTVAQAGLQGHFELNAFKPVIIFNVINSINILSDGILSFCKNCLEGITINKENINNHVKNSLMLVTALNKYIGYDNAAKIAKKAFDENITLKEAALKLKLISEKEFDKIVDPKKMI

SEQ ID NO: 150532 - protein, 105 aa, Unknown
  Bacterial polypetide isolated from the Sargasso Sea
MKNKKRTESDTLGNKKIDSDKYWGAQTQRSIENFRIGNEKMPTEVIRAIGIQKKAAALTNMNLGILDQKIGKAIITACDQIISLKLLDHFPLSVWQTGSGTQTNM

SEQ ID NO: 150533 - protein, 176 aa, Unknown
  Bacterial polypetide isolated from the Sargasso Sea
MKISNDLRWMNSGPLAGLGEIELEALQPGSSIMPGKVNPVIPESAAMVAAQVIGNDATITVGGQSGNFELNVMLPLIAHNLLESIKLLSNVTVLLADKAIATFTVNEKQLAMALSRNPILVTALNPIIGYQKAADIAKKAYRQGRPVLDVADEETEIAREELEKLLDPNNLTFGGL

SEQ ID NO: 150534 - protein, 106 aa, Unknown
  Bacterial polypetide isolated from the Sargasso Sea
HFQLNTYKPVIAFNIIQSVNLLSDGIKSFNYNCLKGLKVNKEIIDNHLNNSLMLVTALNKSIGYDNAAKIAKKAYAENLTLKKAALKLKLISEKDFDKIVDPKKMI

SEQ ID NO: 150535 - protein, 134 aa, Unknown
  Bacterial polypetide isolated from the Sargasso Sea
MIQNGLEIEQNAPIQERSTEPRKASAPVGEIRVEKDTMGELEVPADRYFGAQTARSLINFDIGTDTMPPSVIRAFGILKQASAETNVELGQLDPQVGALISSACDEVISGALDEHFPLRVWQTGSGTQTNMNSN

SEQ ID NO: 150536 - protein, 147 aa, Unknown
  Bacterial polypetide isolated from the Sargasso Sea
NEPGSSIMPGKVNPTQCEALSMVCTQIMGLEYAVSMANSSGTLQMNEYKPLIGFNILTSLKLLKNAIENFRIKLVDGMEPNQKKMKLNLENSLMLVTAIVPKVGYEKAAEIANLAFKESLNLKEATLKLGYLNEDEFDEAMNISSMI

SEQ ID NO: 150537 - protein, 67 aa, Unknown
  Bacterial polypetide isolated from the Sargasso Sea
RIKELLDNSLMLVTALAPHIGYDNAAKIAKTALKNGTTLKHEAVRSGLISEKDYIKIVDPRKMVTPN

SEQ ID NO: 150538 - protein, 322 aa, Unknown
  Bacterial polypetide isolated from the Sargasso Sea
ANLCYKTSKVKIHPNDDVNMSQSSNDVIPTVMNLAYYFDSTKKLMPALNLLIETLEKKAESVKGITKTGRTHLMDAMPVDMSDELNAWNTQLKCSRESMEVVLEKLLFLPQGGTAVGSGINAHRRFSKEFAKELSKLTGFKTKPSKDFFRNLSAQDLSVQLSGELKNLATILLKISNDLRWMNSGPLSGISEIELQALQPGSSIMPGKVNPVIPEAVAMAAADVIGNDVSITVAAQSGNFQLNVMLPVIAYCNLKSVNILAGSMNVLAKKAIKTFKVNHKKIEESLSRNPILVTALNPVIGYQKAAEIAKIAYQESRPVIDV

SEQ ID NO: 150539 - protein, 106 aa, Unknown
  Bacterial polypetide isolated from the Sargasso Sea
MKNIRIETDSFGKLEVSNEKYWGAQTQRSLKNFNIGQEKQKLSLIHGLVVIKQAAAAVNMEEGKLDRKIGNAIVKACKKIRSGKFDDNFPLSVWQTGSGTQTNMNV

SEQ ID NO: 150540 - protein, 103 aa, Unknown
  Bacterial polypetide isolated from the Sargasso Sea
MTKNFRIEKDSMGTIEVPMKALWGAQTQRSIINFSIGEELIPIELIYSLTLIKKAASIANFHLGLIDKRKKDLIVEACSEILDGLHDSQFPLKVWQTGSGTQT

SEQ ID NO: 150541 - protein, 150 aa, Unknown
  Bacterial polypetide isolated from the Sargasso Sea
MNLGSSIMPGKVNPTQSEAVTMVCVKVIGNHTGITIAGSQGQFELNVFKPLIAHNILQSIDLISDSSKNFAKYCVKGIKANINKIQKDLDNSLMLVTALAPKIGYDEAANIAKKALKNNSTLKTEVLKSGLMDEKEYKKIVDPKKMIQPE

SEQ ID NO: 150542 - protein, 219 aa, Unknown
  Bacterial polypetide isolated from the Sargasso Sea
EVAGISVRETSNHFQAQSTLDAAVEASGTLRAIATSLHKIANDIRFMACGPRAGIGEIILPEVQPGSSIMPGKINPVISESVIQVVAQVYGNDATVAVSGQGGYFELNTMMPVVAFNILQSISLLASSANNFAVQCVDGIQSTSTGPDMVERGLMLGTALAPEIGYDLAADIAKTAAREGSTIREVAKIKTELTDDKLTELLNPEEMTKPSLEVSGGGG

SEQ ID NO: 150543 - protein, 126 aa, Unknown
  Bacterial polypetide isolated from the Sargasso Sea
CQVIGNHNGITMAGSHGHFELNVFKPLIIHNILQSIEIMADSSKTFALHCIKGIKADKKRIKFLLDNSLMLVTALAPKIGYDKAAYIAKIAHKNNTTLKEEVVKNKILTENEFNKLMKPISMTKPK

SEQ ID NO: 150544 - protein, 273 aa, Unknown
  Bacterial polypetide isolated from the Sargasso Sea
HVPQEALYGAQTQRAVNNFPISHQPMPAQFIRALILAKTAAAKVNVELKQISEGQGKAIVDVAQGLLEGDYMQHFPVDIFQTGSGTSSNMNANEVIATLASRLLGEAVNPNDHVNCGQSSNDIIPTTIHVSAALVLHEQTLPALLHLVQVIEQKAEAVHPFIKTGRTHLMDAMPVRMSQVLNGWAQQLKANIGHLQDLLPALQALAQGGTAVGTGINAHPEFARRFSQQLSLLTGVKFTPGKNLFALIGSSGHRRCSLWPVESHGGVADEGRQ

SEQ ID NO: 150545 - protein, 100 aa, Unknown
  Bacterial polypetide isolated from the Sargasso Sea
MDFRSEMDSLGSINVSKDKYWGAQTQRSLKNFKIGHHRFPRSVIWALGVVKKAAALTNNELGKLDAKVCQLICSACDEVMDGRLDAHFPLVVWQHRFGHS

SEQ ID NO: 150546 - protein, 183 aa, Unknown
  Bacterial polypetide isolated from the Sargasso Sea
MSQIKILAGALFKISNDIKILSSGPRSGIYELIIPQNEPGSSIMPGKVNPTQCEALSMVCTQIMGFEYAVSMANSSGTLQMNEYKPLIGFNILTSLKLLKNIVENFRINLVDGMEPNQKKMKLNLENSLMLVTAIVPKVGYEKAAKIANLAFKESLNLKEATLKLGYLNEDEFDEAMNINSMI

SEQ ID NO: 150547 - protein, 76 aa, Unknown
  Bacterial polypetide isolated from the Sargasso Sea
VKGIKANKKKIQEHLDNSLMLVTALAPHIGYDNAAKIAKKALKNNTTLKFETLKTGLINEKDYKKIVDPKKMIYPT

SEQ ID NO: 150548 - protein, 92 aa, Unknown
  Bacterial polypetide isolated from the Sargasso Sea
LLTYLADSTKNFALYCVKGIKANKNKIKEHLDNSLMLVTALAPHIGYDNAAKIAKTALKNNTTLKHETLKTGLISEKEYEKIVDPRKMIYPA

SEQ ID NO: 150549 - protein, 115 aa, Unknown
  Bacterial polypetide isolated from the Sargasso Sea
MAGSHGHFELNVFKPLIAHNILQSIDLLADSTKNFSLYCIKGIKADKIKIKQFLDNSLMLVTALAPHIGYDNSAKIAKKALKNKTTLKEEALKSGLIDEKSYNKIVNPLNMIKPL

SEQ ID NO: 150550 - protein, 71 aa, Unknown
  Bacterial polypetide isolated from the Sargasso Sea
ANKKKIQEHLDNSLMLVTSLAPHIGYDNAAKIAKTALKNNTTLKHETLKTGLISEKDYNKIVDPKKMIYPA

SEQ ID NO: 150551 - protein, 175 aa, Unknown
  Bacterial polypetide isolated from the Sargasso Sea
GALFKISNDIKILSSGPRSGIYELIIPQNEPGSSIMPGKVNPTQCEALSMVCTQIMGLEYAVSMANSSGTLQMNEYKPLIGFNILTSLKLLKNAIENFKIKLVDGMEPNQKKMKLNLENSLMLVTAIVPKVGYEKAAEIANLAFKESLNLKEATLKLGYLKEDEFDEAMNINSMI

SEQ ID NO: 150552 - protein, 254 aa, Unknown
  Bacterial polypetide isolated from the Sargasso Sea
FPFTKSFVSSLGLIKDAAAKTNLKLKLISSKKSKAISKAAKEVWQEKHHHEFPIDVFQTGSGTSSNMNANEVIANLASKYSKIKISPNDDVNMSQSSNDVIPTAIKISAHMDLTKKLYPALDALIIAIENKAKTLKGTIKTGRTHLMDAMPIDFSEELKAWSSQLTSSKEMLNILEKKLLELPQGGTAVGSGINAHKQFAKCFSQEMSKLFGNKYKFVSSKNFYHELSAQDCSVQLSGELKNLALILMKISNDL

SEQ ID NO: 150553 - protein, 240 aa, Unknown
  Bacterial polypetide isolated from the Sargasso Sea
MGGTAVGTGINTHPQFPAKFAAEISKLTGESFCEAENHFEAQSTVDAPVELGAQLKTLAVSLLKIVNDLRWMNSGPNGGLGEIQLAALQPGSSIMPGKVNPVIEESMAMVCAQVIGYDAAISVGGLSGNFELNVMLPMVAHSLLESIRLLANASRNLADRSVSRIVVREDHINSLIRKNPILVTTLNPLIGYDLAAKIAKKAFAENRTLKSVALEMCDLSEEDLDKALDPSKMTGGGFLD

SEQ ID NO: 150554 - protein, 135 aa, Unknown
  Bacterial polypetide isolated from the Sargasso Sea
QCEAVTMVCAKVIGNHTGITVAGSHGHFELNVFKPLIAYNILQSIDILADSIKNFTLYCMNGIKPNKKKIKEHLENSLMLVTALAPKIGYDNASKIAKKALKNNTTLKTEALKSGLINEKDYKKIVNPMKMIGPS

SEQ ID NO: 150555 - protein, 68 aa, Unknown
  Bacterial polypetide isolated from the Sargasso Sea
KKIKDYLDNSLMLVTALAPHIGYDNAAKIAKKALKNNTRLKDEAIKTGMISEKDYNKIVNPKKMTSPN

SEQ ID NO: 150556 - protein, 76 aa, Unknown
  Bacterial polypetide isolated from the Sargasso Sea
VKGIKADIKKIKKDLDSSLMLVTALAPKVGYDNAAKIAKTALKNGTTLKHEAVKSGLITEKEYKKIVDPKKMIKPN

SEQ ID NO: 150557 - protein, 263 aa, Unknown
  Bacterial polypetide isolated from the Sargasso Sea
MDFPFTKSFVSSLGLIKDAAAKANLRLKLIPTKKAKAISKASKEVWQEKHHHEFPIDVFQTGSGTSSNMNANEVIANLASKYSKLTISPNDDVNMSQSSNDVIPTAIKISAHIDLSKKLIPALNDLINTIEKKAKSVDGVIKTGRTHLMDAMPINFSEELFAWSSQLRASSEMIDIISNKFLILPQGGTAVGSGINAHKQFSRYFSQEISKLYPGKYKFIPSKNFYHELSSQDCSVQLSGELKNLAVILMKISNDLRWMNSGP

SEQ ID NO: 150558 - protein, 141 aa, Unknown
  Bacterial polypetide isolated from the Sargasso Sea
EPGSSIMPGKVNPTQCEALSMVCTRIMGLEYAFSMANSNGTLQMNEYKPLIGFNILTSLKLLKNVIENFRIKLVEGMEPNQKRMKLNLKNSLMLVTAIVPKVGYEKAADIANLAFKESLNLKEATIKLGYLNEDEFDEAMN

SEQ ID NO: 150559 - protein, 178 aa, Unknown
  Bacterial polypetide isolated from the Sargasso Sea
MKYRIEKDSLGEIKVPSKALWGAQTQRAVNNFPISGIKMDFPFTKSFVSSLGLIKDAAAKTNLRLKLLSSKKSKAISKAAKEVWQEKHHQEFPIDVFQTGSGTSSNMNANEVIANLASKYAKIDIKPNDDVNMCQSSNDVIPTAIKISAHMDLTKKLYPALDKLIAVMKRKLNLYEGQ

SEQ ID NO: 150560 - protein, 309 aa, Unknown
  Bacterial polypetide isolated from the Sargasso Sea
MVIAGEVDEHFPLDVFQTGSGTSTNMNANEVIANLASKRLGEVVSPNDDLNMSQSSNDTIPTAICISALLDMEELLLPGLDILIKEMDTKAKKLKGTIKTGRTHLMDAMPIDFAQEISGWSAQLKSCKNAIVAANKRMLELPQGGTAIGTGVNSHKNFSKSFCEAVEKISGLKVKSAPNFFQGLSSQDNAAELSSALKNLSLVLMKICNDLRWMNSGPLTGLSDIELEALQPGSSIMPGKVNPVIPEAVSMACADVLGNDLTISVAVQNGNFQLNVMLPVIAYNLLKSINLLGNCMPLLAKKCIKSFQS

SEQ ID NO: 150561 - protein, 104 aa, Unknown
  Bacterial polypetide isolated from the Sargasso Sea
MNNKKRIEFDSIGSKKIDKNKLWGAQTQRSLENFKIGSEKIPVELIIALGQQKKAAAQANIELGVLNRKLGSLIINACNDIINLKLIDEFPLLVWQTGSGTQQI

SEQ ID NO: 150562 - protein, 108 aa, Unknown
  Bacterial polypetide isolated from the Sargasso Sea
MEKSIQLRCEAVTMVCANVIGNHNGITMAGSHGHFELNVFKPLIAHNILQSIDLLADSTKNFALYCVKGIKANKKKIKEHLDNSLMLVTSLAPHIGYDNAAKISKRAL

SEQ ID NO: 150563 - protein, 109 aa, Unknown
  Bacterial polypetide isolated from the Sargasso Sea
MQGQYELNVFKPVIAANFLQSARLLADACISFEEHCVNGIEPNYKRIKELLDNSLMLVTALNTKIGYYKAAEIAQTAHKNGTTLKEEAVRLGYVSSEDFDTWVKPEDMV

SEQ ID NO: 150564 - protein, 284 aa, Unknown
  Bacterial polypetide isolated from the Sargasso Sea
EVIANIATKYAKVEISPNDDVNMSQSSNDVIPTAIKLSAYMDLTKKLFPALDGLIKSINDKADSLKGTIKTGRTHLMDAMPIDFSEELKAWSSQLESSKEMLNVIEKKFLELSQGGTAVGSGINAHKQFAKLFAQEITKLTKNKYKFTPAKNFYHELSAQDCSVQLSGELKNLAVILMKISNDLRWMNSGPLAGISEIELKALQPGSSIMPGKVNPVIPEAVAMASADVIGNDVSITVAAQSGNFQLNVMLPVIAYNLLKSINLLSGSMNALSKNAIKTFKVNH

SEQ ID NO: 150565 - protein, 146 aa, Unknown
  Bacterial polypetide isolated from the Sargasso Sea
MKFRIEKDTLGEVKVPSKALWGAQTQRAVNNFPISGIKMNFPFTKSFVSSLGIIKDAAAKANLKLKLISSKKSKSISKAAKEIWQEKHHHEFPIDVFQTGSGTSSNMNANEVIANLATKYSKILISPNDDVNMSQSSNDVILTAIK

SEQ ID NO: 150566 - protein, 94 aa, Unknown
  Bacterial polypetide isolated from the Sargasso Sea
LQSIQILSDSTRSFAKYCVSGLKADKNRIKYLVDNSLMLVTALSPKIGYDNAAKIAKNALKNKTTLKVEAMKSGLINEKEYNKIVDPNKMIKPD

SEQ ID NO: 150567 - protein, 236 aa, Unknown
  Bacterial polypetide isolated from the Sargasso Sea
AVGTGINTPPEFPPAFAEEVSKLSGESMREAENHFEAQSTVDAPVEMSGQLKTIAVGLLKIVNDLRWMNSGPNAGLGEIQLAALQPGSSIMPGKVNPVIEESTAMVCAQVIGYDSAISVGGLSGNFELNVMLPMVAHSLLESIRLLAAASRNLAQRSVSRIIVREEHIKSLVGRNPILVTTLNPLIGYDLAAKIAKTAFAENRPLLEVAKEMCDLPEDELKKALDPAKMTQGGLVE

SEQ ID NO: 150568 - protein, 300 aa, Unknown
  Bacterial polypetide isolated from the Sargasso Sea
MKYRIEKDSVGEVKVPAKALWGAQTQRAVNNFPISGIKMDFPFTKSFISSLGLIKDAAAKANLRLKLISSKKAKAISKAAKEVWQEKHHHEFPVDVFQTGSGTSSNMNANEVIANLATKYAKVNVSPNDDVNMCQSSNDVIPTAIKISAHMDLTKKLFPSLDELIQTIENKADSVKGVIKTGRTHLMDAMPIDFSEELKAWSSQLQSSKGMLSIIEKKFLELPQGGTAVGSGINAHKQFSKYFAQEMTKLSGNKCIPSKNFYHELSAQDCSVQLSGELKNLAVILSKISNDLRWMNSGPL

SEQ ID NO: 150569 - protein, 330 aa, Unknown
  Bacterial polypetide isolated from the Sargasso Sea
SQSSNDVIPTAIKISAHLDLTNKLLPAIDKLINVIEKKAESLKGIIKTGRTHLMDAMPIDFSEELMAWSSQLNSSKEILNILQKKLLELPQGGTAVGTGINAHKQFAKYFAKELSLLLGKKHKCVPSSNFYHELSSQDTSVQLSGELKNLALVLMKISNDLRWMNSGPLTGISEIELRALQPGSSIMPGKVNPVIPEAVAMASADVIGNDVTISVAAQSGNFQLNVMLPVIAYNLLKSINLLAGASNALSKNTISNFKVNKKNLELSLSKNPILVTALNPIIGYEKAAYIAKKAYKENRSIIDVASEETDLTKAKLLKLLDPSKLAKGGL

SEQ ID NO: 150570 - protein, 230 aa, Unknown
  Bacterial polypetide isolated from the Sargasso Sea
MAKKGYREESDSIGIVYVPRKALYGAQTQRAIDNFPISGIKMDFPFTKSFISSLGVIKDAAARANNKLKLLSNKKARAISKASKEVWRENHHEEFPIDVFQTGSGTSSNMNANEVIANLASVFSGEEVSPNDDVNMSQSSNDVIPTAIKISAHMDLTKKLYPNLENLINAIDKKAVSVRGIIKTGRTHLMDAMPVDLADELSAWSSQLKTSLKALQFIETRLLELPQGGT

SEQ ID NO: 150571 - protein, 297 aa, Unknown
  Bacterial polypetide isolated from the Sargasso Sea
MAEKATEFDGVLKSGRTHLMDATPVRLGQEFSGYATQIRKGIERIRVVAAELEELALGGTATGTGINTHEDFSRHTIAKIALATGISFCEADDHFEAQGAKDAAVNAAGALNTIATSFMKIADDIRWLGSGPTSGLHEIRLPAVQPGSSIMPGKVNPVMSEAMMMVAARVMGNHTTVTVAGSRGNFELNVMMPVLAHALLESVDLLSNIAHAFTDRCLIGIEANQERARELLERNPAIATALNPYIGYDEAAVVAKESARRGVSVRDIVTEKRLLPEEQIDEALDVRSMTEPGLPEG

SEQ ID NO: 150572 - protein, 331 aa, Unknown
  Bacterial polypetide isolated from the Sargasso Sea
HVNMGQSSNDVIPSAINVDAVLTLTNNLIPSMRHLKNSIEEKAKSIGDLPKNGRTHLMDAMPITFSQEMSAWSAQIEDSITQYELSMSKLQQLAIGGTAVGTGINADPDLSKKCCNHINKLTGMEFRPANNSFQAISSQDASLILSSCNKTLAVALTKISNDLRWMNSGPLGGIGEITLPALQPGSSIMPGKVNPVIPESVCMVASRVLGNDLTITHAAQSSNFQLNVMLPLIAHTLSESLSLLSNACLSLADNAIKGFEVNQENIESMLNRNPILATALNATIGYEKGAQIVKKAYQEKRSIIDVAVEMTDLDSDTLAEILDPLKLTRNQ

SEQ ID NO: 150573 - protein, 268 aa, Unknown
  Bacterial polypetide isolated from the Sargasso Sea
MKYRIEKDSLGEVKVPLKALWGAQTQRAVDNFPISGIKMDFPFTKSFVSSLGLIKDAASKTNLRLKLLSSKKSKAISKAAKEVWQEKHHHEFPIDVFQTGSGTSSNMNANEVIANLATKYAKTKISPNDDVNMCQSSNDVIPTAIKISAHMDLTKKLYPALDNLIQEIEKKASTLRGVIKTGRTHLMDAMPIDFAEELLAWSSQLESSKNMLTHLETKLLELPQGGTAIGSGINAHKQFAKYFAKEMTLLLGKKHKCVPSKNFYHELS

SEQ ID NO: 150574 - protein, 257 aa, Unknown
  Bacterial polypetide isolated from the Sargasso Sea
MKYRIEKDSLGEVKVPSKALWGAQTQRAVNNFPISGIKMDFPFTKSFVSSLGLIKDAAAKANLRLKLLSSKKSKAISKAAKEVWQEKHHNEFPIDVFQTGSGTSSNMNANEVIASLATKYAKVKVGPNDDVNMSQSSNDVIPTAIKISAHMDLTKKLFPKLDELIETIDKKAKSVRGTIKTGRTHLMDAMPIDFAEELKAWSSQLQNSKNMLIILEKKFLELPQGGTAVGSGINAHKQFAKYFAQELTKLYGHKYIP

SEQ ID NO: 150575 - protein, 92 aa, Unknown
  Bacterial polypetide isolated from the Sargasso Sea
INIMADSSKGFANYCIRGLRADKKRIKSLLDNSLMLVTALSPKIGYDNAAKIAKKALKNGTTLKEEALKTGLINEKEFLRIVDPKKMIGPGK

SEQ ID NO: 150576 - protein, 89 aa, Unknown
  Bacterial polypetide isolated from the Sargasso Sea
ILSDSTKSFAKYCIAGLKADKNRIKHLLDNSLMLVTALSPKIGYDNAAKIAKNALKNKTTLKAEALKSGLINDREYNKIVDPNKMIKPD

SEQ ID NO: 150577 - protein, 78 aa, Unknown
  Bacterial polypetide isolated from the Sargasso Sea
CILDSGANEAKIAEHLENSLMLVTALNPHIGYDNAAKIAKNAHEKGLTLRQSAIELDLVNEEQFEEWVRPSDMTGPSE

SEQ ID NO: 150578 - protein, 355 aa, Unknown
  Bacterial polypetide isolated from the Sargasso Sea
MNANEVIANLATKKARIKINANDHVNMSQSSNDVIPTAICISALLDTQRLLLPSLEGLIKVIDKKALSLKGQLKTGRTHLMDAMPIDFSQELSGWRAQLKAVEKSIVSASKEMAYLPQGGTAIGTGVNAHKDFGKIFAAEVSKLTKLNVKTSTNYFKSLSAQDSAAQLSSSVKNLSLVLTKISNDLRWMNSGPLTGLGEIELEALQPGSSIMPGKVNPVIPEAVAMACADVIGNDVTVSIGSQSGNFQLNVMLPVIAYNLLKSISLMSNSMPLLANKAIKTFKVNKKNIEESIGMNPILVTALNREIGYERAAYIAKKAYKEKRPIIDVAHEETGLPLKQLKALLNPAKLTKGGV

SEQ ID NO: 150579 - protein, 205 aa, Unknown
  Bacterial polypetide isolated from the Sargasso Sea
MSDKKFRIEKDSMGELNVPADSKWGPQTQRAVDNFQISDYKMPTGFIRSLALLKWGLANANKDLNLLSKEKASAIADSAMEIYQGDHMKEFPVDVFQTGSGTSTNMNMNEVISHLASSESNAIHPNDDINMGQSSNDVIPSAINVDSSLSVKNNLIPSMKHLKNAIDEKAKSIGDIPKNGRTHLMDAMPVTFSQEMSAWSAQIQD

SEQ ID NO: 150580 - protein, 105 aa, Unknown
  Bacterial polypetide isolated from the Sargasso Sea
NVFKPLIIHNVLQSLDILSDATKNFSKYCVKGLKANKKRIKELLDNSLMLVTALSPKIGYDNAAKIAKLAHQNNTTLKTEAVKLKLISEKEFDRIVDPKKLTQPE

SEQ ID NO: 150581 - protein, 174 aa, Unknown
  Bacterial polypetide isolated from the Sargasso Sea
MKFRIEKDSLGKVNVPAKALWGAQTQRAVDNFPISGIKMDFPFTKSFVSSLGLIKDAAAKANLKLKLISSKKSKAISKAAKEVWQEKHHHQFPIDVFQTGSGTSSNMNANEVIANLASKHSKLTISPNDDVNMSQSSNDVIPTAIKVSAHMDLTKKLFPALDGLILAMKKRLIH

SEQ ID NO: 150582 - protein, 73 aa, Unknown
  Bacterial polypetide isolated from the Sargasso Sea
MKADKIKIKEYLDNSLMLVTSLAPHIGYDNAAKIAKKALKNKTTLKDEALRSGLINEKEYNKIVNPKKMIKPL

SEQ ID NO: 150583 - protein, 80 aa, Unknown
  Bacterial polypetide isolated from the Sargasso Sea
MKKNKAFRIEHDSLGEVKVPKKALWGAQTQRAIENFPISGIKFRFPFGRSFIKALGAIKHSAAVANQDLGILTIKKSNAI

SEQ ID NO: 150584 - protein, 174 aa, Unknown
  Bacterial polypetide isolated from the Sargasso Sea
MKYRIEKDTMGEINVPHDALWGAQTQRALENFKISGIKFAFPFGRSFIEALGVIKFAAAASNQKLKLLDSRKAKAIKTASKEVLLGKHDSQFPLDVFQTGSGTSTNMNANEVIANLATKKARIKINANDHVNMSQSSNDVIPTAICISALLDTKRLLLPSLENLIKVIDKKAYL

SEQ ID NO: 150585 - protein, 160 aa, Unknown
  Bacterial polypetide isolated from the Sargasso Sea
MKYRIEKDSLGEIKVPSKALWGAQTQRAVNNFPISGIKMDFPFTKSFVSSLGLIKDAAAKTNLRLKLLSSKKSKAISKAAKEVWQEKHHHEFPIDVFQTGSGTSSNMNANEVIANLATKYAKLDIKPNDDVNMSQSSNDVIPTAIKISAHMDLTKKLYPA

SEQ ID NO: 150586 - protein, 231 aa, Unknown
  Bacterial polypetide isolated from the Sargasso Sea
TAVGTGINAPNNLGADVASELQSSIGIPFKEVENHFTRQGSREEVVHLSSALKALAVSLFKIANDIRWMGSGPVSGLGDLKIPALQPGSSIMPGKVNPVIPEMMMQVSAQVIGNDTTITFSSANGNFELNTMLPVMAHNLLESIALLTTGVSVFGEKLIKDLEANTQKLNEDTQKNSILVTALVPKLGYDVAAEVAKEAMESGLTIKDVLLSKELMSEGDIDDLLDIEKLI

SEQ ID NO: 150587 - protein, 122 aa, Unknown
  Bacterial polypetide isolated from the Sargasso Sea
MKFRIEEDSLGKVRVPRNALWGAQTQRAIDNFPISGISMNFPFTNTFISMLGYVKDAAARANKNLKLLETKKQRVISRAAKEVWTNKHGKEFPIDVFQTGSGTSTNMNANEVIANLCYKTSK

SEQ ID NO: 150588 - protein, 137 aa, Unknown
  Bacterial polypetide isolated from the Sargasso Sea
KVNPTQIEALSMVCLQVMGNNLTTTIAGSQGHFELNTFKPVMIYNIIQSLNLLSDSINSFVEKCLKGLKPNKKNIRENLLNSLMLITALNDFIGYDNAAKIAKKAFKENLTLKEAAIKLKLVDIKKFDEILDPKKMI

SEQ ID NO: 150589 - protein, 118 aa, Unknown
  Bacterial polypetide isolated from the Sargasso Sea
LDLVLLVAPTTPADRMVRIGQRSRGFTYLVSVTGVTGERAQMETRVEGLVEELKQSSAVPVAVGFGISGADQVRQVRSWGADGAIVGSALVKRMAAAGEGQIAEEAGRFCRELRNAAD

SEQ ID NO: 150590 - protein, 48 aa, Unknown
  Bacterial polypetide isolated from the Sargasso Sea
MKDNLPDKDGFFGEYGGKFVPETLMYALNELEHTYKTLKDNNDFNAEF

SEQ ID NO: 150591 - protein, 113 aa, Unknown
  Bacterial polypetide isolated from the Sargasso Sea
VNQNSEGQIEETESISAGLDYPGISPLHCFLKDTKRARYTAASDEEALEAFKLVTKFEKLRPSLEPSHAFSVAIKESKKLSKDTIIVVNSCGDAYKDRSILQERLGKKYVKSN

SEQ ID NO: 150592 - protein, 296 aa, Unknown
  Bacterial polypetide isolated from the Sargasso Sea
AGKKYIVGDTGAGYAGKMLSMAAKKFGLKCKIFMGAKDIKRQRPNVEAMRKNGAEIVPVTSGSQTLVDAVSECMRYWVSNCDTTHMCVGSTVGPNIFIKICAWSTAQISRELIKQVKDEFGKIPDKLKLINCVGGGSSAAGFWNEFMDTKAQFIGVEAGGPKNSKLHAAPLTNGSKIGILHGAAQYVIQDKEGQIGSTESISAGLDYPGISPLHCFLKDTKRARYTSASDEDALNAFQLVSKLENLSPSLEPSHAFAEAIRIAPKLKSSEVIIVNSCGDSLKDKDIIKQKLGSYIR

SEQ ID NO: 150593 - protein, 276 aa, Unknown
  Bacterial polypetide isolated from the Sargasso Sea
MQKSLGLKCKIFMGAKDIKRQKPNCDAMKKNGAEIVPVYSGSQTLVDAVSECMRYWVSNCDNTHMCVGSTVGPNIFVKICGWSTAQISRELKVQLKSEFKKIPKKIKLINCVGGGSSAYGFWSEFIDFNKKQIELIGVEAGGPKKSKLHAAPLSQNAKIGVLHGAASYVCQDNEGQINETESISAGLDYPGVSPIHCFLKDTKRARYTYATDEEALNAHVMVTKFENLNPSLEPSHAFAEAIKIAPKLSKDTIIIVNSCGDAMKDRDILKERLGKN

SEQ ID NO: 150594 - protein, 313 aa, Unknown
  Bacterial polypetide isolated from the Sargasso Sea
PDKLGYWTNKKTGETYGGQYISPLLIPNLKKVETGFKKAMKNKKFLADLEEQLVNHIGIVTPILRSKELEEIAGGEKKIGKIFLKRTDLHHDSSHKPVSAFSSVFFAKHILKAKKIITETGASMNARAVASACAKLNLSCEVHIGALDAEKVSLNKDITELYGADIKVCHDSTKSLLPAMAAALRSWQGDPTAMYVVGSVCGPHPYPLMVRTFASIIGRIAKKQMKDLIGKSPSTVFAVCGGGSNLSAISYPFYNEKSVDIFGIESAGKGIASGAHAATITSKAPIGILLGARTNVLMDADGQVDPSETEASG

SEQ ID NO: 150595 - protein, 299 aa, Unknown
  Bacterial polypetide isolated from the Sargasso Sea
TKQPAGPDDFAPLFPMGLILQEVSTEREIEIPEPVREIYKQWRPSPLYRARRLEKFLDTPAKIYYKYEGVSPTGSHKPNTAVPQAFFNKEEGVKKIFTETGAGQWGSSLAFAGQMFGIDIEVFMVKISFDQKPYRKLMMQSFGAKCNPSPSSLTDFGKKLLEENPDNPGSLGIAISDAIEAVVKSEGKAKYSLGSVLGHVLMHQTINGNEAILQMEQAGDYPDIIVGCTGGGSNLSGLMFPFLGQQLRGGKKIDIIGCEPLSCPSFTKGKYAYDHGDMAKMTPLIKMHTLGSDFLPPAN

SEQ ID NO: 150596 - protein, 229 aa, Unknown
  Bacterial polypetide isolated from the Sargasso Sea
MSDTIKYFLEESKMPKTWYNIAADLPKPMEPPLHPGTLKPIGPDDLAPLFPMALIGQEVSQDREIEIPEPVREIYKKWRPSPLYRARALEKHLDTPAKIYYKYEGVSPSGSHKPNTAVAQAFYNKEEGTKKITTETGAGQWGTSLAFACKLFGIELDVYMVKVSFEQKPYRKLVMQTYGARCVASPSNETDSGKAILAKDPNNTGSLGIAISEAVEMAAKNPDTKYALG

SEQ ID NO: 150597 - protein, 294 aa, Unknown
  Bacterial polypetide isolated from the Sargasso Sea
DTGAGYAGKMLSMAAKKFGLKCKIFMGAKDIKRQQPNVKAMKKNDAEVIPVYSGSQTLVDAVSECMRFWVANCDTTAMCVGSTVGPAIFVRICGWSTSQISRELKVQLVNEFGEVPKKLKLYNCVGGGSSSFGFWNEFMDYNKKQVEFIGVEAGGPSKSKRHAAPLTYGSKIGILHGAAQYVNQNSDGQIEETESISAGLDYPGISPLHCFLKDTKRARYTAASDEEALKAYQIVTKYEDLRPSLEPSHAFSVAIKEAKKLSKDTIVIINSCGDAYKDRGILEKKLGKKYVKSN

SEQ ID NO: 150598 - protein, 315 aa, Unknown
  Bacterial polypetide isolated from the Sargasso Sea
PETLKKPIDDLAKLFAKLRKDKKFLKERDHYFNSYIGAPTPFIKLENLTNYLGGAQIYAKVVSEANGGAHKIYNATVHCLIAKRAGKKFIVGDTGAGYAGKMLSMAAKKFGLKCKIFMGAKDIKRQRPNVEAMKKNGATIVPVKTGSQTLVDAVSECMRYWVSNCDTTHMCVGSTVGPNIFIKICAWSTAQISRELLLQVKEEFGKIPKKIKLLNCVGGGSSAMGFWNEFMDTDAEFIGIEAGGPKNSNLHAAPLSNGSKIGILHGAAQYVVQDKESQIGLTESISAGLDYPGISPLHCFLKDSKRARYTSAGDE

SEQ ID NO: 150599 - protein, 309 aa, Unknown
  Bacterial polypetide isolated from the Sargasso Sea
IYNATVHCLIAKKAGKKYVVGDTGAGYAGKMLSMAAKKFGLKCKIFMGAKDIKRQRPNVEAIRKNGATIVPVTTGSQTLVDAVSECMRYWVSNCDTTHMCVGSTVGPNIFIKICAWSTAQISRELIKQVNEEFGKIPKNLKLINCVGGGSSAAGFWNEFMDTHAEFIGVEAGGPKNSKLHAAPLTNGSKIGILHGAAQYVIQDKEGQIGSTESISAGLDYPGISPLHCFLKDTKRAKYTSASDEDALKAYQLVSKLENISPSLEPSHAFAEAIRIAPKLKSSEVIIVNSCGDSLKDKDIIKHRLGSYTR

SEQ ID NO: 150600 - protein, 256 aa, Unknown
  Bacterial polypetide isolated from the Sargasso Sea
QKPNCDAMKKNGAEIVPVYSGSQTLVDAVSECMRYWVSNCDNTHMCVGSTVGPNIFVKICGWSTAQISRELKVQLKSEFRKIPKKIKLINCVGGGSSAYGFWSEFIDFDKKQIELVGVEAGGPKKSKLHAAPLSRNAKIGVLHGAASYVCQNNEGQINETESISAGLDYPGVSPIHCFLKDTKRARYTFATDEEALNAHVMVTKFENLNPSLEPSHAFAEAIKIAPKLSKDTIIIVNSCGDAKKDRDILKERLGKN

SEQ ID NO: 150601 - protein, 182 aa, Unknown
  Bacterial polypetide isolated from the Sargasso Sea
GLIPKKLKLYNCVGGGSSSYGFWSHFMDLNKKQVEFIGVEAGGPKKSKKHAAPLTYGSRIGVLHGAMQYVNQDKIGQIEETESISAGLDYPGVSPLHCFLKDTKRARYTAASDEDALKAYQIVTKYESLQPSLEPSHAFHVAISESRKLSKDTIVVVNSCGDAYKDSAILKKRLGKKYVKSN

SEQ ID NO: 150602 - protein, 308 aa, Unknown
  Bacterial polypetide isolated from the Sargasso Sea
SPLHPGTKQPAGPDDFAPLFPMSLIMQEVSTEREIEIPEPVREVYKQWRPSPLFRARRLEKFLDTPAKIYYKYEGVSPTGSHKPNTAVPQAFFNKEEGISKIFTETGAGQWGSSLAFAGQIFGIDIEVFMVKVSFDHKPYRKLMMQSFGANCHSSPSTLTDFGNKLLSENPDNPGSLGIAISEAIEATVKSGGKAKYSLGSVLGHVLMHQTINGNEAIMQMEMAGDYPDIIVGCTGGGSNLSGLMFPFLGQQLRGGQKIDIIGCEPASCPSFTKGKYAYDHGDMAKMTPLIKMHTLGSDFLPPANHSG

SEQ ID NO: 150603 - protein, 296 aa, Unknown
  Bacterial polypetide isolated from the Sargasso Sea
PWGKKYIIGDTGAGYAGKMLSMAAKKFGLKCKIFMGAKDIKRQKPNCDAMRKNGAEIIPVYSGSQTLVDAVSECMRYWVSNCNNTHMCVGSTVGPNIFVKICGWSTSQISRELKSQLKKEFKRIPKKIKLINCVGGGSSAYGFWSEFINFNKKQIELIGVEAGGPKKSKLHAAPLSRNAKIGILHGAASYVCQNNEGQIHETESISAGLDYPGVSPIHCFLKDTKRARYTYATDEEALNAFKLVRKYEKLNPSLEPSHAFAEAIKIAPKLSRDTICVVNSCGDAKKDRDILKKRLG

SEQ ID NO: 150604 - protein, 255 aa, Unknown
  Bacterial polypetide isolated from the Sargasso Sea
MSDSIKYFLEENKAPKFWYNINADLPSPPPPPLHPGTKQPAGPDDFAPLFPMGLIMQEVSTEREIEIPKPVREIYKQWRPSPLYRARRLEKFLDTPAKIYYKYEGVSPTGSHKPNTAIPQAFYNKEEGVKKIYTETGAGQWGSSLAFAGQVFGIDIEVFMVKISFDQKPYRKLMMQSFGANCHPSPSSLTDFGKKLLDEDPNNPGSLGIAISDAIEMVVKSGGKAKYSLGSVLGHVLMHQTINGNEAILQMEQAR

SEQ ID NO: 150605 - protein, 217 aa, Unknown
  Bacterial polypetide isolated from the Sargasso Sea
MCVGSTVGPAIFVRICGWSTSQISRELKVQLFDEFGSIPKKLKLYNCVGGGSSSFGFWNEFMDFDKKQVEFIGVEAGGPAKSKKHAAPLTYGSKIGILHGAAQYVNQNDDGQIEETESISAGLDYPGISPLHCFLKDTKRARYTAASDEEALKAYQLVTKFENLRPSLEPSHAFYVAIKESKKLSKDTIVVVNSCGDAYKDREILKKRLGKKYNESN

SEQ ID NO: 150606 - protein, 206 aa, Unknown
  Bacterial polypetide isolated from the Sargasso Sea
MTDSIKYFLPESEMPKSWYNIAADLPQPPPPVLHPGTGQPIGPDDLAPLFPMDLILQEVSTESEIEIPEPVREIYRQWRPSPLYRARRLEKALDTPAKIYYKYEGVSPTGSHKPNTAVAQAFYNKEAGVKRISTETGAGQWGSSLAFAGTIFGIEIDVFMVRVSFDQKPYRKAMMESFGASCIASPSNTTESGKAILAENPDSTGS

SEQ ID NO: 150607 - protein, 298 aa, Unknown
  Bacterial polypetide isolated from the Sargasso Sea
KFLKKRDYYFKNYIGSPTSFVKLENLSNHLGGAQIWAKVVSEANGGAHKIYNATVHALICKAMGKKYIVGDTGAGYAGKMLSMAAKKFGLKCKIFMGTKDIKRQKPNCDAMRKNGAEIVPVYSGSQTLVDAVSECMRYWVSNCDTTHMCVGSTVGPNIFVKICGWSTAQISRELKIQIKQEFKKIPKKIKLINCIGGGSSAYGFWSEFIDFNKSQIELIGVEAGGPKKSKLHAAPLSRNAKIGILHGAASYVCQNSEGQINDTESISAGLDYPGVSPIHCFLKIQNEQNILMQLMKRH

SEQ ID NO: 150608 - protein, 178 aa, Unknown
  Bacterial polypetide isolated from the Sargasso Sea
GKIPKKLKLINCVGGGSSSFGFWNEFMHYDKNQVEFIGVEAGGSNKSKRHAAPLTYGSKIGVLHGAMQYVNQDKMGQIEETESISAGLDYPGVSPLHCFLKDTKRARYTAASDEDSLKAYQLVTKYENLNPSLEPSHAFAEAIKIAPKLSKETIIIVNSCGDAKKDRDIIKEKLGKKI

SEQ ID NO: 150609 - protein, 173 aa, Unknown
  Bacterial polypetide isolated from the Sargasso Sea
KKIKLINCVGGGSSAYGFWSEFIDFDKKQIELIGVEAGGPKKSKLHAAPLSRNAKIGILHGAASYVCQDNEGQINETESISAGLDYPGVSPIHCFLKDTKRARYTYATDEEALNAHVMVTKFENLNPSLEPSHAFAEAIKIAPKLNKDTIIIVNSCGDAQKDRDILKERLGKI

SEQ ID NO: 150610 - protein, 249 aa, Unknown
  Bacterial polypetide isolated from the Sargasso Sea
SLGIAISEAVEVAAQNDDVKYALGSVLNHVLTHQSIIGLEAIKQMEMAGDYPDVVVGCTGGGSNFAGIVFPFIGEMFRGGNKIRVVAVEPAACPSLTRGKYAYDFGDTAHLTPLTKMHTLGSTFVPPGFHAGGLRYHGMAPMISHLQELDVLEATAYHQNACFESGVMFGRTEGILPAPEANHAVKGAIEEALRCKREGKSETILFNLCGHGHFDMQAYTDYFAGNLEDRNYDEQELAMALAGLPSVAA

SEQ ID NO: 150611 - protein, 215 aa, Unknown
  Bacterial polypetide isolated from the Sargasso Sea
MADTIKYFLEESKMPKTWYNINADLPKPMEPPLHPGTLKPIGPDDLAPLFPMALIGQEVSQDREIEIPQPVREIYKQWRPSPLYRARKLEKHLDTPAKIYYKYEGVSPSGSHKPNTAVAQAFYNKEEGTKKITTETGAGQWGTSLAFACKLFGIELDVYMVKVSFEQKPYRKLVMQTYGARCVASPSNETDSGKAILEKDPNNTGSLGIAIQKQS

SEQ ID NO: 150612 - protein, 149 aa, Unknown
  Bacterial polypetide isolated from the Sargasso Sea
EFIGGRGWVGPAKSKKHAAPLTYGSKIGILHGAAQYVNQNSDGQIEETESISAGLDYPGISPLHCFLKDTKRARYTSASDEEALNAFKLVTKFEDLRPSLEPSHAFFVALKEAKKLSKDTVVVINSCGDAYKDRGILKKRLGKKYVKSN

SEQ ID NO: 150613 - protein, 195 aa, Unknown
  Bacterial polypetide isolated from the Sargasso Sea
STAQISRELMVQIKKEFGRVPKKLKLINCVGGGSSAMGFWNEFIDYDKNQVELIGVEAGGPKNSKKHAAPLSYGARVGILHGAIQYVIQDTEGQIEETESISAGLDYPGVSPLHCLLKDSKRARYTTATDEEALEAFKLVSRLEKIRPSLEPAHAFAEAIKIAPILSKDTIVAVDSCGDAKKDMKIIKERLGKNL

SEQ ID NO: 150614 - protein, 230 aa, Unknown
  Bacterial polypetide isolated from the Sargasso Sea
MATRGLVMLGKMLSMAAKKFGLKCKIFMGAKDIKRQKPNCDAMKKNGAEIIPVYSGSQTLVDAVSECMRYWVSNCDNTHMCVGSTVGPNIFVKICGWSTAQISRELKIQLKSEFKKIPKKIKLINCVGGGSSAYGFWSEFIDFNKKQIELIGVEAGGPKKSKLHAAPLSRNAKIGVLHGAASYVCQDNEGQINETESISAGLDYPGVSPIHCFLKDTKRARYTYATDEEA

SEQ ID NO: 150615 - protein, 147 aa, Unknown
  Bacterial polypetide isolated from the Sargasso Sea
KQVELIGVEAGGPKKSKLHAAPLSKGAKLGILHGAASYVCQNKDGQINETESISAGLDYPGVSPIHCFLKDTKRARYTYATDEEALNAFQLVTKFEKLNPSLEPSHAFAKAIAYAPKLSKNTIIIVNSCGDAKKDRDILKKRLRKSK

SEQ ID NO: 150616 - protein, 192 aa, Unknown
  Bacterial polypetide isolated from the Sargasso Sea
SSTIAIENGMTTKLLFEQLKDIRKSVQIPLLIMGYFNPIMQFGVEKFCEKCAEIGIDGLIIPDLPLEIYKSEYQSIFEKYNLKNIFLITPQTSESRIREIDELSDSFIYMVSSAAVTGSQSGFGNEQTEYFKRIHNLKLKNPQIVGFGIKDKETFNQATEYQKGAIIGSNFISFLAKNKINCTAEYIKKIKK

SEQ ID NO: 150617 - protein, 158 aa, Unknown
  Bacterial polypetide isolated from the Sargasso Sea
WFWNEFMHYSKKQFEFIGVEAGGPTKSKRHAAPLTYGSKIGILHGAAQYVNQNNEGQIEETESISAGLDYPGVSPLHCFLKDTRRARYTAATDEEALKAYQLVTKYENLNPSLEPSHAFAEAIKIAPKLNRDTIIIVNSCGDAQKDRDILKKRLGNKR

SEQ ID NO: 150618 - protein, 136 aa, Unknown
  Bacterial polypetide isolated from the Sargasso Sea
GGPKKSKLHAAPLSRNAKIGILHGAASYVCQNNEGQIHETESISAGLDYPGVSPIHCFLKDTKRARYTFATDEEALNAYKLVTKFEKLNPSLEPSHAFAEAIKIAPKLSKETICIVNSCGDAKKDRDILKQRLGKY

SEQ ID NO: 150619 - protein, 182 aa, Unknown
  Bacterial polypetide isolated from the Sargasso Sea
QIKEEFGKIPKKLKLLNCVGGGSSAMGFWNEFMDSHAEFVGIEAGGPKNSSLHAAPLTYGSKVGILHGAAQYVIQDKEGQIGSTESISAGLDYPGISPLHCFLKDAKRARYTSASDEDALKAYQLVSKLENISPSLEPSHAFSEAIRLAPKLKSSEVLIVNSCGDSLKDKDIIKQKLGTYVR

SEQ ID NO: 150620 - protein, 142 aa, Unknown
  Bacterial polypetide isolated from the Sargasso Sea
SHAARFCGGNVGIAQGYKTYFFQDEEGQMRHTHSIAAGLDYIGVSPILSHLHDKKRVQFTATTDEEVISATKHLIRTEGIIPALECSHAFASVIEETPHIPNGSNVLINLSGRGDKDIFNIAEAIGDKKWDEFLRQKALMNQ

SEQ ID NO: 150621 - protein, 208 aa, Unknown
  Bacterial polypetide isolated from the Sargasso Sea
MNIKTVLQENDLPEYYYNILADLKNPLPPVLNPGTKEPVGPDDLSPLFPMELIGQEVSSDRHIVIPEEVRDVYRLYRPTPLYRAKALESELDTPAKIYYKYEGVSPTGSHKPNTAIPQAYYNKKEGIDKITTETGAGQWGSSLAFACSKFGIDLEVFMVKVSFMQKPYRKAMMEAFGARCIASPSNETEIGKKILLEDPNSTGSLGIA

SEQ ID NO: 150622 - protein, 183 aa, Unknown
  Bacterial polypetide isolated from the Sargasso Sea
MKDNKMQITKNKSLSKVDEMFCELKNKKKFALMPFIMAGDPNIEITSEILLKLQENGADLIELGIPYSDPLADGPVIQVAASRALKSGTSLRKVITLLESLKGKLNIPIILFSYLNPLLCFGFERFCEMASDAGVSGLIVPDLPLEEAYKFSKIVSNHSMDLILLVAPTTPFERMKQISNHTK

SEQ ID NO: 150623 - protein, 209 aa, Unknown
  Bacterial polypetide isolated from the Sargasso Sea
VGSTVGPNIFIKICAWSTAQISRELMKQVKEEFGKVPEKLKLINCVGGGSSAAGFWNEFLNTRAQLIGVEAGGPKNSKLHAAPLTNGSKIGILHGAAQYVIQDKEGQIGSTESISAGLDYPGISPLHCFLKDTKRARYTSASDEEALYAYQLVSKLENISPSLEPSHAFAEAIKLAPKLKSSEVIIVNSCGDSLKDKDIIKQKLGSYVR

SEQ ID NO: 150624 - protein, 254 aa, Unknown
  Bacterial polypetide isolated from the Sargasso Sea
INVFSMRSYGAEVVPVNSGSQTLVDAVSECMRWWTSENEEAHMCVGSTVGPTIFVKICAWSTAQISREMKKQVMDEFGEVPKDMKLINCVGGGSSAAGFWNEWIDYDNVELIGVEAGGPEGSSKHAAPLTNDSPIGVLHGATQYVIQDDQGEIEETESISAGLDYPGVSPLHCFLKETGRARYTSASDEEAIEAFQLVSKNEGFVSPSLEPSHAFAEAIKIAPKLSKDTIIVVDSCGDSAKDSKIIAERLGYKI

SEQ ID NO: 150625 - protein, 109 aa, Unknown
  Bacterial polypetide isolated from the Sargasso Sea
YVCQNNEGQINDTESISAGLDYPGVSPIHCFLKDTKRARYTYATDEEALKAHVMVTKFEKLNPSLEPSHAFAEAIKIAPKLSKDTIIIVNSCGDAKKDRDILKERLGKI

SEQ ID NO: 150626 - protein, 171 aa, Unknown
  Bacterial polypetide isolated from the Sargasso Sea
MTDQIKFLLGEEELPRSWYNIIADLPEPPAPVMHPGTGQPVGPDDLAPLFPMASIMQEVSGERTIDIPEPVREIYRQWRPSPLFRARRLEEALDTPARIYYKYEGVSPTGSHKPNTAMAQAFFCKEEGVKRIATETGAGQWGSSLALAGSMFGLEIEVFMVRISYDQKPYR

SEQ ID NO: 150627 - protein, 275 aa, Unknown
  Bacterial polypetide isolated from the Sargasso Sea
LNVKFSWGAKDIARQQPNVKAMKKNGAEVVPVYSGSQTLVDAVSECMRFWVANCDTSAMCVGSTVGPAVFVRICGWSTSQISRELKVQLIDEFGSIPKKLKLYNCVGGGSSSFGFWNEFMDYDKRQCEFIGVEAGGPAKSKKHAAPLTYGSKIGILHGAAQYVNQDSDGQIEETESISAGLDYPGISPLHCFLKDTKRARYTAASDEQALEAYKLVTRFEKLRPSLEPSHAFAVAISESKKLSRDTVVVVNSCGDAYKDQGILEKRLGKKYVKSN

SEQ ID NO: 150628 - protein, 117 aa, Unknown
  Bacterial polypetide isolated from the Sargasso Sea
GILHGAASYVCQNNEGQINDTESISAGLDYPGVSPIHCFLKDTKRARYTYATDEEALKAHVMVTKFEKLNPSLEPSHAFAEAIRIAPKLSKDTIIIVNSCGDAKKDRDILRERLGKN

SEQ ID NO: 150629 - protein, 109 aa, Unknown
  Bacterial polypetide isolated from the Sargasso Sea
DERIKLVADATTGFLYYVSRAGVTGEQTSLSDTLAPMVKKIKEFTNKPVAVGFGISDPQQAQEVARHADAVVVGSAIVRRIAEKGGDPDLASQIGDFVADLMRPLKTSS

SEQ ID NO: 150630 - protein, 138 aa, Unknown
  Bacterial polypetide isolated from the Sargasso Sea
RFAGGSVGIAQGYKTYFFQNTEGQMQHTHSIAAGLDYIGVSPILSHLHDQGRVRFCAADDESVVEATKLLIRREGIIPALECSHGFAGLIAEADQIGDGEIILINLSGRGDKDIFNIAEAMQDEKWQQFIREKASLNL

SEQ ID NO: 150631 - protein, 266 aa, Unknown
  Bacterial polypetide isolated from the Sargasso Sea
KDIKRQQPNVKAMKKNGADVIPVYSGSQTLVDAVSECMRYWVANCDTTAMCVGSTVGPAIFVRICGWSTSQISRELKVQLMNEFGDVPKKLKLYNCVGGGSSSFGFWNEFMDYNKKQVEFIGVEAGGPAKSKKHAAPLTYGSKIGILHGAAQYVNQNNDGQIEETESISAGLDYPGISPLHCFLKDTKRARYTAASDEEALKAYQIVTKFENLRPSLEPSHAFFVAIKEAKKLSKNTIVIINSCGDAYKDRGILEKKLGKKYVKSN

SEQ ID NO: 150632 - protein, 266 aa, Unknown
  Bacterial polypetide isolated from the Sargasso Sea
MGAKDIKRQQPNVRAMKKNGAEVVPVYSGSQTLVDAVSECMRYWVANCDKVAMCVGSTVGPAIFVRICGWSTSQISRELKTQLVEEFGSIPKKLKLYNCVGGGSSSFGFWNEFIDYDKKQCEFIGVEAGGPRNSKKHAAPLTFGSKIGILHGAAQYVNQNTDGQIEETESISAGLDYPGISPLHCFLKDTKRARYTAASDEEALNAYKVVTKFEKLRPSLEPSHAFSVAISESRKLSKDTIVVVNSCGDAYKDREIIKRRLGEKYV

SEQ ID NO: 150633 - protein, 38 aa, Unknown
  Bacterial polypetide isolated from the Sargasso Sea
MNKKKINFNSLKNQPSEDGKFGEYGGMFVAETLMPLIL

SEQ ID NO: 150634 - protein, 196 aa, Unknown
  Bacterial polypetide isolated from the Sargasso Sea
QISRELKLQLINEFGDVPKKLKLYNCVGGGSSSFGFWNEFMDYDKKQVEFIGVEAGGPTKSKRHAAPLTYGSKIGILHGAAQYVNQNRDGQIEETESISAGLDYPGISPLHCFLKDTKRARYTAASDEEALKAYQIVTKYENLRPSLEPSHAFSVAIKEAKRFSKDTIVIINSCGDAYKDRGILEKKLGKKYVKSN

SEQ ID NO: 150635 - protein, 191 aa, Unknown
  Bacterial polypetide isolated from the Sargasso Sea
MADTIKYFLEESKMPKTWYNIAADLPKPMEPPLHPGTLKPIGPDDLAPLFPMALIGQEVSQEREIEIPEPVRQIYKQWRPSPLYRARKLEKHLDTPAKIYYKYEGVSPSGSHKPNTAVPQAFYNKEEGTKKITTETGAGQWGTSLAFACKLFGIELDVYMVKVSFEQKPYRKLVMQTYGARCVASPSNETD

SEQ ID NO: 150636 - protein, 228 aa, Unknown
  Bacterial polypetide isolated from the Sargasso Sea
MHGGTGVANCDKVAMCVGSTVGPAVFVRICGWSTSQISRELKTQLVDEFGTVPKKLKLYNCVGGGSSSFGFWNEFMDYNKKQCEFIGVEAGGPAKSKKHAAPLTYGSKIGILHGAAQYVNQNTDGQIEETESISAGLDYPGISPLHCFLKDTKRARYTAASDEEALNAYKLVTKFEKLRPSLEPSHAFSVAIAESKKFSKDTIVVVNSCGDAYKDRGIIEKRLGKKYV

SEQ ID NO: 150637 - protein, 239 aa, Unknown
  Bacterial polypetide isolated from the Sargasso Sea
LDHTLECLQGLVEGGVDILELGIPFSDPEAEGPSIQAANERALKGGATLKDVLDQVKLFRKINSDTPIVLMGYLNSIIAMPDFEKRAFEAGVDGLIMVNLPPEEGEKIAQPLAAQSIDLIYLLAPTTTKERSKEIVEVASGFLYYVSLKGITGADHFDSVEVTRKVKELKELTDLPICVGFGIKDGETAKKIAPYADGIVVGSAFVNLVAKGGSPSEISARLKEKASELRVAIDSTKVS

SEQ ID NO: 150638 - protein, 121 aa, Unknown
  Bacterial polypetide isolated from the Sargasso Sea
QQGLDLVLLVAPTTPADRMVRIGQRSRGFTYLVSVTGVTGERAQMETRVEGLVQELKQSSAVPVAVGFGISGADQVRQVRSWGADGAIVGSALVKRMAAAGNGQIAEEAGRFCRELRNAAD

SEQ ID NO: 150639 - protein, 169 aa, Unknown
  Bacterial polypetide isolated from the Sargasso Sea
EVIKLCGWWKFSYGFWNEFMDTDAEFIGIEAGGPKNSKLHAAPLTNGSKIGILHGAAQYVIQDNEGQIGSTESISAGLDYPGISPLHCFLKDSKRARYTSASDEEALYAYKLVSKLENISPSLEPSHAFAEAIKLAPKLKSSDVIVVNSCGDSIKDKDIIKSKLGSYKR

SEQ ID NO: 150640 - protein, 44 aa, Unknown
  Bacterial polypetide isolated from the Sargasso Sea
ALRDRVTNVNDTFYIIGAAAGHHPYPSMVRDFQSVIGKEVREQL

SEQ ID NO: 150641 - protein, 67 aa, Unknown
  Bacterial polypetide isolated from the Sargasso Sea
KYSALPVVVGFGISSPEPVGAVGRVADGVVVGSALVNCISENLDDPGSLPAAIGARAGSLVAGLGPG

SEQ ID NO: 150642 - protein, 274 aa, Unknown
  Bacterial polypetide isolated from the Sargasso Sea
STEREIEIPEPVREIYKQWRPSPLYRARRLEKHLDTPAKIYYKYEGVSPTGSHKPNTAVPQAFFNKEEGVRKIFTETGAGQWGSSLAFAGQMFGIDIEVFMVKVSFDQKPYRKLMMQSFGGTCHPSPSNITDFGKKLLSEDPNNPGSLGIAISEAIEAVVKSEGKAKYALGSVLGHVLMHQTINGNEAILQMEQAGDYPDIIVGCTGGGSNLAGLMFPFLGQQLRGGQKIDIIGCEPLSCPSFTKGKYAYDHGDMARMTPLIKMHTLGSDFLPP

SEQ ID NO: 150643 - protein, 249 aa, Unknown
  Bacterial polypetide isolated from the Sargasso Sea
SLGIAISEAVEVAATNDDVKYSLGSVLNHVLMHQTIVGLETLQQMEMAGDYPDVVVGCTGGGSNFAGLMFPFLGEQLRGGANVRVVAVEPAACPSLTRGKYAYDFGDTGNMTPLTKMHTLGSTFVPPGFHAGGLRYHGMAPLISHLKELDLLEAYAFHQNACFEAGVTFGREEGIIPAPEANHAVKGALEEALRCKREGKSETILFNLCGHGHFDMQAYTEYFSGNLEDLNYDEQELAMALSGLPSVTD

SEQ ID NO: 150644 - protein, 257 aa, Unknown
  Bacterial polypetide isolated from the Sargasso Sea
RQKPNCDAMKKNGAEIVPVYTGSQTLVDAVSECMRYWVSNCDTTHMCVGSTVGPNIFVKICGWSTSQISRELLVQIKKEFGRIPKKIKLLNCVGGGSSSFGFWNEFMHYNKKQVEFIGIEAGGPKKSKRHAAPLTYGSKIGILHGAAQYVNQDFEGQIEETESISAGLDYPGVSPIHCFLKDTKRARYTAATDEEALSAYKLVTKYENLNPSLEPSHAFAEAIKLAPQLSKNTVIIVNSCGDAHKDRDILKQRLGKF

SEQ ID NO: 150645 - protein, 272 aa, Unknown
  Bacterial polypetide isolated from the Sargasso Sea
MESFGASCIASPSKTTESGKAILAENPDSTGSLGIAISEAVEVAAQNDDVKYALGSVLNHVLTHQSIIGLEAIKQMEMAGDYPDVVVGCTGGGSNFAGIVFPFIGEMFRGGSKIRVVAVEPAACPSLTRGKYAYDFGDTAHLTPLTKMHTLGSTFVPPGFHAGGLRYHGMAPMISHLRELDVLEATAYHQNACFESGVMFGRTEGILPAPEANHAVKGAIEEALRCKREGKSETILFNLCGHGHFDMQAYTDYFAGNLKDRNYDEQELAMAL

SEQ ID NO: 150646 - protein, 228 aa, Unknown
  Bacterial polypetide isolated from the Sargasso Sea
VSECMRYWVSNCDTTHMCVGSTVGPNIFVKICGWSTAQISRELKMQIKQEFKKIPKKIKLINCVGGGSSAYGFWSEFIDFNKSQVELVGVEAGGPKKSKLHAAPLSRNAKIGILHGAASYVCQNNEGQINETESISAGLDYPGVSPIHCFLKDTKRARYTYAFDEEALKAHVMVTKFEKLNPSLEPSHAFAEAIKIAPKLSKDTIIIVNSCGDAKKDRDILKDRLGKY

SEQ ID NO: 150647 - protein, 94 aa, Unknown
  Bacterial polypetide isolated from the Sargasso Sea
SAGLDYPGIGPEHSFLFEEKRVTYMSATDKEALEAFQYCCKLEGIIPALEPAHALAVLKKIAKNYSKDKIIVMNMCGRGDKDIFTIADELNINI

SEQ ID NO: 150648 - protein, 275 aa, Unknown
  Bacterial polypetide isolated from the Sargasso Sea
KFGLKCKIFMGAKDIKRQKPNCDAMRKNGAEIVPVYSGSQTLVDAVSECMRYWVSNCDNTHMCVGSTVGPNIFVKICGWSTAQISKELKTQLKKRFDKIPKKIKLINCVGGGSSAYGFWSEFIDYDKKQIELIGVEAGGPKKSKLHAAPLSKNAKIGILHGAASYVCQNNEGQIHETESISAGLDYPGVSPIHCFLKDTKRARYTYATDEAALNAYKMVTKFEKLNPSLEPCHAFAEAIRIAPKLNKDTILIVNSCGDAKKDKDILKARLKNNNE

SEQ ID NO: 150649 - protein, 281 aa, Unknown
  Bacterial polypetide isolated from the Sargasso Sea
KMLSMAAKKFGLKCKIFMGAKDIKRQKPNCDAMRKNGAEIVPVYSGSQTLVDAVSECMRYWVSNCDTTHMCVGSTVGPNIFVKICGWSTAQISRELKIQIKEKFKKIPNKIKLINCVGGGSSAYGFWSEFIDFNKSQIELIGVEAGGPTKSKLHAAPLSRNAKIGILHGAASYVCQNNDGQINDTESISAGLDYPGVSPIHCFLKDTKRARYTYATDEEALKAHVMVTKLEKLNPSLEPSHAFAEAIKIAPKLSKDTIIIVNSCGDAKKDRDILRERLGKN

SEQ ID NO: 150650 - protein, 145 aa, Unknown
  Bacterial polypetide isolated from the Sargasso Sea
MEGFLRSRRDAGSKLLVAYITGGFEGWEAAVETAAAAGADAIEIGIPFSDPVMDGPVIQEASQRALEGGATPASVLATVPNLDTGVPHAVMTYYNLAHHPGHDRFAATLASSGIDAAILPDLPFVESGPWRHAAANVGIETIMLA

SEQ ID NO: 150651 - protein, 141 aa, Unknown
  Bacterial polypetide isolated from the Sargasso Sea
VGVEAGGPKKSKLHAAPLSRNAKIGILHGAASYVCQNNEGQINDTESISAGLDYPGVSPIHCFLKDTKRARYTYATDEEALKAHAMVTKFEKLNPSLEPSHAFAEAIKIAPKLSKDTIIIVNSCGDAKKDRDILRERLGKN

SEQ ID NO: 150652 - protein, 244 aa, Unknown
  Bacterial polypetide isolated from the Sargasso Sea
EANGGAHKIYNATVHALLCRAMGKKYIVGDTGAGYAGKMLSMAAKKFGLKCKIFMGAKDIKRQKPNCDAMKKNGAEIVPVYSGSQTLVDAVSECMRYWVSNCDNTHMCVGSTVGPNIFVKICGWSTAQISRELKIQLKSEFKKIPKKIKLINCVGGGSSAYGFWSEFIDYDKKQIELIGVEAGGPKKSKLHAAPLSRNAKIGILHGAASYVCQDNEGQINETESISAGLDYPGVSPIHCFLKDT

SEQ ID NO: 150653 - protein, 126 aa, Unknown
  Bacterial polypetide isolated from the Sargasso Sea
SAGIDPIFLLAPTSTDERIAEVGKIASGYVYYVSLKGVTGAANLDVSSIASKIPAIKSHVPLPVGVGFGIRDAQTARLVAEVSDAVVIGSRIVQLLEQAAPEAAAETLTRFVAEVREAIDSVATAR

SEQ ID NO: 150654 - protein, 138 aa, Unknown
  Bacterial polypetide isolated from the Sargasso Sea
AGGPKKSKRHAAPLTYGSKIGILHGAAQYVNQNTEGQIEETESISAGLDYPGVSPLHCFLKDTKRARYAAATDEEALDAYQLVTKYENLNPSLEPSHAFAEAIKIAPKLSKDTIIIVNSCGDAQKDRDILKQRLGNKK

SEQ ID NO: 150655 - protein, 322 aa, Unknown
  Bacterial polypetide isolated from the Sargasso Sea
FGFWGSKFGGSFIPETLKKPIEDLTLNFQKLRKNRKFLKTRDYYFKNYIGSPTRFLKLENLSNHLGGAQIWAKVVSDANGGAHKIYNATVHALICKSMGKKFIVGDTGAGYAGKMLSMAAKKFGLKCKIFMGIKDMKRQKPNCDAMRKNGAEIVPVYSGSQTLVDAVSECMRYWVSNCNTTHMCVGSTVGPNIFVKICGWSTSQISRELKIQIKKKFKKIPKKLKLINCVGGGSSAYGFWSEFIDYPKSQIELIGVEAGGPKNSALHAAPLSRGAKLGILHGAASYVCQNNEGQIKKTESISAGLDYPGVSPIHCFLKMQEG

SEQ ID NO: 150656 - protein, 261 aa, Unknown
  Bacterial polypetide isolated from the Sargasso Sea
LSNHLGGAQIWAKVVSEANGGAHKIYNATVHALICKAMGKKYIVGDTGAGYAGKMLSMAAKKFGLKCKIFMGAKDIKRQKPNCDAMKKNGAEIVPVYSGSQTLVDAVSECMRYWVSNCDTTHMCVGSTVGPNIFVKICGWSTAQISRELKTQIKKEFKKIPKKIKLINCVGGGSSAYGFWSEFIDFNKSQIELVGVEAGGPKKSKLHAAPLSRNAKIGILHGAASYVCQNNEGQINDTESISAGLDYPGVSPIHCFLKDTK

SEQ ID NO: 150657 - protein, 127 aa, Unknown
  Bacterial polypetide isolated from the Sargasso Sea
AAPLSRGAKIGVLHGAAQYVCQNNDGQINETESISAGLDYPGVSPMHCFLKETKRAKYTYATDEEALSAYKLVTKLEKLNPSLEPSHAFAEAIKIAPKLKKDTIIVVNSCGDAKKDRDILKKRLGKI

SEQ ID NO: 150658 - protein, 78 aa, Unknown
  Bacterial polypetide isolated from the Sargasso Sea
MSKLEKNIDTSTIDTFSCMPDENGHFGLYGGRFVAETLMGPLEELEEAYKKYINDPEFNAEFVSRLKHYVGRPFSLYH

SEQ ID NO: 150659 - protein, 305 aa, Unknown
  Bacterial polypetide isolated from the Sargasso Sea
KLENLTGYLNGAQIWAKVVSEANGGAHKIYNATVHSLIAKKAGKKYIVGDTGAGYAGKMLSMAAKKFGLKCKIFMGAKDIKRQKPNCDAMKKNGAEIIPVYTGSQTLVDAVSECMRYWVSNCDTTHMCVGSTVGPNIFVKICGWSTSQISRELLIQIKEEFGEIPKKLKLINCVGGGSSSFGFWNEFMHYDKKQIEFIGVEAAGPKKSKRHAAPLTYGSKIGILHGSAQYVNQNTEGQIEETESISAGLDYPGVSALHCFLKDTKRARYTAASDEEALNAYQVVTKFENLNPKFRTQVMLLLKQL

SEQ ID NO: 150660 - protein, 128 aa, Unknown
  Bacterial polypetide isolated from the Sargasso Sea
APLTYGSKIGILHGAAQYVNQNTDGQIEETESISAGLDYPGISPLHCFLKDTKRARYTAASDEEALNAYKLVTKFEKLRPSLEPSHAFSVAIAESKKLSKDTIVVVNSCGDAYKDKGILEKRLGKKYV

SEQ ID NO: 150661 - protein, 157 aa, Unknown
  Bacterial polypetide isolated from the Sargasso Sea
FMDYDKKQVEFIGVEAGGPAKSKRHAAPLTYGSKIGILHGAAQYVNQDSDGQIEETESISAGLDYPGISPLHCFLKDTKRARYTAASDEEALKAFQIVTKYENLRPSLEPSHAFSVALKESKKFSKDTIVIINSCGDAYKDRGILEQKLGKKYVKSN

SEQ ID NO: 150662 - protein, 198 aa, Unknown
  Bacterial polypetide isolated from the Sargasso Sea
MTDSIKYILEESKAPKYWYNINSDLPSPPPPPLHPGTKQPAGPDDFAPLFPMGLIMQEVSTEREIEIPEPVREIYKQWRPSPLFRARRLEKYLDTPAKIYYKYEGVSPTGSHKPNTAVPQAFFNKEEGVKKIFTETGAGQWGSSLAFAGQMFGIDIEVFMVKVSFEQKPYRKLMMQSFGGTCHPSPSELTDFGKNFYL

SEQ ID NO: 150663 - protein, 303 aa, Unknown
  Bacterial polypetide isolated from the Sargasso Sea
KLRNDETFIAERDYYFKNFVGAPTPFIKLENLTKHLGGAQIYCKLVSKATGGAHKAYNAVVHSLICKRLGKTYIGGDTGAGYAGKMLSMAAAKFNLKCKIFMGAKDIERQSINVFSMRSYGAEVVPVNSGSQTLVDAVSECMRWWTSENEEAHMCVGSTVGPTIFVKICAWSTAQISREMKKQVMDEFGEVPKDMKLINCVGGGSSAAGFWNEWIDYDNVELIGVEAGGPEGSSKHAAPLTNDAPIGVLHGATQYVIQDDQGEIEETDSISAGLDYPGVSPIHCFLKETGRARYTSASDEEAI

SEQ ID NO: 150664 - protein, 319 aa, Unknown
  Bacterial polypetide isolated from the Sargasso Sea
SKATGGAHKAYNAVVHSLICKRLGKTYIGGDTGAGYAGKMLSMAAAKFNLKCKIFMGAKDVERQSINVFSMRSYGAEVVPVNSGSQTLVDAVSECMRWWTSENEEAHMCVGSTVGPTIFVKICAWSTAQISREMKKQVMDEFGEVPKNMKLINCVGGGSSAAGFWNEWIDYDNIELIGVEAGGPEGSSKHAAPLTNDSPIGVLHGATQYVIQDDQGEIEETESISAGLDYPGVSPIHCFLKETGRARYTSASDEEAIEAFQLVSKNEGFVSPSLEPSHAFAEAIKIAPKLSNDTIIVVDSCGDSAKDSKIIAERLGYKI

SEQ ID NO: 150665 - protein, 206 aa, Unknown
  Bacterial polypetide isolated from the Sargasso Sea
MLSMAAKKFGLKCKIFMGAKDIKRQQPNVKAMKKNGADVIPVYSGSQTLVDAVSECMRYWVSNCDTTAMCVGSTVGPAIFVRICGWSTSQISRELKIQLINEFGEVPKKLKLYNCVGGGSSSFGFWNEFMDYDKKQVEFIGVEAGGPAKSKKHAAPLTYGSKIGILHGAAQYVNQNSDGQIEETESISAGLDYPGISPLHCFLKDT

SEQ ID NO: 150666 - protein, 152 aa, Unknown
  Bacterial polypetide isolated from the Sargasso Sea
MHYDKKQVEFIGVEAGGPKKSKRHAAPLTYGSKIGVLHGAMQYVNQDKMGQIEETESISAGLDYPGVSPLHCFLKDTNRARYTAASDEEALKAYQLVTKYENLNPSLEPSHAFAEAIKIAHKLSKDTIIIVNSCGDAKKDKDIIKEKLGKKI

SEQ ID NO: 150667 - protein, 286 aa, Unknown
  Bacterial polypetide isolated from the Sargasso Sea
MGGAQIWAKVVSEANGGAHKIYNATVHALICKAMGKKYIVGDTGAGYAGKMLSMAAKKFGLKCKIFMGAKDIKRQKPNCDAMRKNGAEIVPVYSGSQTLVDAVSECMRYWVSNCDTTHMCVGSTVGPNIFVKICGWSTAQISRELKNQIKQKFKKIPNKIKLINCVGGGSSAYGFWSEFIDFHKSQIELIGVEAGGPKKSKLHAAPLSRNAKIGILHGAASYVCQNSEGQINDTESISAGLDYPGVSPIHCFLKDTKRARYTYATDEEALKAHVMVTKFEKLNSKF

SEQ ID NO: 150668 - protein, 127 aa, Unknown
  Bacterial polypetide isolated from the Sargasso Sea
MGSKIGILHGAAQYVNQNSDGQIEETESISAGLDYPGISPLHCFLKDTKRARYTAASDEQALKAYQIVTKYENLRPSLEPSHAFSVAIKEAKKLSKNTIVIINSCGDAYKDRGILEKKLGKKYVKSN

SEQ ID NO: 150669 - protein, 248 aa, Unknown
  Bacterial polypetide isolated from the Sargasso Sea
EPVREIYKQWRPSPLYRARRLEKFLDTPAKIYYKYEGVSPTGSHKPNTAVPQAFFNKEEGVKKIFTETGAGQWGSSLAFAGQMFGIDIEVFMVKISFDQKPYRKLMMQSFGAKCNPSPSSLTDFGKKLLEENPDNPGSLGIAISDAIEAVVKSEGKAKYSLGSVLGHVLMHQTINGNEAILQMEQAGDYPDIIVGCTGGGSNLSGLMFPFLGQQLRGGKKIDIIGCEPLSCPSFTKANMHMIMVIWQK

SEQ ID NO: 150670 - protein, 75 aa, Unknown
  Bacterial polypetide isolated from the Sargasso Sea
KRISYMYATDNEAIEAFQYCCKHEGIIPALEPSHALAVLIKIAKNYSKDKVVVMNMCGRGDKDIFTVAEELKIKI

SEQ ID NO: 150671 - protein, 191 aa, Unknown
  Bacterial polypetide isolated from the Sargasso Sea
LKVQLIDEFGSIPKKLKLYNCVGGGSSSFGFWNEFMDYDKKQCEFIGVEAGGPTKSKKHAAPLTYGSKIGILHGAIQYVNQNSDGQIEETESISAGLDYPGISPLHCFLKDTKRARYTAASDEEALNAYKLVTKYEKLRPSLEPSHAFSVAIKESKKFSKDTIVVVNSCGDAYKDRSILEKRLGKKYVKSN

SEQ ID NO: 150672 - protein, 272 aa, Unknown
  Bacterial polypetide isolated from the Sargasso Sea
VGAPTPFIKLDNLTNFLGGAEIWAKIVSENPGTAHKIYNVLVHCLIAKRAGKKTVCTDTGAGMNGKNLAMVAKKFHLKCKIFMGSIDIQRQQENVIVMKEYGAEVIPVNTGSRTLVDAVSECIRYFVANNDTTHLVIGSAVGPAIWARICAWSAAQISRELMSQIEDEFGKVPKKLKLLNCVGGGSSALGFWNEFIDYNKNQVELIGVEAGGSKKSKKHAAPLTNGSKIGILHGSAQYVIQNKDGQIEETESISAGLDYPRSFTYSLLFKRY

SEQ ID NO: 150673 - protein, 252 aa, Unknown
  Bacterial polypetide isolated from the Sargasso Sea
KNGAEVVPVYSGSQTLVDAVSECMRYWVANCDHAHMAVGSTVGPSIFVRICGWSTSQISRELKSQILDEFGSMPKKIKLYNCVGGGSSSFGFWNEFMDYDKKQIEFIGVEAGGPAKSKKHAAPLTYGSKIGILHGAAQYVNQNSDGQIEETESISAGLDYPGVSPLHCFLKDVKRARYTAASDEDALKAYKLVTKYENLKPSLEPSHAFSIAIKEARKLSKETIVIVNSCGDAHKDKAILEKRLGKKYAKFN

SEQ ID NO: 150674 - protein, 224 aa, Unknown
  Bacterial polypetide isolated from the Sargasso Sea
MSDTVKYILPESELPKSWYNITADLPESPPPVLHPGTGEPVGPDDLAPLFPMDLILQEVSSERYIDIPEPVREIYRQWRPSPLYRARRLEKALDTPAKIYYKYEGVSPTGSHKPNTAVAQAFYNKESGVKKISTETGAGQWGSSLAFAGSIFGLEIEVYMVKVSFQQKPYRKAMMESFGATCIASPSDRTEFGKAYLAKNPDSTGSLGIAISEAVEVAATNDDV

SEQ ID NO: 150675 - protein, 138 aa, Unknown
  Bacterial polypetide isolated from the Sargasso Sea
GGPKNSKLHAAPLTNGSKIGILHGAAQYVIQDHEGQIGSTESISAGLDYPGISPLHCFLKDAKRARYTSATDEEALKAYKLVSSLENISPSLEPSHSFAEAIKMAPKLKSSDVIIVNSCGDSLKDKDIIKQKLGSYIR

SEQ ID NO: 150676 - protein, 267 aa, Unknown
  Bacterial polypetide isolated from the Sargasso Sea
NNLTKYLGGAQIWCKDVSAINGDAHKAYHATVNALICKESGKKFIAGDTGAGMFGKNLALAAKEMKLSAKIFMGTKDISRQAPNVKFMREAGAEVVPVDSGSKTLVDAVSECMRHYVSNCDTTHLAVGSAIGANIFLKICAWSTSQISRELKRQLIREFGEIPKLKLINVIGGGSSALGFWNEFIDYDKKHVELIGVEAKYAAPLATNAKVAILHGAAQYCLVDKEGQIAETHSLSAGLDYPGSSPLHGLLKDTKRARYTLASDKEA

SEQ ID NO: 150677 - protein, 195 aa, Unknown
  Bacterial polypetide isolated from the Sargasso Sea
MTDTIKYFLEESKMPKTWYNIAADLPKPMEPPLHPGTLKPIGPDDLAPLFPMALIGQEVSQEREIEIPEPVRQIYKQWRPSPLYRARKLEKHLDTPAKIYYKYEGVSPSGSHKPNTAVPQAFYNKEEGTKKITTETGAGQWGTSLAFACKLFGIELDVYMVKVSFEQKPYRKLVMQTYGARCVASPSNETDSEKL

SEQ ID NO: 150678 - protein, 257 aa, Unknown
  Bacterial polypetide isolated from the Sargasso Sea
RQKPNCDAMKKNGAEIVPVYSGSQTLVDAVSECMRYWVSNCDNTHMCVGSTVGPNIFVKICGWSTSQISKELKIQLKEKFKKIPKKIKLINCVGGGSSAYGFWSEFIDYDKKQIELVGVEAGGPKKSKLHAAPLSRNAKIGILHGAASYVCQNNEGQIHETESISAGLDYPGVSPIHCFLKDTKRARYTFATDEEALNAYKLVTKYEKLNPSLEPSHAFAEAIKIAPRLSNDTICIVNSCGDAKKDKDILKKRLGKY

SEQ ID NO: 150679 - protein, 302 aa, Unknown
  Bacterial polypetide isolated from the Sargasso Sea
MGRKLMATDTGAGFNGKLMALACKHFGISLKVFMGTHDVERQSENVKAIKALGATIVPVDTGSKTLVDAVSECNRYWMANCSSTHMAIGSTVGANIFTKICAWSTAQISRELIVQIKDEFGEIPKKLKLLNCVGGGSSAIGMWNSFMDYPKSQVEFLGIEAGGPRNSPLHAAPLSKGGKLGILHGAMQYVLMDSEANIMPTASISAGLDYPGVSSLHCFLKDCGRARYTNVDDESCLEAHKLLTELEPDVRPSLEPLHAFAECIRIAPKLNSETVIVINACGDVAKDINIIRKRLGNKYAQI

SEQ ID NO: 150680 - protein, 213 aa, Unknown
  Bacterial polypetide isolated from the Sargasso Sea
ARKEEGTRYALGSVLNHVLMHQSIIGLEALKQMEMAEDYPDIIVGCTGGGSNFTGLFSPFAKNNMESDKKTIIRAVEPQACPSLTKGIYTYDFGDSVGMAPVVKMHTLGSSFVPDPIHAGGLRYHGMAPLVSAMYEDNLIEAEAIGQRECFEAGQLFAKTEGIVPAPEATHAIASAIRAVKDADLRSEQVAVLTAMCGHGHFDMKAYENFLSG

SEQ ID NO: 150681 - protein, 196 aa, Unknown
  Bacterial polypetide isolated from the Sargasso Sea
MTDSIKYLLEESKAPKFWYNINSDLPSPPPPPLHPGTKQPAGPDDFAPLFPMSLIMQEVSTEREIEIPEPVREVYKQWRPSPLYRARRLEKFLDTPAKIYYKYEGVSPTGSHKPNTAVPQAFFNKEEGISKIFTETGAGQWGSSLAFAGQIFGIDIEVFMVKVSFDHKPYRKLMMQSFGANCHPSPSSLTDFGNKL

SEQ ID NO: 150682 - protein, 204 aa, Unknown
  Bacterial polypetide isolated from the Sargasso Sea
LSNSVTLTQIFEVVSRFRRKDKDTPVVLMGYANPIERMGYEKFARTAYDAGVDAVLTVDLPIEEIDFSSKIFAKVGLESILLVAPTSSEERIHRITTKAEGFIYSVALTGVTGDKNLDFNQVKNQVMSIRRFSNLPVVVGFGIKDADIAKSISSVSDGVVIGSAIVDCLANKTFAPSIAIDNVKTLVSTIRDGMDGVAYDLQVD

SEQ ID NO: 150683 - protein, 267 aa, Unknown
  Bacterial polypetide isolated from the Sargasso Sea
CKIFMGSKDIKRQRPNVEAMKKNGAEIVPVTTGSQTLVDAVSECMRYWVANCDTTHMCVGSTVGPNIFVKICAWSTAQISRELMIQVKEEFGKVPKKMKLLNCVGGGSSAMGFWNEFMDTDAQFIGIEAGGPKNSKLHAAPLTNGSKIGILHGSAQYVIQDNEGQIGRTESISAGLDYPGISSLHCFLKDSKRAKYTSASDEEALNAYKLVSKFENISPSLEPSHAFAEAIKLAPKLKSSDVIIVNSCGDSLKDKDIIKQKLGSYTR

SEQ ID NO: 150684 - protein, 205 aa, Unknown
  Bacterial polypetide isolated from the Sargasso Sea
SNIFVKICGWSTAQISRELKKQIKIQFKKIPKKIKLINCVGGGSSAYGFWSEFIDFPKSQIELIGVEAGGPKNSKLHAAPLSIGAKLGVLHGAASYVCQNNEGQINETESISAGLDYPGVSPIHCFLKDTKRARYTYATDEDALNAYKLVTKFEKLNPSLEPSHAFAEAIRIAPRLNKDTVIIVNSCGDAKKDRDILKKRLGKRI

SEQ ID NO: 150685 - protein, 120 aa, Unknown
  Bacterial polypetide isolated from the Sargasso Sea
MVFFMGAAQYVIQDKEGQIGSTDSISAGLDYPGISPLHCFLKDTKRARYTSASDEEALKAYRLVSKLENISPSLEPSHAFAEAIKLAPKLKSSEIIIVNSCGDSLKDKDIIKQKLGSYIR

SEQ ID NO: 150686 - protein, 260 aa, Unknown
  Bacterial polypetide isolated from the Sargasso Sea
DIKRQKPNCDAMRKNGAEIVPVYSGSQTLVDAVSECMRYWVSNCDTTHMCVGSTVGPNIFVKICGWSTAQISRELKIQIKQEFKKVPKKIKLINCVGGGSSAYGFWSEFIDFNKSQIELVGVEAGGPKKSKLHAAPLSRNAKIGILHGAASYVCQNDEGQINDTESISAGLDYPGVSPIHCFLKDTKRARYTYATDEEALKAHVMVTKFEKLNPSLEPSHAFAEAIKIAPKLSKDTIIIVNSCGDAKKDRDILRERLGKN

SEQ ID NO: 150687 - protein, 133 aa, Unknown
  Bacterial polypetide isolated from the Sargasso Sea
KSKRHAAPLTYGSKIGVLHGAMQYVNQDKIGQIEETESISAGLDYPGVSPLHCFLKDAKRARYTAASDEEALKAYQLVTKYENLNPSLEPSHAFAEAIKIAPKLGKSTIIIVNSCGDAKKDRDIIKEKLGVKI

SEQ ID NO: 150688 - protein, 253 aa, Unknown
  Bacterial polypetide isolated from the Sargasso Sea
KKNGAQVIPVFTGSQTLVDAVSECMRYWVSNCDTTAMCVGSTVGPNIFVKICGWSTSQISRELKSQLKEEFGNVPKKLKLYNCVGGGSSSYGFWSEFMDYSNSQVEFIGVEAGGPKKNNKHAAPLTYGSKIGILHGAAQYVNQNSQGQIEDTQSISAGLDYPGVSPLHCFLKDIKRARYTAASDEDALNAFKIVTKFENLRPSLEPSHAFHVAIKEAKKLSKETIVVVNSCGDAHKDEKILKSKLGSKYDKPN

SEQ ID NO: 150689 - protein, 255 aa, Unknown
  Bacterial polypetide isolated from the Sargasso Sea
AMKENGADVIPVYSGSQTLIDAVSECMRYWVANCDTTAMCVGSTVGPAIFVRICGWSTSQISRELKVQLINEFGEVPKKLKLYNCVGGGSSSFGFWNEFMDYDKKQVEFIGVEAGGPAKSKKHAAPLTYGSKIGILHGAAQYVNQNRDGQIEETESISAGLDYPGISPLHCFLKDAKRARYTAASDEEALKAYQIVTKYENLRPSLEPSHAFSVAIKEAKKLSKNTIVIINSCGDAYKDRGILEKKLGKKYVKSN

SEQ ID NO: 150690 - protein, 315 aa, Unknown
  Bacterial polypetide isolated from the Sargasso Sea
NKIYKLENLTKNLEGAQIGQKFVSDANGGAHKIYNATVHCLIAKKAGKKFIVGDTGAGYAGKMLSMAAKKFGLRCKIFMGAKDIKRQKPNCDAMKKNGAEIVPVYSGSQTLVDAVSECMRYWVSNCDTTHMCVGSTVGPNIFVKICGWSTAQISKELKLQLKEKFKKIPKKIKLINCVGGGSSAYGFWSEFIDYKKSQIELIGVEAGGPKKSKLHAAPLSKGASLGILHGAASYVCQTKEGQINETESISAGLDYPGVSPMHCFLKDSKRARYTFASDEEALSAYQLVTKYEKLNPSLEPCHAFAEAIKIAPKTK

SEQ ID NO: 150691 - protein, 175 aa, Unknown
  Bacterial polypetide isolated from the Sargasso Sea
IPKKVKLLNCVGGGSSSFGFWNEFMHYNKKQVEFIGIEAGGPKKSKRHAAPLTYGSKIGILHGASQYVNQDFEGQIEETESISAGLDYPGVSPIHCFLKDTKRARYTAATDEEALNAYKLVTKYENLNPSLEPSHAFAEAIKLAPKLSKDTVIIVNSCGDAHKDRDILRERLGKI

SEQ ID NO: 150692 - protein, 26 aa, Unknown
  Bacterial polypetide isolated from the Sargasso Sea
MKDNLPDKDGFFGEYGGKFVPETLMY

SEQ ID NO: 150693 - protein, 164 aa, Unknown
  Bacterial polypetide isolated from the Sargasso Sea
GGGSSAYGFWSEFIDFDKKQIELIGVEAGGPKKSKLHAAPLSRNAKIGILHGAASYVCQNNEGQINDTESISAGLDYPGVSPMHCFLKDTKRARYTFATDEEALSAHVMVTKFEKLNPSLEPSHAFAEAIKLAPKLSKETIIIVNSCGDAKKDRDILKERLGKN

SEQ ID NO: 150694 - protein, 285 aa, Unknown
  Bacterial polypetide isolated from the Sargasso Sea
MLSMAAKKFGLKCKIFMGAKDIKRQQPNVKAMKKNGADVIPVYSGSQTLVDAVSECMRYWVANCDTTAMCVGSTVGPAIFVRICGWSTSQISRELKVQLVDEFGDVPKKLKLYNCVGGGSSSFGFWNEFMDYDKKQVEFIGVEAGGPAKSKRHAAPLTYGSKIGILHGAAQYVNQNSDGQIEETESISAGLDYPGISPLHCFLKDTKRARYTAASDEEALKAYQIVTKYENLRPSLEPSHAFSVAIKEAKKLSKNTIVVINSCGDAYKDRDILEKKLGKKYVKSN

SEQ ID NO: 150695 - protein, 240 aa, Unknown
  Bacterial polypetide isolated from the Sargasso Sea
MTDSIKYLLEESKAPKSWYNINSDLPSPPPPPLHPGTKQPAGPDDFAPLFPMGLIMQEVSTEREIEIPEPVREIYKQWRPSPLYRARRLEKFLDTPAKIYYKYEGVSPTGSHKPNTAVPQAFFNKEEGVKKIFTETGAGQWGSSLAFAGQMFGIDIEVFMVKVSFDQKPYRKLMMQSFGGTCHPSPSDLTDFGKKLLSEDPNNPGSLGIAISEAIEAVVKSEGKAKYALWELFRTCTFTP

SEQ ID NO: 150696 - protein, 101 aa, Unknown
  Bacterial polypetide isolated from the Sargasso Sea
GQIEETESISAGLDYPGVSPLHCFLKDTKRARYVAASDEEALNAYKIVTKYENLNPSLEPSHAFAEAIKIAPKLSKDTIIIVNSCGDAQKDKDILKQRLGI

SEQ ID NO: 150697 - protein, 190 aa, Unknown
  Bacterial polypetide isolated from the Sargasso Sea
MSDRIKKTFETKGKKLVTFTTGGDPDFNTSLEILKTIINNGIDIIEIGMPFSDPMADGPSIQESSVRSIANGTKINDIFEIVINIRKLNNEIPIILMGYYNSIFNLGIDNFTAKCAETGVDGLIIVDLQPEEDSELYTKSKEKNIDLIRLITPTTDQKRLITILNNSSGFLYYVTITGITGQNSANIEGL

SEQ ID NO: 150698 - protein, 214 aa, Unknown
  Bacterial polypetide isolated from the Sargasso Sea
MLKKFGLKCKIFMGAKDIQRQKPNCEAMKKNGAEIVPVYSGSQTLVDAVSECMRYWVSNCDNTHMCVGSTVGPNIFVKICGWSTAQISRELKNQLIKEFKKIPKMIKLINCVGGGSSAYGFWSEFIDYDKKQIELIGVEAGGPKNSKLHAAPLSRNAKIGILHGAASYVCQNNEGQIHETESISAGLDYPGVSPIHCFLKDTKRARYTFATDEE

SEQ ID NO: 150699 - protein, 182 aa, Unknown
  Bacterial polypetide isolated from the Sargasso Sea
LKKEFKKIPNKIKLINCVGGGSSAYGFWSEFIDYDKKKIELIGVEAGGPKKSKLHAAPLSRKTKIGILHGAASYVCQNKEGQINETESISAGLDYPGVSPMHCFLKDTKRARYTYATDEEALDAHQMVTKYENLNPSLEPSHAFAEAIKIAPKLSKDTIIIVNSCGDAKKDRDILKERLGKK

SEQ ID NO: 150700 - protein, 230 aa, Unknown
  Bacterial polypetide isolated from the Sargasso Sea
CMRYWVANCDTTAMCVGSTVGPAIFVRICGWSTSQISRELKLQLINEFGTVPKKLKLYNCVGGGSSSFGFWNEFMDYDKKQVEFIGVEAGGPSKSQKHAAPLTYGSKIGILHGAAQYVNQNSDGQIEETESISAGLDYPGISPLHCFLKDTKRARYTAASDEEALKAYQIVTKYEDLRPSLEPSHAFSVAIKEAKKLSKDTIVVINSCGDAYKDKKILEKKLGKKYVKSN

SEQ ID NO: 150701 - protein, 302 aa, Unknown
  Bacterial polypetide isolated from the Sargasso Sea
FKNWIGVPTRFIKFENLTNHIGGAQIWSKVVSDANGGAHKIYNATVHCLLAKKSGKKFVIGDTGAGYAGKMLSMAAKKFGLKCKIFMGAKDIQRQQPNVKAMKKNGAEVVPVYSGSQTLVDAVSECMRYWVANCDHAHMAVGSTVGPAIFVRICGWSTSQISRELKSQIIDEFGSMPKKIKLYNCVGGGSSSFGFWNEFMDYDKKQVEFVGVEAGGPAKSKKHAAPLTYGSKIGILHGAAQYVNQNSDGQIEETESISAGLDYPGVSPIHCFLKDVKRARYTAASDEDALEAYKLVTKYENL

SEQ ID NO: 150702 - protein, 266 aa, Unknown
  Bacterial polypetide isolated from the Sargasso Sea
MTGIERIQSRFTDNESLCKKAIAPFVTAGDPDLSTTAELLQVMDKAGATLIELGVPYSDPIADGGVIQASYVRALERGMTLDNLFEMIRNVSAKISTPVLAMVSYSIIFRRGINTFVNEAVEAGLAGFVVPDLPIEESGELADASEANGLALVRLVTPTTPPERAEIIARQSTGFLYCVSIAGVTGARHTLPEGLIERVKWLRTKTDVPILVGFGISSPDQAKAIASVADGVIIGSAIVKHLIGAADASQEALMTSVGHYVKDLVT

SEQ ID NO: 150703 - protein, 216 aa, Unknown
  Bacterial polypetide isolated from the Sargasso Sea
MSDTVKYILPESEIPKSWYNITADLPEPPPPVLHPGTGEPVGPDDLAPLFPMDLILQEVSSERYIDIPEPVREIYRQWRPSPLYRARRLEKALDTPAKIYYKYEGVSPTGSHKPNTAVAQAFYNKEAGVKKISTETGAGQWGSSLAFAGYIFGLEIEVYMVKVSFQQKPYRKAMMESFGATCIASPSDRTEFGKAYLAKNPDSTGSLGIAISEAVE

SEQ ID NO: 150704 - protein, 102 aa, Unknown
  Bacterial polypetide isolated from the Sargasso Sea
DKINETESISAGLDYPGVSPIHCFLKDSKRARYTYASDEDALNAHVMVTKYENLNPSLEPSHAFAEAIKIAPKLGKDNIIIVNSCGDAKKDRDILSERLGKR

SEQ ID NO: 150705 - protein, 299 aa, Unknown
  Bacterial polypetide isolated from the Sargasso Sea
EANGGAHKIYNATVHALICKAMGKKFIVGDTGAGYAGKMLSMAAKKFGLKCKIFMGAKDIKRQKPNCDAMKKNGAEIVPVYSGSQTLVDAVSECMRYWVSNCDNTHMCVGSTVGPNIFVKICGWSTAQISRELKIQMKKEFKKIPKKIKLINCVGGGSSAYGFWSEFIDYDKKHIELIGVEAGGPKKSKLHAAPLSRNAKIGILHGAASYVCQNDEGQIQDTESISAGLDYPGVSPIHCFLKDTKRARYTYATDEAALNAYKMITKFEKLNPSLEPSHAFAEAIRIAPKLSKDTILIVN

SEQ ID NO: 150706 - protein, 156 aa, Unknown
  Bacterial polypetide isolated from the Sargasso Sea
MDYDKKQVEFIGVEAGGPAKSKRHAAPLTYGSKIGILHGAAQYVNQNSDGQIEETESISAGLDYPGISPLHCFLKDTKRARYTAASDEEALKAYQIVTKYENLRPSLEPSHAFYVAIKEAKKLSKNTIVIINSCGDAYKDRGILEKKLGKKYVKSN

SEQ ID NO: 150707 - protein, 291 aa, Unknown
  Bacterial polypetide isolated from the Sargasso Sea
GSSLAFAGSIFGLEIEVYMVKVSFQQKPYRKAMMESFGATCIASPSDRTEFGKAYLAKNPDSTGSLGIAISEAVEVAATNDDVKYSLGSVLNHVLMHQTIVGVEALKQMEMAGDYPDVVVGCTGGGSNFAGMMFPFLGEQLRGGANVRVVAVEPAACPSLTRGKYAYDFGDTGNMTPLAKMHTLGSKFVPPGFHAGGLRYHGMAPLISHLKELDLLEAYAFHQNECFEAGVTFGREEGILPAPEANHAVKGAVEEALRCKREGKSETILFNLCGHGHFDMQAYTEYFSGNL

SEQ ID NO: 150708 - protein, 97 aa, Unknown
  Bacterial polypetide isolated from the Sargasso Sea
LSHLHDEKRVRFTATADDEVISATKHLIRTEGIIPALECSHAFASVIEEAPHIPDGSHVLINLSGRGDKDIFNIAEAIGDKKWEEFLRQKASLNQRK

SEQ ID NO: 150709 - protein, 260 aa, Unknown
  Bacterial polypetide isolated from the Sargasso Sea
AKDIKRQRPNVEAMRKNGAEIVPVTTGSQTLVDAVSECMRYWVSNCDTTAMCVGSTVGPNIFIKICAWSTAQISRELILQVKEEFGRIPNKLKLINCVGGGSSAAGFWNEFMNTDAEFIGVEAGGPKNSKLHAAPLTNGSKIGILHGAAQYVIQDKEGQIGSTESISAGLDYPGISPLHCFLKDTKRARYTSASDEDALKAYQLVSKLENISPSLEPSHAFAEAIRIAPKLISSEVIIVNSCGDSLIDKDIIKQKLGSYI

SEQ ID NO: 150710 - protein, 60 aa, Unknown
  Bacterial polypetide isolated from the Sargasso Sea
MTTNKHNWPDKDGFFGEYGGKFVPETLMHALEELEKTYKNFKDKPEFKEQFYKDLSEFVG

SEQ ID NO: 150711 - protein, 263 aa, Unknown
  Bacterial polypetide isolated from the Sargasso Sea
MGAKDIKRQKPNCDAMRKNGAEIVPVYTGSQTLVDAVSECMRYWVSNCDTTHMCVGSTVGPNIFVKICGWSTSQISRELHLQIKNEFGKIPKKIKLINCVGGGSSSFGFWNEFMHYNKKQFEFIGIEAGGPKNSKKHAAPLTYGSKIGILHGAAQYVNQNSEGQIEETESISAGLDYPGVSPLHCFLKDTKRARYSAATDEEALKAYQLVTKYENLNPSLEPSHAFAEAIKIAPKLGKDTIIIVNSCGDAQKDRDILKKRLGK

SEQ ID NO: 150712 - protein, 210 aa, Unknown
  Bacterial polypetide isolated from the Sargasso Sea
GVSPTGSHKPNTAVAQAFYNKEAGVKRISTETGAGQWGSSLAFAGTIFGIEIDVFMVRVSFDQKPYRKAMMESFGASCIASPSNTTESGKAILAENPDSTGSLGIAISEAVEVAAQNDDVKYALGSVLNHVLTHQSIIGLESIKQMEMAGDYPDVVVGCTGGGSNFAGIVFPFIGEMFRGGSKIRVVAVEPAACPSLTRGKYSYDFGDTA

SEQ ID NO: 150713 - protein, 287 aa, Unknown
  Bacterial polypetide isolated from the Sargasso Sea
HSLICKRLGKTYIGGDTGAGYAGKMLSMAAAKFNLKCKIFMGAKDVERQSINVFSMRSYGAEVVPVNSGSQTLVDAVSECMRWWTSENEEAHMCVGSTVGPTIFVKICAWSTAQISREMKKQVIDEFGEVPKNMKLINCVGGGSSAAGFWNEWIDYDNVELIGVEAGGPEGSSKHAAPLTNDSPIGVLHGATQYVIQDDQGEIEETESISAGLDYPGVSPLHCFLKETGRARYTSASDEEAIEAFQLVSKNEGFVSPSLEPSHAFAEAIKIAPKLSNDTIIVVDSCG

SEQ ID NO: 150714 - protein, 251 aa, Unknown
  Bacterial polypetide isolated from the Sargasso Sea
GDTGAGYAGKMLSMAAKKFGLKCKIFMGAKDIKRQKPNCDAMRKNGAEIVPVYTGSQTLVDAVSECMRYWVSNCDTTHMCVGSTVGPNIFVKICGWSTSQISRELSEQMKKEFGRIPKKVKLLNCVGGGSSSFGFWNEFMHYNKKQVEFIGIEAGGPKKSKRHAAPLTYGSKIGILHGAAQYVNQDFEGQIEETESISAGLDYPGVSPLHCFLKDAKRARYTAATDEEALNAYKLVTKNENLSPSLEPSHA

SEQ ID NO: 150715 - protein, 272 aa, Unknown
  Bacterial polypetide isolated from the Sargasso Sea
FGLKCKIFMGAKDIKRQKPNCDAIRKNGAEIVPVTTGSQTLVDAVSECMRYWVSNCDTTHMCVGSTVGPNIFVKICGWSTAQISRELKNQLFLEFNKIPKKIKLINCVGGGSSAYGFWSEFIDFPKSQIELIGVEAGGPQNSKLHAAPLSRGAKIGILHGAASYVCQNKEGQINETESISAGLDYPGVSPIHCFLKDTKRAKYTFATDEEALDAYKLVTKFEKLNPSLEPSHAFAEAIKIAPKLRKDNIIIVNSCGDAKKDRDILKQRLPIK

SEQ ID NO: 150716 - protein, 178 aa, Unknown
  Bacterial polypetide isolated from the Sargasso Sea
NSGKIPKKIKLINCVGGGSSAMGFWNEFIDTDAEFYGVEAGGPKNSKLHAAPLSNGSKIGILHGAAQYVVQDKEGQIGSTESISAGLDYPGISPLHCFLKDTKRAIYTSVNDEEALNAYRLVSKLENISPSLEPSHAFAEAIKLAPKLKQSDVIVVNSCGDSLKDKDIIKSRLGYYIR

SEQ ID NO: 150717 - protein, 56 aa, Unknown
  Bacterial polypetide isolated from the Sargasso Sea
FCKKCNEIGIDGLIIPDLPIDYYEANYKSIFEENRLYNMFLIAPQTLHQRIQKIDS

SEQ ID NO: 150718 - protein, 211 aa, Unknown
  Bacterial polypetide isolated from the Sargasso Sea
AVGSTVGPNIFVKICGWSTAQISRELKVQIKKEFKRIPKKIKLINCVGGGSSAYGFWSEFIDFNKKQIELIGVEAGGPKNSKLHAAPLSRNAKIGVLHGAAAYVCQNYEGQINETESISAGLDYPGVSPIHCFLKDTKRARYTYATDEEALNAHVMVTKYENLNPSLEPSHAFAEAIKIAPKLSKDTIIIVNSCGDAKKDRDILKERLGKN

SEQ ID NO: 150719 - protein, 238 aa, Unknown
  Bacterial polypetide isolated from the Sargasso Sea
EMAAQDDNTKYSLGSVLNHVLMHQTIVGNEAIMQMEMADDYPDILVGCTGGGSNFSGLVFPFLGKKFREKKDVRVIACEPKSCPTLTKGKFAYDFGDTGMRTPLVKMHTLGSQFMPPSTHSGGLRYHGMAPMVSHLTDIGAIEPKAFGQKECFEAGVKFANAEGIVPAPEATHAVKGAIDAALECKKNGEKKTILFNLCGHGHFDMQAYGDYFNNKLSDDKYNEADANKALEKLPKIA

SEQ ID NO: 150720 - protein, 84 aa, Unknown
  Bacterial polypetide isolated from the Sargasso Sea
EHSNLKDSGRAMYIAVDDDEVLSSFHLATKLEGIMPALETAHAFAALEHIAKNYKSSQHIVINVSGRGDKDINTVATMDGISLD

SEQ ID NO: 150721 - protein, 237 aa, Unknown
  Bacterial polypetide isolated from the Sargasso Sea
MTETIKYLLEESKAPKFWYNINADLPSPPPPPLHPGTKQPAGPDDFAPLFPMGLILQEVSTEREIEIPEPVREIYKQWRPSPLYRARRLEKFLDTPAKIYYKYEGVSPTGSHKPNTAVPQAFFNKEEGVKKIFTETGAGQWGSSLAFAGQMFGIDIEVFMVKISFDQKPYRKLMMQSFGAKCNSSPSSLTDFGKKLLEENPDNPGSLGIAISDAIESVVKSEGKAKYSLGSVLGHVL

SEQ ID NO: 150722 - protein, 287 aa, Unknown
  Bacterial polypetide isolated from the Sargasso Sea
NSDLPSPPPPPLHPGTKQPAGPDDFAPLFPMGLIMQEVSTEREIEIPEPVREIYKQWRPSPLFRARRLEKYLDTPAKIYYKYEGVSPTGSHKPNTAVPQAFFNKEEGVKKIFTETGAGQWGSSLAFAGQMFGIDIEVFMVKVSFDQKPYRKLMMQSFGGTCHPSPSNITDFGKKLLSEDPNNPGSLGIAISEAIEAVVKSEGKAKYALGSVLGHVLMHQTINGNEAILQMEQAGDYPDIIVGCTGGGSNLAGLMFPFLGQQLRGGQKIDIIGCEPVSCPSFTKGKYA

SEQ ID NO: 150723 - protein, 246 aa, Unknown
  Bacterial polypetide isolated from the Sargasso Sea
MILNFLEILILSIVQGISEFIPVSSSAHLIIFSNVINFSNKSLIFDVGLHLGSLLAIIYYFKKELLNISNDKKLFNLLIIGSIPLILVGYIFYSTGIINSFRNLKVIAWTTLIFGILMYFADTFKIKKNIEKDLTIKNILIIGILQVLAIIPGVSRAGVTITAGRFLNFDRYDSTKISFYLSIPALMGASVLYLKDAVNENLEFNLFLIFSIILSFIFSYLTIKYFLIYTKKFSLKFFVIYRIILS

SEQ ID NO: 150724 - protein, 205 aa, Unknown
  Bacterial polypetide isolated from the Sargasso Sea
GPNIFVKICGWSTTQISRELKVQLKSEFKKIPKKIKLINCVGGGSSAYGFWSEFIDFDKKQIELVGVEAGGPKKSKLHAAPLSRNAKIGVLHGASSYVCQNNEGQINETESISAGLDYPGVSPIHCFLKDTKRARYTYATDEEALNAHVMVTKFENLNPSLEPSHAFAEAIKIAPKLSKDTIIIVNSCGDAKKDRDILRERLGKN

SEQ ID NO: 150725 - protein, 240 aa, Unknown
  Bacterial polypetide isolated from the Sargasso Sea
VEVAATNDDVKYSLGSVLNHVLMHQTIVGVEALKQMEMAGDYPDVIIGCTGGGSNFAGLMFPFLGEQLRGGSNIRVIAIEPAACPSLTRGKYAYDFGDTGNMTPLTKMHTLGSTFVPPGFHAGGLRYHGMAPLISHLKELNILEAYAFHQNSCFEAGVTFGREEGIIPAPEANHAVKGAIEEALRCKREGKSETILFNLCGHGHFDMQAYTEYFSGNLEDRNYDEQELAMALSGLPSVAA

SEQ ID NO: 150726 - protein, 120 aa, Unknown
  Bacterial polypetide isolated from the Sargasso Sea
LHGAAQYVNQNSDGQIEETESISAGLDYPGISPLHCFLKDTKRARYTAASDEDALNAYKLVTKFEKLRPSLEPSHAFSVAIKEAKKLSKDTIVVVNSCGDAYKDKGILEKKLGKKYVKPN

SEQ ID NO: 150727 - protein, 286 aa, Unknown
  Bacterial polypetide isolated from the Sargasso Sea
KKFIIGDTGAGYAGKMLSMAAKKFGLKCKIFMGAKDIARQQPNVRAIKKNGAEIIPVYSGSQTLVDAVSECMRYWVANCDTTAMCVGSTVGPAIFVRICGWSTSQISRELKFQLIDEFGSIPKKLKLYNCVGGGSSSFGFWNEFMDYDKKQIEFIGVEAGGPAKSKKHAAPLTYGSKIGILHGAAQYVNQNNDGQIEETESISAGLDYPGISPLHCFLKDTKRARYTAASDEEALKAYQIVTRYENLRPSLEPSHAFFIAIKESKKLSKDTIVIINSCGDAYKDRG

SEQ ID NO: 150728 - protein, 305 aa, Unknown
  Bacterial polypetide isolated from the Sargasso Sea
ATVHCLIAKRAGKKYIVGDTGAGYAGKMLSMAAKKFGLKCKIFMGAKDIKRQRPNVEAMKKNGAKIIPVTTGSQTLVDAVSECMRYWVSNCDTTHMCVGSTVGPNIFIKICAWSTAQISRELIKQVKDEFGKIPNKLKLLNCVGGGSSALGFWNEFIDTNAELVGIEAGGPRKSNLHAAPLTNGSKIGILHGAAQYVVQNKEGQISATESISAGLDYPGISPLHCFLKDTKRARYTSATDEEALRAYRIVSNLENISPSLEPSHAFAEAIRIAPKLNSSNVIIVNSCGDSIKDKDIIKDKLGEYI

SEQ ID NO: 150729 - protein, 104 aa, Unknown
  Bacterial polypetide isolated from the Sargasso Sea
GQIEETESISAGLDYPGISPLHCFLKDTKRARYTAASDEEALSAFKLVTKLEKLRPSLEPSHAFSVAIAESKKLSKDTIVVVNSCGDAYKDRGIIERRLGKKYV

SEQ ID NO: 150730 - protein, 219 aa, Unknown
  Bacterial polypetide isolated from the Sargasso Sea
VSNCDTSHMCVGSTVGPNIFIKICAWSTAQISRELIKQVKEEFGKIPNKLKLINCVGGGSSAAGFWNQFMDTNAEFIGVEAGGPKNSKLHAAPLSNGSKIGILHGAAQYVIQDKEGQIGSTESISAGLDYPGISPLHCFLKDAKRAKYTSASDEQALKAYQLVSKLENISPSLEPSHAFAEAIKLAPKLKSSEVIVVNSCGDSLKDKDIIKEKLGSYIR

SEQ ID NO: 150731 - protein, 203 aa, Unknown
  Bacterial polypetide isolated from the Sargasso Sea
MSDSIKYLLEENKAPKFWYNINADLPSPPPPPLHPGTKQPAGPDDFAPLFPMSLIMQEVSTEREIEIPEPVREVYKQWRPSPLFRARRLEKFLDTPAKIYYKYEGVSPTGSHKPNTAVPQAFFNKEEGISKIFTETGAGQWGSSLAFAGQIFGIDIEVFMVKVSFDHKPYRKLMMQSFGANCHASPSNLTDFGNKLLSENPNN

SEQ ID NO: 150732 - protein, 95 aa, Unknown
  Bacterial polypetide isolated from the Sargasso Sea
KKQCEFIGVEAGGPTKSNKHAAPLTYGSKIGILHGAAQYVNQDLDGQIEETESISAGLDYPGISPLHGFLKDTKRARNTAASDEEALSAFKTVTK

SEQ ID NO: 150733 - protein, 229 aa, Unknown
  Bacterial polypetide isolated from the Sargasso Sea
MRYWVANCDTTAMCVGSTVGPAIFVRICGWSTSQISRELKVQLINEFGDVPKKLKLYNCVGGGSSSFGFWNEFMDYNKKQVEFIGVEAGGPNKSKRHAAPLTYSSKIGILHGAAQYVNQNRDGQIEETESISAGLDYPGVSPLHCFLKDTKRARYTAASDEEALKAYQIVTKYENLRPSLEPSHAFSVAIKEAKRFSKNTIVIINSCGDAYKDRGILEKKLGKKYVKSN

SEQ ID NO: 150734 - protein, 285 aa, Unknown
  Bacterial polypetide isolated from the Sargasso Sea
PYRKLVMQTYGARCVQSPSNETDSGKAILAKDPSNTGSLGIAISEAVEMAAKNPDTKYALGSVLNHVLMHQTIVGNEALLQMEMADDYPDILVGCTGGGSNFSGLANPFLGKNFTEGKKTRVIACEPKSCPTLTEGKYVYDFGDTGKLTPLVKMHTLGSQFIPPATHSGGLRYHGMAPLVSHLKEINALEAKAYGQKECFEAGVNFARTEGIVPAPEATHAVKGAIDAALECKKNGESKTILFNLCGHGHFDMKAYGDYFDGNLAEDNFDKGSMDKALEDLPKIA

SEQ ID NO: 150735 - protein, 253 aa, Unknown
  Bacterial polypetide isolated from the Sargasso Sea
VRAMKKNAAEIIPVYTGSQTLVDAVSECMRYWVSNCDTTHMCVGSTVGPNIFVKICGWSTSQISRELSIQIKKEFRNMPKKIKLINCVGGGSSSFGFWNEFMDYDKKKVEFIGVEAGGPKKSKRHAAPLTYGSKIGVLHGAMQYVNQDNMGQIEETESISAGLDYPGVSPLHCFLKDVKRARYTSASDEEALKAYQLVTKYENLNPSLEPSHAFAEAIKIAPKNSKDTIIIVNSCGDAKKDKDILRRRLGISI

SEQ ID NO: 150736 - protein, 295 aa, Unknown
  Bacterial polypetide isolated from the Sargasso Sea
KYIIGDTGAGYAGKMLSMAAKKFGLKCKIFMGAKDIKRQKPNCDAMKKNGAEIVPVYTGSQTLVDAVSECMRYWVSNCDTAHMCVGSTVGPNIFVKICGWSTSQISRELSIQIKEEFGKIPKKLKLYNCVGGGSSSFGFWNEFMHYNKKQIEFIGVEAGGPKNSKKHAAPLTYGSKIGILHGAAQYVNQDTEGQIEETESISAGLDYPGVSPLHCFLKDTKRARYTAASDEEALKAYKLVTKYENLNPSLEPCHAFAEAIKVAPKLSKDTIIIVNSCGDALKDRDILKARLGKFK

SEQ ID NO: 150737 - protein, 188 aa, Unknown
  Bacterial polypetide isolated from the Sargasso Sea
MIRKITLEENEIPDKWYNIIADMPNKPLPPLNPGTLEPIGPEALAPLFPMELIKQEVSPEKWIDIPDEVRNIYSMWRPTPLFRAYNFEKALDTPAKIYYKYEGVSPTGSHKPNTAVAQAYYNKQEGVKKITTETGAGQWGSALSFACQHFGIDCEVFMVKLSYEHKPYRKVMMNTWGAKVHPSPSNAT

SEQ ID NO: 150738 - protein, 244 aa, Unknown
  Bacterial polypetide isolated from the Sargasso Sea
RIFRKSTLVDAVSECMRFWVANCDTTAMCVGSTVGPAIFVRICGWSTSQISRELKVQLINEFGDVPKKLKLYNCVGGGSSSFGFWNEFMDYDKKQVEFIGVEAGGPAESKKHAAPLTYGSKIGILHGAAQYVNQNSDGQIEETESISAGLDYPGISPLHCFLKETKRARYTAASDEEALKAYQIVTKFENLRPSLEPSHAFSVAIKEAKKLSKDTVVIINSCGDAYKDRGILEKKLGKKYVKSN

SEQ ID NO: 150739 - protein, 196 aa, Unknown
  Bacterial polypetide isolated from the Sargasso Sea
GWSTAQISRELKMQIKQEFKKIPNKIKLINCVGGGSSAYGFWSEFIDYNKSQIELIGVEAGGPQKSKLHAAPLSRNAKIGILHGAASYVCQNNEGQINDTESISAGLDYPGVSPIHCYLKDTKRARYTFATDEDALNAHVMITKFEKLNPSLEPSHAFAEAIKIAPKLGKDTIIIVNSCGDAKKDRDILKERLGKN

SEQ ID NO: 150740 - protein, 112 aa, Unknown
  Bacterial polypetide isolated from the Sargasso Sea
TQQTDEKRLNTILSNASGFLYYVTITGITGQNSADIDNLKKSINSIKSFTKLPVVAGFGIKNKQDVEQISTFTDGVVVGSSIVNIIKQNLDDKNKMINEIDIFTNGLKEGVR

SEQ ID NO: 150741 - protein, 168 aa, Unknown
  Bacterial polypetide isolated from the Sargasso Sea
GGSSSFGFWNEFMDYDKKQIEFIGVEAGGPAKSKRHAAPLTYGSKIGILHGAAQYVNQNDDGQIEETESISAGLDYPGISPLHCFLKDTKRARYTAASDEEALRAYQIVTKYENLRPSLEPSHAFSVAIKEAKKLSKDTVIVINSCGDAYKDKKILERKLGKKYVKSN

SEQ ID NO: 150742 - protein, 269 aa, Unknown
  Bacterial polypetide isolated from the Sargasso Sea
MGAKDIKRQQPNVKAMKKNGAEVVPVYSGSKTLVDAVSECMRFWVANCDTTAMCVGSTVGPAIFVRICGWSTSQISRELKVQLINEFGEVPKKLKLYNCVGGGSSSFGFWNEFMDYNKKQVEFIGVEAGGPRKSKRHAAPLTYGSKIGILHGAAQYVNQNSDGQIEETESISAGLDYPGISPLHCFLKDTKRARYTAASDEEALKAYQLVTKYENLRPSLEPSHAFSVAIKEAKKLSKNTIVIVNSCGDAYKDRGILEKKLGKRYVKSN

SEQ ID NO: 150743 - protein, 201 aa, Unknown
  Bacterial polypetide isolated from the Sargasso Sea
MSDSIKYLLEENKAPKFWYNINADLPSPPPPPLHPGTKQPAGPDDFAPLFPMSLIMQEVSTEREIEIPEPVREVYKQWRPSPLFRARRLEKFLDTPAKIYYKYEGVSPTGSHKPNTAVPQAFFNKEEGISKIFTETGAGQWGSSLAFAGQIFGIDIEVFMVKVSFDHKPYRKLMMQSFGANCHASPSNLTDFGNKLLSENP

SEQ ID NO: 150744 - protein, 213 aa, Unknown
  Bacterial polypetide isolated from the Sargasso Sea
MNRIRNLFKKDKDKLIVFLTAGYPEINSTEKLVLTAVESGADMIEIGIPFSDPQADGPIIQKASEKALSNGITLDIIFQQVKSIRKKTNIPISLMGYYNPILKRGIDRFLADCVVNEIDGIILPDLPYDEGKEFCNKAKQLGISPILLVAPNTSNKRIEEISNLSNDLIYAVSILGITGNDLSSKKELIKYLNRVKANSSCPFIVGFGIKTND

SEQ ID NO: 150745 - protein, 110 aa, Unknown
  Bacterial polypetide isolated from the Sargasso Sea
SIVLCRDEVGQIQMTHSVSAGLDYAAVGPEHAWLRDQGRVEYTYATDDQALEAFFRLSKLEGIIPALESSHAVAEVIVRAPQMSKDQIIICNLSGRGDKDVQQVAEKVEM

SEQ ID NO: 150746 - protein, 200 aa, Unknown
  Bacterial polypetide isolated from the Sargasso Sea
WSTSQISRELKIQLIDEFGSIPKKLKLYNCVGGGSSSFGFWNEFMDYDKKQCEFIGVEAGGPTKSKKHAAPLTYGSKIGILHGAAQYVNQNSDGQIDETESISAGLDYPGVSPLHCFLKDTKRARYTAASDEEALNAYKLVTKFEKLRPSLEPSHAFAVAIKEAKKFSKDTIIVVNSCGDAYKDRGILEKRLGKKYVKSN

SEQ ID NO: 150747 - protein, 270 aa, Unknown
  Bacterial polypetide isolated from the Sargasso Sea
KKFIVGDTGAGYAGKMLSMAAKKFGLKCKIFMGAKDIKRQRPNVEAMRKNGAKIVPVNTGSQTLVDAVSECMRYWVANCDTTHMCVGSTVGPNIFVKICAWSTAQISRELMIQVKEEFGKVPRKMKLLNCVGGGSSAMGFWNEFMDTDAEFIGIEAGGPKNSKLHAAPLTNGSKLGILHGSAQYVIQDREGQIGGTESISAGLDYPGISSLHCFLKDTKRAKYTSASDEEALKAYQLVSKFENISPSLEPSHAFAEAIKLAPKLKTSDII

SEQ ID NO: 150748 - protein, 72 aa, Unknown
  Bacterial polypetide isolated from the Sargasso Sea
MNNLDSLPKKKILSLFMTCGFPTLNQSKKVFNEMLSHQPDIIEFGLPFSDPMADGPIIQEANKLALRSKLST

SEQ ID NO: 150749 - protein, 128 aa, Unknown
  Bacterial polypetide isolated from the Sargasso Sea
MNRIKELFGTDSKKLIVFITAGFPNKDSTKDLVLEAIKGGADMIEIGIPFSDPQADGPVIQEANEIALKNGITLLEIFEQVKEIREETDVPIALMGYYNPILRMGTKDFIKKCNDAEIDGVILPEFTS

SEQ ID NO: 150750 - protein, 202 aa, Unknown
  Bacterial polypetide isolated from the Sargasso Sea
FVKICGWSTSQISRELYIKIKEQFEKIPKKLKLINCVGGGSSSFGFWNEFMDYDKKQVELIGVEAGGPKKSKKHAAPLTYGSKIGVLHGAMQYVNQDKMGQIEETESISAGLDYPGVSPLHCFLKDTNRARYTAASDEDALKAYQLVTKYENLNPSLEPSHAFAEAIKIAPKLSKDTIIVINSCGDAKKDRDILKKRLGSKI

SEQ ID NO: 150751 - protein, 151 aa, Unknown
  Bacterial polypetide isolated from the Sargasso Sea
MHYDKKQVEFVGIEAGGPKKSKRHAAPLTYGSKIGILHGAAQYVNQNSEGQIEETESISAGLDYPGVSPLHCFLKDTKRARYTAASDEEALNAYKLITRYENLNPSLEPSHAFAEAIKLAPKLSKDVIIIVNSCGDAHKDRDILRQRLGKL

SEQ ID NO: 150752 - protein, 239 aa, Unknown
  Bacterial polypetide isolated from the Sargasso Sea
AVEVAAQNDDVKYALGSVLNHVLTHQSIIGLEAIKQMEMAGDYPDVVVGCTGGGSNFAGIVFPFIGEMFRGGSKIRVVAVEPAACPSLTRGKYAYDFGDTAHLTPLAKMHTLGSTFVPPGFHAGGLRYHGMAPMISHLRELDVLEATAYHQNACFESGVMFGRTEGILPAPEANHAVKGAIEEALRCKREGKSETILFNLCGHGHFDMQAYTDYFAGNLEDRNYDEQELAMALAGLPSV

SEQ ID NO: 150753 - protein, 158 aa, Unknown
  Bacterial polypetide isolated from the Sargasso Sea
YGFWSEFIDYDKKQVELIGVEAGGPKRSKLHAAPLSRNAKIGILHGAASYVCQNKEGQIHETESISAGLDYPGVSPIHCFLKDTKRAKYTYATDEEALNAYKLVTKYEKLNPSLEPSHAFAEAIKIAPKLSRDTICIVNSCGDAKKDRDILKQRLGKF

SEQ ID NO: 150754 - protein, 323 aa, Unknown
  Bacterial polypetide isolated from the Sargasso Sea
KLFAKLRIDKKFLKERDEYFKSYIGSPTPFIKLENLTDYLKGAQIYAKVVSEANGGAHKIYNATVHCLIAKKAGKKFIVGDTGAGYAGKMLSMAAKKFGLRCKIFMGAKDIKRQRPNVEAMKKNGAIIVPVTTGSQTLVDAVSECMRYWVSNCDTTHMCVGSTVGPNIFIKICAWSTAQISRELFEQVKEEFGKIPKKIKLLNCVGGGSSAIGFWNEFMDTDAEFIGVEAGGPKNSKLHAAPLTNGSKIGILHGAAQYVIQDKEGQIGSTESISAGLDYPGISPLHCFLKDTKRARYTSANDEEALGAYQLVSKLKIYLLLWS

SEQ ID NO: 150755 - protein, 194 aa, Unknown
  Bacterial polypetide isolated from the Sargasso Sea
STAQISRELKIQIKQEFKKIPKKIKLINCVGGGSSAYGFWSEFVDFNKSQIEFVGVEAGGPKKSKLHAAPLSKNAKIGILHGAASYVCQNNEGQINDTESISAGLDYPGVSPIHCFLKDTKRARYTYATDEDALKAHVMVTKYEKLNPSLEPSHAFAEAIKIAPKLSKDTIIIVNSCGDAKKDRDILKERLGKN

SEQ ID NO: 150756 - protein, 196 aa, Unknown
  Bacterial polypetide isolated from the Sargasso Sea
PEDLAPLFPMGLILQEVSQDSFIDIPKPVLDLYKLYRPSALFRAVRLEKALGTNSRIYYKYEGGSPSGSHKPNTAIPQAFYNSEEGVTKMVTETGAGQWGSALAFACQAFGIELEVFQVAASYLAKPYRKTMMEIYGAKVYSSPSERTDIGKKFLSEDPETPGSLGIAISEAIEVAAKDEKTRYALGSVLNHVLMH

SEQ ID NO: 150757 - protein, 231 aa, Unknown
  Bacterial polypetide isolated from the Sargasso Sea
MTDSIKYLLEESKAPKFWYNINSDLPSPPPPPLHPGTKQPAGPDDFAPLFPMSLIMQEVSTEREIEIPEPVREVYKQWRPSPLFRARRLEKFLDTPAKIYYKYEGVSPTGSHKPNTAVPQAFFNKEEGISKIFTETGAGQWGSSLAFAGQIFGIDIEVFMVKVSFDHKPYRKLMMQSFGANCHPSPSTLTDFGNKLLSENPDNPGSLGIAISEAIEATVKSGGKAKYSLGS

SEQ ID NO: 150758 - protein, 268 aa, Unknown
  Bacterial polypetide isolated from the Sargasso Sea
MTDSIKYILEESKAPKTWYNINADLPSPPPPPLHPGTKQPAGPDDFAPLFPMGLIMQEVSTEREIEIPEPVREIYKQWRPSPLYRARRLEKFLDTPAKIYYKYEGVSPTGSHKPNTAVPQAFYNKEEGVKKIYTETGAGQWGSSLAFAGQMFGIDIEVFMVKVSFDQKPYRKLMMQSFGGICHPSPSELTDFGKKLLTDDPNNPGSLGIAISEAIEAVVKSEGKAKYALGSVLGHVLMHQTINGNEAILQMEQAGDYPDIIVGCTGGG

SEQ ID NO: 150759 - protein, 267 aa, Unknown
  Bacterial polypetide isolated from the Sargasso Sea
SSETNTGKAILKKDPKNTGSLGIAISEAVEMAAQSKTTKYSLGSVLNHVLMHQTIVGNEAIIQMEMAGDYPDILIGCTGGGSNFSGLVFPFLGKKFRDKKDIKVIACEPKSCPSLTKGKYTYDFGDTGNLTPLVKMHTLGSSFMPPATHSGGLRYHGMAPMVSHLKEIGALEAKAYGQKECFEAGVKFANVEGIVPAPEATHAVKGAIDAALECKKNGKSKTILFNLCGHGHFDMQAYGDYFDNKLEEDVYNEAEVNKALQSLPKIA

SEQ ID NO: 150760 - protein, 104 aa, Unknown
  Bacterial polypetide isolated from the Sargasso Sea
YEGQIEETESISAGLDYPGVSPLHCFLKDTKRARYTAASDEDALNAYKIVTKYENLNPSLEPSHAFAEAIKLAPKLSKDVIIIVNSCGDAHKDRDILKQRLGKY

SEQ ID NO: 150761 - protein, 414 aa, Unknown
  Bacterial polypetide isolated from the Sargasso Sea
MKLKKKIPVIDQTDKLGFWGGKFGGNFCAETLKKPIEDLEILFNKLKNNKSFIKERDEYFKNWIGAPTRFIKLKNLTDHIGGAQIWSKVVSDANGGAHKIYNATVHCLLARRSGKKFVIGDTGAGYAGKMLSMAAKKFGLKCKIFMGAKDIKRQQPNVRAMKKNGAEVVPVYSGSQTLVDAVSECMRYWVANCDHAHMAVGSTVGPSIFVQICGWSTSQISRELKSQIIDEFRSMPKKIKLYNCVGGGSSSFGFWNEFMDYNKKQVEFIGVEAGGPTKSKKHAAPLTYGSKIGILHGAAQYVNQNSDGQIEETESISAGLDYPGVSPLHCFLKDVKRARYTAASDEDALKAYKLVTKYENLKPSLEPSHAFSVAIKEARKLSKDTIVIVNSCGDAHKDKAILEKRLGKKYAKFN

SEQ ID NO: 150762 - protein, 367 aa, Unknown
  Bacterial polypetide isolated from the Sargasso Sea
MKNYRKNKNFIRKKDFYFKNYIGSPTSFIKLENLSNHLGGAQIWAKVVSEANGGAHKIYNATVHALICKAMGKKYIIGDTGAGYAGKMLSMAAKKFGLKCKIFMGAKDIKRQKPNCDAIRKNGAEIIPVYSGSQTLVDAVSECMRYWVSNCDNTHMCVGSTVGPNIFVKICGWSTSQISRELKTQIKKEFKKFPKKLKLINCVGGGSSAYGFWSEFIDYDKKHIELIGVEAGGPRKSKLHAAPLSRNAKIGILHGAASYVCQSSEGQIHETESISAGLDYPGVSPIHCFLKDTKRARYTYATDEEALNAYQMVTKFEKLNPSLEPSHAFAESIRIAPKLSKDTIIIVNSCGDAKKDKDILKERLGKY

SEQ ID NO: 150763 - protein, 339 aa, Unknown
  Bacterial polypetide isolated from the Sargasso Sea
MKLENLSKHLGGAQIWAKVVSDANGGAHKIYNATVHALICKSMGKKYIVGDTGAGYAGKMLSMAAKKFGLKCKIFMGAKDIKRQKPNCDAMRKNGAEIIPVYTGSQTLVDAVSECMRYWVSNCDTTHMCVGSTVGPNIFVKICGWSTSQISKELKIQIKNEFGKIPKKIKLINCVGGGSSAYGFWSEFVDYPKSQIEFIGVEAGGPKNSKLHAAPLSRGAKLGILHGAASYVCQNNDGQINETESISAGLDYPGVSPIHCFLKDVKRAKYTFATDEEALEAYKLVTKYEKINPSLEPSHAFAEAIKIAPKLKRENIIIVNSCGDAKKDRDILKEKIKKI

SEQ ID NO: 150764 - protein, 250 aa, Unknown
  Bacterial polypetide isolated from the Sargasso Sea
MRMRLLGAEIHVVKSGSRQLVDAVSESIRYFVANCDKVHLAVGSSVGPSIYTRICAYAQSVISKELKKQVQDEFGRIPKNLSLVAAVGGGSSSLGFWMHMIDSGCRLIGCEAGGPKKFKNKHAAPLTYGSKLGILHGAAQYVMQDKNFQIADTESVSAGLDYPGCSAIHSWLKQQKRATYVAPSDEETLEAFKLCSRLEGIQASLEPSHALAHVCKIAPKMKKTDKIITLICGNAMKDFGIIAEKLGVKI

SEQ ID NO: 150765 - protein, 349 aa, Unknown
  Bacterial polypetide isolated from the Sargasso Sea
MKKIKKGIPLIDQHNKNGFWGKFGGNFIPETLKKPVEDLTILFKKLRNDKKFIQERDYYFENWVGAPTSFIKLENLTNYLNGAQIWAKVVSEANGGAHKIYNATVHSLIAKRAGKKYIVGDTGAGYAGKMLSMAAKKFGLKCKIFMGAKDIKRQKPNCDAMRANGAEIVPVYTGSQTLVDAVSECMRYWVSNCDTTHMCVGSTVGPNIFVKICGWSTSQISRELFIQMQEEFGKIPKKLILINCVGGGSSSFGFWNEFMHYDKKQVMFIGVEAGGPKKSKRHAAPLTYGSKIGILHGAAQYVNQNTEGQIEETESISAGLDYPGVSPLHCFFERCEKERNILQPAMKKL

SEQ ID NO: 150766 - protein, 336 aa, Unknown
  Bacterial polypetide isolated from the Sargasso Sea
MRIKKGVPLIDQHDKYGFWGGKFGGSFIPETLKKPIEDLTIKFEKLRKNKNFLKKRDFYFQNYIGSPTPFIKLENLSNHLGGAQIWAKVVSEANGGAHKIYNATVHALICKAMNKKYIVGDTGAGYAGKMLSMAAKKFGLKCKIFMGAKDIKRQKPNCDAMRRNGAEIVPVYSGSQTLVDAVSECMRYWVSNCDNTHMCVGSTVGPNIFVKICGWSTAQISRELKYQLKKKFKKMPIKIKLINCVGGGSSAYGFWSEFIDYNKKQIELIGVEAGGPKNSKLHAAPLSRNAKIGILHGAASYVCQNNEGQIHETESISAGLDYPGVSPIHCFLKDTK

SEQ ID NO: 150767 - protein, 380 aa, Unknown
  Bacterial polypetide isolated from the Sargasso Sea
ETLKKPVEDLEVLFQKLRKDKNFIKERDRYFKNWVGSPTRFIKLEKLSKKLGGAQIWAKVVSDANGGAHKIYNATVHCLIAKKAGKKFVVGDTGAGYAGKMLSMAAKKFGLKCKIFMGLKDIKRQKPNCDAMRKNGAEIVPVYTGSQTLVDAVSECMRYWVSNCDTTHMCVGSTVGPNIFVKICGWSTAQISRELKTQIKLQFKKIPKKIKLINCVGGGSSAYGFWSEFIDFSKNQIELIGVEAGGPKKSKLHAAPLSRGAKLGILHGAASYVCQNKEGQINETESISAGLDYPGVSPIHCFLKDSKRARYTFATDEDALKAYQMIKKYEKLNPSLEPSHAFAEAIRIAPKLDKNVIIIVNSCGDAKKDRDILKKRLGKI

SEQ ID NO: 150768 - protein, 307 aa, Unknown
  Bacterial polypetide isolated from the Sargasso Sea
MHVKYLGIELDVYMVKVSFEQKPYRKLIMQTYGASCFASPSDRTDSGKAILAKDPNNTGSLGIAISEAVEMAAKDPNTKYSLGSVLNHVLMHQTIVGNEALLQMEMAGDYPDILVGCTGGGSNFSGLVFPFLGKKFRENKNTRVIACEPKSCPSLTKGKYVYDFGDTGRLTPLVKMHTLGSQFIPPATHSGGLRYHGMAPMVSHLKEIGAIEAQSFGQKECFEAGVSFARAEGIVPAPEATHAVKGAIAAAMECKKNGKSKTILFNLCGHGHFDMKAYGDYFENNLSEDKYDEAGVNKALEELPKIA

SEQ ID NO: 150769 - protein, 410 aa, Unknown
  Bacterial polypetide isolated from the Sargasso Sea
MKLKKKISVLDQHDKFGFWGGKFGGNFVPETLKKPINDLELLFNRLKKNKKFLSERDNYFKNWVGAPTRFIKLSNLTEHVGGAEIWSKVVSDANGGAHKIYNATVHCLLAKKSGKRIICGDTGAGYAGKMLSMAAKKFGLKCKIFMGAKDIERQQPNVKAIKNNGAEIVPVYSGSQTLVDAVSECMRFWVANCDTTAMCVGSTVGPNIFVKICGWSTSQISRELKIQILDEFGKIPKRLKLYNCVGGGSSSFGFWNEFMDYDKKQVEFIGVEAGGPSKSKKHAAPLTYGSKIGILHGAAQYVNQNSEGQIEETESISAGLDYPGVSPLHCFLKDTRRARYTAASDEDALKAFKIVSKYESIRPSLEPSHAFSVAISEAKKLSKDTIVIVNSCGDAYKDRKILKKKLGIKL

SEQ ID NO: 150770 - protein, 410 aa, Unknown
  Bacterial polypetide isolated from the Sargasso Sea
MKIKRNIPLIDQHDKKTGLWGGKFGGSYIPETLKKPVEDLTNLFEKLRHDKKFIRERDYYFKNWVGSPTSFIRLDNLTNHLGGAQIWAKVVSEANGGAHKIYNATVHCLIAKRAGKKFIIGDTGAGYAGKMLSMAAKKFGLKCKIFMGAKDIKRQKPNCDAMKKNGAEIVPVYTGSQTLVDAVSECMRYWVSNCDTTHMCVGSTVGPNIFVKICGWSTSQISRELIKQIKKEFGKIPKKIKLLNCVGGGSSSFGFWNEFMHYDKRQVEFVGIEAGGPKKSKRHAAPLTYGSKIGILHGAAQYVNQNHEGQIEETESISAGLDYPGVSPLHCFLKDTKRARYTAASDEEALSAFKLVTKFENLNPSLEPSHAFAEAIKLAPKLDKNIIIIVNSCGDAHKDRDILKQRLGKF

SEQ ID NO: 150771 - protein, 376 aa, Unknown
  Bacterial polypetide isolated from the Sargasso Sea
MKIKKGVPLIDQHDKNYIYGGKFGGNFIPETLKKPIDDLTKLFSKLRKDKRFLKERDYYFKNYIGVPTPFIKLENLTKYLGGAQIYAKVVSEANGGAHKIYNATVHCLIAKRAGKKYIVGDTGAGYAGKMLSMAAKKFGLKCKIFMGAKDIKRQRPNVEAMRKNGAIIVPVTTGSQTLVDAVSECMRYWVSNCDTTHMCVGSTVGPNIFIKICAWSTAQISRELLTQIKEEFGKIPKKMKLLNCVGGGSSAMGFWNEFMDTNAEFVGIEAGGPKNSKLHAAPLTNGSRIGILHGAAQYVVQDKEGQISPTESISAGLDYPGISPLHCFLKDTKRAKYTSASDEDALDAFQLVSKLENISPSLEPSHAFAVCCKIAP

SEQ ID NO: 150772 - protein, 275 aa, Unknown
  Bacterial polypetide isolated from the Sargasso Sea
QLKKFGLKCKIFMGAKDIKRQRPNVEAMRKNGAEIVPVTTGSQTLVDAVSECMRYWVSNCDTTHMCVGSTVGPNIFIKICAWSTAQISRELMKQIKEEFGRIPNKLKLINCVGGGSSAAGFWNEFMDTRAEFIGVEAGGPKNSKLHAAPLTNGSKIGILHGAAQYVIQDKEGQIGSTDSISAGLDYPGISPLHCFLKDAKRAKYTSASDEEALKAYQLVSKLENISPSLEPSHAFAEAIKLAPKLKPSEVIVVNSCGDSLKDKDIIQQKLGSYVR

SEQ ID NO: 150773 - protein, 409 aa, Unknown
  Bacterial polypetide isolated from the Sargasso Sea
MKLKKGVPLIDQHDQFGFWGEKFGGSFIPETLKKPVEDLTEEFKKLRKNKKFIKKRDYYFKNYIGAPTSFVKLENLSSHLGGAQIWAKVVSEANGGAHKIYNATVHALLCKAMGKKYIVGDTGAGYAGKMLSMAAKKFGLKCKIFMGAKDIKRQKPNCDAMKKNGAEIVPVYSGSQTLVDAVSECMRYWVSNCDNTHMCVGSTVGPNIFVKICGWSTAQISRELKVQLKSEFKKIPKKIKLINCVGGGSSAYGFWSEFIDFNKKQIELIGVEAGGPEKSKLHAAPLSRNAKIGVLHGAASYVCQDNEGQINETESISAGLDYPGVSPIHCFLKDTKRARYTYATDEEALNAHVMVTKFENLNPSLEPSHAFAEAIKIAPKLSKDTIIIVNSCGDAKKDRDILKERLGKN

SEQ ID NO: 150774 - protein, 257 aa, Unknown
  Bacterial polypetide isolated from the Sargasso Sea
MTSHADITRSLKHAKSKSGVALIPFFTAGYPSMDKFKTDLINISRVGDVVEVGIPFSDPMSDGMTIQRSSHEALQNGVSLSWIFDEIDSIKSQLKSPIVFMSYLNPLMAFGYDKLVDRAKKAGVCGFIVPDLPLEESDEFRDALENKDLGLIQLISPATPEKRMATLSKASKGFIYAVTMTGITGSEQGLAKNLTSYLSKISDMSDLPVCAGFGVRTAKDVSLISKHADGAIVGSALVETMEKKQDIIQFLEGLRKF

SEQ ID NO: 150775 - protein, 253 aa, Unknown
  Bacterial polypetide isolated from the Sargasso Sea
MNRIKELFSNDSKKLIVFITAGFPKKDSTKDLVLEAIKGGADMIEIGIPFSDPQADGPVIQEANEIALNNGISLLEIFEQVKEIRKQTDVPIALMGYYNPILKMGTMDFIKKCNDAEIDGVILPDLPLDESVEFCNNLKDKNISPILLVAPNTSKKRIKKISKLAGDLIYAVSILGITGNDLSSKNNLENYLARVKENSETPFMVGFGISSNEDVKWFNSFSDGAVVGSAVIKKVLKDRKKGVVENFVKNLKK

SEQ ID NO: 150776 - protein, 365 aa, Unknown
  Bacterial polypetide isolated from the Sargasso Sea
TWDFGGGKFGGNFVPETLKKPIEDLEVLFNKLKKDKKFIQERDRYFKNWIGVPTRFIKLENLTRHVGGAQIWSKVVSDANGGAHKVYNATVHCLLAKRSGKKVIIGDTGAGYAGKMLSMAAKKFGLKCKIFMGAKDIARQQPNVKAMKKNGAEVVPVYSGSQTLVDAVSECMRFWVANCDTTAMCIGSTVGPAVFVRICGWSTSQISRDLKVQLIEEFGSIPKKLKLYNCVGGGSSSFGFWNEFMDYDKKQCEFIGVEAGGPAKSKKHAAPLTYGSKIGILHGAAQYVNQNSDGQIEETESISAGLDYPGISPLHCFLKDTKRARYTAASDEQALEAYKLVTKFEKLRPSLEPSHAFAVAISDSK

SEQ ID NO: 150777 - protein, 375 aa, Unknown
  Bacterial polypetide isolated from the Sargasso Sea
YASKVREAEREKIVEQFRSQNNKLVSGSVKRVTRDNIIVDITHEAEALLPRDKLMPGEIYKINDRIRAVLQIVEVEGRGPQLMLNRSCPEMVTELFNIEVPEINEDVIEIRGIARDAGSRSKIAVKTNDGRIDPVGACVGMRGSRVQAVSSELGNERIDIIIYDDNPAQLVINALSPAKVESIVMDEDSRSMDIAVNEDNLALAIGSRGQNIRLASRLVGWDLNIISNEEAEAKVKVDETEFLAKIIDTLEIKDEVAEKIISSGFLSFDEIAYVEDSKLKEFIESDEEVLRIKSASEDAALLEAMGAVTEEEGNVESLSDLNLDEEKIGKLSNKGIKNKDDLAELSIDELQEIIEISSDDASKMIMKAREHWFNE

SEQ ID NO: 150778 - protein, 264 aa, Unknown
  Bacterial polypetide isolated from the Sargasso Sea
IKRQQPNVKAMKKNGADVIPVYSGSQTLVDAVSECMRHWVANCDTTAMCVGSTVGPAIFVRICGWSTSQISRELKFQLLHEFGDIPKKLKLYNCVGGGSSSFGFWNEFMDYDKKQVEFIGVEAGGPAKSKRHAAPLTYGSKIGILHGAAQYVNQDSDGQIEETESISAGLDYPGISPLHCFLKDTKRARYTAASDEEALEAYQIVTKYEDLRPSLEPSHAFSVAIKEAKKLSKDTIVIINSCGDAYKDRGILEKKLGRRYVKSN

SEQ ID NO: 150779 - protein, 409 aa, Unknown
  Bacterial polypetide isolated from the Sargasso Sea
MKLRKDIPLIDQHDHFGFWGGKFGGNFIPETLKKPIEDLTKEFQKLRKDKKFIKKRDFYFKSYIGSPTSFVKLENLTNHLGGAQIWAKVVSEANGGAHKIYNATVHALICKTMGKKYIVGDTGAGYAGKMLSMAAKKFGLKCKIFMGAKDIKRQKPNCDAMKKNGAEIVPVYSGSQTLVDAVSECMRYWVSNCDNTHMAVGSTVGPNIFVKICGWSTAQISRELKKQILQEFGRIPKKIKLINCVGGGSSAYGFWSEFIDYDKNQIELIGVEAGGPKNSKLHAAPLSKGAKIGILHGAASYVCQNKEGQINETESISAGLDYPGVSPIHCFLKDTKRAKYTYAYDEEALNAHVLVTKFEKLNPSLEPSHAFAEAIKIAPNLSKDTIIIVNSCGDAKKDRDILRERLGTK

SEQ ID NO: 150780 - protein, 397 aa, Unknown
  Bacterial polypetide isolated from the Sargasso Sea
MWGNKFGGNFVPETLKKPIEELEILFNKMRNNKTFIQERDNYFENWIGSPTRFIYLRNLTNHIGGAQIWAKVVSDANGGAHKIYNATVHCLLAKKAGKKFIIGDTGAGYAGKMLSMAAKKFGLKCKIFMGAKDIRRQQPNVKAMKRNGAEVVPVYTGSQTLVDAVSECMRFWVANCDTTAMCVGSTVGPNIFVKICGWSTSQISRELKKQINEEFGSIPKKLKLYNCVGGGSSSYGFWSEFMDYNKQQVEFIGVEAGGPKAGKKHAAPLTYGSKLGILHGAAQYVNQNIEGQIEETESISAGLDYPGVSPLHCFLKDIKRARYTAASDEDALNAYKLVTKFENLKPSLEPSHAFSVAIKDAKELSKNTIIVVNSCGDAHKDKNILISKLGKKYDKFN

SEQ ID NO: 150781 - protein, 206 aa, Unknown
  Bacterial polypetide isolated from the Sargasso Sea
FVRICGWSTSQISRELKVQLINEFGHVPKKLKLYNCVGGGSSSFGFWNEFMDYDKKQVEFIGVEAGGPAKSKRHAAPLTYGSKIGILHGAAQYVNQDSDGQIEETESISAGLDYPGISPLHCFLKDTKRARYTAASDEEALKAYQIVTKYENLRPSLEPSHAFSVAIKEAKKFSKNTIVIINSCGDAYKDRGILEKKLGKKYVKSN

SEQ ID NO: 150782 - protein, 71 aa, Unknown
  Bacterial polypetide isolated from the Sargasso Sea
YDSVTDDEAMSAFRMLNNLEGILPALESSHALAWVIKKAPAMSEEDIVVMNLSGRGDKDILTVAEMDGILV

SEQ ID NO: 150783 - protein, 368 aa, Unknown
  Bacterial polypetide isolated from the Sargasso Sea
MKLKKGIPVIDQGDRLGFWGGKFGGNFVPETLKKPIEDLEIQFNKLKKDKEFIKKRDRYFKNWIGTPTRFIKLNNLTKYVGGAQIWSKVVSDANGGAHKIYNATVHCLLAKRSGKKVIIGDTGAGYAGKMLSMAARKFGLKCKIFMGAKDIKRQQPNVKAMKKNGADVIPVYSGSQTLVDAVSECMRYWVANCDTTAMCVGSTVGPAIFVRICGWSTSQISRELKVQLINEFGEVPKKLKLYNCVGGGSSSFGFWNEFMDFDKKQVEFIGVEAGGPAKSKRHAAPLTYGSKIGILHGAAQYVNQNDDGQIEETESISAGLDYPGISPLHCFLKDTKRARYTAASDEEALKAYQTVTKYENLRPSLEPS

SEQ ID NO: 150784 - protein, 195 aa, Unknown
  Bacterial polypetide isolated from the Sargasso Sea
MSRIKSIFSSLKERNKKALIAYIVCGDPNNSSTLEAMEYMSQNGVDIIEIGVPFSDPMAEGPSIQRAHERSLKNNTSLENILDLIGDFRKKNKTVGIVLMGYMNNFESMGAKEFSLKASENGVDGIIVVDMPPEESNEFTEHTELNDIDIIRLIAPTTEKERIQKICNSASGFIYFISLKGTTGSEKFNPIDVKE

SEQ ID NO: 150785 - protein, 237 aa, Unknown
  Bacterial polypetide isolated from the Sargasso Sea
TSGSQTLVDAVSECMRYWVSNCNLAHNCIGSTVGPNIFIKICAWSTAQISRELMKQIKEEFGKIPNKLKLINCVGGGSSAAGFWNEFMDTSAEFIGVEAGGPKNSRLHAAPLTNGSKIGILHGAAQYVVQDKEGQIGSTESISAGLDYPGISPLHCFLKDTKRAKYTSATDEEALKAYQLVSKLENISPSLEPSHAFSEAIRIAPKLKSSEIIVVNSCGDSLKDKDIIKQKLGSYIR

SEQ ID NO: 150786 - protein, 67 aa, Unknown
  Bacterial polypetide isolated from the Sargasso Sea
QFCCAQEGIIPALEPSHAMAHVMKIAPELPRDHIICMNMCGRGDKDIFTVAKHLGFDMGDTEGRDAD

SEQ ID NO: 150787 - protein, 381 aa, Unknown
  Bacterial polypetide isolated from the Sargasso Sea
TLKKPIEDLEKLFSKLRKDKSFIKERDHYFENYVGAPTPFIPLYGLSDHLGGAQIWAKVVSENPGTAHKVYNVLVHCLIAKRAGKKYVCTDTGAGMNGKNLAMVAKKFGLKCKIFMGTIDIKRQQENVKVMKKYGAEVVPVNSGSKTLVDAVSECIRFFVANCDTTHLVIGSAVGPSVWARICAWSASQISKELIIQIKDEFGKIPRKLKLLNCIGGGSSALGFWNEFIDYNKNQVELIGVEAGGSKKSKKHAAPLTNGSKIGILHGSAQYVIQNKDGQIEETESISAGLDYPGVSPIHCFLKDAKRARYTSATDEEALDAFQIVSKLENISPSLEPCHAFAEAIKIAPKLSKDTVLCINSCGSSLKDSHIIKSRLGYYQE

SEQ ID NO: 150788 - protein, 27 aa, Unknown
  Bacterial polypetide isolated from the Sargasso Sea
MELILWKIGMPFSDPMADGSTIQLSSN

SEQ ID NO: 150789 - protein, 346 aa, Unknown
  Bacterial polypetide isolated from the Sargasso Sea
VGSPTSFIKLDNLTKHLGGAQIWAKVVSEANGGAHKIYNATVHCLIAKRAGKKYIVGDTGAGYAGKMLSMAAKKFGLKCKIFMGAKDIKRQKPNCDAMRKNGAEIVPVYTGSQTLVDAVSECMRYWVSNCDTTHMCVGSTVGPNIFIKICGWSTSQISRELFIQMKKEFGKIPKKVKLLNCVGGGSSSFGFWNEFMHYNKKQIEFIGIEAGGPKKSKRHAAPLTYGSKIGILHGAAQYVNQDFEGQIEETESISAGLDYPGVSPIHCFLKDTKRARYTVATDEESLNAYKLVTKYENLNPSLEPSHAFAEAIKLAPKLSKNTIMIVNSCGDAHKDKDILRERLGKF

SEQ ID NO: 150790 - protein, 185 aa, Unknown
  Bacterial polypetide isolated from the Sargasso Sea
LMIQVKEEFGRVPKKMKLLNCVGGGSSAMGFWNEFMDTDAEFIGIEAGGPKNSKLHAAPLTNGSNIGILHGAAQYVVQNKEGQISSTESISAGLDYPGISPLHCFLKDAKRAKYTSATDEEALKAYQLVSKLENISPSLEPSHAFAEAIKIAPKLKSSDVIVVNSCGDSIKDRDIIKQKLGSYVR

SEQ ID NO: 150791 - protein, 267 aa, Unknown
  Bacterial polypetide isolated from the Sargasso Sea
MKSSLIDFTFKKCRKEKRPALITFTVAGDNTKKNSLKILNSISKYVDILELSFLHNCPIADGGQIQNSTYRSLENGTTLKDTFKIAKSFKNKNPQKPLILMGYYNLIYQSGENNFIKNCKSSKVDGLIVVDLPWPENKIFAEKCKKKSISFVQLLSPTTSKVRMKKIIKDSHDMIYYISMLSTTGGKLKIPPKKILENYSKIKKINKNKNCVIGFGITNNTIGSFKKADGVVVGSEICKEITKSLKKRQNPVTNVNKMVKKMKDKIL

SEQ ID NO: 150792 - protein, 293 aa, Unknown
  Bacterial polypetide isolated from the Sargasso Sea
KESGKRYIAGDTGAGMFGKNLAMAAKKMNLKCKIFMGTKDISRQAPNVKFMRDAGAEVVPVDSGSKTLVDAVSECMRHYVSNCDNTHLAVGSAIGCNIFLKICAWSTSQISRELKKQLIKEFGEIPKLKLINVIGGGSSALGFWNEFIDYEKKHVELIGVEAKYAAPLSTNAKVAILHGAAQYCLTDKEGQIAETHSLSAGLDYPGSSPLHGLLKDSGRARYTNASDKEALAAFKLITKLEDIRPSLEPAHAWSECIRLAPKLKKSDVLVVNNCGKGYKDKKIYIEQLGYYPK

SEQ ID NO: 150793 - protein, 197 aa, Unknown
  Bacterial polypetide isolated from the Sargasso Sea
CGWSTAQISRELKIQINQKFKKIPKKIKLINCVGGGSSAYGFWSEFIDFKKSQIELVGVEAGGPKKSKLHAAPLSRNAKIGILHGAASYVCQNNEGQIDDTESISAGLDYPGVSPIHCFLKDTKRARYTYATDEEALKAHVMVTKFEKLNPSLEPSHAFAEAIKIAPKLKKDTIIIVNSCGDAKKDRDILKERLRKN

SEQ ID NO: 150794 - protein, 229 aa, Unknown
  Bacterial polypetide isolated from the Sargasso Sea
MFKKGEQDVLSALDQTNYENERVKILLNEHEMPTHWYNICSDLKNPLAPPLNPGTGEPIGPEDLAPLFPMELIMQEVSTDREIEIPDQVREIYRQWRPSPLYRARKLEKALDTPAKIYYKYEGVSPSGSHKPNTAVPQAYYNKEEGVKRLTTETGAGQWGSSLAFAGSIFGLEVDVYMVKVSFNQKPYRRALMESFGARCVASPSDETESGKAILKDSPDSTGSLGIAK

SEQ ID NO: 150795 - protein, 244 aa, Unknown
  Bacterial polypetide isolated from the Sargasso Sea
MNIKTILSEDSIPENFYNIGADLVEALSPVLHPGTKEPVGPDDLSPLFPMELIGQEVSQDRYITIPDEVRDIYRLYRPTPLYRARSLEKALDTPAKIFYKYEGVSPTGSHKPNTAIAQAYYNKNEGIDKLTTETGAGQWGCSLAFACSKFGIDLDVFMVKISYNQKPYRKAMMEAFGANCIASPSEYTEVGRDILSKDPNSTGSLGIAISEAVEKCVSDSNTKYALGSVLNKVLTHQTIMGKRR

SEQ ID NO: 150796 - protein, 350 aa, Unknown
  Bacterial polypetide isolated from the Sargasso Sea
MKLEKGIPLIDQHDENGYWGGKFGGNQIAESLNYPIEELTREFEKLRNDETFIAERDYYFKNFVGAPTPFIKLENLTKHLGGAQIYCKLVSKATGGAHKAYNAVVHSLICKRLGKTYIGGDTGAGYAGKMLSMAAAKFNLKCKIFMGAKDVERQSINVFSMRSYGAEVVPVNSGSQTLVDAVSECMRWWTSENEEAHMCVGSTVGPTIFVKICAWSTAQISREMKKQVIDEFGEVPKDMKLINCVGGGSSAAGFWNEWIDHDNIELIGVEAGGPEGSSKHAAPLTNDSPIGVLHGATQYVIQDDQGEIEETESISAGLDYPGVSPLHCFLKETGRARYTSASDEEAIEAS

SEQ ID NO: 150797 - protein, 100 aa, Unknown
  Bacterial polypetide isolated from the Sargasso Sea
EETESISAGLDYPGVSPLHCFLKDTKRARYTAASDEDALNAYQLVTKYENLKPSLEPSHAFAEAIKIAPRLSRDTIIIVNSCGDAKKDKDILKKKLGKKI

SEQ ID NO: 150798 - protein, 184 aa, Unknown
  Bacterial polypetide isolated from the Sargasso Sea
QLENEFIKIPKKIKLINCVGGGSSAYGFWSEFIDYDKKQIELVGVEAGGPKKSKLHAAPLSRNEKIGILHGAASYVCQNNEGQIHETESISAGLDYPGVSPIHCFLKDAKRARYTYATDEDALNAYKIVTKYERLNPSLEPCHAFAEAIKIAPKLSKDTLCIVNSCGDAKKDRDILKKRLGKFR

SEQ ID NO: 150799 - protein, 174 aa, Unknown
  Bacterial polypetide isolated from the Sargasso Sea
MSDQFKYFLEESKMPKTWYNISADLPKPMEPPLHPGTLKPIGPDDLAPLFPMALIGQEVSQEREIEIPEPVRNIYKQWRPSPLFRARNLEKFLDTPAKIYYKYEGVSPTGSHKPNTAVAQAFFNKEEGTKKITTETGAGQWGSSLAFACQIFGIELDVYMVKISFEQKPYRKLI

SEQ ID NO: 150800 - protein, 96 aa, Unknown
  Bacterial polypetide isolated from the Sargasso Sea
MTPPSGDISQQARPDADGRYGSYGGKYVPETLIPALIALEKEYETIKEDPEFQAELQSILKDYVGRENPLYYAERLSEEFKDANGNGPDIYLKRED

SEQ ID NO: 150801 - protein, 149 aa, Unknown
  Bacterial polypetide isolated from the Sargasso Sea
VEEFCKKCNEIGIDGLIIPDLPMDYYEENYKSIFKKYEIYNMFLIAPQTSDERIKKIDSISDGFIYMVSSSSITGSKDSFSSEQLEYFERIKKMNLKTPRITGFGVANKKTFEAAVKFSKGAIIGSAFIKSLHLNGIDSISKFIHSIKD

SEQ ID NO: 150802 - protein, 79 aa, Unknown
  Bacterial polypetide isolated from the Sargasso Sea
MKNKGYFGDYGGLFIPETLSHALNELDSLYLDIKDNANFQEELTNIYKYYVGRPSPLYFAEKYSELVKAKVWFKREDLN

SEQ ID NO: 150803 - protein, 158 aa, Unknown
  Bacterial polypetide isolated from the Sargasso Sea
MSDRIKYFLEESKMPKTWYNIAADLPKPLSPVLHPGTLKPIGPDDLAPLFPMALIGQEVSQDREIEIPEPVREIYKQWRPSPLYRARKLEKALDTTAKIYYKYEGVSPTGSHKPNTAVAQAFFNKEEGTKKITTETGAGQWGSSLAFACSIFKIELDV

SEQ ID NO: 150804 - protein, 384 aa, Unknown
  Bacterial polypetide isolated from the Sargasso Sea
SFIPETLKKPVEDLTQEFSKLRNNKKFLKKRDYYFKNYIGSPTSFVKLENLSNHLGGAQIWAKVVSEANGGAHKIYNATVHALICKAMGKKYIVGDTGAGYAGKMLSMAAKKFGLKCKIFMGAKDIKRQKPNCDAMRKNGAEIIPVYSGSQTLVDAVSECMRYWVSNCDTTHMCVGSTVGPNIFVKICGWSTAQISRELKIQIKQEFKKIPKKIKLINCVGGGSSAYGFWSEFIDFNKSQIELVGVEAGGPKKSKLHAAPLSRNAKIGILHGAASYVCQNNEGQINDTESISAGLDYPGVSPIHCFLKDTKRARYTYATDEEALKAHVMVTKFEKLNPSLEPSHAFAEAIKIAPKLSKDTIIIVNSCGDAKKDRDILKERLGKK

SEQ ID NO: 150805 - protein, 201 aa, Unknown
  Bacterial polypetide isolated from the Sargasso Sea
MTKNSLKNGPDEFGYYGEFGSRYAPEILMPNLIELEKAFNDAIKDKKFIDEFEYYLKEWIGRPNPLYFAEQLTKQIGGAKIYFKSDHLNHLGAHKGNNALFQILLAKRMGKTKVLCETGAGAHLIATAAAGAFKSLPVIGYMGKDDIFKQSTNVLKAKLFGAKVIECVDGTGEKGVLKDACTAVLKAWSNDPDAFYCCGSA

SEQ ID NO: 150806 - protein, 408 aa, Unknown
  Bacterial polypetide isolated from the Sargasso Sea
MIKIKKGIPLIDQHDKNGFWGKFGGNFIPETLKKPVEDLTILFEKLRRDKKFIQERDYHFNNWVGAPTPFIKLKNLTEHLGGAQIWAKVVSEANGGAHKIYNATVHSLIAKRAGKKYIVGDTGAGYAGKMLSMAAKKFGLKCKIFMGAKDIKRQKPNCDAMRANGAEIVPVYTGSQTLVDAVSECMRYWVSNCDTTHMCVGSTVGPNIFVKICGWSTSQISRELLIQIKEEFGTIPKKLKLYNCVGGGSSSFGFWNEFMNYDKKQIEFVGIEAAGPKKSKRHAAPLTYGSKIGILHGAAQYVNQNKEGQIEKTESISAGLDYPGVSPLHCFLKDTKRARYTAATDEEALNAYKIVTKFESLNPSLEPSHAFAEAIKIAPKLSKNTIVCVNSCGDALKDRDILKQRLGK

SEQ ID NO: 150807 - protein, 297 aa, Unknown
  Bacterial polypetide isolated from the Sargasso Sea
GPQLMLNRSCPEMVTELFNIEVPEINEDVIEIRGIARDAGSRSKIAVKTNDGRIDPVGACVGMRGSRVQAVSSELGNERIDIIIYDDNPAQLVINALSPAKVESIVMDEDSRSMDIAVNQDNLALAIGSRGQNIRLASRLVGWDLNIISNEEAEAKVKVDETEFLAKIIDTLEVKEEVAEKIISSGFLSFDEIAYAEDSKLKEFIESDEEVLRIKSASEDAALLEAMGAVTEEEDNVESLSDLNLDEDNIAKLSNKGIKNKDDLAELSIDELQEIIEISSDDASKMIMKAREHWFNE

SEQ ID NO: 150808 - protein, 140 aa, Unknown
  Bacterial polypetide isolated from the Sargasso Sea
MSHRIKKVFASNKKKLITFVTGGDPDIDSSNKILETIEKNGADIIEIGMPFSDPMADGPIIQLSSKRAIKKGVTLDNIFSICKKLRSNNDEVPIILMGYYNVIYNYGVKNFVNSCKSNGVDGLIVVDLQPEEDPDLLIEI

SEQ ID NO: 150809 - protein, 90 aa, Unknown
  Bacterial polypetide isolated from the Sargasso Sea
MTSKNINKPSSNGRFGKFGGKFVPETLMSSLKEIEEAFEKYSKDESFWEELTTLQNDFIGRPTPLYYAKNLSEKLNQRIWIKREDLAHTG

SEQ ID NO: 150810 - protein, 414 aa, Unknown
  Bacterial polypetide isolated from the Sargasso Sea
MKLKKGIPVIDQGDKLGFWGGKFGGNFVPETLKKPIEDLEIQFNKLKNDKNFIRERDKYFKNWIGTPTRFIKLNNLTKHVGGAQIWSKVVSDANGGAHKIYNATVHCLLAKRSGKKVIIGDTGAGYAGKMLSMAAKKFGLKCKIFMGAKDIKRQQPNVKAMKKNGADVIPVYSGSQTLVDAVSECMRFWVANCDTTAMCVGSTVGPAIFVRICGWSTSQISRELKVQLINEFGEVPKKLKLYNCVGGGSSSFGFWNEFMDYDKKQVEFIGVEAGGPSKSKRHAAPLTYGSKIGILHGAAQYVNQNSDGQIEETESISAGLDYPGISPLHCFLKDTKRARYTAASDEEALKAYQIVTKYENLRPSLEPSHAFSVALKESKKFSKDTIVIINSCGDAYKDRGILEKKLGKKYVKSN

SEQ ID NO: 150811 - protein, 298 aa, Unknown
  Bacterial polypetide isolated from the Sargasso Sea
MGKKYIVGDTGAGYAGKMLSMAAKKFGLKCKIFMGAKDIKRQKPNCEAIKKNGAEIVPVYSGSQTLVDAVSECMRYWVSNCDTTHMCVGSTVGPNIFVKVCGWSTSQISKELKLQIKKEFGKIPNKVKLINCVGGGSSAYGFWSEFVDFPKKQIELIGVEAGGPKNSKLHAAPLSKGAKLGILHGAASYVCQNKEGQINQTESISAGLDYPGVSPIHCFLKDTKRARYTYATDEEALNAYKLVTKFEKLNPSLEPSHAFAEAIACAPKSDKNTIIIVNSCGDAKKDRDILKKRLGNRK

SEQ ID NO: 150812 - protein, 263 aa, Unknown
  Bacterial polypetide isolated from the Sargasso Sea
MSSRIKKIFEDSSKKLVTFVTGGDPDYVTSKEILDKIIEKGADIIEIGMPFSDPMADGPIIQLASKRAIDNGTNLETIFKICNHIREKNLSIPIVLMGYYNVILHYGIKNFVDKINSIGVDGLIIVDLQPEEDRELYDNLKSKNIDLIRLITPNTNSKRLSTITNQASGFLYYVTITGITGQKSANIQELKKIIPNIRKYSKLPIIAGFGIKDKNDVSEICKTADGAVVGSSIVKIIENNLNNKEKMMNEVSSFIEELKKGTK

SEQ ID NO: 150813 - protein, 119 aa, Unknown
  Bacterial polypetide isolated from the Sargasso Sea
ILHGAAQYCLTDKNGQIKETHSISAGLDYPGVSPLHCFLKDTGRARYCSASDEQALAAFKLVTKLEPSVKPSLEPAHCLHEVIRLAPKLNQDEIIIYNNCGHAYKDQKIIKDRIGYFPS

SEQ ID NO: 150814 - protein, 342 aa, Unknown
  Bacterial polypetide isolated from the Sargasso Sea
KFYKTEKLNKSSCGAQIWSKVVSDANGGAHKIYNATVHCLIAKRAGKKYIVGDTGAGYAGKMLSMAAKKFGLKCKIFMGAKDIRRQGPNVRAMRKNLAEIVPVYTGSQTLVDAVSECMRYWVSNCDTTHMCVGSTVGPNIFVKICGWSTSQISRELFIQIKKEFGRIPKKLKLINCVGGGSSSFGFWNEFMHYNKNQVEFIGVEAGGPKKSRLHAAPLTYGSKIGVLHGAMQYVNQDKMGQIEETESISAGLDYPGVSPLHCFLKDAKRARYTAATDEEALNAYKLVTKYENLNPSLEPSHAFAEAIKITPKLNKDTVVCVNSCGDARKDQDILKKRLGKKI

SEQ ID NO: 150815 - protein, 233 aa, Unknown
  Bacterial polypetide isolated from the Sargasso Sea
DDTKYALGSVLNHVLLHQTIIGQESMKQLEIAGDEPDVIVGCTGGGSNFAGIAFPFIGRNLRGESKTRIVAVEPANCPTLTKGKYAYDFGDTGHLTPLVKMHTLGSAFVPPGFHAGGLRYHGMSPLVSHLANENEIECTSYKQLECFEAGVTFAKAEGILPAPEANHAVKGAIVEALKAKEEGESKTILFNLCGHGHFDMQAYTDYFGGKLKDQDYDESEVAMALANLPSVSA

SEQ ID NO: 150816 - protein, 367 aa, Unknown
  Bacterial polypetide isolated from the Sargasso Sea
MVEIYFFIVQYTFIMSDSIKYLLEENKAPKFWYNINSDLPSPPPPPLHPGTKQPAGPDDFAPLFPMSLIMQEVSTEREIEIPEPVREVYKQWRPSPLFRARRLEKFLDTPAKIYYKYEGVSPTGSHKPNTAVPQAFFNKEEGISKIFTETGAGQWGSSLAFAGQIFGIDIEVFMVKVSFDHKPYRKLMMQSFGANCHASPSNLTDFGNKLLSENPDNPGSLGIAISEAIEATVKSGGKAKYSLGSVLGHVLMHQTINGNEAIMQMEMAGDYPDIIVGCTGGGSNLSGLMFPFLGQQLRGGQKIDIIGCEPASCPSFTKGKYAYDHGDMAKMTPLIKMHTLGSDFLPPANHSGGLRDHGMSYHLSHLY

SEQ ID NO: 150817 - protein, 281 aa, Unknown
  Bacterial polypetide isolated from the Sargasso Sea
MFNFKIELDVYMVKVSYEQKPYRKMIMQTFGANCYASPSNRTPTGKAILEKDPNNTGSLGIAISEAVEMAAQDDHTKYSLGSVLNHVLMHQTIVGNEAIMQMEMADDYPDILVGCTGGGSNFSGLAFPFLGKKFREKKDIKVIACEPKSCPTLTKGKFAYDFGDTGMRTPLVKMHTLGSSFMPPSTHSGGLRYHGMAPLVSHLTDLGAIEPKAFGQKECFEAGVKFANAEGIVPAPEATHAVKGAIDAALECKKNGEKKTILFNLCGHGHFDMQAYGDYFN

SEQ ID NO: 150818 - protein, 298 aa, Unknown
  Bacterial polypetide isolated from the Sargasso Sea
YYNILSDLKEPLPPVLHPGTKEPVGPDDLSPLFPMELIKQEVSTDPQIIIPDQVRDIYRLYRPTPLYRARSLEKALGTPAKIFYKYEGVSPTGSHKPNTAIPQAYYNKMEGVDKITTETGAGQWGSSLAFACSKFDIDLDIYMVKVSYEQKPYRKAMMETFGARCIASPSHETEVGRKILAETPDSTGSLGIAISEAVEMCVSSSGTKYALGSVLNHVLTHQTIIGQEAMQQMSQIDENVDIVVGCTGGGSNFSGIAMPFLGKAIRNNEKLDLVAVEPSACPTLTKGKYAYDFGDTGQ

SEQ ID NO: 150819 - protein, 253 aa, Unknown
  Bacterial polypetide isolated from the Sargasso Sea
MFGGQYIEDRIKAPKAPGPAIIPFITAGYPNAEDFKQTLYDLAKKADVIEIGVPFSDPMADGVTIQRSSHMAIENGVTLTWIFSQLKEIKLDTPIVLMSYLNPLYVFGLKELVEASIESGVDGYIVPDLPIEESKELNDQLTDAGLALIQLVTPATPSDRIEMITKQSSGFIYAVTVKGVTGGENALSADVTDYLEQVHEISKIPVCAGFGIRDKSDVEMIAEHVDGIIVGSAIVETIEQGNSPTEFLDRLKN

SEQ ID NO: 150820 - protein, 315 aa, Unknown
  Bacterial polypetide isolated from the Sargasso Sea
AKPLSPVLHPGTLKPVGPDDLAPLFPMALIGQEVSQEREIEIPEPVREIYKQWRPSPLYRARKLEKALDTTAKIYYKYEGVSPTGSHKPNTAVAQAFYNKEEGTKKITTETGAGQWGSSLAFACSIFKIELDVYMVKVSFEQKPYRKMIMQTFGANCYASPSNRTPTGKAILEKEPNSTGSLGIAISEAVEMAAQDDATKYSLGSVLNHVLMHQTIVGNEAIMQMEMANDYPDILVGCTGGGSNFAGLAFPFLGKKFREKKDIKVIACEPKSCPSLTKGKFAYDFGDTGNRTPLVKMHTLGSSFMPPATHSGGLR

SEQ ID NO: 150821 - protein, 65 aa, Unknown
  Bacterial polypetide isolated from the Sargasso Sea
IINNGADIMEIGMPFSDPMADGPTIQLSSNRAISKGIDLENIFSLASEAKKTKSDLPVILMGYYN

SEQ ID NO: 150822 - protein, 228 aa, Unknown
  Bacterial polypetide isolated from the Sargasso Sea
MKGNKMQITKNESLSKVDEMFYELKNKKKFALMPFIMAGDPNIEITSEILLKLQENGADLIELGIPYSDPLADGPVIQVAASRALKSGTSLKKVIKLLESLKGKLNIPIILFSYLNPLLCFGFKRFCEMASDAGVSGLIVPDLPLEEAYKFSKIVSNHSMDLILLVAPTTPFERMKQISNQTKGFTYLVSVTGVTGERNKMENRVENLIAKLKNVNSNPIAVGFGIST

SEQ ID NO: 150823 - protein, 256 aa, Unknown
  Bacterial polypetide isolated from the Sargasso Sea
SFFNIKAEKRKALITYIVSGDPDTETTIEVMNSMVRQGTDIIELGIPFSDPMAEGISIQKGHERALEKGASLMGTFELLKKFRANDKKTPIVFMGYMNTFESLGAKQFMLEAVKADLDGILIVDMPPEESSNFSSEADKVGIDIIRLIAPTTSSLRAKKICSLCSGYVYYISVKGITGASNINPEEVKVKVSELRSHTDLPIAIGFGIKDAASASSVKDIADGVVIGSVFVDLIGEGGNIIEKVESKTRELSEVLN

SEQ ID NO: 150824 - protein, 307 aa, Unknown
  Bacterial polypetide isolated from the Sargasso Sea
NVTETGAGQWGSALSFACQAFGIDLEVFQVAASYASKPHRKTMMEIYGATVHPSPSERTDIGKQFLSQDPNTPGSLGIAISEAIEVARKEEGTRYALGSVLNHVLMHQSIIGLEALKQMEMAEDYPDIIVGCTGGGSNFTGLFSPFAKNNMESNKKTIIRAVEPQACPSLTKGVYTYDFGDSVGMAPVVKMHTLGSSFVPDPIHAGGLRYHGMAPLVSAMYEDNLIEAEAIGQRECFEAGQLFAKTEGIVPAPEATHAIASAIRAVKDADQRSEQVAVLTAMCGHGHFDMKAYENFLSGEIIDYDFP

SEQ ID NO: 150825 - protein, 151 aa, Unknown
  Bacterial polypetide isolated from the Sargasso Sea
MNRIKETFDKLKKNNKKALGIFVTAGDPNFESSLKLITNLPDNGANFIEIGMPFSDPMADGPSIQLSSQRALKSGMNLNKCLSLIKIFREKNNHTPIILMGYYNPIYKFGKEKFIKNCIELGVDALIIVDLPPEEDDEFYFEAEKNNLSMI

SEQ ID NO: 150826 - protein, 287 aa, Unknown
  Bacterial polypetide isolated from the Sargasso Sea
MHPGTLKPIGPDDLAPLFPMALIGQEVSQDREIEIPEPVREIYKQWRPSPLYRARKLEKHLDTPAKIYYKYEGVSPSGSHKPNTAVAQAFYNKEEGTKKITTETGAGQWGTSLAFACKLFGIELDVYMVKVSFEQKPYRKLVMQTYGARCVASPSNETDSGKAILAKDPNNTGSLGIAISEAVEMAAKNPDTKYALGSVLNHVLMHQTIVGNEALLQMEMADDYPDILVGCTGGGSNFSGLVNPFLGKNFREGKKTKVIACEPKSCPTLTQGKYVYDFGDTGKLTPL

SEQ ID NO: 150827 - protein, 157 aa, Unknown
  Bacterial polypetide isolated from the Sargasso Sea
ALGLFYPFLDDDVDMYGVESAGMGLDGNEHAASLSKGVPGILHGNRTYLLQDNEGQIREGHSISAGLDYPGIGPEHSWLNDQGRVNYVSSTDNEALNAFEICSKYEGIIPALEPSHALAFVFKLAKDMKKDQIIIVNLCGRGDKDIETVADYLGVEV

SEQ ID NO: 150828 - protein, 162 aa, Unknown
  Bacterial polypetide isolated from the Sargasso Sea
MATRILRTFDELKSNSQTGLITYLTAGFPNQDLCFDIIDELSKSGSDLIEIGMPFSDPMAEGPIIQQSSKLALDNGHTMELTFDLIKKFRNKNSQTPIILMGYYNPIYQYGNESFIKRCLDYGVDGLIVVDLPPEHDSELCDLTIDIDLDFIRLATPTTNKK

SEQ ID NO: 150829 - protein, 52 aa, Unknown
  Bacterial polypetide isolated from the Sargasso Sea
VEGIIPALETAHAISYACDLAPTLRPEDIIIICLSGRGDKDISIVAEQESLF

SEQ ID NO: 150830 - protein, 127 aa, Unknown
  Bacterial polypetide isolated from the Sargasso Sea
MNNPKNGFYGDFGGKFIPETLSYAIEELDQNYKQIAQSDDFQKQFHLLLKEFVGRPTALYFAKNLTEHYGGAKIYFKREDLAHLGAHKINNAVGQGLLAKLMGKKRIIAETGAGQHGVATAAICAKL

SEQ ID NO: 150831 - protein, 77 aa, Unknown
  Bacterial polypetide isolated from the Sargasso Sea
MPDKNGRFGIYGGRYVAETLVPALEELSEQYELIKKDEKFLKEFEDDLKDYVGRPSPLYFANTLDRITWWRRRFILK

SEQ ID NO: 150832 - protein, 181 aa, Unknown
  Bacterial polypetide isolated from the Sargasso Sea
MSKSPLRIEESLRKRIGGGGKCLVPYITGGFEGYVEAIYAAAEAGADAIEIGIPFSDPVMDGPTIQKANDVVLAQKISPLDILQEIRDLDIGIPLAVMTYYNIVYRFGLERFANALSESGISGAILPDLPLNEAGAWVDAASANGTETILLAAPTTTDERLEALCGQSKGFVYAVGLLGIT

SEQ ID NO: 150833 - protein, 89 aa, Unknown
  Bacterial polypetide isolated from the Sargasso Sea
FPGVGCEHSYLKDLGRATYATITDEEALEGFKLLSSKEGIIPALESAHAIAHVAKLAPEMKKDEIILVCLSGRGDKDVNQIADRMGVSL

SEQ ID NO: 150834 - protein, 263 aa, Unknown
  Bacterial polypetide isolated from the Sargasso Sea
MTSRIKEVFSKIKAEKRKALITYIVSGDPDTETTIEIMNSMVQQGTDIIELGIPFSDPMAEGISIQKGHERALEKGVSLKGTFELLKKFRANDEKTPIVFMGYMNTFESLGAKQFMSEAVNANLDGILIVDMPPEESSDFSTEAEKVGIDIIRLIAPTTSSLRAKKICSQCSGYVYYISVKGITGASNINAEEVKAKVSELRSHTDLPIAIGFGIKDAASASSVKDVADGVVAGSVFVDLIGEGGNIIKKVESKTRELSQVLN

SEQ ID NO: 150835 - protein, 79 aa, Unknown
  Bacterial polypetide isolated from the Sargasso Sea
MKDSERAEYVAVSDDAALKAFHEVSELEGIIPALETAHAFAYLDTLMKEFDKNSNIIVNVSGRGDKDINTVANIDGIKI

SEQ ID NO: 150836 - protein, 263 aa, Unknown
  Bacterial polypetide isolated from the Sargasso Sea
WRPSPLYRARKLEKHLDTPAKIYYKYEGVSPSGSHKPNTAVPQAFYNKEEGTKKITTETGAGQWGTSLAFACKLFGIELDVYMVKVSFEQKPYRKLVMQTYGARCVASPSNETDSGKAILAKDPSNTGSLGIAISEAVEMAAKNPDTKYALGSVLNHVLMHQTIVGNEALLQMEMADDYPDILVGCTGGGSNFSGLANPFLGKNFTEGKKTRVIACEPKSCPTLTEGKYVYDFGDTGKLTPLVKMHTLGSQFIPPATHSGGLR

SEQ ID NO: 150837 - protein, 112 aa, Unknown
  Bacterial polypetide isolated from the Sargasso Sea
MNSKNTYKHLPDEKGYFGKFGGRYVSETLMPLIQEVENEYNKIKNDQKFLQELEYYFKNYIGRPSPLFFAKRISEDLKGPKIYFKRDELNHTGAHKINNCMGQILLAKKMGK

SEQ ID NO: 150838 - protein, 123 aa, Unknown
  Bacterial polypetide isolated from the Sargasso Sea
MIGGKYIEKKIRTSKAPGPAIIPFITAGYPSTEDFKQMLHEIAKKADVIEIGVPFSDPMADGVTIQRSSQLAIENGVTLTWIFNQLKKIKLDTPIVLMSYLNPLHVFGMEQLVEASIASGVDG

SEQ ID NO: 150839 - protein, 278 aa, Unknown
  Bacterial polypetide isolated from the Sargasso Sea
QERDKYFNNWIGVPTRFIKLENLSKHVGGAQIWSKVVSDANGGAHKVYNATVHCLLAKRSGKKVICGDTGAGYAGKMLSMAAKKFGLKCKIFMGAKDIARQQPNVKAMKKNGAEVIPVYSGSQTLVDAVSECMRFWVANCDTTAMCVGSTVGPAVFVRICGWSTSQISRELKVQLIDEFGSIPKKLKLYNCVGGGSSSFGFWNEFIDYDKKQCEFIGVEAGGPAKSKKHAAPLTYGSKIGILHGAAQYVNQNSDGQIEETESISAGLDYPGISPLHCF

SEQ ID NO: 150840 - protein, 272 aa, Unknown
  Bacterial polypetide isolated from the Sargasso Sea
MSDTIKYFLEESKMPKTWYNIAADLPKPMEPPLHPGTLKPIGPDDLAPLFPMALIGQEVSQDREIEIPEPVREIYKKWRPSPLYRARALEKHLDTPAKIYYKYEGVSPSGSHKPNTAVAQAFYNKEEGTKKITTETGAGQWGTSLAFACKLFGIELDVYMVKVSFEQKPYRKLVMQTYGARCVASPSNETDSGKAILAKDPNNTGSLGIAISEAVEMAAKNPDTKYALGSVLNHVLMHQTIVGNEAILQMEMADDYPDILVGCTGGGSNFSG

SEQ ID NO: 150841 - protein, 179 aa, Unknown
  Bacterial polypetide isolated from the Sargasso Sea
REDNSITPVVLMGYLNPIESMGYDEFAEAAALAGVDGTIIVNFPPEEAGEFGDRLAEREVETVYLLSPTTTDERARKICGASKGFVYYVSLKGTTGAATLDLADVAEKTSRFRAFSDLPILVGFGIKDGASAKAIAELSDGAVVGSAIVKIMGDNADNPKLLKERVQALIRELRSALDG

SEQ ID NO: 150842 - protein, 284 aa, Unknown
  Bacterial polypetide isolated from the Sargasso Sea
MKDNKMQITKNESLSKVDEKFFDLKNNKKLALMPFIMAGDPNIEITSEILLSLQENGADLIELGIPYSDPLADGPVIQVSASRALKSGTSPRKVIKLLESLKGKLNIPIILFSYLNPLLCFGFEKFCEMASNAGVSGLIVPDLPLEEAYKFSKIVSNHSMDLILLVAPTTPFERMKQISNHTKGFTYLVSVTGVTGERNEMENRVENLIAKLKDVNSNPIAVGFGISTPEHVNKVREWGADGVIIGSAFVKRISSSSEKDVVDHVGEFCKEMRLAADKKKYIQK

SEQ ID NO: 150843 - protein, 288 aa, Unknown
  Bacterial polypetide isolated from the Sargasso Sea
NTAVAQAFFNKEEGTKKITTETGAGQWGSSLAFACQIFGIELDVYMVKVSFEQKPYRKLIMQTYGASCFASPSNRTDSGKAILAKDPNNTGSLGIAISEAVEMAAKDPNTKYSLGSVLNHVLMHQTIVGNEALLQMEMAGDYPDILVGCTGGGSNFSGLVFPFLGEKFRENKNTRVIACEPKSCPSLTKGKYVYDFGDTGRLTPLVKMHTLGSQFIPPATHSGGLRYHGMAPMVSHLKEIGAIEAQAFGQKECFEAGVNFARSEGIVPAPEATHAVKGAIAAAMECKK

SEQ ID NO: 150844 - protein, 193 aa, Unknown
  Bacterial polypetide isolated from the Sargasso Sea
SSFSSLQNGTKVENVLAELSLFRAEREIPVVLFTYLNPVLRYGLEDFLLDATESGASGLLLTDLPVGADYGVERAVAESPLDFIRLVAPTTREERVPEIAESGSGFLYYISRAGVTGVRSQLRESLGDEVAALRSQVGLPVAVGFGISTPEQAREVGRASDGVVVGSALVRIMDESGVEAGARFVARLRAALD

SEQ ID NO: 150845 - protein, 146 aa, Unknown
  Bacterial polypetide isolated from the Sargasso Sea
MNRIKQTFNELKKNNQKAVGIFLTAGDPDFKSSLNLIKKLPENGVDFIEIGMPFSDPMADGPSIQLSSQRALKSGTNLTKCLSLVENFRKKNNHTPIILMGYYNPIYRFGKKNFINKCLEIGVDGLIIVDLPPEEDEEFYIEAERN

SEQ ID NO: 150846 - protein, 203 aa, Unknown
  Bacterial polypetide isolated from the Sargasso Sea
MKDNKMQITKNESLSKVDEMFCELKNKKKFALMPFIMAGDPNIEITSEILLKLQENGADLIELGIPYSDPLADGPVIQVAASRALKSGTSLRKVITLLESLKGKINIPIILFSYLNPLLCFGFERFCEMASDAGVSGLIVPDLPLEEAYKFSKIVSNHSMDLILLVAPTTPFERMKQISNHTKGFTYLVSVTGVTGERNKMEN

SEQ ID NO: 150847 - protein, 216 aa, Unknown
  Bacterial polypetide isolated from the Sargasso Sea
MSDKIKYFLEESKMPKTWYNIAADIPKPLSPVLHPGTLKPIGPDDLAPLFPMALIGQEVSQDREIEIPEPVREIYKQWRPSPLYRARKLEKALDTTAKIYYKYEGVSPTGSHKPNTAVAQAFFNKEEGTKKITTETGAGQWGSSLAFACSIFKIELDVYMVKVSYEQKPYRKMIMQTFGANCYASPSNRTPTGKAILEKDPNSTGSLGIAISEAVE

SEQ ID NO: 150848 - protein, 29 aa, Unknown
  Bacterial polypetide isolated from the Sargasso Sea
MESFGSLPDILLACVGGGSNAMGAFPSFC

SEQ ID NO: 150849 - protein, 51 aa, Unknown
  Bacterial polypetide isolated from the Sargasso Sea
MQWELFHPFVKDTNVRLIGVEAAGSGVDTDKHAATITKGSVGILHGSMSLL

SEQ ID NO: 150850 - protein, 99 aa, Unknown
  Bacterial polypetide isolated from the Sargasso Sea
SVSAGLDYSGVGPEHCYLRDYDRVEYAYATDEEALEAFQLLSQLEGIIPALESSHAIAEVCKMAPTMDSDQVVIVNLSGRGDKDVQQAAVMIDGIDEVG

SEQ ID NO: 150851 - protein, 80 aa, Unknown
  Bacterial polypetide isolated from the Sargasso Sea
MAEDSGRAEYVAVSDDAALKAFHEVSELEGIIPALETAHAFAYLDTLMKEFDKNSNIIVNVSGRGDKDINTVANIDGIKI

SEQ ID NO: 150852 - protein, 64 aa, Unknown
  Bacterial polypetide isolated from the Sargasso Sea
MTRIDQTFKKLKSEGTKAFVSYIMAGDPDFETSLELVMGLPAAGVDIIELGLPFTDPMADGPTI

SEQ ID NO: 150853 - protein, 111 aa, Unknown
  Bacterial polypetide isolated from the Sargasso Sea
MTNLISQAFKNDGKKLVTFVTGGDPDFETSLKIIKTIINNGADIMEIGMPFSDPMADGPTIQLSSNRAINKGIDLEKIFSLASEAKKIKGDLPIILMGYYNLILYFGIEKF

SEQ ID NO: 150854 - protein, 284 aa, Unknown
  Bacterial polypetide isolated from the Sargasso Sea
GSPTRFIKLENLTEHVGGAQIWSKVVSDANGGAHKIYNATVHCLLAKRSGKKVICGDTGAGYAGKMLSMAAKKFGLKCKIFMGAKDIQRQQPNVRAMKKNGAEVIPVYSGSQTLVDAVSECMRYWVANCDKVAMCVGSTVGPAVFVRICGWSTSQISRELKTQLIDKFGSIPKKLKLYNCVGGGSSSFGFWNEFMDYDKKQCEFIGVEAGGPEKSKKHAAPLTYGSKIGILHGAAQYVNQNSDGQIEETESISAGLDYPGISPLHCFLKDTKRARYTAASDEEA

SEQ ID NO: 150855 - protein, 171 aa, Unknown
  Bacterial polypetide isolated from the Sargasso Sea
DNITPVVLMGYFNPIYNLGIFNFLERCKSVGVDGLIVVDLPPEEDEELCIPAINHGLNFIRLATPTSDDKRLQTVLKNTSGFLYYISMTGITGALIEKTNSINQKVRNLKTLTPLPVCVGFGVRDKKMVKQLCSVADGVVVGSAIVRQIEKNKSVDEILKFCKELADGTNL

SEQ ID NO: 150856 - protein, 248 aa, Unknown
  Bacterial polypetide isolated from the Sargasso Sea
MSDQLKYFLDESKMPKTWYNIAADLPKPMEPPLHPGTLKPIGPDDLAPLFPMALIGQEVSQDREIEIPEPVRKIYKQWRPSPLYRARNLEKFLDTPAKIYYKYEGVSPTGSHKPNTAVAQAFFNKEEGTKKITTETGAGQWGSSLAFACQIFGIELDVYMVKVSFEQKPYRKLIMQTYGASCFASPSNRTDSGKAILAKDPNNTGSLGIAISEAVEMAAKDPNTKYSLGSVLNHVLMHQTIVEMKHYC

SEQ ID NO: 150857 - protein, 209 aa, Unknown
  Bacterial polypetide isolated from the Sargasso Sea
MTSRIPNIFNKNKSKNKKTFISYLVCGDPSNDITLSAMHTMSKSGVDIIELGIPFTDPIADGPTIQKSIDRSLKNNTSLHDVISVVKEFRKDNSDTAVVLMGYMNPVHKMGIAKFAKQINDTGIDGVLIVDSPPEESVMLNKYLTKYKKSHIYLASPTTTDQRMKNISKMSSGYVYYVTIKGITGSKLSNVNSIRTNVNKIKKYSNNSL

SEQ ID NO: 150858 - protein, 78 aa, Unknown
  Bacterial polypetide isolated from the Sargasso Sea
LKDLKRVEYTAVTDDEALDAFFTLTQKEGIIPALETAHALAYAFQLAKKLKNKKILLNLSGRGDKDIDTIAKLKNIKL

SEQ ID NO: 150859 - protein, 283 aa, Unknown
  Bacterial polypetide isolated from the Sargasso Sea
LIGQEVSQEREIEIPELVREIYKQWRPSPLYRARKLEKHLDTPAKIYYKYEGVSPSGSHKPNTAVAQAFYNKEEGTKKITTETGAGQWGTSLAFACKLFGIELDVYMVKVSFEQKPYRKLVMQTYGARCVASPSNETDSGKAILAKDPNNTGSLGIAISEAVEMAAKNPDTKYALGSVLNHVLMHQTIVGNEALLQMEMADDYPDILVGCTGGGSNFSGLANPFLGKNFREGKKTRVIACEPKSCPTLTEGKYVYDFGDTGKLTPLVKMHTLGSQFIPPATHS

SEQ ID NO: 150860 - protein, 215 aa, Unknown
  Bacterial polypetide isolated from the Sargasso Sea
LGIPYSDPLADGPVIQAAASRALHAGTTPAKVMEMLSTLPDDFDLPLILFSYSNPLLNLGMQRFCEQAAGAGASGLVIPDLPLEEADRLSPIATQHGLDLVLLVAPTTPEARMARIAESSRGFTYLVSVTGVTGERAQMETRVEGLVQQLKQSSPVPVAVGFGISGPEQVKQVRRWGADGAIVGSALVKRMAAAGAANMASEAESFCRELREACH

SEQ ID NO: 150861 - protein, 255 aa, Unknown
  Bacterial polypetide isolated from the Sargasso Sea
KQWRPSPLYRARSLEKHLDTPAKIYYKYEGVSPSGSHKPNTAVAQAFYNKEEGTKKITTETGAGQWGTSLAFACKLFGIELDVYMVKVSFEQKPYRKLVMQTYGARCVASPSDETDSGKAILAKDPNNTGSLGIAISEAVEMAAKNPDIKYALGSVLNHVLMHQTIVGNEAILQMEMADDYPDILVGCTGGGSNFSGLVNPFLGKNFREGKKTRVIACEPKSCPTLTEGKYVYDFGDTGKLTPLVKMHTLGSQFI

SEQ ID NO: 150862 - protein, 248 aa, Unknown
  Bacterial polypetide isolated from the Sargasso Sea
MSDKIKFLLEESKMPKTWYNIAADLPKPLSPVLHPGTLKPIGPDDLAPLFPMALIGQEVSQEREIEIPEPIRDIYKQWRPSPLYRARKLEKALDTPAKIYYKYEGVSPTGSHKPNTAVAQAFYNKEEGTKKITTETGAGQWGSSLAFACSIFKIELDVYMVKVSYEQKPYRKMIMQTFGANCYASPSNRTPTGKAILEKDPNNSGSLGIAISEAVEMAAQDESTKYSLGSVLNHVLMHQTIVGNEAIM

SEQ ID NO: 150863 - protein, 234 aa, Unknown
  Bacterial polypetide isolated from the Sargasso Sea
DPSTRYALGSVLNHVLLHQTIIGEEALLQLAKVGETPDILVGCTGGGSNFGGLSFPFLREKLAGRMNPTIRCVEPAACPTLTKGEYRYDFGDTAGLTPLMKMHTLGHQFIPEPIHAGGLRYHGMAPLVSHVYDLGLVEATSVPQTACFEAAVQFARSEGIVPAPEPTHAIASAIDEALKCKETGEEKVILTALCGHGHLDLPAYEKFLSGEITDLDLPEESISESMKSVPVIDG

SEQ ID NO: 150864 - protein, 82 aa, Unknown
  Bacterial polypetide isolated from the Sargasso Sea
PFICAGDPNLDATKKALKVLDDAGADIIELGVPYSDPLADGPVIQASATRALANGATLNKVIDLVREVSPTIAAPIVMIYVL

SEQ ID NO: 150865 - protein, 219 aa, Unknown
  Bacterial polypetide isolated from the Sargasso Sea
MFGGQYIEDRIKAPKAPGPAIIPFITAGYPNAEDFKQTLYDLAKKADVIEIGVPFSDPMADGVTIQRSSHMAIENGVTLTWIFSQLKEIKLDTPIVLMSYLNPLYVFGLKELVEASIESGVDGYIVPDLPIEESKELNDQLTDAGLALIQLVTPATPSDRIEMITKKSSGFIYAVTVKGVTGGENALSADVTDYLEQVHEISKIPVCAGFGIRDKSDVE

SEQ ID NO: 150866 - protein, 258 aa, Unknown
  Bacterial polypetide isolated from the Sargasso Sea
MNNLDTLPKKKILSLFMTCGFPTLNQSKKVFNEMLSHQPDIIEFGLPFSDPMADGPIIQEANKLALRSKLSTQQSLNLIKELSKSKNNTSFVIMCYLNTVRKFGLNKFIKNIKSIVDGIIIVDLPFEEEDAIKKSLSKNNIHLIKLISPMTDKKRSKKLLKNSKGFIYYISATGITGSNKLDYKEINKNVKSIKKMSSVPVLVGFGIKSKKDVIDISKKTNADGVIIGSALIQKYFDLKMDFDKYIKNLKKFIKEVKV

SEQ ID NO: 150867 - protein, 68 aa, Unknown
  Bacterial polypetide isolated from the Sargasso Sea
SDQEVIEAFQLLSKTEGIIPALESAHALAWVVREAASLQGQVVLLNLSGRGDKDVDQMMEVLGMDEVG

SEQ ID NO: 150868 - protein, 178 aa, Unknown
  Bacterial polypetide isolated from the Sargasso Sea
MKDNKMQINKNEVLSKVDEKFHELKNNKKLALMPFIMAGDPNIEITSEILLKLQENGADLIELGIPYSDPLADGPIIQLAASRALKSGTTSRKVITLLGSLKGKLNIPIILFSYLNPLLCFGFEQFCEMASNAGVSGLIIPDLPLEEAYKFSKIVSTYSMDLILLVAPTTPFERMKKI

SEQ ID NO: 150869 - protein, 244 aa, Unknown
  Bacterial polypetide isolated from the Sargasso Sea
TGGDPDIDTSENILSAIISSGADIIEIGMPFSDPMADGPTIQLSSNRAIKQNIDLDKIFLICKNIRKKNDNIPIILMGYYNVIFSYGVNRFVEECKNNGIDGLIVVDLQPEEDKDLLNALNETELDLIRLVTPTTDNKRLEKILENSSGFLYYVTITGITGQHSANINELKLSIEKINKKTNLPIVSGFGIKDEKQVSEICKICDGAVVGSSLVKIIEENLNNKSKIIKLVSEFVKKLKQGTKI

SEQ ID NO: 150870 - protein, 276 aa, Unknown
  Bacterial polypetide isolated from the Sargasso Sea
GLNVKFFMGAKDIKRQQPNVRAIKKNGAEVIPVYSGSQTLVDAVSECMRFWVANCDTTAMCVGSTVGPAVFVRICGWSTSQISRELKVQLIDEFGSIPKKLKLYNCVGGGSSSFGFWNEFMDYDKRQCEFIGVEAGGPKKSKKHAAPLTYGSKIGILHGAAQYVNQNSDGQIEETESISAGLDYPGISPLHCFLKDTKRARYTAASDEDALWAYKMVTKYEKLKPSLEPSHAFSVAIKESKRFSKDTIVVVNSCGDAYKDRGILQKKLGKKYVKSN

SEQ ID NO: 150871 - protein, 176 aa, Unknown
  Bacterial polypetide isolated from the Sargasso Sea
INIPIILFSYLNPLLCFGFERFCEMASDAGVSGLIVPDLPLEEAYKFSKILSNYSMDLILLVAPTTPFERMKQISNQTKGFTYLVSVTGVTGERSKMENRVENLIAKLKDGNSNPIAVGFGISTPEHVNKVREWGADGVIIGSAFVKRISSSSEKDVVDHVGEFCKEMRLAADQKK

SEQ ID NO: 150872 - protein, 157 aa, Unknown
  Bacterial polypetide isolated from the Sargasso Sea
LGLFHEFLDDSNVEMIAVEAAGHGITSNKHAASLTGGKPGVLHGNKTYLLQSNTGQIQEAHSISAGLDYPGIGPEHSFLFEEKRVTYMSATDTEALEAFQYCCKLEGIIPALEPAHALAVLKRIAKNYNKEKIIVMNMCGRGDKDIFTIADELKIKI

SEQ ID NO: 150873 - protein, 139 aa, Unknown
  Bacterial polypetide isolated from the Sargasso Sea
MTNLISQIFKNKEKKLVTFVTGGDPDLDTSLEIIKTIISNGADIIEIGMPFSDPMADGPTIQLSSNRAISKGIDLEDIFYLATAAKKIKSDLPIILMGYYNLILYFGIERFVKRCKENGVDGLIIVDLQPEEDGDLINE

SEQ ID NO: 150874 - protein, 197 aa, Unknown
  Bacterial polypetide isolated from the Sargasso Sea
EARQQMLDTTGKLPDRIYACVGGGSNASGIFLPFLDDDTVELVGVEAGGRGVDTGSHAARFCGGNVGIAQGYKTYFFQDEEGQMRHTHSIAAGLDYIGVSPILSHLHDKKRVRFTATTDEEVISATKHLIRTEGIIPALECSHAFASVIEETPHIPNGSHVLINLSGRGDKDIFNIAEAIGDKKWDKFLREKALLSQ

SEQ ID NO: 150875 - protein, 324 aa, Unknown
  Bacterial polypetide isolated from the Sargasso Sea
ADLPKTYGATSSPCTLKPIGPDDLAPLFPMALIGQEVSQDREIEIPEPVRKIYKQWRPSPLYRARNLEKFLDTPAKIYYKYEGVSPTGSHKPNTAVAQAFFNKEEGTKKITTETGAGQWGSSLAFACQIFGIELDVYMVKVSFEQKPYRKLIMQTYGASCFASPSNRTDSGKAILAKDPNNTGSLGIAISEAVEMAAKDPNTKYSLGSVLNHVLMHQTIVGNEALLQMEMADDYPDILVGCTGGGSNFSGLVLPFLGKKFRENKNTRVIACEPKSCPSLTKGKYVYDFGDTGRLTPLVKMHTLGSQFIPPATHSGGLRYHGMAP

SEQ ID NO: 150876 - protein, 268 aa, Unknown
  Bacterial polypetide isolated from the Sargasso Sea
MSDQLKYFLEEGKMPKTWYNIAADLPKPMEPPLHPGTLKPIGPDDLAPLFPMALIGQEVSQDREIEIPEPVRNIYKQWRPSPLFRARNLEKFLDTPAKIYYKYEGVSPTGSHKPNTAVAQAFFNKEEGTKKITTETGAGQWGSSLAFACQIFGIELDVYMVKVSFEQKPYRKLIMQTYGASCFASPSDRTDSGKAILAKDPNNTGSLGIAISEAVEMAAKDPNTKYSLGSVLNHVLMHQTIVGNEALLQMEMAGDYPDILVGCTGGEV

SEQ ID NO: 150877 - protein, 264 aa, Unknown
  Bacterial polypetide isolated from the Sargasso Sea
MTDTLSQIFKYNSKKLVTFVTGGDPDFNTSNKIIKKMIDNKIDIIEIGMPFSDPMADGPTIQLSSNRALKNDINLDHIFKLASNAKNKNIKLPIILMGYYNLIMHYGIKEFVKNCVINGVDGLIIVDLQPEEDQDLVNELNKNNINLIRLITPTTNENRLKLILKNASGFLYYVSVMGTTGQKSANIDELKKSISFIRKFTDLPIIPGFGVKDKTDVNNICKIADGAVVGSSIIKIIEKNLDDKVLMLKKIDNFTKELKEGTKI

SEQ ID NO: 150878 - protein, 214 aa, Unknown
  Bacterial polypetide isolated from the Sargasso Sea
FSDPLADGLTNQLAAQRALEAGTTREDVFDLVRKIREKDGQTPIVFYTYYNLMFSGGLEAYIAEAKEAGVDGLLVLDLPPEEAGDFMEACRKIEMKTVFLLAPTTPEERVEYIAQNATGFIYYVSRTGVTGVRKDLASDLQEMVDMIKRHSDNSLVVGFGIQNPDQVNAVARLADGVVVGSAIVNTIKDNLEDEKKMLERIESLVTDLVGGTQL

SEQ ID NO: 150879 - protein, 291 aa, Unknown
  Bacterial polypetide isolated from the Sargasso Sea
YRARRLEKYLDTPAKIYYKYEGVSPTGSHKPNTAVPQAFFNKEEGVSKIFTETGAGQWGSSLAFAGQMFGIDIEVFMVRVSFDQKPYRKLMMQSFGGTCHPSPSDLTDFGKKLLAEDANNPGSLGIAISEAIEAVVKSEGKAKYALGSVLGHVLMHQTINGNEAIMQMEQAGDYPDIIVGCTGGGSNLAGLMFPFLGQQLRGGKKIDIIGCEPLSCPSFTKGKYAYDHGDMARMTPLIKMHTLGSDFLPPANHSGGLRYHGMSYHLSHLYDLGLMRAKAYGQKDCFEAGVI

SEQ ID NO: 150880 - protein, 287 aa, Unknown
  Bacterial polypetide isolated from the Sargasso Sea
MALIGQEVSQDREIEIPEPVREIYKQWRPSPLYRARRLEKALDTTAKIYYKYEGVSPTGSHKPNTAVAQAFYNKEEGTKKITTETGAGQWGSSLAFACSIFKIELDVYMVKVSYEQKPYRKMIMQTFGANCYASPSNRTPTGKAILEKDPNNSGSLGIAISEAVEMAAQDESTKYSLGSVLNHVLMHQTIVGNEAIIQMEMANDYPDILVGCTGGGSNFSGLVFPFLGKKFREKKDVRVIACEPKSCPSLTKGKFAYDFGDTGNRTPLVKMHTLGSSFMPPSTHSGG

SEQ ID NO: 150881 - protein, 71 aa, Unknown
  Bacterial polypetide isolated from the Sargasso Sea
YVSVTDDEAIQAFHDLCQIEGIIPALESSHALAYTSKIAPKMDKSEIIVVNLSGRGDKDIQTVAVHEGITI

SEQ ID NO: 150882 - protein, 170 aa, Unknown
  Bacterial polypetide isolated from the Sargasso Sea
DLLMACIGGGSNALGLFHEFLDDKQIQMIAVEAAGHGIDSGNHAASLSGGKPGILHGNKTYLLQSSDGQIDEAHSISAGLDYPGIGPEHSYLFEQKRVKYMSATDKEAIEAFQYCCNLEGIIPALEPSHALAVLKKIAKNYSKDKIVVMNMCGRGDKDIFTIAEELNIKL

SEQ ID NO: 150883 - protein, 91 aa, Unknown
  Bacterial polypetide isolated from the Sargasso Sea
MSDRIKKTFESKRKKLVTFTTAGDPDLDTSLEILNTIINNGVDVIEIGMPFSDPMADGPTIQESSVRSITNGTEIDDIFEIVKKVRELNNE

SEQ ID NO: 150884 - protein, 287 aa, Unknown
  Bacterial polypetide isolated from the Sargasso Sea
DFVGGAQIWSKVVSDANGGAHKIYNATVHCLLAKRSGKKVICGDTGAGYAGKMLSMAARKFGLKCKIFMGAKDIERQQPNVKAMKKNGAEVIPVYTGSQTLVDAVSECMRFWVANCDTTAMCVGSTVGPNIFVRICGWSTSQISRELKTQILEEFGKMPKKLKLYNCVGGGSSSFGFWNEFMDYDKRQVEFIGVEAGGPSKSKRHAAPLTYGSKIGVLHGAAQYVNQNSEGQIEETESISAGLDYPGVSPLHCFLKDTKRARYTAASDEDALNAFKIVSKYENLRPS

SEQ ID NO: 150885 - protein, 224 aa, Unknown
  Bacterial polypetide isolated from the Sargasso Sea
MIKGIPVIDQGDKLGFWGGKFGGNYVPETLKKPIEDLEILFNKLKKDKNFIKERDRYFKNWIGSPTRFIKLNNLTKYLGGAQIWSKVVSDANGGAHKIYNATVHCLLAKRSGKKVIIGDTGAGYAGKMLSMAAKKFGLKCKIFMGAKDIKRQKPNVNAMKKNGAEVIPVYSGSQTLVDAVSECMRYWVANCNTTAMCVGSTVGPSVFVRICGWSTSQISRELKS

SEQ ID NO: 150886 - protein, 299 aa, Unknown
  Bacterial polypetide isolated from the Sargasso Sea
FYLDETIENLKWADTIKYFLEESKMPKTWYNIAADLPKPMEPPLHPGTLKPIGPDDLAPLFPMALIGQEVSQDREIEIPEPVREIYKQWRPSPLYRARKLEKHLDTPAKIYYKYEGVSPSGSHKPNTAVAQAFYNKEEGTKKITTETGAGQWGTSLAFACKLFGIELDVYMVKVSFEQKPYRKLVMQTYGARCVASPSNETDSGKAIIAKDPNNTGSLGIAISEAVEMAAKNPDTKYALGSVLNHVLMHQTIVGNEALLQMEMADDYPDILVGCTGGGSNFSGLANPFLGKNFREGKKT

SEQ ID NO: 150887 - protein, 282 aa, Unknown
  Bacterial polypetide isolated from the Sargasso Sea
APLFPMALIGQEVSQDREIEIPEPVRKIYKQWRPSPLYRARNLEKFLDTPAKIYYKYEGVSPTGSHKPNTAVAQAFFNKEEGTKKITTETGAGQWGSSLAFACQIFGIELDVYMVKVSFEQKPYRKLIMQTYGASCFASPSNRTDSGKAILAKDPNNTGSLGIAISEAVEMAAKDPNTKYSLGSVLNHVLMHQTIVGNEALLQMEMADDYPDILVGCTGGGSNFSGLVLPFLGKKFRENKNTRVIACEPKSCPSLTKGKYVYDFGDTGRLTPLVKMHTLGSQ

SEQ ID NO: 150888 - protein, 206 aa, Unknown
  Bacterial polypetide isolated from the Sargasso Sea
GLRAKSAGANLHQTLSMVREFRKVDDITPIILMGYYNPIYIYGNEKFLIDAKNSGVDGLIVVDLPPEEDKELCLPSLEKGLHFIRLATPTTDENRISTVLTNTSGFVYYVSIAGVTGSKSARSDEVRAAVKNIKKYTELPVAVGFGIKTPEQAAIVARSADAAVVGSAIVKVIENNIDETGAPSDNLVDNVLEFVSSLSRGVRESR

SEQ ID NO: 150889 - protein, 185 aa, Unknown
  Bacterial polypetide isolated from the Sargasso Sea
KLLKSLKGKLNIPIILFSYLNPLLCFGFERFCEMASDAGVSGLIVPDLPLEEAYKFSKIVSNHSMDLILLVAPTTPFERMKQISNHTKGFTYLVSVTGVTGERNKMENRVENLIAKLKDVNSNPIAVGFGISTPEHVNKVREWGADGVIIGSAFVKRISSSSEKDVVDHVGEFCKEMRLAADQKK

SEQ ID NO: 150890 - protein, 224 aa, Unknown
  Bacterial polypetide isolated from the Sargasso Sea
MATRILRTFDELKSNSQTGLITYLTAGFPNQDLCLDIINELSKSGSDLIEIGMPFSDPMAEGPIIQQSSKIALDNGHTMELTFDLIKKFRTKNSQTPIILMGYYNPIYQYGNESFIKRCLDYGVDGLIVVDLPPEHDSELCDLTIDIDLDFIRLATPTTDKKRLNIVLNKSSGFLYYVSIMGITGTKEPNLEILKEQVIKLKKETDIPIGVGFGIKRQNRLKDI

SEQ ID NO: 150891 - protein, 95 aa, Unknown
  Bacterial polypetide isolated from the Sargasso Sea
ISAGLDYPGIGPEHSWLNDQGRVNYVSSTDDEALNAFEICSKYEGIIPALEPSHALAFVFKLAKDMKKDQIIIVNLCGRGDKDIETVADYLGVEV

SEQ ID NO: 150892 - protein, 128 aa, Unknown
  Bacterial polypetide isolated from the Sargasso Sea
MAAPLNDGKEGVLHGMRTYLMQDDAGQVIETHSVSAGLDYPGVGPEHAWLKDIGRAEYEAADDEEALDAFKELTRVEGIMPALETAHGIAYVKKVAPTMSKDSSIVVNVSGRGDKDINTVASIEGIEL

SEQ ID NO: 150893 - protein, 180 aa, Unknown
  Bacterial polypetide isolated from the Sargasso Sea
MSSKIKEVFSNIKAQKRKALITYIVSGDPDIQTTLNIMHRMVEEGADIIELGIPFSDPMAEGVSIQRGHERALEKGASLHDAFELVKEFRLTNKLTPIVFMGYMNTFESLGADLFMQNASSSELDGILIVDMPPEESSEFSLAAKKANIDIIRLIAPNYSYSRAKKICSQCSGYVYYISV

SEQ ID NO: 150894 - protein, 270 aa, Unknown
  Bacterial polypetide isolated from the Sargasso Sea
VKFLLGAKDIQRQQPNVKAMKKNGAEVIPVYSGSQTLVDAVSECMRYWVANCDKVAMCVGSTVGPAVFVRICGWSTSQISRELKIQLINEFGSVPKRLKLYNCVGGGSSSFGFWNEFMDYDKKQCEFIGVEAGGPAKSKKHAAPLTYGSKIGILHGAAQYVNQNTDGQIEETESISAGLDYPGISPLHCFLKDTKRARYTAVSDEEALNAYKLVTKFEKLKPSLEPSHAFSVAIAESKKLSKDTIVVVNSCGDAYKDRGILKKRLGKKYV

SEQ ID NO: 150895 - protein, 268 aa, Unknown
  Bacterial polypetide isolated from the Sargasso Sea
MATRILRTFDELKSNSKTGLITYLTAGFPNQDLCLDIINELSESGSDLIEIGMPFSDPMAEGPIIQQSSKIALDNGHTMELTFDLIKKFRTINSQTPIILMGYYNPIYQYGNENFIKKCLDYGVDGLIVVDLPPEHDSELCDLTIDIDLDFIRLATPTTDQKRLNIVLNKSSGFLYYVSIMGITGTKEPNLDILKEQVIELKKVTNIPIAVGFGIKRSDQAQKISEFSDAIVVGSSLIEKIMGNYQNNKEDLVLSEISEYIKSLKAVI

SEQ ID NO: 150896 - protein, 316 aa, Unknown
  Bacterial polypetide isolated from the Sargasso Sea
KSWYNITADLPEPAPPVLHPGTGEPVGPDDLAPLFPMDLILQEVSSERYIDIPEPVREIYQQWRPSPLYRARRLEKALDTPAKIYYKYEGVSPTGSHKPNTAVAQAFYNKEAGVKKISTETGAGQWGSSLAFAGSIFGLEIEVFMVKVSFQQKPYRKAMMESFGATCIASPSDKTEFGKAYLAKNPDSTGSLGIAISEAVEVAATNDDVKYSLGSVLNHVLMHQTIVGLETLQQMEMAGDYPDVVVGCTGGGSNFAGLMFPFLGEQLRGGANVRIVAVEPAACPSLTKGKYAYDFGDTGNMTPLTKMHTLGSTICA

SEQ ID NO: 150897 - protein, 275 aa, Unknown
  Bacterial polypetide isolated from the Sargasso Sea
LKCKIFMGAKDISRQQPNVKAIKKNGAEVIPVNSGSQTLVDAVSECMRYWVANCDTTAMCVGSTVGPAVFVRICGWSTSQISRELKDQLIDKFGSIPKKLKLYNCVGGGSSSFGFWNEFMDYDKNQCEFIGVEAGGPAGSKKHAAPLTYGSKIGILHGAAQYVNQNSDGQIEETESISAGLDYPGISPLHCFLKDTKRARYTAASDEEALIAYKLVTKFEKLKPSLEPSHAFSVAIKEAKKFSKDTIIVVNSCGDAYKDKGIIEKKLGKKYVKSN

SEQ ID NO: 150898 - protein, 215 aa, Unknown
  Bacterial polypetide isolated from the Sargasso Sea
FGLPFSDPMADGPIIQEANKLALRSKLSTQQSLNLIKELSKSKNNTSFVIMCYLNTVRKFGLNKFIKNIKSIVDGIIIVDLPFEEEDAIKKSLSKNNIHLIKLISPMTDKKRSKKLLKNSKGFIYYISATGITGSNKLDYKEINKNVKSIKKMSSVPVLVGFGIKSKKDVIDISKKTNADGVIIGSALIQKYFDLKMDFDKYIKNLKKFIKEVKV

SEQ ID NO: 150899 - protein, 90 aa, Unknown
  Bacterial polypetide isolated from the Sargasso Sea
MNRINKVFEKDGVIMSIYFTAGFPKKNDTLSIIKELDSAGVEMIEIGLPFSDPLADGPTIQKSSTVALNNGMNTSLLFEQLKDLRKITDV

SEQ ID NO: 150900 - protein, 120 aa, Unknown
  Bacterial polypetide isolated from the Sargasso Sea
SILGTEGIIHGSKTLLMQTQDGQITEPYSISAGLDYPGIGPMHANLFKSKRGKFISIDDDDAMKWGLMLSQIEGIIPAIETSHAFAVLEKMDFNKDDIIIFNCSGRGDKDLDTYIDYFKL

SEQ ID NO: 150901 - protein, 245 aa, Unknown
  Bacterial polypetide isolated from the Sargasso Sea
EGASPSGSHKPNTALAQAFYNKEAGVKKIATETGAGQWGTALSYAGAVFGIEIKVFMVKVSYDQKPYRRAIIESYGGSVVASPSNETNSGRAILEKDPNSSGSLGIAISEAAEVAATNDDTKYALGSVLNHVLMHQSIIGQEALLQMEMANDYPDIVIGCTGGGSNFSGLCNPFLGKKFRGEQDVHAIAVEPSSCPSLTKGKYSYDFGDTLKSAPLLKMHTLGSDFIPSPTHVGGLRYHGMSPML

SEQ ID NO: 150902 - protein, 99 aa, Unknown
  Bacterial polypetide isolated from the Sargasso Sea
MTNLISQIFKNKNKKLVTFVTGGDPDFKTSNEILKIIIENGVDIIEIGMPFSDPMADGPTIQLSSNRALENNIDLDQIFELARNAKKIKEKLPIILMGY

SEQ ID NO: 150903 - protein, 216 aa, Unknown
  Bacterial polypetide isolated from the Sargasso Sea
MDFERLWGIPGAGYAGKMLSMAAKKFGLKCKIFMGAKDIKRQKPNVEAMKKNDAEIVTVTTGSQTLVDAVSECMRYWVSNCDTTHMCVGSTVGPNIFVKICAWSTAQISRELIKQVKDEFGKIPDKLKLINCVGGGSSAAGFWNEFIDTNAEFIGVEAGGPKNSKLHAAPLSNGSKIGILHGAAQYVIQDEEGQIGSTESISAGLDYPGISPLHCF

SEQ ID NO: 150904 - protein, 204 aa, Unknown
  Bacterial polypetide isolated from the Sargasso Sea
IQVAASRALKSGTSLRKVIKLLKSLKGKLNIPIILFSYLNPLLCFGFERFCEMASDAGVSGLIVPDLPLEEAYKFSKIVSNHSMDLILLVAPTTPFERMKQISNHTKGFTYLVSVTGVTGERNKMENRVENLIAKLKDVNSNPIAVGFGISTPEHVNKVREWGADGVIIGSAFVKRISSSSEKDVVDHVGEFCKEMRLAADQKK

SEQ ID NO: 150905 - protein, 72 aa, Unknown
  Bacterial polypetide isolated from the Sargasso Sea
MSSRINKTFANKDKKLVTFVTGGDPDMGTSEKIINAIALSGADIIEIGMPFSDPMADGPTIQLSSHRAIKKK

SEQ ID NO: 150906 - protein, 117 aa, Unknown
  Bacterial polypetide isolated from the Sargasso Sea
GINFIRLATPTTDDRRLPRVLQNTSGFVYYVSITGITGAASAKANNVGPEVARIKSKTDLPVVVGFGIKTPENSHEIASIADGAVVGSAIVEKFADGASVDEICEFVESLASGAHAA

SEQ ID NO: 150907 - protein, 324 aa, Unknown
  Bacterial polypetide isolated from the Sargasso Sea
DTIKYILPESKLPKSWYNITADLPEPTPPVLHPGTGEPVGPDDLAPLFPMDLILQEVSSERYIDIPEPVREIYRQWRPSPLYRARRLEKALDTPAKIYYKYEGVSPTGSHKPNTAVAQAFYNKEAGVKKISTETGAGQWGSSLAFAGSIFGLEIEVYMVKVSFQQKPYRKAMMESFGATCIASPSGRTEFGKAYLAKNPDSTGSLGIAISEAVEIAATNDDVKYSLGSVLNHVLMHQTIVGLETLQQMEMAGDYPDVVVGCTGGGSNFAGLMFPFLGEQLRGGANVRVVAVEPAACPSLTRGKYAYDFGDTGNMTPLTKMHTLG

SEQ ID NO: 150908 - protein, 304 aa, Unknown
  Bacterial polypetide isolated from the Sargasso Sea
IYYKYEGVSPSGSHKPNTAVAQAFYNKEEGTKKITTETGAGQWGTSLAFACKLFGIELDVYMVKVSFEQKPYRKLVMQTYGARCVASPSDETDSGKAILAKDPNNTGSLGIAISEAVEMAAKNPDTKYALGSVLNHVLMHQTIVGNEALIQMEMADDYPDILVGCTGGGSNFSGLVFPFIGKNFREGKNTKVIACEPKSCPSLTKGKFVYDFGDTGRLTPLMKTHTLGSQFIPPATHSGGLRYHAMAPMVSHLKEIGAIDAKAYGQKECFEAGVNFARTEGIVPAPEATHAVKGAVDAALECKK

SEQ ID NO: 150909 - protein, 298 aa, Unknown
  Bacterial polypetide isolated from the Sargasso Sea
LAPLFPMELIMQEVTQERYIDIPGPVLEAYSRWRSTPLVRARALEKALDTPARIYYKYEGASPSGSHKPNTALAQAFYNKEAGVKKIATETGAGQWGTALSYAGAVFGIEIKVFMVRVSYDQKPYRRAIIESYGGSVVASPSNETNSGRAILEKDPNSSGSLGIAISEAAEVAATNDDTKYALGSVLNHVLMHQSIIGQEALLQMEMANDYPDIVIGCTGGGSNFSGLCNPFLGKKFRGEQDVHAIAVEPSSCPSLTKGKYSYDFGDTLKSAPLLKMHTLGSDFMPSPTHVGGLRYHG

SEQ ID NO: 150910 - protein, 123 aa, Unknown
  Bacterial polypetide isolated from the Sargasso Sea
MSSRIKKIFENNSKKLVTFITGGDPDYATSTEILDKIIEKGADVIEIGMPFSDPMADGPTIQLASKRAIDNGTNLETIFNICNHIREKNLSIPIVLMGYYNVILHYGIKNFVDKINSIGVDGL

SEQ ID NO: 150911 - protein, 91 aa, Unknown
  Bacterial polypetide isolated from the Sargasso Sea
MSSRIKKIFENHSKKLVTFVTGGDPDYITSKEILDKIVEKGADIIEIGMPFSDPMADGPTIQLASKRAIDSGTNLETIFKICHHIREKNFS

SEQ ID NO: 150912 - protein, 253 aa, Unknown
  Bacterial polypetide isolated from the Sargasso Sea
MTDSIKYFLPESEMPKSWYNIAADLPQPPPPVLHPGTGQPIGPDDLAPLFPMDLILQEVSTEREIEIPEPVREIYRQWRPSPLYRARRLEKVLDTPAKIYYKYEGVSPTGSHKPNTAVAQAFYNKEAGVKRISTETGAGQWGSSLAFAGTIFGIEIDVFMVRVSFDQKPYRKAMMESFGASCIASPSNTTESGKAILAENPDSTGSLGIAISEAVEVAAQNDDVKYALGSVLNHVLTHQSIIGWKPSSRGKAG

SEQ ID NO: 150913 - protein, 85 aa, Unknown
  Bacterial polypetide isolated from the Sargasso Sea
MVSGKENSLRNMPDINGRFGDFGGRFVAETLMPLILKVESSYEKAIKNEKFINKLDAYRRDFIGRPSPLYFAERLTKFLEEQKFI

SEQ ID NO: 150914 - protein, 249 aa, Unknown
  Bacterial polypetide isolated from the Sargasso Sea
KIDTGKKALVVYITGGLGNEWIQTMHSVIDAGADVVEIGIPFSDPVMDGPVIQLANESSMKSGTTPVSILNDLRGENPAAPLAAMTYYNLAYRMGHERFASGLSSAGISGCILPDLPLEELDAWSDSAAKSNIETILLAAPTTPDERLSEICERSYGFVYAVGLLGVTGVRSELADSAIKIASRLKKVTSKPVLVGVGIGNPEQAVKASEVSDGVIVGSAVVQEMIDGSSPEKVGELVATFRNSLDKNC

SEQ ID NO: 150915 - protein, 131 aa, Unknown
  Bacterial polypetide isolated from the Sargasso Sea
MTIKNSFKQLPNERGYFGTFGGRYVSETLMPLILEVEKEYEKIKSEDKFKKELNHYMETYIGRPSPLFFAERITKDLGGPKIYFKRDELNHTGAHKINNCMGQILLAKKMGKKRIIAETGAGQHGVATATV

SEQ ID NO: 150916 - protein, 99 aa, Unknown
  Bacterial polypetide isolated from the Sargasso Sea
STHSVSAGLDYPGVGPEHSYLRDSGRVVYEAATDEEALDSFHDLTKTEGIMPALETAHALAYAKKIAPDLDKEEILVVNLSGRGDKDMANVAKVEGLTL

SEQ ID NO: 150917 - protein, 232 aa, Unknown
  Bacterial polypetide isolated from the Sargasso Sea
IIKTIINNGADIIEIGMPFSDPMADGPTIQLSSNRAISKGISLEDIFYLASEAKKIKSDLPIILMGYYNLILYFGIKKFVKKCKENGVDGLIIVDLQPEEDEDLINELNKNKIDLIRLITPTTDEGRLKLILKNASGFLYFVSVMGITGQKSADLNELEKSVIFIKKHTNLPVVPGFGIKNSTDVNNICKIADGAVVGSSIIRIIEENLNDRQKMLSQIDKFSKDLKNGTKV

SEQ ID NO: 150918 - protein, 311 aa, Unknown
  Bacterial polypetide isolated from the Sargasso Sea
NIIPDLPNPLPPPLNPQTMEPIGPEDLAPLFPMGLILQEVSQDSFIDIPKPVLDLYKLYRPSPLFRAVRLEKALGTKSRIYYKYEGGSPSGSHKPNTAIPQAFYNAEEGVTKMVTETGAGQWGSALAFACQAFGIELEVFQVAASYLAKPYRKTMMEIYGAKVYSSPSERTDIGKKFLSEDPETPGSLGIAISEAIEVAAKDEKTRYALGSVLNHVLMHQTIIGEEALKQLALADDYPDVIVGCTGGGSNFAGLFTPFARENMQNNKSTVIRAVEPQACPSLTKGTYAYDFGDSVGMAPVVKMHTLGHSFV

SEQ ID NO: 150919 - protein, 167 aa, Unknown
  Bacterial polypetide isolated from the Sargasso Sea
MKDNKMQFTKNESLSRIDEKFYELKKNKKLALMPFIMAGDPNIAITSEILLKLQENGADLIELGIPYSDPLADGPVIQVAASRALKSGTTPKNIIILLESLKGKLNIPIILFSYLNPLLCFGFEQFCDMASNAGVSGLIIPDLPLEEAYKFSKIVRKHSMDLILLVL

SEQ ID NO: 150920 - protein, 110 aa, Unknown
  Bacterial polypetide isolated from the Sargasso Sea
MRNRIDIKFDELRNKNQKALITFITSGDPNQKLSKKILDVLRLGKIDIIEIGFPFSDPMADGPTIQKSSQRAIISGSNLDSTFDLVADFRIKEKKVPIILMGYFNPNFSV

SEQ ID NO: 150921 - protein, 95 aa, Unknown
  Bacterial polypetide isolated from the Sargasso Sea
YCLGSVMGPHPYPWMVRTFHHVIGDEAPEQCLNLMIQLPDVVVACVGGGSNAAGFFSGFSDSDARLVGVEPAGGAAVGRGVPGVVHGMTSYLMQD

SEQ ID NO: 150922 - protein, 190 aa, Unknown
  Bacterial polypetide isolated from the Sargasso Sea
LRKVIKLLESLKGKLNIPIILFSYLNPLLCFGFERFCEMASDAGVSGLIVPDLPLEEAYKFSKIVSNHSMDLILLVAPTTPFERMKQISNHTKGFTYLVSVTGVTGERNKMENRVENLIAKLKDVNSNPIAVGFGISTPEHVNKVREWGADGVIIGSAFVKRISSSSEKDVVDHVGEFCKEMRLAADQKK

SEQ ID NO: 150923 - protein, 168 aa, Unknown
  Bacterial polypetide isolated from the Sargasso Sea
MGYYNPIYQYGNENFIKRCLDDGVDGLIVVDLPPEHDSELCDLTIDIDLDFIRLATPTTDKKRLNIVLNKSSGFLYYVSIMGITGTKEPDLDILKEQVIKLKKETDIPIGVGFGIKRPDQAKMISEFSDAIVVGSSLIEKIMGNYQNNKENLVLSEVSEYIKSLKAVI

SEQ ID NO: 150924 - protein, 297 aa, Unknown
  Bacterial polypetide isolated from the Sargasso Sea
GGAQIWCKDVSAIHGQAHKGYHATVNALICKAAGKKYIVGDTGAGMFGKNLAMAARELKLKCKIFMGTKDIKRQAPNVKFMREAGAEIVPVNTGSATLVDAVSECMRYYVSNCDTTHLAVGSAIGANVFLKICAYSTAQISKELKNQLIEEFGEIPKMKLVNVIGGGSSAIGFWSEFIDYPKKHVELIGVEAKYCAPLTTNAKLAILHGAAQYCLTDKNGQIKETHSISAGLDYPGVSPLHCFLKDAGRARYCSASDEQALAAFKLVTKLEPSVKPSLEPAHCLHEVIRLAPKLKSG

SEQ ID NO: 150925 - protein, 190 aa, Unknown
  Bacterial polypetide isolated from the Sargasso Sea
DSTGKLPDLIYACVGGGSNASGIFLPFLNDESVELVGVEAGGRGVDTGSHAARFYGGKVGIAQGYKTYFFQDEEGQMLHTHSIAAGLDYIGVSPILSYLHDEKRIRFVASTDDAVISATKHLIRTEGIIPALESSHAFASVIEEASHIPEGSQVLINLSGRGDKDIFNIAEAIGDKKWEEFLRQKASSKK

SEQ ID NO: 150926 - protein, 296 aa, Unknown
  Bacterial polypetide isolated from the Sargasso Sea
MVKVSYEQKPYRKMIMQTFGANCYASPSNRTPTGKAILEKDPNNTGSLGIAISEAVEMAAQDKNTKYSLGSVLNHVLMHQTIVGNEAILQMEMADDYPDILVGCTGGGSNFSGLVFPFLGKKFREKKDIRVIACEPKSCPSLTKGKFAYDFGDTGNRTPLVKMHTLGSSFMPPSTHSGGLRYHGMAPMVSHLVDIGAVEAKAFGQKECFDAGVKFANSEGIVPAPEATHAVKGAIDAALECKKNGEKKTILFNLCGHGHFDMQAYGDYFNNKLSDDKYNEAEVNSALENYLKLLNK

SEQ ID NO: 150927 - protein, 268 aa, Unknown
  Bacterial polypetide isolated from the Sargasso Sea
MSDKTKFFLEESKMPKTWYNISSDLPKPLSPVLHPGTLKPIGPDDLAPLFPMALIGQEVSQEREIEIPEPVREIYKQWRPSPLYRARRLEKALDTSAKIYYKYEGVSPTGSHKPNTAVAQAFFNKEEGTKKITTETGAGQWGSSLAFACSIFKIELDVYMVKISYEQKPYRKMIMQTFGANCYASPSNRTPTGKAILEKDPNNTGSLGIAISEAVEMAAQDEGTKYSLGSVLNHVLMHQTIVGNEAIIQMEMANDYPDILVGCTGGGS

SEQ ID NO: 150928 - protein, 301 aa, Unknown
  Bacterial polypetide isolated from the Sargasso Sea
ATVNALICKAAGKKYIVGDTGAGMFGKNLAMAARELKLKCKIFMGTKDIKRQAPNVKFMKDAGAEIIPVDTGSATLVDAVSECMRYYVSNCNTTHLAVGSAIGANVFLKICAYSTAQISKELKTQVIEEFGEIPKMKLVNVIGGGSSAIGFWSEFIDYPKKHVELIGVEAKYCAPLTTNAKLAILHGAAQYCLTDKNGQIKETHSISAGLDYPGVSPLHCFLKDTGRARYCSASDEQALAAFKLVTKLEPSVKPSLEPAHCLHEVIRLAPKLNQDEIIIYNNCGHAYKDRKIIKDRIGYFH

SEQ ID NO: 150929 - protein, 286 aa, Unknown
  Bacterial polypetide isolated from the Sargasso Sea
ALIGQEVSQDREIEIPEPVRDIYKQWRPSPLYRARKLEKFLDTPAKIYYKYEGVSPSGSHKPNTAVAQAFYNKEEGTKKITTETGAGQWGTSLAFACKLFGIELDVYMVKVSFEQKPYRKLVMQTYGARCVASPSNETDSGKAILAKDPNNTGSLGIAISEAVEMAAKNPDTKYALGSVLNHVLMHQTIVGNEALLQMEMADDYPDILVGCTGGGSNFSGLVFPFIGKNFREGKKTRVIACEPKSCPSLTKGKFVYDFGDTGRLTPLMKTHTLGSQFIPPATHSGG

SEQ ID NO: 150930 - protein, 189 aa, Unknown
  Bacterial polypetide isolated from the Sargasso Sea
GTSLTNIFHLVKEIRKVDEKIPIILMGYYNPIYSMGVSKFLEQSKKSGVDGFIIVDLPPEEDEEFCLPARKMGMSFIRLATPTTSNKRIPKVLNNTSGFIYYVSVTGITGSKNLDIKNVEEQVKTIKNHTKIPICVGFGINTPEDAKNVAEIADGVVVGSSIVKLIEEKNSLDSVFKYIEKLANAVHGK

SEQ ID NO: 150931 - protein, 313 aa, Unknown
  Bacterial polypetide isolated from the Sargasso Sea
AKIYLKSDHLNHLGAHKINNSLFQILLAKYMGKTKIYCETGAGAHLIATAACGARFNFPVIGYMGKDDIFLQSTNVLKAKLFGAEVVECVDGTGEKGVLKDACTSVLKAWSSDPEAFYCCGSAIGPHPFPKIVQYAQSIIGKEIKKQILEKENRLPDAIVACIGGGSNLIGCIHDFLDDKEVALYGVEAEHSSALTNGSIGIMQGFKSFMLQSNDGSATLDTKSLASGINFYSCGPEHSYLKSIGRVNYTYATDEEAFSAFQLLCKTEGILPAFEPSFAIAQAIKIAKEMDSDKIVVINICGRGDKDIDTAER

SEQ ID NO: 150932 - protein, 112 aa, Unknown
  Bacterial polypetide isolated from the Sargasso Sea
MLKNSYKKFPDEKGYFGQFGGRYVSETLMPLILEVQNEYEKIKNDENFISEFNYYLETYVGRPSPLFFAERITKDLNGPKIYFKRDELNHTGAHKINNCMGQILLAKKMGKT

SEQ ID NO: 150933 - protein, 210 aa, Unknown
  Bacterial polypetide isolated from the Sargasso Sea
MKVEGRIKNKFVKLEEQNKKGLITFITAGDPNYNISLEILKGLPGSGADVIEIGMPFTDPMADGPSIQASYLRALQEGQNIKKTIELVKNFRVSNQDIPIVLMGYYNPIYKYGVKNFLKEAKAVGVDGLIIVDLPPEADDEVCIPASKMGIDFIRLATPTSSINRLPKIIKNSSGFLYYISVLGITGSKTPKIENINKNIKIIKSLTDIP

SEQ ID NO: 150934 - protein, 269 aa, Unknown
  Bacterial polypetide isolated from the Sargasso Sea
KHYIGRPSPLYFAENLTKNLGGAKILFKQEHLNHTGSHKINNSLFQILLARRMGKKHLICESGAGQHYSATAAVAAKFNMPLIGVMGEIDIKRVNQNIIKAKHYGAKLKSVPGSLKEAITFAIKTWTSNPDYAYIIGSCVSSAPFPKIVTFAQSIIGKEIREQSMAQEGKIPDMIVGCLGGGSNFAGSIYEFLDEPSVKKIGVEAAETAALSNGTLGIMQGMKTYMLQSNDGSKSLGGSSLGAGIQYFSVGPMHSYLKNLKAVDYTFAT

SEQ ID NO: 150935 - protein, 301 aa, Unknown
  Bacterial polypetide isolated from the Sargasso Sea
CTFPILLAKRMGKTKVLCETGAGAHLIATAAAGALKSLPVIGYMGKDDIFKQSTNVLKAKLFGAKVIECVDGTGEKGVLKDACTAVLKAWSNDPDAFYCCGSAIGPHPFPRIVQYAQSVIGREIREQILEKEGRLPDAIAACIGGGSNLIGAVHEFLDDKEVELHGVEPEHSAALTNGTVGIMQGFKSFMLQSDTGDATLSTQSLASGINFYSAGPEHAYLKSIKRILYSHVSDKEAFDAFQLICKTEGILIAFEPAFAVAHGIKLAKKMGKDKILVLNICGRGDKDIDTAERMLGDNLDK

SEQ ID NO: 150936 - protein, 236 aa, Unknown
  Bacterial polypetide isolated from the Sargasso Sea
TLLSVRGLVKGGADIIELGFPFSDPIADGPTIQKASTGSLNNGIKIAKFFKLVKKIRSETDIPLILMTYTNILYKQGYQKFIKNAKNAGIDGLILPDMAIEEAKNYLSAAKSQKMDTIFLVSPNTQKNRLAKIAKATSGFLYMVAVFGTTGVQTKIHQYTIDALKSTKRSVKSIPVGVGFGISNAKDVKKYVSVGADAVIVGSANIKIMENTPISKLEKEILSFTKKLKSETRQSE

SEQ ID NO: 150937 - protein, 182 aa, Unknown
  Bacterial polypetide isolated from the Sargasso Sea
MVTRISKTFDELKLNSQTGLITYLTAGFPNQELCLDIINVLSRSGSDLIEIGMPFSDPMAEGPIIQQSSKMSLDNGHTMELTFDLIKKFRNKNITTPIILMGYYNPIYQYGNDNFIKRCLDYGVDGLIVVDLPPEHDSELCDLTIDIDLDFIRLATPTTDKKRLNIVLNKSSGFLYYVSIMG

SEQ ID NO: 150938 - protein, 102 aa, Unknown
  Bacterial polypetide isolated from the Sargasso Sea
QIREGHSISAGLDYPGIGPEHSWLNDQGRVNYVSSADDEALNAFEICSKYEGIIPALEPSHALAFVFKLAKKMKKDQIIIVNLCGRGDKDIETVANYLGVDV

SEQ ID NO: 150939 - protein, 64 aa, Unknown
  Bacterial polypetide isolated from the Sargasso Sea
MTNRIKKTFENLQLNNKKGIILYLTTGIPDNKTTAELALELFNSGADIIELGIPFSDPLADGVT

SEQ ID NO: 150940 - protein, 183 aa, Unknown
  Bacterial polypetide isolated from the Sargasso Sea
VREQILKLENKLPNLLIACIGGGSNALGLFHEFLDDEQIEMIAVEAAGHGIESGSHAASLSGGKPGILHGNKTYLLQSKDGQIDEAHSISAGLDYPGIGPEHSYLFEQKRVKYMSATDKEAIEAFQYCCNLEGIIPALEPSHALAVLKKIAKNYSKDKIVVMNMCGRGDKDIFTIAEELNIKL

SEQ ID NO: 150941 - protein, 127 aa, Unknown
  Bacterial polypetide isolated from the Sargasso Sea
AASLSGGKPGILHGNKTYLLQSEDGQIDEAHSISAGLDYPGIGPEHSYLFEQKRVEYMSATDKEAIEAFQYCCNLEGIIPALEPSHALAVLKKIAKKYTKDKIVVMNMCGRGDKDIFTIAKELNIKL

SEQ ID NO: 150942 - protein, 109 aa, Unknown
  Bacterial polypetide isolated from the Sargasso Sea
MTNLISQVFKDNKKKLVTFVTGGDPDFETSLQIIKTIINNGVDIIEIGMPFSDPMADGPTIQLSSNRAINKGIDLENIFSLASEAKKTKKDVPIILMGYYNLILYFGIE

SEQ ID NO: 150943 - protein, 309 aa, Unknown
  Bacterial polypetide isolated from the Sargasso Sea
WRNFVPETLKKPIEDLEILFNKLKKDKKFIAERDKYFKNWIGTPTRFIKLENLTNHIGGAQIWSKVVSDANGGAHKIYNATVHCLLAKRSGKKIICGDTGAGYAGKMLSMAAKKFGLKCKIFMGAKDIARQQPNVKAMKKNGAEVIPVYSGSQTLVDAVSECMRFWVANCDTTAMCVGSTVGPSVFVRICGWSTSQISRELKVQLIDEFGSIPKKVKLYNCVGGGSSSFGFWNEFMDYDKKQFEFIGVEAGGPTESKKHAAPLTYGSKIGILHGAAQYVNQNSDGQIEETESISAGLDYPGNFSTSLFF

SEQ ID NO: 150944 - protein, 96 aa, Unknown
  Bacterial polypetide isolated from the Sargasso Sea
MPTSASPDPAGLEPSARPGAHGRFGRFGGQYVPETLMPALAELEQAAAQAWKDPSFTGELNRLLKNYVGRATPLYEAERLTSHYRRADGGPRIWLK

SEQ ID NO: 150945 - protein, 66 aa, Unknown
  Bacterial polypetide isolated from the Sargasso Sea
ATDDEALEAFSWMSKMEGIIPALETAHAISYIKKLKNVKNEDIILNLSGRGDKDINTVAKELGIHL

SEQ ID NO: 150946 - protein, 289 aa, Unknown
  Bacterial polypetide isolated from the Sargasso Sea
CKLVSKATGGAHKAYNAVVHSLICKRLGKTYIGGDTGAGYAGKMLSMAAAKFNLKCKIFMGSKDIERQSINVFSMRSYGAEVIPVDSGSQTLVDAVSECMRWWTSENDQAHMCVGSTVGPTIFVKICAWSTAQISREMKKQVIDEFGEIPKDMKLINCVGGGSSAAGFWNEWIDHDNVELIGVEAGGPEGSSMHAAPLTNNSPLGVLHGATQYVIQDNQGEIEETASISAGLDYPGVSPLHCFLKETGRARYTSASDEEAIDAFQLVSRMEGFVSPSLEPSHAFAEAIK

SEQ ID NO: 150947 - protein, 126 aa, Unknown
  Bacterial polypetide isolated from the Sargasso Sea
MTNLISQAFKNKEKKLVTFVTGGDPDLDTSLEIISTIINNGADIIEIGMPFSDPMADGPTIQLSSNRAISKGTDLESIFTLASEAKKIKGDLPIILMGYYNLILYYGISKFVKKCKENGVDGLIVV

SEQ ID NO: 150948 - protein, 270 aa, Unknown
  Bacterial polypetide isolated from the Sargasso Sea
MWLDPPTRAALLACAGHADYKTRQQAIRALCDLTRDDETGREMWLDPPTRAVLLACAGRADYVTTPWAIRALCDLTRDDETGREMWADPPTRAVLLACAGHADYVTHQQAVFTLRKMWLDPPTRAALLACAGDDDDETRRKAIFALSYVVKQLVGERARKHLIRDDETWHEMWLDPPTRAALLACAHEIWADPPTRAVLLACAGHDDDETRRWAVRALCDLTRDDETGHEMWADLPTRAVLLSCAGHDDEETRQQAVEALCNLTRDDATR

SEQ ID NO: 150949 - protein, 222 aa, Unknown
  Bacterial polypetide isolated from the Sargasso Sea
MDAVPANQGRIAAEFARLAQHGKKALVTFITAGDPGIDFTVPAMHSLVAGGANLLELGIPFSDPEAEGPAIQAANERALANGMTLAKVLEMVVEFRASNSTTPVVLMGYLNSVLAMTNFAQRAKDAGVDGLIMVNLPQEEAADLRQTLSAVGMDLVSLIAPTTADPRAQEIVTTASGFLYYVSLKGTTGSGALAVDEVAERMSFLQTLTDVPICVGFGIKDA

SEQ ID NO: 150950 - protein, 208 aa, Unknown
  Bacterial polypetide isolated from the Sargasso Sea
MKDNKMQITKNESLSKVDEMFCELKNKKKFALMPFIMAGDPNIEITSEILLKLQENGADLIELGIPYSDPLADGPVIQVAASRALKSGTSLRKVIKLLESLKGKLNIPIILFSYLNPLLCFGFERFCEMASDAGVSGIIVPDLPLEEAYKFSKIVSNYSMDLILLVAPTTPFERMKQISKHTKGFTYLVSVTGVTGERNEMENRVENL

SEQ ID NO: 150951 - protein, 263 aa, Unknown
  Bacterial polypetide isolated from the Sargasso Sea
DLPKPLSPVLHPGTLKPIGPDDLAPLFPMALIGQEVSQEREIEIPEPVRNIYKQWRPSPLYRARKLEKALDTSAKIYYKYEGVSPTGSHKPNTAVAQAFYNKEEGTKKITTETGAGQWGSSLAFACSIFKIELDVYMVKVSYEQKPYRKMIMQTFGANCYASPSDRTPTGKAILEKDPNNTGSLGIAISEAVEMAANDENTKYSLGSVLNHVLMHQTIVGNEAILQMEMANDYPDILVGCTGGGSNFSGLAFPFLGKKFKENK

SEQ ID NO: 150952 - protein, 177 aa, Unknown
  Bacterial polypetide isolated from the Sargasso Sea
EKKLPSKIIACIVGGSNAMGLFHSFLDDDKVEIIGVEAGGKGLNSKLHAASLTGGKPGILHGNKTYLIQDLDGQIIDAHSISAGLDYPGIGPEHSWLNDIGRVQYKACTDDEALEAFHLCSKLEGIIPALEPAHALHITIQEAKKMKHDDIIIMNMCGRGDKDLSAVLPKLKEMGKI

SEQ ID NO: 150953 - protein, 225 aa, Unknown
  Bacterial polypetide isolated from the Sargasso Sea
DLPQPPPPVLHPGTGQPIGPDDLAPLFPMDLILQEVSTEREIEIPEPVREIYRQWRPSPLYRARRLEKALDTPAKIYYKYEGVSPTGSHKPNTAVAQAFYNKEAGVKRISTETGAGQWGSSLAFAGTIFGLEIDVFMVRVSFDQKPYRKAMMESFGASCIASPSNTTESGKAILAENPDSTGSLGIAISEAVEVAAQNDDVKYALGSVLNHVLTHQSIIGLEAIK

SEQ ID NO: 150954 - protein, 125 aa, Unknown
  Bacterial polypetide isolated from the Sargasso Sea
SAATSALGKDGVIHGSKTLLMQTHDGQITEPYSISAGLDYPGVGPLHSHLFRTGRAEFISITDENAMQSGLELTQLEGIIPAIETSHAFAVFENRKFETNDIVVVNLSGRGDKDLDTFINFFKLQ

SEQ ID NO: 150955 - protein, 244 aa, Unknown
  Bacterial polypetide isolated from the Sargasso Sea
MGDPNIQITSEILIKLQENGADLIELGIPYSDPLADGPVIQVSASRALKSGTSPRKVIKLLESLKGKLNIPIILFSYLNPLLCFGFEKFCEMASNAGVSGLIVPDLPLEEAYKFSKIVSNHSMDLILLVAPTTPFERMKQISKHTKGFTYLVSVTGVTGERNKMENRVENLITKLKDVNSNPIAVGFGISTPEHVNKVREWGADGVIIGSAFVKRISSSSEKDVVDHVGEFCKEMRLAADQNNK

SEQ ID NO: 150956 - protein, 240 aa, Unknown
  Bacterial polypetide isolated from the Sargasso Sea
MSDRIKYFLEESKMPKTWYNISADLPKPLSPVLHPGTLKPIGPDDLAPLFPMALIGQEVSQDREIEIPEPVREIYKQWRPSPLYRARKLEKALDTTAKIYYKYEGVSPTGSHKPNTAVAQAFFNKEEGTKKITTETGAGQWGSSLAFACSIFKIELDVYMVKVSYEQKPYRKMIMQTFGANCYASPSNRTPTGKAILEKDPNNTGSLGIAISEAVEMAAQDDHTKYSLGSVLNHVLMHQT

SEQ ID NO: 150957 - protein, 168 aa, Unknown
  Bacterial polypetide isolated from the Sargasso Sea
MSKTSISSSILESKARKGIGIIPFLTSGYPSIDESEEIVKSLIEEKLASAIEIGIPFSDPIAEGKTIQKSSSIALENGVDIKTTLDLIERINSFKDHNVPIITMGYYNPILKMGLENFFSASSSVGVKGIIIADVPNDELNKIQKTANNYNIDTIPLVPLNSSEERVN

SEQ ID NO: 150958 - protein, 104 aa, Unknown
  Bacterial polypetide isolated from the Sargasso Sea
DGQIIEPHSISAGLDYPGIGPEHAWLKDVKRVKYVSVTDNEALGAFKLCTKIEGIIPALEPSHALAYLIKEAPRMPKKNIVIMNMCGRGDKDIFTVAKKLKINI

SEQ ID NO: 150959 - protein, 249 aa, Unknown
  Bacterial polypetide isolated from the Sargasso Sea
IFVTAGDPDFQSSLELIKNFPEYGVDFIEIGMPFSDPMADGPSIQLSSQRALMSGMNLKKCLSLIKIFREKNNHTPIILMGYYNPIYKFGKEKFIKNCVDLGVDALIIVDLPPEEDNEFYLEAEINKLSMIRLVTPTTDKKRLKKILLNATGFVYYVSITGITGTQAPDIINVKSNIEKIKQTTDLPIVIGFGIRSPAQASLMADTCDGIVIGSAVVDIIRESLDDNNNTRDKKLISCLDFVKEISKTL

SEQ ID NO: 150960 - protein, 192 aa, Unknown
  Bacterial polypetide isolated from the Sargasso Sea
MNRIDKYFNNLRENKKKAFGIFLTAGYPTINFSERLLKQITNSDIDFIEIGLPFSDPMADGPLIQESSEVALKNNASVSTCLNIVKNIRKKNNDIPIILMGYYNPIFHYGNLKFIKNCKNSGIDGLIIVDLPMEEDEEFFNLSIRNNLPVIRFVTPTTNVDRLKKIVKTAKGFIYYIAVTGITGTKSASLDE

SEQ ID NO: 150961 - protein, 78 aa, Unknown
  Bacterial polypetide isolated from the Sargasso Sea
MTDLINQTFNNKDKKLVTFVTGGDPDFDTSNEIIKTIISNNIDILEIGMPFSDPMADGPTIQLSSNRALENDINLKDI

SEQ ID NO: 150962 - protein, 285 aa, Unknown
  Bacterial polypetide isolated from the Sargasso Sea
ARRLEKFLDTPAKIYYKYEGVSPTGSHKPNTAVPQAFFNKEEGISKIFTETGAGQWGSSLAFAGQIFGIDIEVFMVKVSFDHKPYRKLMMQSFGANCHASPSNLTDFGNKLLSENPDNPGSLGIAISEAIEATVKSGGKAKYSLGSVLGHVLMHQTINGNEAIMQMEMAGDYPDIIVGCTGGGSNLSGLMFPFLGQQLRGGQKIDIIGCEPASCPSFTKGKYAYDHGDMAKMTPLIKMHTLGSDFLPPANHSGGLRYHGMSYHLSHLYELGLMRAKAYGQKDCFE

SEQ ID NO: 150963 - protein, 223 aa, Unknown
  Bacterial polypetide isolated from the Sargasso Sea
MSLRIKKVFENKSKKLVTFTTGGDPDLKISIKILETIINNKVDIIEIGMPFSDPMADGPTIQLSSNRSIKNGTKLNDIFFIVREIRKKNKEIPIILMGYYNVIFYYGINKFVNECKNNGVDGLIIVDLQPEEDGELFKELKKNNISLIRLITPTTNESRLKLILSNASGFLYYVTITGITGQNSADLNELERSIKFIKSHSNLPIIAGFGIKDSNDVKEICNI

SEQ ID NO: 150964 - protein, 236 aa, Unknown
  Bacterial polypetide isolated from the Sargasso Sea
MSDRIKYFLEESKMPKTWYNIAADLPKPLSPVLHPGTLKPIGPDDLAPLFPMALIGQEVSQDREIEIPEPVREIYKQWRPSPLYRARKLEKALDTTAKIYYKYEGVSPTGSHKPNTAVAQAFFNKEEGTKKITTETGAGQWGSSLAFACSIFKIELDVYMVKVSYEQKPYRKMIMQTFGANCYASPSNRTPTGKAILEKDPNNTGSLGIAISEAVEMAAQDDHTKYSLGSVLNHVL

SEQ ID NO: 150965 - protein, 211 aa, Unknown
  Bacterial polypetide isolated from the Sargasso Sea
MSSQKLSPIAQRFEQLKQEKRLALMPFLMAGDPDLVTTSEVLLSLQAAGADMVELGMPYSDPLADGPVIQAAASRALAAGTTPGNVLEMLSSLKGRLTIPVILFTYSNPLLNVGMEVFCERAAAAGAAGLVVPDLPLEEAERLSPLAERQGLDLVLLVAPTTPADRMVRIGQRSRGFTYLVSVTGVTGERAQMENRVEGLVKKLKQSSAAP

SEQ ID NO: 150966 - protein, 348 aa, Unknown
  Bacterial polypetide isolated from the Sargasso Sea
MVVLPRFIKLKNLTKHVGGAQIWSKVVSDANGGAHKIYNATVHCLLAKRSGKKVICGDTGAGYAGKMLSMAAKKFGLKCKIFMGAKDIQRQQPNVRAMKKNGAEVIPVYSGSQTLVDAVSECMRYWVANCDKVAMCVGSTVGPAVFVRICGWSTSQISRELKTQLVDEFGSVPKKLKLYNCVGGGSSSFGFWNEFMDYNKKQCEFIGVEAGGPAKSKKHAAPLTYGSKIGILHGAAQYVNQNTDGQIEETESISAGLDYPGISPLHCFLKDTKRARYTAASDEEALNAYKLVTKFEKLRPSLEPSHAFSIAITESKKFSKDTIVVVNSCGDAYKDRGIIEKKLGRKYV

SEQ ID NO: 150967 - protein, 453 aa, Unknown
  Bacterial polypetide isolated from the Sargasso Sea
MSNQRKFFLEESKMPKTWYNIAADLPKPMEPPLHPGTLKPIGPDDLAPLFPMALIGQEVSQDRDIEIPEPVREIYKQWRPSPLYRARSLEKHLDTPAKIYYKYEGVSPSGSHKPNTAVAQAFFNKEEGTKKITTETGAGQWGTSLAFACKLFGIELDVYMVKVSFEQKPYRKLVMQTYGARCVASPSDETDSGKAILVKDPNNTGSLGIAISEAVEMAAKNPDTKYALGSVLNHVLMHQTIVGNEAILQMEMADDYPDILVGCTGGGSNFSGLVNPFLGKNFREGKKTRVIACEPKSCPTLTEGKYVYDFGDTGKLTPLVKMHTLGSQFIPPATHSGGLRYHGMAPLVSHLKEINAIEAKAYGQKECFEAGVNFARTEGIVPAPEATHAVKGAIDAALECKKNGESKTILFNLCGHGHFDMKAYGDYFDGNLAEDKFDRGSMDKALEDLPKIA

SEQ ID NO: 150968 - protein, 268 aa, Unknown
  Bacterial polypetide isolated from the Sargasso Sea
MVTRISKTFNELKLESQTGLITYLTAGFPNQDLCLEIINELSKSGSDLIEIGMPFSDPMAEGPIIQHSSKLSLDNGHTMELTFELINKFRENNSKTPIILMGYYNPIYQYGNENFIRRCLDDGVDGLIVVDLPPEHDSELCDLTTEIDLDFIRLATPTTDKKRLNTVLNKSSGFLYYVSVMGITGTKEPDLELLKKQVLNLRKETDIPIGVGFGIKRPDQAKKISEFSDAIVVGSSLIESIIKNYKNNNEDDVLLEISEYIKSLKAVI

SEQ ID NO: 150969 - protein, 372 aa, Unknown
  Bacterial polypetide isolated from the Sargasso Sea
MSDTIKYFLEEGKMPKTWYNIAADLPKPLDPVLHPGTLKPIGPDDLAPLFPMALIGQEVSQEREIEIPEPVRDIYKQWRPSPLYRARKLEKFLDTPAKIYYKYEGVSPSGSHKPNTAVAQAFYNKEEGTKKITTETGAGQWGTSLAFACKLFGIELDVYMVKVSFEQKPYRKLVMQTYGARCVASPSSETDSGKAILAKDPNNTGSLGIAISEAVEMAAKNPDTKYALGSVLNHVLMHQTIVGNEALLQMEMADDYPDILVGCTGGGSNFSGLVFPFIGKNFREGKNTRVIACEPKSCPSLTKGKFVYDFGDTGRLTPLMKTHTLGSQFIPPATHSGGLRYHAMAPMVSHLKEIGAIEAKAYGQKECFEAGV

SEQ ID NO: 150970 - protein, 405 aa, Unknown
  Bacterial polypetide isolated from the Sargasso Sea
MSDQRKYFLEESKMPKTWYNIAADLPKPMEPPLHPGTLKPIGPDDLAPLFPMALIGQEVSQDRDIEIPEPVREIYKQWRPSPLYRARSLEKHLDTPAKIYYKYEGVSPSGSHKPNTAVAQAFFNKEEGTKKITTETGAGQWGTSLAFACKLFGIELDVYMVKVSFEQKPYRKLVMQTYGARCVASPSNETDSGKAILAKDPNNTGSLGIAISEAVEMAAKNPDTKYALGSVLNHVLMHQTIVGNEAILQMEMADDYPDILVGCTGGGSNFSGLVNPFLGKNFREGKKTRVIACEPKSCPTLTEGKYVYDFGDTGKLTPLVKMHTLGSQFIPPATHSGGLRYHGMAPLVSHLKEINAIEAKAYGQKECFEAGVNFARTEGIVPAPEATHAVKGAIDAALECKKNGE

SEQ ID NO: 150971 - protein, 268 aa, Unknown
  Bacterial polypetide isolated from the Sargasso Sea
MVTRISKTFNELKLESQTGLITYLTAGFPNQDLCLKIINELSKSGSDLIEIGMPFSDPMAEGPIIQNSSKLSLDNGHTMELTFELINKFRKNNTKTPIILMGYYNPIYQYGNENFISRCLNDGVDGLIVVDLPPEHDSELCDLTTEIDLDFIRLATPTTDKKRLNTVLNKSSGFLYYVSVMGITGTKEPDLELLKKQVINLRKETDIPIGVGFGIKRPDQAKKISEFSDAIVVGSSLIEKIIINYKNNNEDDVLLEISEYIKSLKAVI

SEQ ID NO: 150972 - protein, 404 aa, Unknown
  Bacterial polypetide isolated from the Sargasso Sea
MSKDSKFFLKDSDVPKQWYNLVADLKEPMSPPLNPGTKQPLGPDDLAPLFPMDLIMQEVSQERYIDIPGPVLEAYSRWRCTPLVRARALEKALDTPARIYYKYEGASPSGSHKPNTALAQAFYNKEAGVKKIATETGAGQWGTALSYAGAVFGIEIKVFMVRVSYDQKPYRRAIIESYGGSVVASPSNETNSGRAILEKDPNSAGSLGIAISEAAEVAATNEDTKYALGSVLNHVLMHQSIIGQEALLQMEMADDYPDIVIGCTGGGSNFSGLCNPFLGKKFRGEQDVHAIAVEPSSCPSLTKGKYSYDFGDTLKSAPLLKMHTLGSDFMPSPTHVGGLRYHGMAPMLSHLVHNGHMEPRAYGQKECLEAGIQFARTEGIMPAPEATHAIKGAVDEALKCKAEG

SEQ ID NO: 150973 - protein, 249 aa, Unknown
  Bacterial polypetide isolated from the Sargasso Sea
MITFVTGGDPDFETSKDIIKTIINNNIDIIEIGMPFSDPMADGPTIQLASNRAIKKEINLDKIFSLSKFAKNLKNNLPIILMGYYNMILHYGVKNFVTNCVKNGVDGLIVVDLQPEEDEELIENLKDSNIDLIRLITPTTNEERLKLILQNASGFLYFVSVTGITGQKSANLIELEKSIRKIKNFTGLPVVPGFGIKNSTDVKNICKISDGAVVGSSIIKIIEDNLADKKEMIRKIDLFTKDLKEATNI

SEQ ID NO: 150974 - protein, 453 aa, Unknown
  Bacterial polypetide isolated from the Sargasso Sea
MSDQLKYFLEESKMPKSWYNISADLPKPMDPPLHPGTLKPIGPDDLAPLFPMALIGQEVSQEREIEIPEPVRKIYKQWRPSPLFRARNLEKFLDTPAKIYYKYEGVSPTGSHKPNTAVAQAFFNKEEGTKKITTETGAGQWGSSLAFACQIFGIELDVYMVKVSFEQKPYRKLIMQTYGASCFASPSNRTDSGKAILAKDPNNTGSLGIAISEAVEMAAKDPNTKYSLGSVLNHVLMHQTIVGNEALLQMEMAGDYPDILVGCTGGGSNFSGLVFPFLGKKFRENKNTRVIACEPKSCPSLTKGKYVYDFGDTGRLTPLVKMHTLGSQFIPPATHSGGLRYHGMAPMVSHLKEIGAIEAQSFGQKECFEAGVNFARSEGIVPAPEATHAVKGAIAAAMECKKNGESKTILFNLCGHGHFDMKAYGDYFDNNLAEDKYDESGVNKALEELPKIA

SEQ ID NO: 150975 - protein, 366 aa, Unknown
  Bacterial polypetide isolated from the Sargasso Sea
NKKFISERDKYFLNWVGSPTRFIKLENLTNHIGGAQIWSKVVSDANGGAHKIYNATVHCLLAKRSGKKIICGDTGAGYAGKMLSMAAKKFGLKCKIFMGAKDIARQQPNVKAMKKNGAEVIPVYSGSQTLVDAVSECMRFWVANCDTTAMCVGSTVGPAVFVRICGWSTSQISRELKAQLIDEFGSIPKKLKLYNCVGGGSSSFGFWNEFMDYDKRQVEFIGVEAGGPKKSKKHAAPLTYGSKIGILHGAAQYVNQNSDGQIEETESISAGLDYPGISPLHCFLKDTKRARYTAASDEEALSAYKLVTKFEKLRPSLEPSHAFFVALKEAKKLSKDTVVVINSCGDAYKDRGILEKRLGKKYVKSN

SEQ ID NO: 150976 - protein, 451 aa, Unknown
  Bacterial polypetide isolated from the Sargasso Sea
MKEQYKYLLNEDDLPKQWYNIVPDLPNPLPPQLNPQTMEPIGPEDLAPLFPMGLILQEVSDQNYIDIPEPVLELYKLYRPSPMYRALRLERAIGTNSRIYYKYEGGSPSGSHKPNTAIPQAFFNAEEGIKKMVTETGAGQWGSALSFACQAFGIELEVFQVAASYESKPYRKTMMEIYGAKVYPSPSDKTDIGKKFLTEDPNTPGSLGIAISEAIEVARKEEGTRYALGSVLNHVLMHQSVIGLEALKQMEMAEDYPDVIVGCTGGGSNFTGLFSPFLRNNILTDQKTTIRAVEPEACPSLTKGVYTYDFGDSVGMAPVVKMHTLGSSFVPDPIHAGGLRYHGMAPLVSAMYEENLIEAEAIGQKECFEAGQLFAKTEGIVPAPEATHAIASAIRAAKDADQNSKEIAVLTAMCGHGHFDMKAYENFLSGEMIDYEFPADKVKVALESVKK

SEQ ID NO: 150977 - protein, 253 aa, Unknown
  Bacterial polypetide isolated from the Sargasso Sea
MIGGKYIEKKIRTPKAGGPAIIPFITAGYPNTEDFKQTLHEIAKKADVIEIGVPFSDPMADGVTIQRSSHLAIENGVTLTWIFDQLREIKLDTPIVLMSYLNPLYVFGMKELVEASIASGVDGFIVPDLPIEESKELNEQLMDADLALIQLVTPATPLDRIELISNQSTGFIYAVTIKGVTGGEDALSADVTDYLKQVQEISRIPVCAGFGIREKSDVEMIADYVDGVIVGSAIVETIEKGNSPTEFLDQLKN

SEQ ID NO: 150978 - protein, 340 aa, Unknown
  Bacterial polypetide isolated from the Sargasso Sea
KSNKTCWRSSNWSKVVSDANGGAHKIYNATVHCLLAKQSGKKFIIGDTGAGYAGKMLSMAAKKFGLKCKIFMGAKDIARQQPNVKAMKKNGAEVIPVYSGSQTLVDAVSECMRFWVANCDTTAMCVGSTVGPAVFVRICGWSTSQISRELKVQLVDEFGSIPKKLKLYNCVGGGSSSFGFWNEFMDYDKKQCEFIGVEAGGPERSKKHAAPLTYGSKIGILHGALQYVNQDSDGQIEETESISAGLDYPGISPLHCFLKDTKRARYTAASDEEALRAYKIVTKFEKLRPSLEPSHAFSVAIKESKKFSRDTVVVVNSCGDAYKDKGILEKKLGKKYVKFN

SEQ ID NO: 150979 - protein, 213 aa, Unknown
  Bacterial polypetide isolated from the Sargasso Sea
MISFITAGDPSAEHTIPALHALVRGGVDVIELGIPFSDPEAEGPSIQRSSERALENGVGLDSVLRMVQEFREKDTETPIVLMGYLNSILAMANFTEKASKSGVDGLIVVNLPPEEAEDLQLSLKQNDIDLIYLLAPTTTEKRSAFIAEKASGFLYYVSLKGITGAGHIEVDEVASRIESLREITDLPLCVGFGIKNATTATEIGKFSDGVVVG

SEQ ID NO: 150980 - protein, 453 aa, Unknown
  Bacterial polypetide isolated from the Sargasso Sea
MADTIKYFLEESKMPKTWYNIAADLPKPMEPPLHPGTLKPIGPDDLAPLFPMALIGQEVSQDREIEIPEPVREIYKQWRPSPLYRARKLEKHLDTPAKIYYKYEGVSPSGSHKPNTAVAQAFYNKEEGTKKITTETGAGQWGTSLAFACKLFGIELDVYMVKVSFEQKPYRKLVMQTYGARCVASPSNETDSGKAIIAKDPNNTGSLGIAISEAVEMAAKNPDTKYALGSVLNHVLMHQTIVGNEALLQMEMADDYPDILVGCTGGGSNFSGLANPFLGKNFREGKKTRVIACEPKSCPTLTEGKYVYDFGDTGKLTPLVKMHTLGSQFIPPATHSGGLRYHGMAPLVSHLKEINALEAKAYGQKECFEAGVNFARTEGIVPAPEATHAVKGAIDAALECKKNGESKTILFNLCGHGHFDMKAYGDYFEGNLAEDKFDKGSMDKALEDLPKIA

SEQ ID NO: 150981 - protein, 88 aa, Unknown
  Bacterial polypetide isolated from the Sargasso Sea
MLDNRINSFKEGPDENGRFGNFGGRFVSETLMPLILLLEKEYEKAKSDDNFWKEMEFFLKDYVGRPSPLYFSERLTNHFGGAKIYLKP

SEQ ID NO: 150982 - protein, 99 aa, Unknown
  Bacterial polypetide isolated from the Sargasso Sea
MNRIDQIFLTKEKLLSIYFTAGYPNLNDTIPILKKLQEAGVDIIEIGLPFSDPLADGPTIQESSKIALNNGMNSEKLFNQLKNVRNEVDVPLIIMGYFN

SEQ ID NO: 150983 - protein, 420 aa, Unknown
  Bacterial polypetide isolated from the Sargasso Sea
MKKQYKYLLNESDIPKQWYNIVPDLPNPLPPQLNPQTMEPIGPEDLAPLFPMGLILQEVSDQNYIDIPEPVLELYKIYRPSPMYRALRLEEALGTKSRIYYKYEGGSPSGSHKPNTAIPQAFYNAEEGVKKMVTETGAGQWGSALSFACQAFGIELEVFQVAASYASKPHRKTMMEIYGATVHPSPSERTDIGKQFLSQDPNTPGSLGIAISEAIEVARKEEGTRYALGSVLNHVLMHQSIIGLEALKQMEMAEDYPDIIVGCTGGGSNFTGLFSPFAKNNMESNKKTIIRAVEPQACPSLTKGVYTYDFGDSVGMAPVVKMHTLGSSFVPDPIHAGGLRYHGMAPLVSAMYEDNLIEAEAIGQQECFEAGQLFAKTEGIVPAPEATHAIASAIRAVKDADQRSEQVAVLTANVWSWTHF

SEQ ID NO: 150984 - protein, 157 aa, Unknown
  Bacterial polypetide isolated from the Sargasso Sea
MTIKNSFKNLPNEKGYFGSFGGRYVSETLMPLILEVEKEYEKIKNESEFKEKLNHYMETYIGRPSPLFFAERITKDLGGPKIYFKRDELNHTGAHKINNCMGQILLAKKMGKKRIIAETGAGQHGVATATVCALFGLPCIVYMGEKDIKRQSPNFLE

SEQ ID NO: 150985 - protein, 263 aa, Unknown
  Bacterial polypetide isolated from the Sargasso Sea
MSSKIKEVFSNIKAQKRKALITYIVSGDPDIQTTLNIMHRMVEEGADIIELGIPFSDPMAEGVSIQRGHERALEKGASLHDAFELVKEFRLTNKLTPIVFMGYMNTFESLGADLFMQNASSSKLDGILIVDMPPEESSEFSLAAKKANIDIIRLIAPTTSSSRAKKICSQCSGYIYYISVKGITGAGNMDAADVKNKVGELRKHTDLPIAIGFGIKDAASASSVMEVADGIVVGSVFVDLIGEGGNIIEKVSAKTKELSEVLH

SEQ ID NO: 150986 - protein, 68 aa, Unknown
  Bacterial polypetide isolated from the Sargasso Sea
CTDDEALYAFNILCKTEGIIPALETSHAIHYAMELAKNMSSGKNIVVNLSGRGDKDLNTVSKIEGIKI

SEQ ID NO: 150987 - protein, 135 aa, Unknown
  Bacterial polypetide isolated from the Sargasso Sea
VESGLHAASLTGGRPGILHGNRTYLLQNEDGQITEAHSISAGLDYPGIGPEHSWLFENGRVDYVCATDEEALEAFALCSRLEGIIPALEPSHALAYISTIIGALPREHIIIMNMCGRGDKDLEAVLPLLEKMGKL

SEQ ID NO: 150988 - protein, 251 aa, Unknown
  Bacterial polypetide isolated from the Sargasso Sea
MKDNKMQITKNESLSKVDKMFCELKNNKKLALMPFIMAGDPNIEITSEILLKLQENGANLIELGIPYSDPLADGPVIQVAASRALKSGTNPRKVIKLLESLKGKLNIPIILFSYLNPLLCFGFEKFCEMASNAGVSGLIVPDLPLEEAYKFSKIVSNHSMDLILLVAPTTPFERMKQISNHTKGFTYLVSVTGVTGERNKMENRVENLIAKLKDVNSNPIAVGFGISTPEHVNKVREWGADGSNNWECICK

SEQ ID NO: 150989 - protein, 453 aa, Unknown
  Bacterial polypetide isolated from the Sargasso Sea
MSDQLKYFLEESKMPKTWYNIAADLPKPMEPPLHPGTLKPIGPDDLAPLFPMALIGQEVSQDREIEIPEPVRKIYKQWRPSPLYRARNLEKFLDTPAKIYYKYEGVSPTGSHKPNTAVAQAFFNKEEGTKKITTETGAGQWGSSLAFACQIFGIELDVYMVKVSFEQKPYRKLIMQTYGASCFASPSNRTDSGKAILAKDPNNTGSLGIAISEAVEMAAKDPNTKYSLGSVLNHVLMHQTIVGNEALLQMEMADDYPDILVGCTGGGSNFSGLVLPFLGKKFRENKNTRVIACEPKSCPSLTKGKYVYDFGDTGRLTPLVKMHTLGSQFIPPATHSGGLRYHGMAPLVSHLKEIGAIEAQAFGQKECFEAGVNFARSEGIVPAPEATHAVKGAITAALECKKNGESKTILFNLCGHGHFDMKAYGDYFDNNLAEDKYDEAGVNKALEELPKIA

SEQ ID NO: 150990 - protein, 72 aa, Unknown
  Bacterial polypetide isolated from the Sargasso Sea
EYAAVTDQQPWDALRLVSELEGIIPALETAHAFAWLEQLCPTLPEGSEIVINCSGRGDKDVNTVAEKLGDQL

SEQ ID NO: 150991 - protein, 454 aa, Unknown
  Bacterial polypetide isolated from the Sargasso Sea
MSDSIKYLLEENKAPKFWYNINADLPSPPPPPLHPGTKQPAGPDDFAPLFPMGLIMQEVSTEREIEIPEPVREVYKQWRPSPLFRARRLEKFLDTPAKIYYKYEGVSPTGSHKPNTAVPQAFFNKEEGISKIFTETGAGQWGSSLAYAGQIFGIDIEVFMVKVSFDHKPYRKLMMQTFGANCHASPSNLTDFGNKLLSENSDNPGSLGIAISEAIEATVKSGGKAKYSLGSVLGHVLMHQTINGNEAIMQMEMAGDYPDIIVGCTGGGSNLSGLMFPFLGQQLRGGQKIDIIGCEPASCPSFTKGKYAYDHGDMAKMTPLIKMHTLGSDFLPPANHSGGLRYHGMSYHLSHLYELGLMRAKAYGQKDCFEAGLTFAKQEGIIPAPEGNHAIKGAIDAALECKEKGESKTILFNLCGHGYFDMSAYDDYLNGSMADDVIDDDGIGKSISQIPEVA

SEQ ID NO: 150992 - protein, 97 aa, Unknown
  Bacterial polypetide isolated from the Sargasso Sea
MWSEKLNSYKTGPDENGRFGNYGGMFVSETLMPLIIELKVQYEKAREDQDFLSEMNYLWKHYVGRPSPLYFAERITEKVSGAKIYFKRDELNHHGCP

SEQ ID NO: 150993 - protein, 443 aa, Unknown
  Bacterial polypetide isolated from the Sargasso Sea
MTESVKYILEESKAPKFWYNINSDLPSPPPPPLHPGTKQPAGPDDFAPLFPMSLIMQEVSTEREIEIPEPVREIYKQWRPSPLYRARRLEKFLDTPAKIYYKYEGVSPTGSHKPNTAVPQAFFNKEEGVNKIFTETGAGQWGSSLAFAGQMFGIEVEVFMVKISFDQKPYRKLMMQTFGGKCHPSPSSLTDFGKKLLEENPNNPGSLGIAISDAIEAVVKSQGKAKYSLGSVLGHVLMHQTINGNEAILQMEQAGDYPDIIVGCTGGGSNLSGLMFPFLGQQLRGGKKIDIIGCEPLSCPSFTKGKYAYDHGDMAKMTPLIKMHTLGSDFLPPANHSGGLRYHGMSYHLSHLYELGLMRAKAYGQKDCFEAGVIFGKQEGIIPAPEANHAVKGAIDAALECKQNGEAKTILFNLCGHGHFDMSAYDDYFSGKLADDVFEEDSV

SEQ ID NO: 150994 - protein, 156 aa, Unknown
  Bacterial polypetide isolated from the Sargasso Sea
MFGSQYIEERIRAPKAPGPAIIPFITAGYPNAEEFKQTLYDISKKADVIEIGVPFSDPMADGVTIQRSSSVAIENGVTLTWIFSQLKEIKLDIPIVLMSYLNPLYVFGMKELVEASIASGVDGYIVPDLPIEESKELNGQLTEAGLALIQLVTPAT

SEQ ID NO: 150995 - protein, 253 aa, Unknown
  Bacterial polypetide isolated from the Sargasso Sea
MIGGKYIEKKIRTPKAAGPAIIPFITAGYPNTEDFKQTLHEIAKKADVIEIGVPFSDPMADGVTIQRSSHLAIENGVTLSWIFDQLKEIKLDTPIVLMSYLNPLYVFGIEELVEASIASGVDGFIVPDLPIEESKELNEQLMDADLALIQLVTPATPLDRIELISNQSTGFIYAVTVKGVTGGEDALSADVTDYLKQVQEISRIPVCAGFGIREKSDVEMISDYVDGVIVGSAIVETIEKGNSPTEFLDQLKN

SEQ ID NO: 150996 - protein, 107 aa, Unknown
  Bacterial polypetide isolated from the Sargasso Sea
MLLHDDDGLIQETHSVSAGLDYPGVGPEHAFLQSINRVQYTSARDDEALELLREVCEYEGILPAIESSHAFVEARKWARGNQGKRILIGLSGRGDKDMPTLSKLMNE

SEQ ID NO: 150997 - protein, 229 aa, Unknown
  Bacterial polypetide isolated from the Sargasso Sea
KLQENGADLIELGIPYSDPLADGPVIQVAASRALKSGTSLRKVIKLLESLKDKLNIPIILFSYLNPLLCFGFERFCEMASDAGVSGLIVPDLPLEEAYKFSKIVSNHSMDLILLVAPTTPFERMKQISNNTKGFTYLVSVTGVTGERNKMENRVENLIAKLKGVNSNPIAVGFGISTPEHVNKVREWGADGVIIGSAFVKRISSSSEKDVVDHVGEFCKEMRLAADQKK

SEQ ID NO: 150998 - protein, 365 aa, Unknown
  Bacterial polypetide isolated from the Sargasso Sea
MSEDSKFFLKDSDVPKQWYNLGADLKEPMSPPLNPGTKQPIGPDDLAPLFPMELIMQEVTQERYIDIPGPVLEAYSRWRSTPLVRARALEKALDTPARIYYKYEGASPSGSHKPNTALAQAFYNKEAGVKKIATETGAGQWGTALSYAGAVFGIEIKVFMVRVSYDQKPYRRAIIESYGGSVVASPSNETNSGRAILEKDPNSSGSLGIAISEAAEVAATNDDTKYALGSVLNHVLMHQSIIGQEALLQMEMANDYPDIVIGCTGGGSNFSGLCNPFLGKKFRGEQEVHAIAVEPSSCPSLTKGKYSYDFGDTLKSAPLLKMHTLGSDFMPSPTHVGGLRYHGMSPMLSHLVHNGHMEPRAYGQK

SEQ ID NO: 150999 - protein, 266 aa, Unknown
  Bacterial polypetide isolated from the Sargasso Sea
MTRIQEKFNQLKSKNEAALISYIMVGYPSEKATLAAVRGLIKGGTDIIELGFPFSDPIADGPTIQMASTESLNKGTKIDDFFSIVKKIRKEADIPLVLMTYTNILYNQTYQKFISRAKEVGIDGLILPDMAIEESKDYVKAAKKSGMDTIFLVSPNTQNDRLKKIIKATSGFLYMVAVFGTTGVQTKIHKYTIDALKNTKRSANGKIPVGVGFGISTDKDVHKYVSSGADAVIVGSANIKIMENTPANKIESKIFTFTKKLKNKTR

SEQ ID NO: 151000 - protein, 368 aa, Unknown
  Bacterial polypetide isolated from the Sargasso Sea
MSDQLKYFLEESKMPKTWYNIAADLPKPMEPPLHPGTLKPIGPDDLAPLFPMALIGQEVSQEREIEIPEPVRNIYKQWRPSPLFRARNLEKFLDTPAKIYYKYEGVSPTGSHKPNTAVAQAFFNKEEGTKKITTETGAGQWGSSLAYACQIFGIELDVYMVKVSFEQKPYRKLIMQTYGASCFASPSNRTDSGKAILAKDPNNTGSLGIAISEAVEMAAKDPNTKYSLGSVLNHVLMHQTIVGNEALLQMEMTDDYPDILVGCTGGGSNFSGLVFPFLGKKFRENKNTRVIACEPKSCPSLTKGKYVYDFGDTGRLTPLVKMHTLGSQFIPPATHSGGLRYHGMAPMVSHLKEIGAIEAQSFGQKECF

SEQ ID NO: 151001 - protein, 141 aa, Unknown
  Bacterial polypetide isolated from the Sargasso Sea
VPDLPLEEAYKFSKIVSNHSMDLILLVAPTTPFERMKQISNHTKGFTYLVSVTGVTGERNKMENRVENLIAKLKNVNSNPIAVGFGISTPEHVNKVREWGADGVIIGSAFVKRISSSSEKDVVDHVGEFCKEMRLAADQKK

SEQ ID NO: 151002 - protein, 223 aa, Unknown
  Bacterial polypetide isolated from the Sargasso Sea
MTKNSLKNGPDEFGYYGEFGSRYAPEILMPNLIELEKAFNDAIKDKKFIDEFEYYLKEWIGRPNPLYFAEQLTNQIGGAKIYFKSDHLNHLGAHKGNNALFQILLAKRMGKTKVLCETGAGAHLIATAAAGAFKSLPVIGYMGKDDIFKQSTNVLKAKLFGAKVIECVDGTGEKGVLKDACTAVLKAWSNDPDAFYCCGSAIGPHPFPRIVQYAQSVIGKEIK

SEQ ID NO: 151003 - protein, 161 aa, Unknown
  Bacterial polypetide isolated from the Sargasso Sea
GGSNAAGMFYPFVDHPDVRLVGVEAGGRSGGDGEHAAPLTYGTPGILHGSLSYVLQDADGQTADVHSVSAGLDYPGVGPEHSFWRDSGRVDYTSVTDAAALDAFDMVAQQEGVLPALETSHALAWAVEAASKMRPEEILVVCMSGRGDKDAAEIARLRGHE

SEQ ID NO: 151004 - protein, 263 aa, Unknown
  Bacterial polypetide isolated from the Sargasso Sea
MEDAFALCKTESRRAVAPFVTAGDPDSESTSAILESIYEAGATCCELGVPYSDPIADGPVIQSSYTRALNAGMTLTKMFDVVATFSKSHSMPLLAMASYSLIFRNGIETFVKRGEASGLAGFVVPDLPLEESDELDTQCRRAGLALVRLVTPTTPPERAREIARRSTGFLYCVSVAGVTGERTVLPENLVERIQWLREESDVPILVGFGISTADQAREVAAVADGVIVGSAVVRCVEKAQETTSMPESVGDFVRELVEACRLN

SEQ ID NO: 151005 - protein, 251 aa, Unknown
  Bacterial polypetide isolated from the Sargasso Sea
MRIDNCFETLKLTNKKALITFLTAGDPNYDLSLELIKSLPEAGADIIEIGMPFSDPMADGPAIQASSLRAINSGHKMEKTFEMIESFRKDNSRTPIILMGYFNPIYNYGVDSFIKKIIDIEVDGVIVVDLPPEEDNELCNALESADLSFIRLVTPTTNADRLNKILQKTSGFLYYVSIAGITGSKRPEIDEVETAVQEIKTKTNIPIGVGFGIRTKEDIERVGSFADGVIVGSVLVDIIKNNERESSLKIK

SEQ ID NO: 151006 - protein, 266 aa, Unknown
  Bacterial polypetide isolated from the Sargasso Sea
MSKIKEKFKELKSKKESALISYIMAGYPSERATLAAVRGLIQGGTDIIELGFPFSDPIADGPTIQMASTESLNGGTKIDNFFAIVKKIRKESDIPLVLMTYTNILYNQTYQKFISRAKQAGIDGLILPDMAIEESKEYVKAAKKIGIDTIFLVSPNTEKDRLKQIIKSTSGFLYMVAVFGTTGVQTKIHKYTIDALKNTKNSAKGKIPVGVGFGISTEKDVQKYVSSGADAVIVGSANIKIIENTPASKIQTRIATFTKKLKNKTR

SEQ ID NO: 151007 - protein, 254 aa, Unknown
  Bacterial polypetide isolated from the Sargasso Sea
MNRINQVFKNSKDILSIYFTSGFPKLDDTLEIIKELDSSNVEMIEIGLPFSDPLADGPTIQKSSEIALKNGMTTDLLFKQLNGLRAITDIPVVIMGYFNPILQYGFEKFCTRCKNVGIDGLIVPDLPVEIYQKDYIKITEKFGLNMMFLITPQTSNERIYKIDKFSNGFIYMVSSYSVTGARNSFDEYQIDYFKRIKKMKLSNPLLIGFGIGNNNTYKTACKYSSGAIIGSAFIKHIKKNGVKRTKDFISEITE

SEQ ID NO: 151008 - protein, 191 aa, Unknown
  Bacterial polypetide isolated from the Sargasso Sea
MNSRISKTFSNNENKLVTFVTAGDPDIITSEKIINTIASSGADIIEIGMPFSDPMADGPTIQLSSNRAIKQNINLDKIFSICNNFRKNNSKIPIILMGYYNIIFSYGIEKFVKECNNNGVDGLIIVDLQPEEDAELLNAIKKTAINLIRLITPTTDSKRLDKILENSSGFLYYVTITGITGQHSANIDQLK

SEQ ID NO: 151009 - protein, 169 aa, Unknown
  Bacterial polypetide isolated from the Sargasso Sea
MTSKIKEVFSNIKAENRKALITYIVSGDPDTETTIEIMNSMVRQGTDIIELGIPFSDPMAEGISIQKGHERALEKGASLSGAFELLKKFRVNDKKTPIIFMGYMNTFESLGANKFMLEAVKASLDGILIVDMPPEESSNFSIEAKKVGVDIIRLIAPTTSSTRAKKICS

SEQ ID NO: 151010 - protein, 411 aa, Unknown
  Bacterial polypetide isolated from the Sargasso Sea
MKLKKGIPVIDQGNKLGFWGGKFGGNFVPETLKKPIEDLEILFNKLKKDKKFINERDKYFKNWVGSPTRFIKLENLTKHVGGAQIWSKVVSDANGGAHKIYNATVHCLLAKRSGKKVICGDTGAGYAGKMLSMAAKKFGLKCKIFMGAKDIERQQPNVKAIKKNGAEVIPVYSGSQTLVDAVSECMRFWVANCDTTAMCVGSTVGPAVFVRICGWSTSQISRELKVQLINEFGSIPKKLKLYNCVGGGSSSFGFWNEFMDIDKRQCEFIGVEAGGPKKSKKHAAPLTYGSKIGILHGAAQYVNQNSDGQIEETESISAGLDYPGISPLHCFLKDTKRARYTAASDEDALEAFKLVTKYEKLRPSLEPSHAFSVAIKESKKFSKDTIVVVNSCGDAYKDKQIIKKRLGKKYA

SEQ ID NO: 151011 - protein, 268 aa, Unknown
  Bacterial polypetide isolated from the Sargasso Sea
MATRILRTFDELKSNSQTGLITYLTAGFPNQDLCLDIINELSKSGSDLIEIGMPFSDPMAEGPIIQQSSKIALDNGHTMELTFDLIKKFRSKNSQTPIILMGYYNPIYQYGNENFIKRCLDDGVDGLIVVDLPPEHDSELCDLTIDIDLDFIRLATPTTDKKRLNIVLNKSSGFLYYVSIMGITGTKEPNLDILKEQVITLKKETDIPIGVGFGIKRPDQAQKISEFSDAIVVGSSLIEKIMGNYQNNKENLVLSEVSEYIKSLKAVI

SEQ ID NO: 151012 - protein, 253 aa, Unknown
  Bacterial polypetide isolated from the Sargasso Sea
MFGGQYIEDRIKAPKAPGPAIIPFITAGYPNAEDFKQTLYDLAKKADVIEIGVPFSDPMADGVTIQRSSHMAIENGVTLTWIFSQLKEIKLDTPIVLMSYLNPLYVFGLKELVEASIESGVDGYIVPDLPIEESKELNDQLTDAGLALIQLVTPATPSDRIEIITKQSSGFIYAVTVKGVTGGENALSADVTDYLEQVHEISKIPVCAGFGIRDKSDVEMIAEHVDGIIVGSAIVETIEQGNSPTEFLDRLKN

SEQ ID NO: 151013 - protein, 139 aa, Unknown
  Bacterial polypetide isolated from the Sargasso Sea
MKLIDKIKSNNKSRKISFVSYITAGDPDINTSLNIMKNLAENGTDIIELGVPFSDPISDGPIIQKATERALSNKVDMKKVLDLVKKFRKNYSTPIVIFGYYNPFLKYGLNKIMKNIKDAGADGVLVVDLPPEEAEEIQE

SEQ ID NO: 151014 - protein, 416 aa, Unknown
  Bacterial polypetide isolated from the Sargasso Sea
EPPLHPGTLKPIGPDDLAPLFPMALIGQEVSQDREIEIPEPVRKIYKQWRPSPLYRARNLEKFLDTPAKIYYKYEGVSPTGSHKPNTAVAQAFFNKEEGTKKITTETGAGQWGSSLAFACQIFGIELDVYMVKVSFEQKPYRKLIMQTYGASCFASPSNRTDSGKAILSKDPNNTGSLGIAISEAVEMAAKDPNTKYSLGSVLNHVLMHQTIVGNEALLQMEMAGDYPDILVGCTGGGSNFSGLVFPFLGKKFRENKNTRVIACEPKSCPSLTKGKYVYDFGDTGRLTPLVKMHTLGSQFIPPATHSGGLRYHGMAPMVSHLKEIGAIEAQSFGQKECFEAGVNFARAEGIVPAPEATHAVKGAITAAMECKKNGESKTILFNLCGHGHFDMKAYGDYFENNLSEDKYDEAGSNKA

SEQ ID NO: 151015 - protein, 74 aa, Unknown
  Bacterial polypetide isolated from the Sargasso Sea
RVEYSSATDDEALEAFRWLSEKEGIIPALETAHAIAYLKDKNNNIKKNEHVILNLSGRGDKDINTIAKELGIEL

SEQ ID NO: 151016 - protein, 300 aa, Unknown
  Bacterial polypetide isolated from the Sargasso Sea
MSDTVKYILPESEIPKNWYNITADLPEPPPPVLHPGTGEPIGPDDLAPLFPMELILQEVSSERYIDIPEPVRDIYRQWRPSPLYRARRLEKTLDTPAKIYYKYEGVSPTGSHKPNTAVAQAFYNKESGVKKISTETGAGQWGSSLAFAGSIFGLEIQVYMVKVSFQQKPYRKAMMESFGATCIASPSETTEFGKAYLDKNPDSKGSLGIAISEAVEVAATNDDVKYSLGSVLNHVLMHQTIVGVEALKQMEMAGDYPDVIVGCTGGGSNFAGLMFPFLGEKLRGGSNIRVKAIEPAACPS

SEQ ID NO: 151017 - protein, 146 aa, Unknown
  Bacterial polypetide isolated from the Sargasso Sea
MKKYKQPSTIGRFGEFGGMYVSETLMPLLLDLDKSYKKIQKDKKFKKELNDLFKNYVGRPSSLHYAKNLSEYINGPKVYFKRDELNHTGAHKINNCLGQILLAKKMGKTRIIAETGAGQHGVATATVCALFGLPCYIYMGSKDIER

SEQ ID NO: 151018 - protein, 265 aa, Unknown
  Bacterial polypetide isolated from the Sargasso Sea
RGIARDADQRSKIAVKTNDGRIDPVGACVGMRGSRVQAVSSELGNERIDIIIYDDNPAQLVINALSPAKVESIVMDEDSRSMDIAVNEDNLALAIGSRGQNIRLASRLVGWDLNIISNEEAEAKVKVDETEFLAKIIDTLGVQEEVAEKIISSGFLSFDEIAYAEDSKLKEFIESDEEVLRIKTASEDAALLEAMGAVTEEEDNVESLSDLNLDEDNIGKLSNKGIKNKDDLAELSVDELQEIIEISSDDASKMIMKAREHWFNE

SEQ ID NO: 151019 - protein, 232 aa, Unknown
  Bacterial polypetide isolated from the Sargasso Sea
PDGLVQTSIKKIKDKFPDLLVISDIALDPYTSHGQDGIIDKKGYIINDDTNNILVKQALSHAESGSDIIAPSDMMDGRIKLIRKELEKNQFYNTKILSYSAKYSSSYYGPFRDAIGSLKALGKSDKKTYQMDYSNRNEAIREIDLDLREGADLVMVKPAIPNLDIISDLKETFKVPILAYHVSGEYLMIKSAAKKNVFNEKDLVIETLTSIKRAGASSIITYYAKEAAKWMN

SEQ ID NO: 151020 - protein, 212 aa, Unknown
  Bacterial polypetide isolated from the Sargasso Sea
MIKNYFPIDQSKSLKKKILIQPLFVDQKVKNSKEIKGLGDNKSWSSSSIIKAIEKDLKKGINNFLLFIVPNKKQKHPEDFSFHYEVIRKIKNYFGKDIVLLIDTCLCSITVDGHCGVTHKKSIDLNKTHYSLGLAANTYLEAGADIIAPSDMMKNTTKYLRKIFVQNGFSNSQIMSYSTKFKSHFYGPFRDVAKSSPQGFDRSSYQLPVKTK

SEQ ID NO: 151021 - protein, 117 aa, Unknown
  Bacterial polypetide isolated from the Sargasso Sea
FRDAVGSKKLLKGDKKTYQMDFRNSDESLREVSLDIKEGADMVMVKPGMPYLDIIKKVKDNFKIPVFAYQVSGEYSLIMNGINKKLIDKASIKESLISFKRAGANSIVTYFADQIDL

SEQ ID NO: 151022 - protein, 148 aa, Unknown
  Bacterial polypetide isolated from the Sargasso Sea
MDIAYRPRRLRRTPGLRAMVREHHVSAADFIYPLFVHEGASNEPIGAMPGAQRWSLDGLLGEVGRAWDLGIRCVVLFPKVADGLKTEDGSECFNDGGLIPRAIRRIKQEHPGMTVMTDVALDPYSCDGHDGIVSNDGIVLHDETVEIL

SEQ ID NO: 151023 - protein, 70 aa, Unknown
  Bacterial polypetide isolated from the Sargasso Sea
MPYLDIIREVKNNFKIPVIAYQVSGEYSLIQNAISKNILDKKSIYESLVSFKRAGANGIITYFADQIKLD

SEQ ID NO: 151024 - protein, 64 aa, Unknown
  Bacterial polypetide isolated from the Sargasso Sea
FNVPIIAYNVSGEYSMVKAGNQKNYIDEKSVMMEIMYSIKRAGANSIITYHALEIAEILKNNEV

SEQ ID NO: 151025 - protein, 207 aa, Unknown
  Bacterial polypetide isolated from the Sargasso Sea
MSDFNIGQFPTTRLRRLRMKDFSRRMISENNLTVNDLIWPIFVCEGNNIADKINSMPGVFRYSIDNILKELETVVKLKIPAIALFPQIDSALKNKEGSQAIDENNLICRTIRSIKKQFPDLGVICDVALDPFTDHGHDGLIVNDIVDNDATLKVLEKQALVQANAGCDIIAPSDMMDGRVGIIRKALDENNFQNTLILSYAAKYAQN

SEQ ID NO: 151026 - protein, 212 aa, Unknown
  Bacterial polypetide isolated from the Sargasso Sea
MITGKYPNLRLRRSRKYAWSRKLVQESSLSYSDLILPIFIIEGKNKKESIKSMPNVFRYSIDKLNTVVGKAIKKGIPMVALFPHISPKKKDEKGTEALNPDNLVCRGIKFIKKKFNNKIGIMCDVALDPYTSHGHDGLLKKKTIINDQTVEILTKQAVLQAKIGCDVIAPSDMMDGRIGKIRSALDKENLNDVQILSYAVKFSSSFYGPFRE

SEQ ID NO: 151027 - protein, 112 aa, Unknown
  Bacterial polypetide isolated from the Sargasso Sea
GSKKLLKGDKKSYQMDFRNSDESLREISLDIKEGADMVMVKPGMPYLDIIKKVKDNFKIPVFAYQVSGEYSLIMNGINKKLIDKASIKESLISFKRAGANGIVTYFADQINL

SEQ ID NO: 151028 - protein, 58 aa, Unknown
  Bacterial polypetide isolated from the Sargasso Sea
FAYQVSGEYSMIKAAGLNGWLSAERCMIESLISFKRAGANGILTYFAIDAARLIKNPH

SEQ ID NO: 151029 - protein, 210 aa, Unknown
  Bacterial polypetide isolated from the Sargasso Sea
MKFQGKYPNTRLRRGRSEDWIRRLISENNLSVDDLIMPIFICEGRNKIEKIHSMPGIYRYSIDKLGSAIKRIEKLKIPLVALFPYVSSNKKDNFGSEALNENNLICKALRAIKNNFKIGVMCDVALDPFTNHGHDGILKNNYVLNDETIRVLIQQALLYAKNGCDIIAPSDMMDGRIGLIRKSLEKNKFINTKILSYAVKYASNFYGPFR

SEQ ID NO: 151030 - protein, 58 aa, Unknown
  Bacterial polypetide isolated from the Sargasso Sea
PIAATTSVVSIDVKAAAERGWIDEKAVVLETLLSFKRAGADLILTYHACDAAAWLKEA

SEQ ID NO: 151031 - protein, 217 aa, Unknown
  Bacterial polypetide isolated from the Sargasso Sea
MSNMLMRLKKNKILRNMCAETTFLNDQLIQPIFVSENLESKKEIPGIPNNFVMNLKESIQQIELDLKNNQKNFLLFMIPKDKKDSDFNFNFQQNVISTIKNKFKNDMLLWADVCLCSMTTHGHCCLFDNNKNIDLSSSLSSLSKVALNYAEAGVDGLAPSDMMDGRTTSIRKILDDNKYNLVPIMSYSTKFASNFYGPFRYAADSAPSFGDRKQYQL

SEQ ID NO: 151032 - protein, 144 aa, Unknown
  Bacterial polypetide isolated from the Sargasso Sea
MKYPESRLRRLRYNKNIRSLVQDVEINISDLIYPIFVCEGNNVKDEIESLKGQYRLSTDNVIEKCEQLIKLGIKSILLFGVSDKKDSNGEIACSSDSIVPITIKAIKERFKDEILIIADLCNCSYTSHGHCGTIIDNDVDNDET

SEQ ID NO: 151033 - protein, 218 aa, Unknown
  Bacterial polypetide isolated from the Sargasso Sea
MRRVRSSNWVRRLVTEHSLSANDLILPIFLTEGKNKREKIKNMPDIFRYSIDNLNQILDQASKYRIPMIALFPNTPNSKKDKFGSEALNDKNIVCKALKKIKKNYKNFGLMCDVALDPYTDHGHDGLLIDGIIDNDKTLEILINQAVLQAEMGCDVIAPSDMMDGRIGRIRKELDKNNFKDTKILSYAVKYASNFYGPFRNAIGSNKFLKGDKKTYQM

SEQ ID NO: 151034 - protein, 142 aa, Unknown
  Bacterial polypetide isolated from the Sargasso Sea
NKFKDVQIISYAVKYASSYYGPFRDAVGSKKSLIGDKKSYQMDFKNSDEAIREVALDIKEGADMIMVKPGLPYLDIINKVKDKFKVPVLAYQVSGEYSLIKNGIQKKIIDEKTIIESLMSLKRAGANAIVSYFADTIDFSSF

SEQ ID NO: 151035 - protein, 206 aa, Unknown
  Bacterial polypetide isolated from the Sargasso Sea
MGSFPNVRMRRLRQCPSIRRMMAETHLSVNDLIFPLFIHHGKGVKQPIASMPGCFQYSIDQLPPLLAEIQQLGVCSVLVFGIPVSKDSTGSDAYDAHGVLASAIKMIKKEAPSLWVIADICCCEYTDHGHCGVLQQASDAYEVDNDATLAVLAKQALVQARAGVDCVAPSGMMDGMVQAIRAALDAEHFQDVAVMSYAVKYASALY

SEQ ID NO: 151036 - protein, 83 aa, Unknown
  Bacterial polypetide isolated from the Sargasso Sea
DILMVKPGISYLDIVYRLSTFSNKPIAAYNVSGEYSMVKSAAMKNWINEKDIVLETLLSFKRAGAKLILTYHACDASQWLQDT

SEQ ID NO: 151037 - protein, 120 aa, Unknown
  Bacterial polypetide isolated from the Sargasso Sea
DAVEGILALLPGDKKTYQMDIANSNEALRLVARDLKEGADMVMIKPGMPYLDICRRVKDTFGAPTFAYQVSGEYSMLSAAFEKGWLDRNKIIIETLMAFKRSGCDGILTYFAPEAAKLLK

SEQ ID NO: 151038 - protein, 299 aa, Unknown
  Bacterial polypetide isolated from the Sargasso Sea
VWPVFVCEGSNVKDEIESMPNVFRYSIDNLSEVYDTADKHNINLIAIFPFTPEELKTKSGDEALNPNNLVCRSIEKLKSQKPSFGIMCDVALDPYTNHGHDGLLSDDGKILNDETNGVLVKQSILLAQFGADIVAPSDMMDGRIGMIRDELEKHRLKDTLILSYAAKYSSSMYSPFRDAVGSSKNLKTDKKTYQMNIYNSNEAIREASMDIREGADMIMVKPGISYLDIIYRIKNELKCPTFAYQVSGEYSLIKFGAKKGVIDEKTTVIEQLSSFKRAGADAIITYYAPEVSQFLKLID

SEQ ID NO: 151039 - protein, 173 aa, Unknown
  Bacterial polypetide isolated from the Sargasso Sea
FLNKKIDNDKTINILVKQALLQAEMGCDVIAPSDMMDGRIGVIRKALDKNNLQDVCIVSYAAKYASGYYGPFRDAIGTKKRLKTDKKTYQMDFRNTSETFREISLDIKESADIVMIKPGLPYLDIISKIKDNFKVPVFAYQVSGEYSSIKHSIDKNLFTEDIIIENLTSFKKA

SEQ ID NO: 151040 - protein, 264 aa, Unknown
  Bacterial polypetide isolated from the Sargasso Sea
MKLFNSKGFPYHRGRRLRSFNYLRDMVSENILTTHDLVMPYFVREDNDDSSIEGLKDLKRFSITELLTELDIISKNGLKAIALFPKVVKEKKSLKAEECYSNKNLICRTIKSISKRFPEMIIICDVALDAYTLSGHDGIIDANGQIDNDFTIDLLSKMAVNFAESGCRVIAPSDMMDGRVKIIRENLEKNGFFDTNILSYSAKFCSNFYTPFRDALGSKENLGNSKKNSYQINYTNSREALKESIEDIYEGADIIMVKPAGILP

SEQ ID NO: 151041 - protein, 243 aa, Unknown
  Bacterial polypetide isolated from the Sargasso Sea
MIIGKYPNLRLRRTRKESWSRRLIQENTLSPNDFILPIFLIEGSNKRKPISSMPGVYRYTINRLSQIVDRAIKKKIPMVALFPKTQNVRKNELGTESLNEKNLVCRAIKEIKKRYKNQIGIMCDVALDPYTSHGHDGLIKSNTILNDETIEVLINQSLLQAEMGCDVLAPSDMMDGRIGKIRKALDKNKFQNVQILSYAAKYASSFYGPFRNAIGSKGSLKGDKKTYQMDYRNSNEALREVAL

SEQ ID NO: 151042 - protein, 58 aa, Unknown
  Bacterial polypetide isolated from the Sargasso Sea
VSGEYAMVIAAAEKGWIDRDMAMMEMLNSIKRAGADMILTYFAKDAAKRLKSDYGSFS

SEQ ID NO: 151043 - protein, 208 aa, Unknown
  Bacterial polypetide isolated from the Sargasso Sea
MQKTLFPKVRPRRLRLNKTIRNLVSETSINKSKLIQPLFVSEILKNKEEIPTMPDQYLFSKNDLMFEVDELVSLGIHTIALFPNTDNDLKDNSGSEALKEDNFICRIVREIKQRFPELVIITDVALDPYTSTGHDGIILDDKVDNDLTLDALTKMSLNLASSGADILAPSDMMDGRIGKIRDSLEKNNFKDTILLSYAAKYASNFYGP

SEQ ID NO: 151044 - protein, 95 aa, Unknown
  Bacterial polypetide isolated from the Sargasso Sea
DEALREVALDIKEGADMVMVKPGMPYLDIIKSVKEKFKIPVFAYQVSGEYSLISNAIQKKLVNEDSVIESIMAFKRAGASAIVSYYADRIDKILK

SEQ ID NO: 151045 - protein, 91 aa, Unknown
  Bacterial polypetide isolated from the Sargasso Sea
EALREVSLDIKEGADMVMVKPGMPYLDIIKKVKDNFKIPVFAYQVSGEYSLIMNGINKKLIDKTSIKESLISFKRAGANSIVTYFADQIEL

SEQ ID NO: 151046 - protein, 74 aa, Unknown
  Bacterial polypetide isolated from the Sargasso Sea
GMPYLDIIRSVKDKFKIPVIAYQVSGEYSLMKNGINKKIIDEKSIIESLYAFKRAGANAIITYFADSIDLDLLN

SEQ ID NO: 151047 - protein, 90 aa, Unknown
  Bacterial polypetide isolated from the Sargasso Sea
ARDLDEGADMIMIKPGMPYLDICRRAKDMFGAPTFAYQVSGEYSMLQAAIKNGWLNGNMVIMESLYCFKRAGCDGILTYFAPIAAKELIN

SEQ ID NO: 151048 - protein, 97 aa, Unknown
  Bacterial polypetide isolated from the Sargasso Sea
EALIESALDQYEGADILMVKPGISYLDIVYRLSTFSNKPIAAYNVSGEYSMVKSAAMKNWINEKDIVLETLLSFKRAGAKLILTYHACDASQWLQDT

SEQ ID NO: 151049 - protein, 239 aa, Unknown
  Bacterial polypetide isolated from the Sargasso Sea
KGINNFLLFIVPNKKQKNPEDFSFHYEVIRRIKNYFGKDIVLLIDTCLCSITVDGHCGVTHKKSIDLNKTHYSLGLAANTYLEAGADIIAPSDMMKNTTKYLRKIFVQNGFSNSQIMSYSTKFKSHFYGPFRNVAKSSPQGFDRSSYQLPVEDKTKAIKSSISNAAQGANYLMVKPGMTSIDLIRDIKKETLLPTGAYQVSGEYASLQMLSKAKFGNYVDLLIESLTVLKRAQADFIIT

SEQ ID NO: 151050 - protein, 72 aa, Unknown
  Bacterial polypetide isolated from the Sargasso Sea
MPYLDIIRTIKNNFKIPVFAYQVSGEYSMLANAINKRIIKKDAIFENLMSFKRAGANAIVSYYADRLNEILL

SEQ ID NO: 151051 - protein, 226 aa, Unknown
  Bacterial polypetide isolated from the Sargasso Sea
MPKTRPRTPEQTMTDSFPSARFPATRMRRNRRTPWLRRLVRESQVTVNDLIWPVFVVDGESQRVPVESMPGVDRLSCDLIGDAVGQAWDLGIPMIAIFPYTSERLKTPDAREAVNPDNLVCRAVRAIKDSVPDIGVMCDVALDPFNSDGHDGILQDGIILNDGSVEILCQQALVQAQAGCDVIAPSDMMDGRVAAIRSTLDGGGFEHVAIMSYAAKYASGFTTPSA

SEQ ID NO: 151052 - protein, 332 aa, Unknown
  Bacterial polypetide isolated from the Sargasso Sea
MKTVGSYPKTRLRRLRKSKWLRNLVSENNISNNDLVLPIFIREGKNKIEQIKSMPGVNRYSVDKLYTILNEVRKFKIPMVALFPYTPNNKKDDKGSEALNPNNLICRGLKVIKTKFPDIGVMCDVALDPYTSHGHDGIMKKNKIDNDETIKILVKQALLQAEMGCDIIAPSDMMDGRVGAIRKALDKKKFYDVSVLSYAIKYASNFYDPFRDAVGSKSKLKTNKKTYQMDYRNKLESFREVGLDIKEGADLVMIKPGMFYLDIISNIKKNFNIPVIVYQVSGEYSLLKNAIRNKILSEDAMIESLTSFKRSGACAIVTYFALEIAKKIKQIN

SEQ ID NO: 151053 - protein, 100 aa, Unknown
  Bacterial polypetide isolated from the Sargasso Sea
QMDFRNHEESLREVALAFKEGADMIIVKPGMPYLDIIRSVKDKFKIPTIAYQVSGEYSLIKNGIQKKIVDENSIIESLISFKRAGANAIITYFADKINLV

SEQ ID NO: 151054 - protein, 168 aa, Unknown
  Bacterial polypetide isolated from the Sargasso Sea
LEAGADIIAPSDMMKNTTKYLRKIFVQNGFSNSQIMSYSTKFKSHFYGPFRDVAKSSPKGFDRSSYQLPVEDKVKAIKSSINNAAQGANYLMVKPGMTSIDLIRDIKKETLLPTGAYQVSGEYASLQMLSKAKFGNYVDLLLESLTVLKRAQADFIITYGARDIAKYL

SEQ ID NO: 151055 - protein, 334 aa, Unknown
  Bacterial polypetide isolated from the Sargasso Sea
MKKLSKQSFPSLRMRRLRSTNNIRRLVRETKLAPENLIQPIFLIEGKNKKEKISSMPDICRLTIDHALKEIKKLSTAGIIAVALFPKISASKKTFNAEEAYKANGLVQTCIKKIKDKFPDLLVISDVALDPYTSHGQDGIIDEKGYIVNDDTNNILVKQALSHAESGSDIIAPSDMMDGRIKFIRKELEKNKFYNTKILAYSAKYSSSYYGPFRDAVGSLKALGKSDKKTYQMDYSNRNEAIREIDLDLREGADLVMVKPATPNLDIISDLKETFKVPVLAYHVSGEYLMIKSAVKKNVFNEKDLVIETLTSIKRAGASSIITYYAKEAAKWMS

SEQ ID NO: 151056 - protein, 252 aa, Unknown
  Bacterial polypetide isolated from the Sargasso Sea
MIKRTFPQTRLRRTRTKSFLRDLIAENNLNTDDLIQPIFIADQSEDKVEIPSMPGIHRHNLDSLYFEVEALTQVGIKSIAIFPAIDAGKKDKDGSYALDEGNIVCLALTGLAERFPDIIKIADVALDPYTDHGHDGLLINGRVENDETVKLLQDQALLLAQSGADIIAPSDMMDGRIKAIRDTLESNKFFDTIILSYAAKYASSFYGPFREAVGSAANLGKASKKTYQMNFANLDEALHEVGMDIEEGADIV

SEQ ID NO: 151057 - protein, 63 aa, Unknown
  Bacterial polypetide isolated from the Sargasso Sea
IRVSVPTFAYQVSGEYSMIKAAVNNGWLESKVIKESLLSFKRAGVDGILTYFAREIAEELRDE

SEQ ID NO: 151058 - protein, 234 aa, Unknown
  Bacterial polypetide isolated from the Sargasso Sea
MTKQERKFPNTRMRRNRMKKFSRKLTSENALSANDIIWPVFIKEGKAIKQVIDAMPDVFCFSIDSLIKELENPIRLGLNAIALFPNIDSKLKDREGSQGIDPNNLICRAIKEIKKEFPSLGIICDIALDPFTDHGHDGVVYGGIVDNDLTLDKLNKQALIYAEAGCDIIAPSDMMDGRVGSIRTCLEKNNFKNTMIMSYAAKFSSSYYGPFRSAIGSEELIQPRDKKSYQLDFA

SEQ ID NO: 151059 - protein, 55 aa, Unknown
  Bacterial polypetide isolated from the Sargasso Sea
QVSGEYSMIKAAADKGYVDENEIVYEQLTSFKRAGADAILTYFAPQVANKLRSGS

SEQ ID NO: 151060 - protein, 120 aa, Unknown
  Bacterial polypetide isolated from the Sargasso Sea
FRDAVGSKGSLKGDKKTYQMDYRNSDEALREVALDIKEGADMVMVKPGMPYLDIIKSIKEKFKLPVFAYQVSGEYSLIETAITKKLINKDAIYESLVAFKRAGANAIVSYYADRIDKIIK

SEQ ID NO: 151061 - protein, 113 aa, Unknown
  Bacterial polypetide isolated from the Sargasso Sea
VGSKKLLKGDKKSYQMDFRNSDESLREVSLDIKEGADMVMVKPGMPYLDIIKKVKDNFKIPVFAYQVSGEYSLIMNGINKKLIDKASIKESLISFKRAGANGIVTYFADQINL

SEQ ID NO: 151062 - protein, 208 aa, Unknown
  Bacterial polypetide isolated from the Sargasso Sea
MNSIIRPRRLRRTEAIREMVRENHLTASDFIYPLFIHEKDFKEEISAMPGTYRWDINGLIKEVTRAWELGIRCVVLFPKINDSLKTEDGAECFNEDGLIPKAIRILKKEIPEMAIMTDVALDPYSCDGHDGLVDETGKILNDETIEILKKQALTQARAGADFIGPSDMMDGRVGAIRASLDSQGFSDVGIISYTAKYSSAYYGPFRTA

SEQ ID NO: 151063 - protein, 234 aa, Unknown
  Bacterial polypetide isolated from the Sargasso Sea
MSIFRKYPSTRLRRVRKNLNLIELVSETNLTSKDLIQPIFIKENFEGKEEIESMPGIFRFGLNHVLSEIEEVINAGINAIAVFPVIESSKKDEKGSEALNKSNFIAHSINKIKQEFPELILIADVALDPYTDHGHDGILINNEVANDETLEVLIEQSILLAEAGADIIAPSDMMDGRIGLIRDSLEKQNLKDTILLSYAAKYNSKFYGPFRDAVNSASNLGNSSKSSYQMNISN

SEQ ID NO: 151064 - protein, 172 aa, Unknown
  Bacterial polypetide isolated from the Sargasso Sea
ILQAQMGCDVIAPSDMMDGRIGKIRKALDKNGFKSVQILSYAVKYASNFYGPFRDAVGSKKLLKGNKKDYQMDFSNSKEALREVALDISEGADFVMVKPGMPYLDIIKLVKDSFKIPVFAYQVSGEYSLIMNGIINKTLKEEAIYESLISFKRAGASAIVTYFADFIAKKLK

SEQ ID NO: 151065 - protein, 110 aa, Unknown
  Bacterial polypetide isolated from the Sargasso Sea
QNVQILSYAAKYASSFYGPFRDPVGSKGSLKGDKKTYQMDYRNSDEALREVPLDIKEGADMVMVKPGMPYLDIIKSIKEKFKLPVFSYQVSGEYSLIETAIRKKLINKDA

SEQ ID NO: 151066 - protein, 271 aa, Unknown
  Bacterial polypetide isolated from the Sargasso Sea
IETIKSMPGVFRYSIDKLSNIVNQASKLKIPLVAIFPHTPNNKKNSYGTEGLDEDNLVCRAIRKIKKNNPNIGVMADVALDPYTDHGHDGILKNNEILNDETIEILSEQALLQAQMGCDVIAPSDMMDGRVGVIRKTLDKNNFKNVQILSYAAKYASNFYGPFRNAIGSIKKLKGNKKSYQMDYKNSSEALREVALDIKEGADFVMVKPALPYLDVIKLVKDHFKIPVFGYQVSGEYTMIAQSVKKNILEKDAILESLMSIKRAGASAIVT

SEQ ID NO: 151067 - protein, 117 aa, Unknown
  Bacterial polypetide isolated from the Sargasso Sea
NLSKKSKKSYQMDPANSAEALREVRQDINEGADMIIIKPGMPYLDIISKVKNEFNFPIIAYQVSGEYSMIKGAIQNGWFDEEKIIFETLLCFKRAGCDGIITYFAPFVAKKLINKTF

SEQ ID NO: 151068 - protein, 219 aa, Unknown
  Bacterial polypetide isolated from the Sargasso Sea
MIIGKYPSVRLRRSRKESWSRKLIQENTLSPNDFILPIFLIEGSNKRQEISSMPGVYRYTINRLSQIVDKALKLGIPMIALFPKTKNSKKDELGTESLNENNLVCKALQEIKKRYKNQIGIMCDVALDPYTSHGHDGLIKSNTILNDETINVLVDQSLLQAEMGCDVLAPSDMMDGRIGKIRKALDKNKFQNVQILSYAAKYASSFYGPFRDAVGSKAH

SEQ ID NO: 151069 - protein, 163 aa, Unknown
  Bacterial polypetide isolated from the Sargasso Sea
PSDMMDGRIGKIRDSLEKNNHKDTILLSYAAKYASNFYGPFRDAVGSKQTEGISKKTYQMDSKNLKEAYKEILLDINEGADILMVKPAMPYLDVINDLSQKTNVPIFAYQVSGEYSMLKMGIDKKIFDHNVISETLISLFRAGSSSVITYFARWTAENYDNIS

SEQ ID NO: 151070 - protein, 262 aa, Unknown
  Bacterial polypetide isolated from the Sargasso Sea
VDRALSQKIPMVALFPSTNSKLKNNNGSEALNEDNLVCRAIRFIKKRYKNKIGIMCDVALDPYTSHGHDGLIKSNYVLNDETVEILIKQSLLQAQMGCDVIAPSDMMDGRVGRIRKNLDKNGYHLVQILSYAVKYASNFYGPFRDAVGSKNLLKNDKKNYQMDYRNKLEALREVALDIKEGADIVMIKPGMPYLDLISLVKENFKIPVFAYQVSGEYALISNGIRRGLINKNAILESLISFKRAGANAIVTYYADQISKLLK

SEQ ID NO: 151071 - protein, 119 aa, Unknown
  Bacterial polypetide isolated from the Sargasso Sea
IGSGSNLGKDGKLTYQMDPSNSDEAIREVGLDISEGADMVMVKPGMPYLDIISRIKSEFKVPTFAYQVSGEYSMIKESINKGWLNEKVVMESLLSFKRAGANGILTYFALEAAEKLKNE

SEQ ID NO: 151072 - protein, 169 aa, Unknown
  Bacterial polypetide isolated from the Sargasso Sea
MGCDIIAPSDMMDGRIGKIRQELDRNNFKDVSILSYAVKYASNFYGPFRDAVGSKSKLKNDKKTYQMDFRNSSEAFREVALDIKEGADMVMVKPGMIYLDIIKQIKNNFKVPVLAYQVSGEYFLIKNAIQKNILEDDSIIESLIAFKRAGACAIVTYFAIDIAKKLKNI

SEQ ID NO: 151073 - protein, 241 aa, Unknown
  Bacterial polypetide isolated from the Sargasso Sea
MITGKYPSLRLRRSRKYSWSRRLIQENSLSYSDLILPIFLIEGKNKKESIKSMPNVFRYSIDKLNSVVGKAVKKGIPMVALFPYTETKKKDEYGSEALNPNNLVCRGIKFIKKKFKNKIGIMCDVALDPYTSHGHDGLLKKRDILNDETLEILTKQAVLQAKMGCDVIAPSDMMDGRIGKIRKALDKDGLKDVQILSYAVKFSSSFYGPFRDAVGSKKLLKGDKKTYQMDFRNSNESLREV

SEQ ID NO: 151074 - protein, 234 aa, Unknown
  Bacterial polypetide isolated from the Sargasso Sea
DLVLPIFVIKGKNKKIPINSMPGVYRYTIDRLKQIVDKAISLKIPMVAIFPYVNRSLKNNLGSESLNKNNLVCKATSFIKDKYKDKIGIMCDVALDPYTIHGHDGILKNGKILNDETIKILVEQSIIQAQAGCDVIAPSDMMDGRIGVIRKSLDKNGFKDVQLLSYAAKYASNFYGPFRDAVGSKSLLKGDKKTYQMDYRNSNEALREVALDIKEGADMVMIKPGLPYLDIIKE

SEQ ID NO: 151075 - protein, 230 aa, Unknown
  Bacterial polypetide isolated from the Sargasso Sea
MNYPNSRLRRLRYNPNVRRLVEDIDLKTSDLIYPIFVCEGENIKEEIVSLPGQYRYSIDKLLILTEELISLDIRSVLLFGVSDNKDDNGKIACSHKSIIPKAVKKIKEKHNNDILVIADLCNCSYTSHGHCGTLIDGDVDNDLTIETLCRQGVILAESGVDIIAPSDMMDGRTGEIRKELDKNGFHKIPIFPYSVKYASSFYGPFRGAVSNSLDEGDRKTHQMSFKNSSD

SEQ ID NO: 151076 - protein, 214 aa, Unknown
  Bacterial polypetide isolated from the Sargasso Sea
MSDTPPYSPGRIRPRRLRKNQVVRDLVAETHISPSQFIVPHFVLGAENEEKAIPSMPGISELGIENLVKNVSADLKLGIRSVLLFGHPDDAAHKTPDGKAAWDQKGAVQRAVRRLKSEFGNDLIVMTDVCLCAYTDHGHCGIVENGYVLNDASLNPLVHTALSHAEAGADVVAPSDMMDGRIAAIRDGLDQGGHENVILLAYAVKYASGYYGPF

SEQ ID NO: 151077 - protein, 272 aa, Unknown
  Bacterial polypetide isolated from the Sargasso Sea
MNSIIRPRRLRRTEAIREMVRENHLTPSDFIYPLFIHEKDFKEEILAMPGTFRWDINGLIKEVTRAWELGIRCVVLFPKINDSLKTEDGAECFNEEGLIPEAIRILKKEIPEMAIMTDVALDPYSCDGHDGLVDETGKILNDETIEILKKQALTQARAGADFIGPSDMMDGRVGAIRAALDSQGFSDVGIISYTAKYSSAYYGPFRTALDSAPRENSKKIIPDNKSTYQMDPANSKESLIESALDQYEGADILMVKPEFHTGILFIDKHFSQ

SEQ ID NO: 151078 - protein, 261 aa, Unknown
  Bacterial polypetide isolated from the Sargasso Sea
MKILGGYPSLRLRRNRKSAWVRRLVEENNISVNDLILPIFVTEGKNKVQEIKTMPGIYRYSVDKLSNVINRASKANIPLIAIFPNTPKSKKDFYGSEALNENNLVCKAIRKIKKNNPKIGIMADVALDPYTSHGHDGIIKKKKILNDETLEILSKQAVLQAQMGCDVIAPSDMMDGRIGVIRKALDKNNLKDVQLLSYSAKYASSFYGPFRNAIGSSQTNKINKKTYQMDYRNSNEAIREVALDIKEGADFVMVKPGYTIS

SEQ ID NO: 151079 - protein, 301 aa, Unknown
  Bacterial polypetide isolated from the Sargasso Sea
LRLRRSRKYSWSRRLIQENTLSYNDLVLPIFLTEGKNKKIPIQSMPGVFRYTINKLSEIIDRAIKKKIPMVALFPHINPKRKNFNGSEALNENNLICQGIKYIKNKYKNEIGIMCDVALDPYTTHGHDGILKKNNILNDETLDILVEQSLIQARAGCDIIAPSDMMDGRVGKIRKALDKENFKDVQILSYAVKYSSSFYGPFRDAVGSKKLLKGDKKTYQMDFRNYEESLREVSLDIKEGADIIMIKPGLPYLDIISKVKERFKIPVMAYQVSGEYSLLMNGIKNKVIDEKSIFENLMCFK

SEQ ID NO: 151080 - protein, 277 aa, Unknown
  Bacterial polypetide isolated from the Sargasso Sea
MSKSYPSTRMRRNRSAKFIRNLVRETSFAADDLIYPIFILPGKNKEELIDSMPGRKRYSVDKLLPELTKLYKKGLNAIAIFPVIDTAKKSKDAKEAFNPKGLVQNAVKIIKKELPDLGIITDVALDPYTVSGHDGLIDKDGYVLNDQTVDVLTKQALSHAEAGADIVAPSDMMDGRIMAIRNTLEKNKFHNTKILSYAAKYASNLYGPFRNAVDSSDNLKGSSKETYQMDFANITEASLEIKLDINEGADMIIIKPGLPYLDIVAKIKNKFSIPVFS

SEQ ID NO: 151081 - protein, 181 aa, Unknown
  Bacterial polypetide isolated from the Sargasso Sea
MELTYRPRRLRRTPALRAMVREHSLSAADFIYPLFVHEGTEVEPIGAMPGASRWSLASLTGEVQRAYDLGVRCIVLFPKVSEGLKTEDGAECFNANGLIPRAIRQIKQAIPEMAIMTDVALDPYSCDGHDGIVSQDGVVLNDETIELLCKQAVVQAEAGADLIGPSDMMDGRVGAIREALD

SEQ ID NO: 151082 - protein, 153 aa, Unknown
  Bacterial polypetide isolated from the Sargasso Sea
RIGEIRKELDKYGYEKIQILSYAVKYSSSFYGPFRDAVGSKKALKGDKKTYQMDYSNIGEALREVALDIREGADMVMVKPGLPYIDVIKEVKNKFRIPVIAYQVSGEYSLIENAIKNKILKKEAIYEVLLSFKRAGANAIVSYYADYINKILK

SEQ ID NO: 151083 - protein, 169 aa, Unknown
  Bacterial polypetide isolated from the Sargasso Sea
EAGADVVAPSGMMDGQVGAIRQALDANGHELLPVLAYSAKFASAEYGPFREAVDVTITGGGNRKSYQQDPANGREAMEEIRLDIAEGADVVMVKPALAYLDVIAQARSQFDVPLAAYHVSGEYAMLKAAAQNGWIDGPLTALEHLTAIKRAGADIILTYLAHEMAETLQ

SEQ ID NO: 151084 - protein, 208 aa, Unknown
  Bacterial polypetide isolated from the Sargasso Sea
MCDVALDPYTSHGHDGLIKSNTILNDETIEVLIKQSLLQAEMGCDVLAPSDMMDGRIGKIRKVLDKNKFQNVQILSYAAKYASSFYGPFRNAVGSKNSLKGDKKTYQMDYRNSDEALREVALDIKEGADMIMVKPGMPYLDIIKSIKEKFKLPVFAYQVSGEYSLIETAIAKKLINKDAIYETLVAFKRAGANAIVSYYADRIDKIIK

SEQ ID NO: 151085 - protein, 170 aa, Unknown
  Bacterial polypetide isolated from the Sargasso Sea
RLRRTEAIREMVKENHLSPKDFIYPLFIHEKDFQEEISAMPGTFRWDMHGLIREVSRAWELGIRCIVLFPKIDDSLKTEDGSECFNEAGLIPKAIRMLKKEIPKMAIMTDVALDPYSCDGHDGLVDENGKILNDETIEILKRQAITQARAGADFIGPSDMMDGRVGAIRK

SEQ ID NO: 151086 - protein, 158 aa, Unknown
  Bacterial polypetide isolated from the Sargasso Sea
MDGRVGAIRKALDKNKFYDVSILSYAVKYASNFYGPFRDAVGSKSKLKSDKKTYQMDYRNSSESFREVALDIKEGADMVMVKPGIIYLDIINEIKNKFKIPIIAYQVSGEYSLIKNAINKRILNEESIIESLTSFKRAGANAIVTYFALEIAKKIKNY

SEQ ID NO: 151087 - protein, 62 aa, Unknown
  Bacterial polypetide isolated from the Sargasso Sea
AAYNVSGEYAMIVSAAEKGLIDRDLAMMEMLISIKRAGADMILTYFAKDAAAILRADFGSFK

SEQ ID NO: 151088 - protein, 128 aa, Unknown
  Bacterial polypetide isolated from the Sargasso Sea
ALASAPRPGSEDWKIPKDKAEYQMDPANYRECLREAALDEQEGADIMMVKPAGAYLDIIRALRDNTTLPISAYQVSGEYSMLKAAAAAGYINERDAVLESLIAIKRAGADLTLSYYAIDAAKWIQEGN

SEQ ID NO: 151089 - protein, 230 aa, Unknown
  Bacterial polypetide isolated from the Sargasso Sea
MSRGEYPATRMRRNRMKAFSRRMMAESRLSVDDLIWPMFVIEGTDSAEPVGAMPGVERLTVDRLVAQAREAMALGIPAIAIFPSVDASLKDEDGTLALDGDNLVCRTVRAVKEACPDLGVICDVALDPYTSHGHDGVLRDGQVANDETVAILCRQAVRQADAGCDIIAPSDMMDGRVGEIRSALDEAGHTDVQIMSYAAKYASGFYGPFRSAVGAGGTAGKDGKSTYQRT

SEQ ID NO: 151090 - protein, 134 aa, Unknown
  Bacterial polypetide isolated from the Sargasso Sea
VYSAKYASSFYGPFRDAIGSKQKKRIDKRTYQMDYRNSDEAIREVALDIKEGADFVMIKPGLPYLDIIKSVKENFKIPVFVYQVSGEYSMIKNAITNGNLDKESVIESLIAFKRSGASAIVTYFALDIAKKLSN

SEQ ID NO: 151091 - protein, 144 aa, Unknown
  Bacterial polypetide isolated from the Sargasso Sea
LDKNNLKDVQILSYSAKYASSFYGPFRNAIGSKQKNKINKKTYQMNYRNSEEAIREVALDIKEGADFVMIKPGLPYLDIIKSVKENFKIPVFVYQVSGEYSMIKNSIKTGILDNESIIESLISFKRSGASAIVTYFALDIAKKI

SEQ ID NO: 151092 - protein, 150 aa, Unknown
  Bacterial polypetide isolated from the Sargasso Sea
DSLEKNNHKDTILLIYAAKYASNFYGPFRDAVGSKQTEGISKKTYQMDSKNLKEAYKEILLDINEGADILMVKPAMPYLDVINDLSQKTNVPIFAYQVSGEYSMLKMGIDKKIFDHNVISETLISLFRAGSSSVITYFARWTAENYDNIS

SEQ ID NO: 151093 - protein, 231 aa, Unknown
  Bacterial polypetide isolated from the Sargasso Sea
MKRKFPNSRLRRLRLNSSIIDLVSENTLNSADLIQPVFVKENLNGSEPIESMPNVNRYGIDSILKEVESVISSGIKTIAIFPVIDSNKKDDLGKEALNEENIISKTIKLIKKEFPELVIIADVALDPYTSHGHDGLLINNYVDNDATLESLVSQSLILAASGADIIAPSDMMDGRIGKIREALENSNFKNTLILSYAAKYNSKFYGPFRDAVNSSSNLGKSSKSSYQMSPA

SEQ ID NO: 151094 - protein, 131 aa, Unknown
  Bacterial polypetide isolated from the Sargasso Sea
AVKYSSSFYGPFRDAIGSKNSLKGNKKTYQMDYGNSDEALREVSIDIKEGADMVMVKPGLPYLDIIKDIKNRFKIPILAYQVSGEYSLLTNAIKNKILKPEAIYETLLSFKRAGANAIISYHADYLDKILK

SEQ ID NO: 151095 - protein, 280 aa, Unknown
  Bacterial polypetide isolated from the Sargasso Sea
KESIKSMPNIFRYSVDKLNSVVGKAIKKGIPMVALFPYTASKKKDEYGSEALNPNNLVCRGIKFIKKKFKNKIGIMCDVALDPYTSHGHDGLLNKRNILNDETLEILTKQAVLQAKIGCDVIAPSDMMDGRIGKIRKALDKNNLNDVQILSYAVKFSSSFYGPFRDAVGSKKLLKGDKKTYQMDFRNSDESLREVSLDVKEGADMIMVKPGMPYLDIIKKVKDNFKMPVFAYQVSGEYSLIMNGINKKLIDKESIKESLISFKRAGASSIVTYFADQIDL

SEQ ID NO: 151096 - protein, 291 aa, Unknown
  Bacterial polypetide isolated from the Sargasso Sea
IIGSYPKTRLRRLRKSKWLRNLISETSISHNDLILPIFIREGKNKIEPIKSMPGIKRYTLDKLSSILNKVREYKIPMVALFPYTPNFKKDKHGTEALNPNNLICRAIKLVKKKFPEIGVMCDVALDPYTSHGHDGIIINNQIDNDQTIKILVKQALLQAKMGCDIIAPSDMMDGRIGKIRQELDQNNLKDVSILSYAVKYASNFYGPFRDAVGSKSKLKNDKKTYQMDFRNSSEAFREVALDIKEGADMVMVKPGMIYLDIIKQIKNNFKVPVLAYQVSGEYFLIKNAIQK

SEQ ID NO: 151097 - protein, 116 aa, Unknown
  Bacterial polypetide isolated from the Sargasso Sea
SSASLGSGSKDTYHMSVANIDEALHEVKMDIEEGADIVMVKPGLPYLDVIKSVKETFKVPTFAYQVSGEYAMLKAAIQNGWLSEEVMMESLLSFKRAGADCILTYAANQIAETLNR

SEQ ID NO: 151098 - protein, 140 aa, Unknown
  Bacterial polypetide isolated from the Sargasso Sea
VSILSYAVKYASTFYGPFRDAVGSKSKLKKDKKTYQMDYRNSFDIFREVGFDINEGADMVMVKPGMLYLDIINKIKENFKIPILAYQVSAEYSLIKNGIQKKILNEESIIESILSFKRAGACAIITYFALDLAKKINSIN

SEQ ID NO: 151099 - protein, 255 aa, Unknown
  Bacterial polypetide isolated from the Sargasso Sea
IVSKLNIPAIALFPHIDQGLKDSHGTEALKENNLVCETVKMVKKEFPQLGVICDVALDPYTDHGHDGVLIDGEVDNDETVGILCKQALNQASAGCDVIAPSDMMDGRVLSIRETLDNNKFTNTQIMSYAAKYASSFYGPFRDAVGSSSGKKVIDKSSYQMSPENSDEAVREVNLDISEGADMVIIKPGMPYLDIIYRIKNECNIPVFAYQVSGEFSMISISASSGALDLDKAMMESLLGFKRAGADGVLTYFAVE

SEQ ID NO: 151100 - protein, 273 aa, Unknown
  Bacterial polypetide isolated from the Sargasso Sea
NIFRYSIDKLKRVVDNALKLGIPMVALFPYTNPKKKDQYGNEALNENNLVCQAIKFIKKNYKNEIGIMCDVALDPYTSHGHDGIIRKNEILNDETLEILIKQSILQAKMGCDVIAPSDMMDGRILKIRKALDKNNLKDVQILSYAVKYASSFYGPFRNAVGSKNLLKGDKKTYQMDFKNNYESLREVALDIKEGADMIIVKPGMPYLDIIREVKNNFKIPVIAYQVSGEYSLIQNAISKNIIDKKSIYESLVSFKRAGASAIITYFADQIKLD

SEQ ID NO: 151101 - protein, 69 aa, Unknown
  Bacterial polypetide isolated from the Sargasso Sea
MDIIRYAKDNFNVPIAAYQVSGEYSRLWAASMKGWLDLEDCALESLISIKRAGADLILTYFAERFSKLI

SEQ ID NO: 151102 - protein, 165 aa, Unknown
  Bacterial polypetide isolated from the Sargasso Sea
VIAPSDMMDGKILEIRKSLEKNNFKNVLILSYAAKFSSGFYGPFRDGVGSRQKQKIDKSTYQMDFSNSIDALRQINKDIEDGSDMIMIKPALSYLDIISKAKENFNVPIIAYNVSGEYSMLKLGIKNNIFEDDILKEIIISFKRAGANAIVSYFANEYIEKYILR

SEQ ID NO: 151103 - protein, 284 aa, Unknown
  Bacterial polypetide isolated from the Sargasso Sea
DGKNKTVKIKNMPDVFRHSLDKLPKIVDKALKLKLPMVALFPYTSNNLKNSHGTEALNENNLVCRALRLIKKRYKNEIGLMTDVALDPYTDHGHDGILKNNYVLNDETNLVLTKQALLQAQMGCDVIAPSDMMDGRVKEIRKILDKNKLINTKILSYAVKYASNFYGPFREAVGTKNKLKKDKKNYQMNFMNIDEALREVSLDIKEGADLIMVKPGLPYADIIKQIKDKFKIPVFSYQVSGEYSLIKEGIKKGIINNEAIFESLISLKRAGSTCIISYFADKID

SEQ ID NO: 151104 - protein, 226 aa, Unknown
  Bacterial polypetide isolated from the Sargasso Sea
MITGKYPSLRLRRTRKYKWSRRLVQENNLSSNDLIYPIFLVEGKNTKQSIKSMPGVYRYSVDQLGAIVNNIIKNKIPMVALFPLTPNIKKDKYGKESLNENNLVCKAIRFIKKRFKNSIGIMCDVALDPYTSHGHDGLLKNNYVINDETVNVLVKQSLLQAQMGCDVIAPSDMMDGRIGKIRKSLDKNNYHDVQILSYAVKYASNFYGPFRDAVGSKKSLKGDKKN

SEQ ID NO: 151105 - protein, 212 aa, Unknown
  Bacterial polypetide isolated from the Sargasso Sea
EIGLMCDVALDPYTSHGHDGILKNNYVDNDETIKILVKQSLLQAEMGCDLIAPSDMMDGRIGEIRKALDKNGFKLVQILSYAVKYASNFYGPFRNAVGSSRSLVGDKKNYQMDFKNSKEALKEVALDINEGADFVMVKPGMPYLDIIKLIKDNFKIPVFAYQVSGEYSLIMNGINKKILDEKAIYESLISFKRAGASAIVTYFADRIASKLK

SEQ ID NO: 151106 - protein, 303 aa, Unknown
  Bacterial polypetide isolated from the Sargasso Sea
MSKFNIGTFPSTRLRRLRMKEFSRRMVSENNLSVDDLIWPLFVCEGNNVAEKINSMPGVFRYSIDNILKELETAAKLKIPAIALFPQIDNTLKDENGSQAIDENNLICRTIKSIKKNFPDIGVICDVALDPFTNHGHDGLVINDIVDNDATLSVLEKQALAQVRAGCDIIAPSDMMDGRVGRIRKTLDDNNFHNTLILSYAAKYASKFYGPFREAISSSGNLKGGSKSTYQMDISNSDEALREVALDINEGADMVMIKPGMPYLDIIQRVKSEFKIPTFAYQVSGEYAMIKGAIDNNWLDSKV

SEQ ID NO: 151107 - protein, 144 aa, Unknown
  Bacterial polypetide isolated from the Sargasso Sea
FKDTLIMSYAAKFASAYYGPFREAVGAQGLLKGDKKTYQIDPPNIQEAIREVGEDINEGADMVMVKPGMPYLDIISEVKRKFGFPTFAYQVSGEYSMIKGAIENNWLDKNSTIIESLTCFKRAGCDGILTYFALEAADILDKSS

SEQ ID NO: 151108 - protein, 215 aa, Unknown
  Bacterial polypetide isolated from the Sargasso Sea
MSIFRKYPSTRLRRLRKNLNLIELVSETNLTSKDLIQPIFIKENFEGKEEIESMPGIFRFSLNHVLSEIEEVINAGINAIAVFPVIESSKKDEKGSEALNKSNFIAHSINKIKQEFPELILIADVALDPYTDHGHDGILINNEVANDETLEVLIEQSILLAEAGADIIAPSDMMDGRIGLIRDSLEKQNLKDTILLSYAAKYNSKFYGPFRDAVN

SEQ ID NO: 151109 - protein, 85 aa, Unknown
  Bacterial polypetide isolated from the Sargasso Sea
EQSILLAEAGADIIAPSDMMDGRIGLIRDSLEKQNFKDTILLSYAAKYNSKFYGPFRDALNSASNLGNSSKSSYQMNISNKNEAL

SEQ ID NO: 151110 - protein, 179 aa, Unknown
  Bacterial polypetide isolated from the Sargasso Sea
MINRPRRNRLTPRIRGLVGETTIQPKNLVWPTFVQEGKSQRTPIASMPGISRLSIDQLVADSKKAFELGVPAVALFPAIDDSLKTPEGKESLNPDGLLQRAVKELKKQVPELVVITDVALDPYSSDGHDGLVQNGQILNDETLPLLAGMAVAQAEAGVDVVAPSDMMDGRIEAIRWALD

SEQ ID NO: 151111 - protein, 117 aa, Unknown
  Bacterial polypetide isolated from the Sargasso Sea
SKKIFPDNKSTYQMDPANSKEALIECALDQYEGADILMVKPGISYLDIVYRLSTFSNKPIAAYNVSGEYSMVKSAAMKNWINEKDIVLETLLSFKRAGAKLILTYHACDASQWLQDT

SEQ ID NO: 151112 - protein, 220 aa, Unknown
  Bacterial polypetide isolated from the Sargasso Sea
LDKKKYKNKIGIMCDVALDPFTSHGHDGLIDKKEILNDKTIQILIEQSLLQAQMGCDVIAPSDMMDGRIGEIRRALDKNGYEKIQILSYAVKYSSSFYGPFRDAVGSKKALKGDKKTYQMDFSNIDEALREVALDIKEGADMVMVKPGLPYIDVIKEVKDKFKIPVLAYQVSGEYSLISNAIKNKILSNDAIYETLLSFKRAGANAIITYYADYIDKIIK

SEQ ID NO: 151113 - protein, 100 aa, Unknown
  Bacterial polypetide isolated from the Sargasso Sea
SNEALREVEMDIKEGADIVMVKPGISYLDIISKIKSEFNFPTFAYQVSGEYSMIKAAANKEYINEDEIVFEQLTSFKRAGADAILTYFAPQVANKLRSGS

SEQ ID NO: 151114 - protein, 178 aa, Unknown
  Bacterial polypetide isolated from the Sargasso Sea
ILVKQSLLQAEMGCDVISPSDMMDGRVGEIRKNLDKNDFKDVQILSYAVKYASSFYGPFRNAVGSKNLLKGDKKTYQMDYSNKLESIREVALDIKEGADMIMVKPGMPYLDIISTIKNNFKIPVLAYQVSGEYSLICNGIQKGIIDKNSIIEILTGFKRAGANAVVTYFANKIAKDIK

SEQ ID NO: 151115 - protein, 111 aa, Unknown
  Bacterial polypetide isolated from the Sargasso Sea
GAGSKDTYQMSVANIEEALHEVKMDIEEGADIVMVKPGMPYLDVIKAVKDTFKIPTFAYQVSGEYAMLKAAIENGWLAEEVLEESLLSFKRAGADCVLTYAANEIAIKLNQ

SEQ ID NO: 151116 - protein, 266 aa, Unknown
  Bacterial polypetide isolated from the Sargasso Sea
MNSIIRPRRLRRTEAIREMVRENHLTASDFIYPLFIHEKDFKEKISSMPGTYRWDINGLIKEVTRAWELGIRCVVLFPKIKDSLKTEDGAECFNEDGLIPEAIRILKKEIPEMAIMTDVALDPYSCDGHDGLVDETGKILNDETIEILKKQALTQARAGADFIGPSDMMDGRVGAIRAALDSQGFSDVGIISYTAKYSSAYYGPFRTALDSAPRENSKKVIPDNKSTYQMDPANSKEALIESALDQYEGADILMVKPRNFIFGYCL

SEQ ID NO: 151117 - protein, 274 aa, Unknown
  Bacterial polypetide isolated from the Sargasso Sea
VYRYSVDKIPMILDKAVKYKIPMVALFPYTNKKLKNELGSEALNENNLVCRAIRLIKKKYKNKIGIMCDVALDPYTSHGHDGLLKEGKILNDETIEILIRQSLLQAQMGCDVIAPSDMMDGRIGKIRKYLDKYKFQDVQILSYAAKYASSFYGPFREAVGSNKSLKSDKKTYQMDFNNSLEALREVSLDIKEGADIVMVKPGMPYLDVIKSIKENFKIPVFAYQVSGEYSLIKNAIDRKLIKEDSVIETLVGFKRAGASAVVTYFADQIARYLK

SEQ ID NO: 151118 - protein, 229 aa, Unknown
  Bacterial polypetide isolated from the Sargasso Sea
MIITGKYPNLRLRRNRKSDWARRLVQENHLSVNDLILPIFLIEGRNKMESIKTMPGIYRYSVDKIPMILDKAVGYKIPMIALFPYTNKKLKNESGQEALNENNLVCKAIKLIKKKYKNKIGIMCDVALDPYTSHGHDGLLKDGKILNDETIEILVKQSLLQAQMGCDVIAPSDMMDGRVGKIRKALDKNNFKDVQILSYAAKYASSFYGPFRDAVGSNKSLKGDKKTLS

SEQ ID NO: 151119 - protein, 127 aa, Unknown
  Bacterial polypetide isolated from the Sargasso Sea
YGPFRNAIGSEKNLSSKSKKSYQMDFSNSDEALREVGLDISEGADMVMVKPGMPYLDIIYRIKTTFKMPTYAYQVSGEYAMIMSAVKNGYIDKDKAIIESLTCFKRAGANGILSYFAIEAAKLINKG

SEQ ID NO: 151120 - protein, 245 aa, Unknown
  Bacterial polypetide isolated from the Sargasso Sea
MIIGKYPSLRLRRNRKESWSRRLIQENTLTPNDFILPIFLIDGSNKRQEISSMPGVYRYTINRLSQIVDRAIKKKIPMVALFPKTQNAHKDELGTESLNEKNLVCRAIKEIKKRYKNQIGIMCDVALDPYTSHGHDGLIKSNTILNDETIEVLINQSLLQAEMGCDVLAPSDMMDGRIGKIRKALDKNKFQNVQILSYAAKYASSFYGPFRDAVGSKSSLKGDKKTYQMDYRNADEALREVALDI

SEQ ID NO: 151121 - protein, 117 aa, Unknown
  Bacterial polypetide isolated from the Sargasso Sea
VLPGHSRGDKSTYQMDPANGEEALRTIARDLDEGADMIMIKPGMPYLDICRRAKDMFGAPTFAYQVSGEYSMLQAAIKNGWLNGNKVIMESLYCFKRAGCDGILTYFAPIAAKELNN

SEQ ID NO: 151122 - protein, 240 aa, Unknown
  Bacterial polypetide isolated from the Sargasso Sea
MSIFRKYPSTRLRRLRKNLNLIELVSETNLTLKDLIQPIFIKENFEGKEEIESMPGIFRFGLNHVLSEIEEVINAGINAIAVFPVIESSKKDEKGSEALNKSNFIAHSINKIKQEFPELILIADVALDPYTDHGHDGILISNEVANDETVEVLIKQSILLAEAGADIIAPSDMMDGRIGLIRDSLEKQNLKDTILLSYAAKYNSKFYGPFRDAVNSASNLGNSSKSSYQMNISNKDEALH

SEQ ID NO: 151123 - protein, 156 aa, Unknown
  Bacterial polypetide isolated from the Sargasso Sea
MDGRIGKIRKALDKNKFQNVQILSYAAKYASSFYGPFRDAVGSKGSLKGDKKTYQMDYRNSDEALREVALDIKEGADMVMVKPGMPYLDIIKSIKEKFKLPVFAYQVSGEYSLIETAITKKLINKDAIYESLVAFKRAGANAIVSYYADRIDKIIK

SEQ ID NO: 151124 - protein, 305 aa, Unknown
  Bacterial polypetide isolated from the Sargasso Sea
HLWSRKLVEENTISPSDLVLPIFITEGANKIESIKTMPGVYRYSINNLSKIIDKALNLKIPMIAIFPNIRSNLKNINGSEALNENNITCRAIRFIKEKYKNKIGIMCDVALDPYTSHGHDGVFKKGKILNDKTNEILIKQSLLQAEMGCDVIAPSDMMDGRIGRIRKALDKNGYDEVQILSYAVKYASSFYGPFREAVGSNKNLKSDKKTYQMDFKNKNEALREVSLDIKEGADMIMVKPGMPYLDIISLVKTNFKIPVMAYQVSGEYSLIMNGIKKKLINKNAIYESLMSFKRAGACAIITYFA

SEQ ID NO: 151125 - protein, 224 aa, Unknown
  Bacterial polypetide isolated from the Sargasso Sea
MDGKNKRQSIKNLPGVYRYSVDKLPLILDKAVKNKIPMIALFPYTKSNVKDYIGSEALNENNLICKALRFIKKKYKNEIGIMCDVALDPYTSHGHDGIIKKNKILNDETIEILIKQSLLQAEMGCDIIAPSDMMDGRIGKIRKSLDKKNFKDVQLLSYAVKYASSFYGPFRNAVGSNKSLKGDKKTYQMDYKNKIESIREVSLDIKEGADMVMVKPGLPYLDII

SEQ ID NO: 151126 - protein, 125 aa, Unknown
  Bacterial polypetide isolated from the Sargasso Sea
FYGPFRDAVGSKKSLKGDKKTYQMDFSNSDEALREVALDIKEGADLVMVKPGLPYLDIIKKVKENFKIPVLAYQVSGEYSLLMNGINKGLINENSINETLMSFKRAGANAIISYFADRLDKIIKN

SEQ ID NO: 151127 - protein, 262 aa, Unknown
  Bacterial polypetide isolated from the Sargasso Sea
MIITGKYPQLRLRRNRKREWSRRLTSENNLSVNDLILPIFIIDGKNKKIPVKTMPGIYRYSLDKLNSVVERAINLGIPMIALFPYTKNNLRNSLGSESLNPNNLVCRACKQIKKKFKYNIGIMCDVALDPYTSHGHDGLIVRGDVENDETVKLLIEQSLIQASAGCDVLAPSDMMDGRVGKIRNALDKNNFKNVQILSYAVKYASSYYGPFRDAVGSKNLLRGDKKTYQMDFKNSDESLREVTLDIKEGADMIIVKPWITVI

SEQ ID NO: 151128 - protein, 268 aa, Unknown
  Bacterial polypetide isolated from the Sargasso Sea
MKILGKYPSLRLRRNRKSSWARKLVEEHNISVNDLILPIFVTEGKNRIEEIKSMPGVYRYTVDKINNVVNKANKIGIPLIAIFPNTPKSKKNFYGSEALNENNLVCRTIRKIKKNNPNIGIMSDVALDPYTSHGHDGIVKKKHVLNDETIQILSKQAILQAQMGCDVIAPSDMMDGRIGVIRKSLDRNNYKDVQILSYSAKYASSFYGPFRNAIGSSQKKKINKKTYQMDYRNSDEALREVALDIKEGADFVMIKPGLPYLDIIKSGK

SEQ ID NO: 151129 - protein, 123 aa, Unknown
  Bacterial polypetide isolated from the Sargasso Sea
SSFYGPFRDAVGSKKALKGDKKTYQMDYKNSVESLREVALDIKEGADMVMVKPGMPYLDIIKLVKDNFKIPVFAYQVSGEYSLIKNGIKKELINKDSILESLISFKRAGANAIVSYFADKISL

SEQ ID NO: 151130 - protein, 224 aa, Unknown
  Bacterial polypetide isolated from the Sargasso Sea
MKKYSSTAPYFPRTRMRRNRENIFSKLITAESTLSVNDLIMPLFVVEGKGVSQSIESMPNIFRYSPDKILKVVEEVVSLEIAAIALFPKIEDSFKDKSGSLAYNPDNLICETVRLIKSEFPNLGVICDVALDPYTDHGHDGLLINDQIDNDETIKALVKQSIVQAEAGCDAIAPSDMMDGRVSAIRDALDSKGLQGTQIISYAAKYASSFYGPFREAVGSNNLK

SEQ ID NO: 151131 - protein, 162 aa, Unknown
  Bacterial polypetide isolated from the Sargasso Sea
PSDMMDGRIGVIRNALEEENFKNTILLSYAAKYNSKFYGPFRDAVKSSSNLGKSSKSSYQMNIGNKDEALHEVALDISEGADIVMVKPAMPYLDIIHLIKDSFKVPTFAYQVSGEFSMLKLAIKQGWLDEGVMLESLTSIKRAGADAILSYAAKDISKEINN

SEQ ID NO: 151132 - protein, 127 aa, Unknown
  Bacterial polypetide isolated from the Sargasso Sea
SFYGPFRDAVGSAANLGKASKKTYQMNFANLDEALHEAGMDIEEGADIVMVKPGTAYLDVVHAIKSAFQVPTFVYQVSGEYSMLQLSIEKGWLDKDVMLESLMCCKRAGADAILTYAAKQIASELNS

SEQ ID NO: 151133 - protein, 262 aa, Unknown
  Bacterial polypetide isolated from the Sargasso Sea
MKNVGRYPSVRLRRNRKTEWSRRLVSENNLSTNDLIWPIFLKDGKDIKEPINSMPGVYRYSLDKIPKLVERAAKKKIPLIALFPQTAQFKKDSRGTEALNKNNLVCKALRLIKKEFNEIGVMCDVALDPYTSHGHDGILKKDYVDNDETVKILVKQSLLYAKMGCDVIAPSDMMDGRIGEIRKALDKNNYKSVQLLSYAVKYASNFYGPFRDAVGSKKSLKGNKKNYQMDYKNSKESLREVSMDINEGADFVMVNQECHILI

SEQ ID NO: 151134 - protein, 241 aa, Unknown
  Bacterial polypetide isolated from the Sargasso Sea
NEWSRRLVEENNLSSSDFILPIFLMKGRNKKQAILSMPGVYRYTLDKLAPLIDKAIKIKIPMVALFPYIDSKKKDEVGTEALNENNLVCKAIRLIKKKYKDQIGIMCDVALDPYTSHGHDGLFKSGYVLNDETIEILVNQSLLQAQMGCDVIAPSDMMDGRIGEIRKSLDKNGLKMTQILSYAVKYSSNFYGPFRDAVGSKKLLKGDKKNYQMDFRNSDEALREVSLDIKEGADMVMVKPG

SEQ ID NO: 151135 - protein, 216 aa, Unknown
  Bacterial polypetide isolated from the Sargasso Sea
MQGNFPSTRLRRNRMKEFSRRLVAENTLSVNDLILPLFVCEGNKINDPINSMPGVSRYSIDKLLNEVEKAVKFNIPAIAIFPQIESGLKNSEGSLAVDENNLVCRSIKSIKKNFPNIGIVCDVALDPFTDHGHDGLVINDKIDNDKTLEVLELQAVIQANAGCDVIAPSDMMDGRVGRIRSALDSNNLSDTLILSYAAKYASGFYGPFRDAIGSGS

SEQ ID NO: 151136 - protein, 62 aa, Unknown
  Bacterial polypetide isolated from the Sargasso Sea
AAYNVSGEYAMIVSAAEKGLLDRNLAMMEMLMSIKRAGADMILTYFAKEAAAILRADFGSFK

SEQ ID NO: 151137 - protein, 103 aa, Unknown
  Bacterial polypetide isolated from the Sargasso Sea
MDMRNYDEALREVGFDIKEGADFVMVKPGMPYLDIINLIKQNFKIPVFSYQVSGEYAMIMNSIKNKDLDENIIEESLISLKRAGSNAIITYFALDIAKKLRNY

SEQ ID NO: 151138 - protein, 250 aa, Unknown
  Bacterial polypetide isolated from the Sargasso Sea
YTPEEKKTDSGEESINSKNLVCKALKKIKSQKNNFGVMCDVALDPYTSHGHDGLVNSEGEIVNDETNSLLVKQALLFAEHGADIIAPSDMMDGRITKIRNKLEDEKFYNTIILSYAAKYASKMYSPFRDAVGSSSNLKTDKKTYQMNIANSDEALREVAMDIKEGADIVMVKPGISYLDIISKIKSKFNFPTFAYQVSGEYSMIKAAADKSFINEEEIVFEQLTSFKRAGADAILSYFAPEVARKLKSGN

SEQ ID NO: 151139 - protein, 223 aa, Unknown
  Bacterial polypetide isolated from the Sargasso Sea
MNSIIRPRRLRRTEAIREMVRENHLMASDFIYPLFIHEKDFKEEISAMPGTYRWDINGLIKEVTRAWQLGIRCVVLFPKVNDSLKTEDGAECFNEDGLIPKAIRILKKEIPEMAIMTDVALDPYSCDGHDGLVDETGKILNDETIEILKKQALTQARAGADFIGPSDMMDGRVGAIRAALDSQGFSDVGIISYTAKYSSAYYGPFRTALDSAPRENSKKIIQT

SEQ ID NO: 151140 - protein, 218 aa, Unknown
  Bacterial polypetide isolated from the Sargasso Sea
ISDVALDTYTDHGHDGIIDTAGGVDNDASIQVLKKQALCHAQAGADIVAPSDMMDGRVKEIRSYLDENSLSNAQILSYAVKYASNFYSPFRDAVGSSSQLKTKGKHTYQMDYSNSNEAIMEASLDVEEGADMLMVKPAGHYCDIIFRLKKEFMLPVFSYHVSGEYSMIKAASKMGWLDEKLCVQEVLLSLIRAGSSAIMTYYALQVAKWLKEDAFVDL

SEQ ID NO: 151141 - protein, 199 aa, Unknown
  Bacterial polypetide isolated from the Sargasso Sea
DGILENGKIINDKTVKILCEQALINSQAGCDIVAPSDMMDGRIVQIRNYLDKCNQEDTLIMSYTAKYASSMYSPFRDAISASTNLGIDKKNTYQMDASNIKEAIKEASMDIREGADILLVKPGIMYLDVLKEIKRNFNFPTFSYQVSGEYSMIKNAIISGTFKKEDILIETMICFKRAGADAIISYFALEIAQMMKNGH

SEQ ID NO: 151142 - protein, 251 aa, Unknown
  Bacterial polypetide isolated from the Sargasso Sea
MIIGKYPSLRLRRNRKESWSRRLIQENTLSPNDFILPIFLIEGSNKRQEISLMPGVYRYTINRLSQIVDRAIKKKIPMVALFPKTQNAHKDELGTESLNEKNLVCRAIKEIKKRYKNQIGIMCDVALDPYTSHGHDGLIKSNTILNDETIEVLINQSLLQAEMGCDVIAPSDMMDGRIGKIRKALDKNKFKNVQILSYAAKYASSFYGPFRDAVGSKGSLKGDKKTYQMDYRNSDEALRRVALDIKEVQIW

SEQ ID NO: 151143 - protein, 135 aa, Unknown
  Bacterial polypetide isolated from the Sargasso Sea
YAVKYASSFYGPFRDAVGSKNNLKSDKKTYQMDFRNSNESLREVGLDIKEGADMVMVKPGLPYLDIIKKIKDNFKIPVFAYQVSGEYSLIKFGIMNNLIKEEAILESLLAFKRAGASAIVTYFAIDIARKIKKIN

SEQ ID NO: 151144 - protein, 256 aa, Unknown
  Bacterial polypetide isolated from the Sargasso Sea
MSTRGAFPHTRMRRLRASAFARDMVRESTLSPANFIYPVFVLEGSGQREAVPSMPGVERLSVDLLVELAKAANALGIPALALFPVVGQDSKSLLAEAAYHADGLVQRAVAELKSAVPEIGVITDVALDPYTTHGQDGIIDDAGYVLNDVTSDTLVKQALSHAAAGADIVAPSDMMDGRIGAIRSALESEGHINTLILSYAAKYASTYYGPFRDAVGSAANIKGGDKKTYQMDPGNSDEAIHEVALDLQEGADMVMV

SEQ ID NO: 151145 - protein, 250 aa, Unknown
  Bacterial polypetide isolated from the Sargasso Sea
MSINAQFPAWRSRRLRRTSAIRRLVSETQISIDDFVAPLFVKEGIKEPQQISSLPGVFQHTLESLKLEVDSLRKLGIPGIILFGIPESKDEVGSGAWDPDGIVQLALKDLKENFGDEMTLIADLCVDEYTSHGHCGILSQDGTVDNDATLEIYNQTALAQADAGADICAPSGMMDGQVSSIRNALDSNNHTQTIILAYSAKYASSLYGPFRDAVDVTIKGGGDRRGYQQDYANSREALAEIKADISEGAD

SEQ ID NO: 151146 - protein, 255 aa, Unknown
  Bacterial polypetide isolated from the Sargasso Sea
MIITGKYPNLRLRRNRNSDWSRRLVRENTLSVNDLILPIFVVDGSNKKQSIKNMPDIYRYSVNRLSEVIDKAVYNKIPMVAIFPYTAKKLKNDSGSESLNEDNLVCKAIQYIKKKYKNSIGIMCDVALDPYTSHGHDGLLNNGKILNDETVKILVKQSLLQAQMGCDVISPSDMMDGRIGEIRKNLDKNNFKDVQILSYAVKYASSFYGPFRDAVGSKSLLRGDKKTYQMDYGNSQEAIREVALDIKEGTDMVMV

SEQ ID NO: 151147 - protein, 329 aa, Unknown
  Bacterial polypetide isolated from the Sargasso Sea
MITGKYPNLRLRRNRKESWTRRLVQENTLSPNDFILPIFLIDGSNKKESISTMPGVFRYTINRVSQIVDKAIKKGIPMVALFPKTKNTLKNDLGTESLNENNLVCRAILEIKKKYKNQIGIMCDVALDPYTSHGHDGLIKSNQIINDETIEVLINQSLLQAEMGCDVLAPSDMMDGRIGKIRKALDNSNFKNTQILSYAAKYASSFYGPFRDAVGSKNSLKGDKKTYQMDFRNSDEAMREVALDIKEGADMIMVKPGMPYLDIIKSIKEKFKIPVLAYQVSGEYSLLETAINKKLIQKNAVYESLVSFKRSGANAIVSYYADRIDKILE

SEQ ID NO: 151148 - protein, 176 aa, Unknown
  Bacterial polypetide isolated from the Sargasso Sea
MRRNRMKSFSRKLISENVLTVNDLILPLFVTEGVNKKEDIPSMPAVYRNSIDELLKEAEYAAKLDIPAIAIFPHIEKDLKDAKGSNAIDNKNLVCRSIKAVKKEFPDLGIITDVALDPFTDHGHDGLIINEEVHNDETLKVLGKQALVQAEAGCDMIAPSDMMDGRVAHIRQVLDE

SEQ ID NO: 151149 - protein, 240 aa, Unknown
  Bacterial polypetide isolated from the Sargasso Sea
KNYYGSEALNENNLVCKAIRLIKKKYKNQIGIMCDVALDPYTSHGHDGLFKSGYVLNDETVEILVKQSLLQAEMGCDVIAPSDMMDGRVGKIRKALDKNGYELVQILSYAVKYASSFYGPFRDAVGSRGFLKGDKKNYQMDYKNETEALREVALDIKEGSDMIMVKPALPYLDIIKNIKNNFKIPVIGYQVSGEYSLISNGIKKGIINQDAIIESLISIKRAGASAIVTYYADKISKFLK

SEQ ID NO: 151150 - protein, 331 aa, Unknown
  Bacterial polypetide isolated from the Sargasso Sea
MKIERTFPETRMRRIRKNSGLREMLAETNLSKTDLIQPIFIKEDLSGAEAIKTMPGINRFGLDILNDEVGKIVDLGIKSIAVFPVINEEKKDESGSQATIDDNFICRAISSIKKSYPDLMVIADVALDPYTNHGHDGLLDETGDVDNDLTLPVLKEQAVVLAKAGTDIIAPSDMMDGRIKIIRDALEQNDFINTLILAYSAKFSSKFYGPFKDAVESAKFFGDKTKDTYQMPVGNINEALHEVALDIREGADIVMIKPGMPYLDVIKAVKDEFKVPTFAYQVSGEYSMLKNAVDSKLLSNDVIKESLLSFKRAGADCILTYFASEIARSLS

SEQ ID NO: 151151 - protein, 232 aa, Unknown
  Bacterial polypetide isolated from the Sargasso Sea
MFNRKFPNSRLRRLRTSNNLIDLVSETTLTKHDLIQPFFIKEGLKGSEAVDSMPKISRHGLDIISSKVEQAITAGISSIAVFPVIDSNKKDQEGSEALNPNNLICSAISSLKKQFPEIIIIADVALDPYTNHGHDGVLKGNKIDNDETLKLLGEQATFLADAGADIIAPSDMMDGRIGYIRSKLDEFNHKDTIILSYAAKYHSSFYGPFRDAVGSKNQLQGASKSSYQMNIA

SEQ ID NO: 151152 - protein, 248 aa, Unknown
  Bacterial polypetide isolated from the Sargasso Sea
MSIFRKYPSTRLRRLRKNLNLIELVSETNLTSKDLIQPIFIKENFEGKEQIESMQDIFRFGLNHVLSEIEELINVGINAIAVFPVIESSKKDEKGLEALNKSNFIVQSINKIKKEFPELILIADVALDPYTDHGHDGILINNEVANDETVEVLIEQSILLAEAGADIIAPSDMMDGRIGLIRDSLEKQNLKDTILLSYAAKYNSKFYGPFRDAVNSASNLGNSSKSSYQMNISNKNEALHEVALDINE

SEQ ID NO: 151153 - protein, 331 aa, Unknown
  Bacterial polypetide isolated from the Sargasso Sea
MFKRKYPNTRLRRLRKNSNLIDLISETNISSNDLIQPIFIKENFKGTEEINSMPGVFRLGVDQALIEVENILNAGVNSIAVFPIIDNDKKDSVGSEAIKQGNFISSSIKKIKDRFPEIVLIADVALDPYTDHGHDGILEDNKVINDETIDILVNQALLLADAGADMIAPSDMMDGRIGAIRKALEKQNFKNTILLSYAAKYNSKFYGPFRDAVNSASSLGKSSKSSYQMDVRNKNEAIQEVAMDINEGADIVMIKPALAYLDIIHVIKETFKIPTFAYQVSGEFSMLKHAINQKWLDSDVMLESLLSIKRAGADAILSYAAKDISMEIKNK

SEQ ID NO: 151154 - protein, 271 aa, Unknown
  Bacterial polypetide isolated from the Sargasso Sea
MIKRTFPQSRLRRTRTKGYLRDLIAENHISTNDLIQPIFIADQSEAKVEIPSMPGIFRHSLESLYAETEELIKKGIKSVAIFPAIDSSKKDQKGSHAFDDKNIVCMALRGLAEKFPEVIKIADVALDPFTDHGHDGVLLDGKVDNDKTLELLKDQALLLAQSGADVLAPSDMMDGRVRMIRDTLESNGFVDTVILSYAAKYASSFYGPFREAVGSSANLGKASKKTYQMNFANLDEALHETAMDIEEGADIVMVKPGTAYLDVVHAIKSEL

SEQ ID NO: 151155 - protein, 330 aa, Unknown
  Bacterial polypetide isolated from the Sargasso Sea
MIITGKYPNLRLRRNRKSDWCRRLVEENTLSVNDLILPIFITDGKNKKESIKSMPGIYRYSVDKIPTILDGAVKNEIPMVALFPYTNFKLKNNMGTEALNENNLVCKAIRFIKKKYKDKIGVMSDVALDPYTSHGHDGILKKANILNDETVDILVKQSVLQAQMGCDVIAPSDMMDGRIGRIRKALDKNNLQNTQILSYAVKYASSFYGPFRDAVGSKKNLKGNKKTYQMDYKNSNEAIREISLDIKEGADMIMIKPALPYLDIIKLAKENFKIPIIAYQVSGEYSLLTNAIKKGLIDDNSIIETLYSFKRAGSNAIVTYFADRIVKFIK

SEQ ID NO: 151156 - protein, 134 aa, Unknown
  Bacterial polypetide isolated from the Sargasso Sea
AAKYASGFYGPFRDGVGSTQKEGIDKSSYQLDSANSDDALRQIEGDLKDGADMIMIKPGLTYLDIISQTKDKYNVPIVAYNVSGEYSMIKNGIKNNIFNENILKEIMISFKRAGASAIVSYFAIEYIEKFLNQK

SEQ ID NO: 151157 - protein, 331 aa, Unknown
  Bacterial polypetide isolated from the Sargasso Sea
MKIERSYPDTRMRRIRKSSALREMLAETTLSKADLIQPIFIKEDLKGREAIKSMPGINRLGLDVLNDEIKKIIDLGIKSVAVFPVINEEKKDEIGSQATIENNFICESISAIKKSYPDLVVIADVALDPYTDHGHDGLLNDTGDVDNDLTLPALREQALVLAKAGTDIIAPSDMMDGRIKIIRDALEQNDFINTLILAYSAKFSSKFYGPFKDAVESAKFFGNKTKDTYQMPIQNINEALHEVALDIREGADIVMVKPGMPYLDVIKAVKDEFKIPTFAYQVSGEYSMLKNAVDSGLLSNDVIKESLLSFKRAGADCVLTYFASEIARELS

SEQ ID NO: 151158 - protein, 235 aa, Unknown
  Bacterial polypetide isolated from the Sargasso Sea
QNGSEALNENNLVCRGIKFIKKRFKNKIGIMCDVALDPYTSHGHDGLLKNKKILNDETVEILTKQAVLQAKMGCDVIAPSDMMDGRIGKIRSALDKNNFNDVQILSYAVKYSSSFYGPFRDAVGSKKLLKGDKKTYQMDYRNSDESLREVSLDIKEGADMIMVKPGMPYLDVIKKVKDKFKIPVLAYQVSGEYSLIMNGINQKLIDKTSIKESLISFKRAGASSIVTYFADQIDL

SEQ ID NO: 151159 - protein, 245 aa, Unknown
  Bacterial polypetide isolated from the Sargasso Sea
MTINRKFPNTRLRRLRRNSNLIDLVAETNLSSQDLIQPIFIKENFNGIESIESMPGINRFGIDEVLKEIEEVIESGINTIAVFPVVESDKKDTKGSEATKEDNFISSAIKTIKKNFPEIILIADVALDPYTDHGHDGILINDEIDNDATIKVLIEQSLILAEAGADIIAPSDMMDGRIGSIRQSLEDSNFKNTILLSYAAKYNSKFYGPFRDAVNSASNLGKATKSSYQMSIHNKDEAIHEVAID

SEQ ID NO: 151160 - protein, 333 aa, Unknown
  Bacterial polypetide isolated from the Sargasso Sea
MKENYSHYPNTRMRRLRRTSAIRNLVSETSLSSHDLIYPAFITESEESEDIGSMPGTKRLCLNDLLQLAEKLVSLSIPAIALFPVIQNEKKTVDGKEAFNSNGLIQKAISKLKSQFPELIVISDVALDPYTTHGQDGIIDENSYVLNDLTNETLKKQALSHAEAGADIVAPSDMMDGRIGLIREEFEKNQFHNTMILSYAAKYASCFYNPFRDAVNSKGNLASGDKRTYQMDPSNSDESYREVAMDINEGADIVMIKPAMMYQDIISNIRSKFSIPVFAYQVSGEYAMIRAAADAGYLNHKDAVMESVLSIKRSGASGILTYSAIDIAQWLSE

SEQ ID NO: 151161 - protein, 304 aa, Unknown
  Bacterial polypetide isolated from the Sargasso Sea
TNLTTKDLIQPIFIKENYNDAEPINSMPDIYRYGIEKALFEIEDILKNNIKALALFPVIENINKDEKGSEAFKKNNFISNVIQKIKAEFPEIILIADVALDPYTDHGHDGIIVNKEVDNDETIEVLIKQSQILAEVGADIIAPSDMMDGRIGKIREALEKNNFKDTILLSYAAKYNSSFYGPFRDAVNSASNLGKSSKSSYQMSYKSINEAIHEVEMDINEGADIVMIKPAMPYLDIITRIKQNFKIPTFAYQVSGEYSMLKNAINQGWLNETVMLESLYSIKRSGADAVLTYAAKEIAKELSK

SEQ ID NO: 151162 - protein, 131 aa, Unknown
  Bacterial polypetide isolated from the Sargasso Sea
ASNFYGPFRDAVGSHKSLKSNKKSYQMNFSNSNEALREAALDISEGADLIMVKPGISYLDIISKIKNEFKFPTFAYQVSGEYSMIKAAGEKGWIDEDAVIIEQLTSFKRAGADAILTYFAPYIAKTLNSSK

SEQ ID NO: 151163 - protein, 153 aa, Unknown
  Bacterial polypetide isolated from the Sargasso Sea
RIGSIRQSLENSGYKNTILLSYAAKYNSKFYGPFRDAVDSASNLGKSSKSAYQMSIRNKDEALHEVAIDINEGADIVMIKPAMPYLDIIHLVKERFKIPTFAYQVSGEYSMLKQAIKEGWLDEMVMLESLISIKRAGADAILTYAAKEVSKEI

SEQ ID NO: 151164 - protein, 331 aa, Unknown
  Bacterial polypetide isolated from the Sargasso Sea
MFKRKYPNTRLRRLRKNSNLIDLISETNISSNDLIQPIFIKENFKGTEEINSMPGILRLGLDQALIEVENILNAGVNSIAVFPIIDNDKKDSVGSEAIKQGNFISSSIKKIKDRFPEIVLIADVALDPYTDHGHDGILEDNKVINDETIDVLVNQALLLADAGADMIAPSDMMDGRIGAIRKALEKENFKDTILLSYAAKYNSKFYGPFRDAVNSAANLGKSSKSSYQMDVRNKNEAIQEVAMDINEGADIIMIKPALAYLDVIHVIKETFKIPTFAYQVSGEFSMLKNAINQKWLDNDVMLESLLSIKRAGADAILSYAAKDISKEINNK

SEQ ID NO: 151165 - protein, 321 aa, Unknown
  Bacterial polypetide isolated from the Sargasso Sea
MRLRRNRKSDWCRRLVEENTLSANDLILPIFITDGRNKKESIKSMPGIYRYSVDKIPTILDGAVKNKIPMVALFPYTNFKLKNNMGTEALNENNLVCKAIRLIKKKYKDKIGVMSDVALDPYTSHGHDGILKKGNVLNDETVDILIKQSVLQAQMGCDVIAPSDMMDGRIGRIRKALDSNNLQSTQILSYAVKYASSFYGPFRDAVGSKKNLKGNKKTYQMDYKNSNEAIREISLDIKEGADMIMVKPAMPYLDIIKLAKESFKIPVIAYQVSGEYSLLTNAIRKGLIDDNSIIETLYSFKRAGSNAIVTYFADRIVKFIK

SEQ ID NO: 151166 - protein, 99 aa, Unknown
  Bacterial polypetide isolated from the Sargasso Sea
NSEEAIREVGLDISEGADMVMVKPGMPYLDIISRIKSEFKVPTFAYQVSGEYSMIKESINKGWFNEKVIMESLLSFKRAGANGILTYFALEAAEKLNNE

SEQ ID NO: 151167 - protein, 328 aa, Unknown
  Bacterial polypetide isolated from the Sargasso Sea
MITRNFPKTRARRLRKNSVIRDLISETSLNHKKLIQPLFVSDTVKGVEEISSMPNQFRFDQNSVLKEIEELKGLGINTIALFPHLKSIKKDNEGSEALNPENFLCDTLKKIKQHFPDLVVIVDVALDPYTTSGHDGILKDGKVDNDLTLDALSKMSITLTHSGADILAPSDMMDGRIGYIRDELEKNDFKDTVILSYAVKYASSYYGPFRDAVGSKQKEGISKKTYQMDFRNSKEARKEVELDIQEGADILMVKPALPNLDVIKVVSEEYDLPVFAYQVSGEYSMLMNGIDKNLFDSNVIPETLVSIFRAGSSSVLTYFAKWIAENNG

SEQ ID NO: 151168 - protein, 327 aa, Unknown
  Bacterial polypetide isolated from the Sargasso Sea
MNRKFPDTRLRRLRSNPSLLKITAETNLTVDDLIQPIFVKEGIKKAEAIESMPNVNRYSKEGVIDYCKSLMDLGIKAVALFPVIDSKKKDLEGIEAFNRKNLICGTVESIKKKIPELVLIVDVALDPYTVHGHDGILDKKDYVDNDKTVEVLKKQALVLADAGADVIAPSDMMDGRIGAIRKELELNNFFNTVILSYAAKYSSKFYGPFREAVQSSSNLGKGNKDSYQMSPHNINEALHEVEMDLNEGADAVMVKPGMPYLDVIRAVKEKFKVPTFAYQVSGEYSMLKGAIEKGWLQEEVLMEVLHSFKRAGSDCILTYAAEEVHRN

SEQ ID NO: 151169 - protein, 316 aa, Unknown
  Bacterial polypetide isolated from the Sargasso Sea
RKSSSLREMLAETTLSKTDLIQPIFIKEDLEGREVIKSMPGINRLGLDVLNDEIKKIIDLGIKSVAVFPVINEEKKDEIGSQAIIENNFICAAISSIKKNYPDLIVIADVALDPYTDHGHDGLLNEDGDVDNDLTLPALREQAIVLAKAGTDIIAPSDMMDGRIKIIRDSLEQNDFINTLILAYSAKFSSKFYGPFKDAVESAKFFGNKTKDTYQMPVGNINEALHEVALDIQEGADIVMIKPGMPYLDVIKAVKDEFKVPTFAYQVSGEYSMLKNAVDSELLSNDIIKESLLSFKRAGADCILTYFASEIAESLS

SEQ ID NO: 151170 - protein, 329 aa, Unknown
  Bacterial polypetide isolated from the Sargasso Sea
MITGKYPSLRLRRSRKYDWSRRLIEENNLSSSDFILPIFLIDGKNKRQTIKSMPNVYKYSIDNLNSIVDKAIKNGLPMVALFPNTNKNKKNLLGTEALNENNLVCKAIRHIKKKYRNEIGIMCDVALDPYTSHGHDGLIKSNYILNDETIKILIEQSLIQAQMGCDVLAPSDMMDGRIGEIRKTLDKNNFEMTQILSYAVKYASSFYGPFREAVGSKGLLKGDKKSYQMDFKNKNEALREVALDIKEGADMVMVKPGMPYLDIIKSVKENFKIPVMAYQVSGEYSLLSNSINKKLIDKYAILESLISFKRAGANAIVSYYADRLDKILR

SEQ ID NO: 151171 - protein, 196 aa, Unknown
  Bacterial polypetide isolated from the Sargasso Sea
MATTLPGAFPGRRLRRVRKHDFSRRLVRENVLTANDLIYPVFVLEGENRREAVTSMPGVDRLSIDLLLKEAAELVALGVPAIALFPVTPLEQKSLLAEEAYNPDGLAQRATRALKASFPELGVITDVALDPFTTHGQDGIIDDEGYVLNDITTEILVKQALSHAAAGVDIVAPSDMMDGRIGAIRAALEENGFINT

SEQ ID NO: 151172 - protein, 107 aa, Unknown
  Bacterial polypetide isolated from the Sargasso Sea
MDPPNSNEALHEVALDIQEGADSVMVKPGMPYLDVIRQVKDQFGVPTFAYQVSGEYAMHMAAIQNGWLKEKESIMESLLCFKRAGADGILTYFAKRAAQWLQEDARR

SEQ ID NO: 151173 - protein, 368 aa, Unknown
  Bacterial polypetide isolated from the Sargasso Sea
MNRGGVSLRPGDGIIHSWMNRMLLPDTVGTGGDSHTRFPIGISFPAGSGLVAFAATLGVMPLDMPESVLVRFKGEMQPGITLRDLVNAIPYAALQKGLLTIDKDGKKNVFSGRCLEIEGLPNMKVEQAFELSDASAERSASGCTVKLNEEPILEYLKSNIVMLRWMIASGYGDAKTLERRAQSMEEWILNPQLLEADDNAEYAEIIEIDLNEIKEPLLACPNDPDDIKPLSEVANTKIQEVFIGSCMTNIGHFRAAGTLLQKYKNIKARLWVVPPTKMDEKQLIEEGIYNIFGVSGARTEVPGCSLCMGNQARVLANSTVVSTSTRNFPNRLGDGANVFLASAELSAISAVLGKLPSVDEYHKYMGRY

SEQ ID NO: 151174 - protein, 273 aa, Unknown
  Bacterial polypetide isolated from the Sargasso Sea
MAAGLLAKKAVEAGLKVQPHIKTSLAPGSRIVTEYLTQTGLLPYLEKLGFALAGYGCTTCIGNAGDLTPELNEVITSNDLVCAAVLSGNRNFEARIHPNLKANFLASPPLVVAYAIAGTVLKDLMTEPVGQGKGGKDIYLGDIWPSSDEVHALLKYAMNGKAFRENYSKVASDPGKLWEKIKGVSGTAYTWPASTYIAEPPFFAQFALDQGAAAASAVHGARIMALFGDSITTDHISPAGSIKESSPAGQWLLQHGVQKADFNSYGARRGTMT

SEQ ID NO: 151175 - protein, 311 aa, Unknown
  Bacterial polypetide isolated from the Sargasso Sea
GITLRDLVNAIPYAAIQNGLLTVEKKGKKNIFSGRCLEIEGLPNMKVEQAFELSDASAERSASGCTVRLNKEPIVEYLNSNIVMLRWMIASGYGDAKTLERRAQAMEEWILNPELLEPDKDAEYTEVIEIDLNEIKEPLLACPNDPDDIKPLSEVANTEIQEVFIGSCMTNIGHFRAAGTLLEKYNGIKARLWVVPPTKMDEKQLIEEGIYNIFGVSGARTEVPGCSLCMGNQARVLANSTVVSTSTRNFPNRLGDGADVFLASAELAAISSVLGKLPTVDEYHKYMADINPLSDEIYRYLNFNEIDSYVE

SEQ ID NO: 151176 - protein, 205 aa, Unknown
  Bacterial polypetide isolated from the Sargasso Sea
MKPGKKNSYNCLKTLEIEGKSYKYFSLVEAEKNGLNGISKLPKSLLVLLENLLRFEDDVSVTRNQIDAIKNWLKTKKSNTEIAYRPTRILLQDYTGIPAVADLAAMREAVKEKNKDPKKINPLSPVDLVIDHSVQVDDFANISSLKKNVDIEFSRNGERYSFLKWGQKAFDNFRIVPPGTGICHQVNLEYLSKVVLVLGNRREKY

SEQ ID NO: 151177 - protein, 301 aa, Unknown
  Bacterial polypetide isolated from the Sargasso Sea
KNIFSGRILEIEGLPNLKVEQAFEISDASAERSAGGCTIRLDKEPIIEYFHSNITMLRWMIDNGYQDPRTLERRAQAMEEWLANPVLLEPDSEAEYFKVIEIDLNEIKEPLLACPNDPDDIKTLSEVAGTKIDEVFIGSCMTNIGHFRAAAEVLKQVDGGLPTRLWVAPPTKMDEHQLTEEGIYNIFGTSGARTEMPGCSLCMGNQARVAANSTVVSTSTRNFPNRLGQGADVFLASSELAAVSAALGKIPTMSEYLEYMSSINTMSENIYRYLNFNEIEEFIEASDRAKNIPLTNVQDVA

SEQ ID NO: 151178 - protein, 173 aa, Unknown
  Bacterial polypetide isolated from the Sargasso Sea
MSSVAGEKIDEVFIGSCMTNIGHFRAAGKLLEQVKGQLPTRLWLSPPTKMDAHQLTEEGYYGIYGKAGARMEMPGCSLCMGNQARVEPNSTVVSTSTRNFPNRLGDGANVYLASAELAAVASTLGRLPTVEEYMGYAAKLDTMASDVYRYLNFDQIAEFRKIAASANIPVIQA

SEQ ID NO: 151179 - protein, 151 aa, Unknown
  Bacterial polypetide isolated from the Sargasso Sea
GKAKNSLTENIENCSNIARNYKEKNMRWIIVGDNNYGEGSSREHAAMTPRFLGCAAVIAKSFARIHETNLKKQGILALTFENSDDYEKIKEDDKISISGLTDFAPDKSFECVLKHSDGNTEKIMLKHSYNSSQIEWFKAGSALNVLKNKTK

SEQ ID NO: 151180 - protein, 286 aa, Unknown
  Bacterial polypetide isolated from the Sargasso Sea
RLKDIWPSDAEIDAVVASSVKPEQFRKVYEPMFAVSVDYGEKISPLYDWRPQTTYIRRPPYWEGALAGERSMKGMRALAVLGDNITTDHLSPSNAIMMDSAAGEYLHKMGLPEEDFNSYATHRGDHLTAQRATFANPKLINEMAVVDGKIKQGSLTRIEPEGVVTRMWEAIETYMERKQPLIIIAGADYGQGSSRDWAAKGVRLAGVEAIVAEGFERIHRTNLVGMGVLPLEFKTGVNRKTLALDGTESYDVLGERTPRTTLTLVITRRNGEVLQVPVTCRLDTAE

SEQ ID NO: 151181 - protein, 150 aa, Unknown
  Bacterial polypetide isolated from the Sargasso Sea
MKNINSFNSEQNLHINNQKYKYFDLNTVSKQFNLDLLNIPISIKIILENLLRNEDGETVNKEMISSVFESLNKKNNNKALEIAFFPTRVLMQDFTGVPAVADLAAMRNALKKRGFEPSIINPISRVDLVIDHSVMVDIYKGQNALKENVK

SEQ ID NO: 151182 - protein, 170 aa, Unknown
  Bacterial polypetide isolated from the Sargasso Sea
MNQTDLIKKIYDNYLSKIEEANSFFNRPLTFTEKILFSHLSEDMDSIPARTKTFCTLSPDRVAMQDATAQMALLQFINAGMETTAVPTTVHCDHLITAIKGADDDLSNALLTNKEVYDFLKSVCAKYGIGFWKPGAGIIHQTILENYAVPGTMMIGTDSHTPNAGGLGMM

SEQ ID NO: 151183 - protein, 258 aa, Unknown
  Bacterial polypetide isolated from the Sargasso Sea
MIFDLEIIKKVYSSIKQKVDSARKVCNHPLTLSEKILYSHLWDGNPKKPFLRGKDYVDFAPDRIACQDATAQMALLQFMQAGKKKVAVPTTVHCDHLIQARIGADEDLQNAINTSNEVFNFLESVSNKYGIGFWKPGAGIIHQVVLENYAFPGGMMIGTDSHTVNAGGLGMVAIGVGGADAVDVMAGMAWELKFPKLIGVKLTGKLSGWTAPKDVILKVAGILTVKGGTGAIIEYFGPGAEELSCTGKGTICNMGAEV

SEQ ID NO: 151184 - protein, 303 aa, Unknown
  Bacterial polypetide isolated from the Sargasso Sea
EFYGEGASKLTLGDRATISNMAPEYGATAAMFSIDENTLDYLRLTGRSDEQVKLVETYAKTAGLWSDTLKQAEYERVLRFDLSSVVRNMAGPSNPHARVATTDLAAKGIAGKWEETPGQMPDGAVIIAAITSCTNTSNPRNVIAAALLARNANRLGLTRKPWVKSSLAPGSKAVELYLEEAGLKAELENLGFGIVAFACTTCNGMSGALDPKIQQEIIDRDLYATAVLSGNRNFDGRIHPYAKQAFLASPPLVVAYAIAGTVRFDIERDSFGTDANGKPILLKDLWPTDEEIDAIVRASVKPE

SEQ ID NO: 151185 - protein, 271 aa, Unknown
  Bacterial polypetide isolated from the Sargasso Sea
ASAERSASGCTIKLGEEPILEYLNSNIIMLRWMIANGYGDAKTLERRARAMEEWIKNPVLLEADKNANYKEIIEIDLNQIKEPLLACPNDPDDIKPLSEVQDTKIDEVFIGSCMTNIGHFRAAGQLLEKYKKLPARLWIVPPTKMDQQQLIDEGFYKIFDSAGARTEVPGCSLCMGNQARVEPNSTVISTSTRNFPNRLGDGADVFLASAELSAVSAILGRLPSNEEYLEIMKDIDTLHKDIYKYLNFNEIKAYVDQAKSANIPNINIAEV

SEQ ID NO: 151186 - protein, 179 aa, Unknown
  Bacterial polypetide isolated from the Sargasso Sea
EPIVACPNDPDDVKVLSDVQGDKIDDVFIGSCMTNIGHFRAAGEVLEGKGQANVKLWICPPTKMDKDQLTREGYYAKFAAAGARLEMPGCSLCMGNQARVKDGVTVFSTSTRNFNNRMGKDARVYLGSSELAAACATLGKIPTPAEYNSIVIPAVEGKEEAIYKYLNFDQMTGFSIDEK

SEQ ID NO: 151187 - protein, 51 aa, Unknown
  Bacterial polypetide isolated from the Sargasso Sea
GSIQKESQMGQYFMEHQILLKEYNSYGLRRGNHEVMMRGTFANIRIRNEIA

SEQ ID NO: 151188 - protein, 302 aa, Unknown
  Bacterial polypetide isolated from the Sargasso Sea
GSGLVAFGAALGVIPLDMPESVLVRFSGEMQPGITLRDLVNAIPYAAIQEGLLTVEKEGKKNIFSGRCLEIEGLPNLKIEQAFELSDASAERSASGCTVLLDEEPILEYLKSNIVLLRWLISEGYGDARTLERRAQKMEQWIQNPVLLKPDKNAKYAATIEIDLNEIKEPLLACPNDPDDIKTLSEIGEDKIDEVFIGSCMTNIGHFRAAGKLLKDTSSLPTKLWISPPTRMDKFQLEQEGFYDIFKKAGVRTEVPGCSLCMGNQARVEPNSTVVSTSTRNFPNRLGDGADVYLASAELAAI

SEQ ID NO: 151189 - protein, 256 aa, Unknown
  Bacterial polypetide isolated from the Sargasso Sea
VGVELTGKPQPGITATDIVLALTEFLRKERVVSAYLEFYGEGASHLTLGDRATISNMTPEYGATAAMFYIDQQTIDYLRLTGREEKQIALVEQYAKHTGLWADDLETAEYERVLTFDLSAVGRNMAGPSNPHARLPTSDLESRGIAAKWTEEEGKMPDGAVIIAAITSCTNTSNPRNVIAAGLLARNANQRGLTRKPWVKSSLAPGSKAVKLYLEEANLMSELEDLGFGVVAFACTTCNGMSGALDPKIQQEIIDR

SEQ ID NO: 151190 - protein, 204 aa, Unknown
  Bacterial polypetide isolated from the Sargasso Sea
MKPGNRNSYKSLSDLEVSGKNFKYYSLKKAELNGLQGISKLPKSLKVLLENLLRYEDGVSVNKNQIEAIKNWLDTKKSKTEIAYRPARVLLQDYTGIPAVADLAAMREAVKEKNKDPNTINPLSAVDLVIDHSVQVDQSAKKDSFEKNVDIEFKRNGERYSFLKWGQSAFNNFRIVPPGTGICHQVNLEYLSKVVWTEEYKGEK

SEQ ID NO: 151191 - protein, 250 aa, Unknown
  Bacterial polypetide isolated from the Sargasso Sea
FNGRIMEIEGLPDLKLEQAFELTDATAERSCAGSTIKLSVDTVSEYLRSNVALLKNMIARGYSDARTLARRIKAMENWLANPQLLEADADADYAAVIDIDLNTITEPIVACPNDPDNVKTLSDVAGDKVDEVFIGSCMTNIGHYRAAATVLEGQGQNTARLWVCPPTRMDEETLKAEGYYATFEAAGSRMEMPGCSLCMGNQARVEDNTTVFSTSTRNFNNRLGNGAQVYLGSAELAAVCAQLGRIPSRE

SEQ ID NO: 151192 - protein, 307 aa, Unknown
  Bacterial polypetide isolated from the Sargasso Sea
GDLTLEKKGKKNIFSGRIFEIEGLPDLKVEQAFEISDASAERSAGGCTIRLNKEPIIEYFNSNITLLRWMIDNGYQDPRTLERRAQAMEEWLADPVLLEPDSNAKYFKTIEINLNEIKEPLLACPNDPDDIKPLSEVNGTEIDEVFIGSCMTNIGHFRAAAEVLKQVEGSLPTRLWVAPPTKMDEHQLTEEGIYNIFGTSGARTEMPGCSLCMGNQARVAANSTVVSTSTRNFPNRLGQGADVFLASSELAAVSAAIGKIPTMSEYMKYMTGIDTMSESIYRYLNFDEIKEFIEASDRAKNIPLTNI

SEQ ID NO: 151193 - protein, 124 aa, Unknown
  Bacterial polypetide isolated from the Sargasso Sea
EGPKEGQKINTPTGDLYNWNSSSTYVQKPPFFDNQSNEDKEIKPIENARPLLLLGNRVTTDHISPAGAIKVDSPAGNYFMERQIRQNDFNSYGARRGNHEVMVRGTFANIKIKNQLLSNVEGGY

SEQ ID NO: 151194 - protein, 130 aa, Unknown
  Bacterial polypetide isolated from the Sargasso Sea
TDLIVIGGKEYGTGSSRDWAAKGTKLLGVKSVFAESFERIHRSNLIGMGILPLQFIDGMDRKKLKLLGSEIITVKGIEKGLNPGDKLSVEFKYQNGEIKKIKMLCRIDTNNELEYYKHGGILQYVLRNTI

SEQ ID NO: 151195 - protein, 291 aa, Unknown
  Bacterial polypetide isolated from the Sargasso Sea
GATCGFFSTDKETIKYLELSGKDDHQINIVKKYTSIQKLWIDGTYDPNFDETVNLDLNLIEPSVAGPKRPQDKILVKDIPEVFKTIDAVNYDKVISNKNLKSGDVVIAAITSCTNTSNPNVMIAAGLVAKKAVEFGLDVKPWVKTSLAPGSKVVSDYLDKANLSQYLDQIGFNLVGYGCTTCIGNSGPLEEWVSNEIKNNNLTVCSILSGNRNFEGRVHQEVKANFLASPPLVVAFAIAGNMNIDIFKQPIGISKLGKDVFLRDLWPSSSEIIEIVDNSISTEMFKKRYKE

SEQ ID NO: 151196 - protein, 245 aa, Unknown
  Bacterial polypetide isolated from the Sargasso Sea
ESVSKKYGIGFWEPGAGIIHQVVLENYAFPGGMMIGTDSHTVNAGGLGMVAIGVGGADAVDVMAGMPWELKFPKLIGVCLKGELGGWSSAKDVILKVAGILTVKGGTGSVVEYFGSGAEKLSCTGKGTICNMGAEVGATTSIFSYDQNMSNYLRATSRHELADLADQNAEFLCGDPEVYKDPEKYFDEVITVDLDTLEPHINGPFTPDLATPISEFAESAKENGWPLKLDVGLIGSCTNSSYEDI

SEQ ID NO: 151197 - protein, 167 aa, Unknown
  Bacterial polypetide isolated from the Sargasso Sea
ISNNCLIGAINAFGGEANLVVNQLTGDKGEVPATARAYKAAGIPTIVVGDHNYGEGSSREHAAMEPRHLGVKAVIVKSFARIHETNLKKQGMLGLIFENENDYNLIKEDDTFNFLNLDKFAPKKRLSLEIIHKDGTKNVIQLNHTYNSQQIEWFKHGSALNLIKSNN

SEQ ID NO: 151198 - protein, 127 aa, Unknown
  Bacterial polypetide isolated from the Sargasso Sea
MSSTLREASKDTLQVKDKTYRYYSLRLAAKSLGDITRLPKSLKVLLENLLRWQDGNSVTEDDIHALAHWLKTAHADREIAYRPARVLMQDFTGVPAVVDLAAMREAVKRLGGDTAKVNPLSPVDLVI

SEQ ID NO: 151199 - protein, 103 aa, Unknown
  Bacterial polypetide isolated from the Sargasso Sea
GIKAVIAESFERIHRSNLIGMGILPLQFINDVNRKNLKLIGSELISIMDIEKGFNPSDEVNVEIKYASGEMKKIKTLCRIDTKNELEYYKNGGILQYVLRNMI

SEQ ID NO: 151200 - protein, 179 aa, Unknown
  Bacterial polypetide isolated from the Sargasso Sea
MAFDINVIKRVYSEMSEKIKKARSLLGRPMTLSEKILYSHLWNDNNVETFKRGTDYVDFGPDRVTCQDATAQMALLQFMQAGKDKVAVPTTVHCDHLILAQSGALKDLKNANKVSSEVFNFLESVSKKYGIGFWKPGAGIIHQVILENYAFPGGMMIGTDSHTVNAGGLGMVAIGVGGA

SEQ ID NO: 151201 - protein, 108 aa, Unknown
  Bacterial polypetide isolated from the Sargasso Sea
EPNIYDVEKEDFKITDGDVLIAAITSCTNTSNPSVLIGAGLLAKNAIEKGLMTKPWVKTSLAPGSQVVTDYLEKAGLNIYLDKLGFNLVGYGCTTCIGNSGPLADNIS

SEQ ID NO: 151202 - protein, 99 aa, Unknown
  Bacterial polypetide isolated from the Sargasso Sea
VIAESFERIHRSNLIGMGILPLQFKDGLNRNKLNLKGSELITIINIEKGLTPGQDVECEIKFVDGVAKKISLLSRIDTANEIEYYKNDGILKYVLRNML

SEQ ID NO: 151203 - protein, 338 aa, Unknown
  Bacterial polypetide isolated from the Sargasso Sea
ESVLVKFKGEMQPGITLRDLVNAIPYAAIQSGDLTLEKKGKKNIFSGRILEIEGLPNLKVEQAFEISDASAERSAGGCTIRLNKEPIIEYFKSNITLLRWMIDNGYQDPRTLERRAQAMEEWLANPVLLEPDANAQYFKTIEINLNEIKEPLLACPNDPDDIKTLSQVNGTEIDEVFIGSCMTNIGHFRAAAEVLKQVEGSLPTRLWVAPPTKMDEHQLTEEGIYSIFGTSGARTEMPGCSLCMGNQARVAADSTVVSTSTRNFPNRLGQGANVFLASSELAAVSAAIGKIPTMSEYMQYMSGIDTMSESIYRYLNFDEIEEFVEASDRAKNIPLTNI

SEQ ID NO: 151204 - protein, 106 aa, Unknown
  Bacterial polypetide isolated from the Sargasso Sea
MQDSYKTKKTLKIGKKQYTFNSLRLAEKHGLKNISSLPFSIKILLENLIRNEDGITVTSKDIKEFSKWKKNKKINLEINFRPARVLMQDFTGVPAVVDLAAMRAAM

SEQ ID NO: 151205 - protein, 203 aa, Unknown
  Bacterial polypetide isolated from the Sargasso Sea
MKPGKKNSFKSLKSIKINNKDYKYFSLLEAEKNGLKGISNLPKSLKVLLENLLRFENDLSVTKDQIEAVQKWLKEKKSNTEIAYRPARVLLQDYTGIPAVADLAAMREAVKKKNKDPNTINPLSTVDLVIDHSVQVDQSSKPDSFEKNVDIEFKRNGERYSFLKWGQQAFNNFRIVPPGTGICHQVNLEYLSKVVWCEKYKED

SEQ ID NO: 151206 - protein, 290 aa, Unknown
  Bacterial polypetide isolated from the Sargasso Sea
QKKNLNLIHPDTCIGTDSHTPMVNAIGVLGWGVGGVEAEISMLGKTIPMSVPEVVGVNLTKQLKEGITSTDLVLYITKLLRDSKVVGSFIEFCGEGVENLTVGDRATISNMAPEYGATAVLFPVDKATLNYLSMTGRTEEEIKIVEEYSKCQNLWRKSNTTPEYNRVLDLDLSTIEPCVSGPKNPEDKIDLDKFSKEINTHSKMLYNKDLRDDEFEVPTQGYKIKDADIMIAAITSCTNTANPKNVIAAGLIAKKLINLGFKKKNKIKTSFAPGSKVTAEILKKSGYKNI

SEQ ID NO: 151207 - protein, 206 aa, Unknown
  Bacterial polypetide isolated from the Sargasso Sea
MKPGNKNSYKSLSDLEVNGKNYKYYSLKKAELNGLEGVSKLPKSLKVLLENLLRYEDEISVNQKQIEAVKNWLDTKKSKTEIAYRPARVLLQDYTGIPAVADLAAMREAVKEKNKDPNTINPLSAVDLVIDHSVQVDQSAKKDSFEKNVDIEFKRNGERYSFLKWGQSAFNNFRIVPPGTGICHQVNLEYLSKGSLVRRIQRRKIL

SEQ ID NO: 151208 - protein, 260 aa, Unknown
  Bacterial polypetide isolated from the Sargasso Sea
PCIGQWAREGADKQEKNSIIHSFNRNFAKRADGNPNTHAFVASPEIVAAIAISGDLGFNPKTDSLVNDLGEKVRLEEPTGWELPPKGFEVDDRGYIEPDKDGSNVEVIINPESKRLEKLEPFAPWDGKNITEAKLLIKAFGKCTTDHISMAGPWLRYRGHLDNISNNCLIGAVNAYNKKTNFIKSQLNGEYGGVPETQREYKKNNIPTVVVGDHNYGEGSSREHAAMEPRHLGVRVVIVKSFARIHETNLKKPRYASINF

SEQ ID NO: 151209 - protein, 146 aa, Unknown
  Bacterial polypetide isolated from the Sargasso Sea
MIGTDSHTVNAGGLGMIAIGVGGADAVDVMAGMPWELKFPKLIGVKLTGELSGWTSAKDVILKLAGILTVKGGTGSIIEYFGEGTKTLSCTGKGTICNMGAEIGATTSIFGYDEKMEEYLKATGREEIVGYTNNIAEHLVSDKAVT

SEQ ID NO: 151210 - protein, 296 aa, Unknown
  Bacterial polypetide isolated from the Sargasso Sea
NIFSGRCLEIEGLPDLKVEQAFELSDASAERSASGCTVRLNKEPIIEYLKSNIVMLRWMIGSGYGDAKTLERRAQAMEEWIANPELLEPDENAEYAEIIEIDLNKITEPLLACPNDPDDIKPLSEVAETSIDEVFIGSCMTNIGHFRAAGHLLKKYNGTKARLWVVPPTKMDEKQLMEEGIYNVFGTSGARTELPGCSLCMGNQARVLANSTVVSTSTRNFPNRLGDGADVFLASAELAAIASVLGKLPSLKEYLKYMEEINPLADDIYRYLNFNEIDQYVESANTADIPAVNIVS

SEQ ID NO: 151211 - protein, 272 aa, Unknown
  Bacterial polypetide isolated from the Sargasso Sea
VDSFRIVNQKFQYISLRKARDFFKFDLNCLPFSYRILLENILRKFDNKNIKIEDIENLISLKFGKEIFFSPSRVLMQDYTGVPAIADLAAMRDKIKSDGLDPKLINPIVPVSLVIDHSISVDSFATINSLNENVKMEYFRNSERYKLLKWAQSSIKNFTLFPPGSGICHQINLEFLSEIVSNKNNFLFFDSVVGTDSHTTMVNALSVLGWGVGGIEAEAVMLGQPISMQLPEVVGIKIIGNLLDGVTATDAVLHLTEKLRKLNVVGKFVEFF

SEQ ID NO: 151212 - protein, 109 aa, Unknown
  Bacterial polypetide isolated from the Sargasso Sea
KAVIAESFERIHRSNLVGMGVIPLEFETGLTRHDFRLTGKECITILGLDNDLKPLQEVHGFIKYADGQEKEIKLRCRIDTDMELEYIENGGVLHYVLRNLAKDKVSQEI

SEQ ID NO: 151213 - protein, 267 aa, Unknown
  Bacterial polypetide isolated from the Sargasso Sea
RPSDLAVKGISGVVENEPGLMPDGAVIIAAITSCTNTSNPRNVIAAGLLARNAKAKGLSRKPWVKSSLAPGSKTVELYLKEANLLTDLESLGFGIVAFACTTCNGMSGALDPVIQKELIERDLYATAVLSGNRNFDGRIHPYAKQAFLASPALVVAYAIAGTIRFDIEKDVLGLDKDGNEIRLKDIWPSDAEIDAVVESSVKPEQFRKVYEPMFAVSVDYGEKISPLYDWRPQTTYIRRPPYWEGALAGERSMKGMRALAVLGDNIT

SEQ ID NO: 151214 - protein, 285 aa, Unknown
  Bacterial polypetide isolated from the Sargasso Sea
PETVIGLALGGTLDFNFLDDTLTSKDGEEITLSPPIADELPDKGFEETLEGFIQPTPGDDVEVVIDPESNRLQRLTPFEAPNEAEYKSMSVLMKAEGKCTTDHISPAGKWLQFRGHLENISQNLFNGVNNAFADNAGDGVNVLTKEVDTLPNIAKNYHAENVSWVAVGDENYGEGSSREHAAMEPRFRGCKVVLVKSFARIHEANLKKQGILPLVFDDKNDYEKIEQFDKMTIKSLSDIKVDTPIEIVLEKENGEQETIKANHSLSSDQISWFFAGSALNYIKSK

SEQ ID NO: 151215 - protein, 257 aa, Unknown
  Bacterial polypetide isolated from the Sargasso Sea
MDLSRTPIELVESVYKTLTENILTIRERKDAPLTLAEKILFGHATDPSSISLDKGEDYGDFAPDRVAMQDATAQMALLQFMQAGMEKTAVPSTVHCDHLIQAYEGASSDLAVANQTHKEVFDFLRSASQKFGIGFWGPGAGIIHQVVLEQYAFPGGMMIGTDSHTPNAGGLGMVAIGVGGADAVDVMAGMPFNTKIPKLIGVKLTGSLSGWSSPKDIILKVAEILTVKGGTNAIVEYFGEGTSSISTTGKSTITNMG

SEQ ID NO: 151216 - protein, 288 aa, Unknown
  Bacterial polypetide isolated from the Sargasso Sea
SVSNKYGIGFWKPGAGIIHQVILENYAFPGGMMIGTDSHTVNAGGLGMIAIGVGGADAVDAMTGMPWELMFPKLIGIKLNGKISGWTSAKDVILKVAGMLTVKGGTGAIVEYFGDGAASLSCTGKGTICNMGAEIGATTSIFPYDNNMGEYLRATGRGKVADLSESMSENLKSDDDVYEKPEEYYDEVIEIDLDKLEPYINGPFTPDKATPISEMKMEAKKNGWPNDVSVGLIGSCTNSSYEDISRSASIAAQAVERGLDTKATFTITPGSEQVRSTIERDGYIDILK

SEQ ID NO: 151217 - protein, 193 aa, Unknown
  Bacterial polypetide isolated from the Sargasso Sea
MYDSFKTKKILKIGKKTYTYFSFKAAEKNGLKNISSLPFSIKVLLENLIRNEDGTTVSVDDIKDFGNWKTNKKINREINFRPARVLMQDFTGVPAVVDLASMRSAIMSEKGDAKKVNPLSPVDLVIDHSVMVDKYGSATSYKANVDLEYKRNIERYEFLRWGQKSFNNFRVVPPGTGICHPGKSRIPCQDCLV

SEQ ID NO: 151218 - protein, 301 aa, Unknown
  Bacterial polypetide isolated from the Sargasso Sea
GLLTIDKDGKKNVFSGRCLEIEGLPNMKVEQAFELSDASAERSASGCTVKLNKEPIIEYLQSNIVMLRWMIASGYGDAKTLERRAQSMEEWILNPQLLEADKDAEYAEIIEIDLNEIKEPLLACPNDPDDIKPLSDVANTKIQEVFIGSCMTNIGHFRAAGTLLEKYKNLKARLWVVPPTKMDEKQLIEEGIYNIFGVSGARTEVPGCSLCMGNQARVLANSTVVSTSTRNFPNRLGDGANVFLASAELSAICSVLGKIPTIEQYHQYMNDINPLSDQIYRYLNFNEIDTYVESANNAEIP

SEQ ID NO: 151219 - protein, 200 aa, Unknown
  Bacterial polypetide isolated from the Sargasso Sea
SYIERRITAMQDWLANPELMEADADAEYKHVLEIDLADIKEPVLCAPNDPDDARLLSDVTGEKIDEVFIGSCMTNIGHFRAAGKLLDGFTGRIPTQLWVAPPTKMDKDQLTDEGYYGIFGRVGARIETPGCSLCMGNQARVADKATVVSTSTRNFPNRLGTGANVFLASAELAAVAAILGKLPTPAEYQEYAAKINATAA

SEQ ID NO: 151220 - protein, 294 aa, Unknown
  Bacterial polypetide isolated from the Sargasso Sea
MPESVLVRFKGEMQPGITLRDLVNAIPYAALQKGLLTIDKDGKKNVFSGRCLEIEGLPNMKVEQAFELSDASAERSASGCTVKLNEEPILEYLKSNIVMLRWMIASGYGDAKTLERRAQSMEEWILNPQLLEADDNAEYAEIIEIDLNEIKEPLLACPNDPDDIKPLSEVANTKIQEVFIGSCMTNIGHFRAAGTLLQKYKNIKARLWVVPPTKMDEKQLIEEGIYNIFGVSGARTEVPGCSLCMGNQARVLANSTVVSTSTRNFPNRLGDGANVFLASAELSAISAVLGNSPV

SEQ ID NO: 151221 - protein, 271 aa, Unknown
  Bacterial polypetide isolated from the Sargasso Sea
DIDPGASGAFAWEEGSTYILKPPFLETAVAQSPPKIEGAAILAMFGDNVTTDHISPGARILEGTLAGDYLAARGTPPDDFSGFLQRRTNHEIMMRGTFNNAHIQNEMTPERRGGWTLYQPTGDLMTIFEAHERYRADGRALVVVAGREYGTGSSRDWAARGPHLLGVRAILAEGFERIHRSNLVGMGILPLEFKDGVSRETLGLDGSESVYISGFAMAMDVGQTVSVCFAKPDGTTSEANVLCRLDTAREIAWFEAGGVMPFVLKGISETA

SEQ ID NO: 151222 - protein, 276 aa, Unknown
  Bacterial polypetide isolated from the Sargasso Sea
ISNKNISDGSVVLAAITSCTNTSNPHVMIGAGLIAKKAIELGIKIKPWVKTSLAPGSKVVTEYLQKSNLLKYLEKLGFNIVGYGCTTCIGNSGDFIKEVQEEVIKNNLAVASVLSGNRNFEARIHPNIKMNFLMSPMFVVIYSLIGKININILKDKIAVDKNGKHIFLKDLWPKNIEIEKIMNSVVNKNQFKKTYSKIFKGDSNWHRLKVKKSSLFNWDKNSTYIKEVSFFRNNKTNNTKNINAKILVHLGDSVTTDHISLGRQVSRYSSSWGILN

SEQ ID NO: 151223 - protein, 183 aa, Unknown
  Bacterial polypetide isolated from the Sargasso Sea
LLPGPWLRLRGHLDKLSDNLLLGAVNAFNDQVGKAKNSLTENIENCSNIARNYKEKNMRWIIVGDNNYGEGSSREHAAMTPRFLGCTAVIAKSFARIHETNLKKQGILALTFENSDDYEKIKEDDKISISGLTHFAPDKSFECMLKHSDGSSEKIMLKHSYNSSQIEWFKAGSALNVLKNKTK

SEQ ID NO: 151224 - protein, 262 aa, Unknown
  Bacterial polypetide isolated from the Sargasso Sea
TVKLNKEPIIEYLNSNIVMLRWMIASGYGDAKTLERRAQGMEEWILNPELLEADKDAEYAEIIEIDLNEIKEPLLACPNDPDDIKPLSEVANTQIQEVFIGSCMTNIGHFRAAGTLLEKYNGIKARLWVVPPTKMDEKQLIEEGIYNIFGVSGARTEVPGCSLCMGNQARVLANSTVVSTSTRNFPNRLGDGANVFLASAELAAISSVLGKLPTVDEYHKYMADINPLSDEIYRYLNFNEIDSYIESANSAVIPAVNIVNPN

SEQ ID NO: 151225 - protein, 105 aa, Unknown
  Bacterial polypetide isolated from the Sargasso Sea
LLGIKTVIAESFERIHRSNLIGMGVLPLQFINGVNRQNLNLDGSELFTVKKLENGIKPLEQVDLEIKYNSGDIKIIKVLSRIDTKNELEYYKNGGILQYVLRNMI

SEQ ID NO: 151226 - protein, 272 aa, Unknown
  Bacterial polypetide isolated from the Sargasso Sea
KISVALIGSCTNSSYEDMSRSSSVAKQAETYGIKAKIPLLVTPGSEQIRSTIERDGQIDTLKSIGATVLANACGPCIGQWDRPELKDGEKNSIVTSFNRNFPGRNDGKRDTMNFIASPEIVTALALGGSLSFNPLEDSLEGKDGKKIKLSPPEIAPEVPANGFVTTEGIYLTPSENPENVEVLIDPNSERLQKLEPFSSWNGNDFTGLNLIFKAKGKCTTDHISPAGPWLRLRGHLDNLSDNLLLGAVNAFNDEVGRAKNILTNSIENCSQI

SEQ ID NO: 151227 - protein, 265 aa, Unknown
  Bacterial polypetide isolated from the Sargasso Sea
KNFNVVPPGMGICHQINLEYLAECVKEKDGYLFPDTLVGTDSHTPMVNGIGVLGWGVGGIEAEAAMLGQPIFMILPEVIGLKLKGKLNEGITTTDLVLSITEKLRSYGVVGKIVEVFGDGVKNLSVADRATISNMSPEFGCTDTHWPIDEQTIKYLKNSNRSNKLIDRVISYSKKNLLWNENYNLIKYTDVVNFNINEVVPTISGPKKPQEKIKLNNVKEKTEYIIKNDFNGKLTNDKVSDGSVVIAAITSCTNTSNPNVMIGAG

SEQ ID NO: 151228 - protein, 330 aa, Unknown
  Bacterial polypetide isolated from the Sargasso Sea
AALGVMPLDMLESVLVKFRGELQPGITLRDLVNAIPYAALQTGQLTLPKEGKVNVFSGKCLEIEGLPNLKVEQAFELSDASAERSASGCTIKLNEEPIREYLESNIILLRWLISEGYEDEKTLERRAQAMEAWLENPILMEADEDAEYAAVIEIDLNEITEPLLACPNDPDDIKTLSEVAKTNIDEVFIGSCMTNIGHFRAAGKLLDKVTELPSRLWISPPTKMDKHQLTEEGYYNIFENAGVRLEMPGCSLCMGNQARVEAESTVVSTSTRNFPNRLGDGANVFLASAELAAISATLGYIPTIEEYNEFMSEINTMGADVYRYLNFHEI

SEQ ID NO: 151229 - protein, 192 aa, Unknown
  Bacterial polypetide isolated from the Sargasso Sea
LADIKEPILCAPNDPDDARLLSDVQGEKIDEVFIGSCMTNIGHFRAAGKLLDSHKGQLPTRLWVAPPTRMDAAQLTEEGYYSVFGKSGARIEIPGCSLCMGNQARVADGATVVSTSTRNFPNRLGTGANVYLASAELAAVASLLGKLPTPEEYQTFVAQVDKTAADTYRYLNFNQLEQYTDKADGVIFQTAV

SEQ ID NO: 151230 - protein, 254 aa, Unknown
  Bacterial polypetide isolated from the Sargasso Sea
SCAGSTILLSQETVQEYLKSNICLLEKMIESNYEDSKSISRRINDMKNWLKKPSLIQPDSNAQYEEIIEIDLAKVTQPIVACPNDPDNVKEITDVANTNIDEVFIGSCMTNIGHYRAAAKVLEGVQNLKAKLWICPPTKMDEETLKAEGYYKIFEDCGARLELPGCSLCMGNQARVDEGSVVFSTSTRNFDNRLGKNAQVFLGSAELAAVCALLGKIPEVEEYQDITKNKINPYSDELYRYLQFDEINDFSLTK

SEQ ID NO: 151231 - protein, 126 aa, Unknown
  Bacterial polypetide isolated from the Sargasso Sea
MSKHIQSLTVGSKEYQYLDLKSLDTNNLDQIPFSHKILLENALRHSLEDETREKDVDSILNWDAKSGKAIEISFTPSRVILQDFTGVPAVVDLAAMRDAVASMKGDATQINPLSPAELVIDHSVQV

SEQ ID NO: 151232 - protein, 172 aa, Unknown
  Bacterial polypetide isolated from the Sargasso Sea
PNDPDNVKEIADVANTNIDEVFIGSCMTNIGHYRAAAKVLEGIQNLKAKLWICPPTKMDEETLKAEGYYKIFENCGARLELPGCSLCMGNQARVDEGSVVFSTSTRNFDNRLGKNAQVFLGSAELAAVCALLGKIPEVEEYQDITKNKINPYSDELYRYLQFDEIHNFSLSK

SEQ ID NO: 151233 - protein, 176 aa, Unknown
  Bacterial polypetide isolated from the Sargasso Sea
ITSCTNTSNPNVMIAAGLVAKKAIDFGLEVKPWVKTSLAPGSKVVSDYLDKAGLTEYLDLLGFNTVGYGCTTCIGNSGPLDKWVSNEVKKNNLTVCSVLSGNRNFEGRVHQEVKANFLASPPLVVAYAIAGNININLMTDFIGKSKSGKKIFLKDLWPSNREINQTLGLCLTPRYV

SEQ ID NO: 151234 - protein, 192 aa, Unknown
  Bacterial polypetide isolated from the Sargasso Sea
MKPGSKNSYNSLSDIEISRKKYKYYSIKAAENNGLDGVSKLPKSLKVLLENLLRYEDDLSVTKNQIEAIKEWLKTKKSKTEIAYRPARVLLQDYTGIPAVADLAAMREAVKEKNKDPNTINPLSSVDLVIDHSVQVDKFASANSLKENVDIEFNRNSERYSFLKWGQQAFNNFRIVPPGTGICHQVNLEYLS

SEQ ID NO: 151235 - protein, 288 aa, Unknown
  Bacterial polypetide isolated from the Sargasso Sea
GTDSHTVNAGGLGMIAIGVGGADAVDVMAGMPWELKFPKLIGVKLSGELSGWTSAKDVILKLAGILTVKGGTGSIIEYFGEGTKTLSCTGKGTICNMGAEIGATTSIFGYDEKMEEYLKATGREEIVGYANNIAKHLVSDKAVTDNPKDFYDQVIEINLSDLEPHLNGPFTPDRATPISKMRDEAKKNDWPIDVQVGLIGSCTNSSYEDISRSVSIAKQANKLGLSTNAEFTITPGSEQVRQTIERDGFIEEFNALGAKVFANACGPCIGQWSRDGAEKEDKNTIVHS

SEQ ID NO: 151236 - protein, 175 aa, Unknown
  Bacterial polypetide isolated from the Sargasso Sea
KFRGHLDNISNNMLTGAVNYFNDKTNSVKNQINGQYGEVPDVQRAYKSAGISSIVVGDENYGEGSSREHAAMEPRHLGVRIILVKSFARIHETNLKKQGMLAITFKNKSDYDKILEDDTIDCLDLETFSENKTLCLKFAHTDGSSDLIYCNHTYNKSQIEWFIAGSALNLINTKK

SEQ ID NO: 151237 - protein, 201 aa, Unknown
  Bacterial polypetide isolated from the Sargasso Sea
MIFDLEMIKKVYSSIKRKVDSAKKVCNHPLTLSEKILYSHLWDGHPKKPFLRGKDYVDFAPDRIACQDATAQMALLQFMQAGKKKVAVPTTVHCDHLIQARIGADEDLQNAINNSNEVFNFLESVSNKYGIGFWKPGAGIIHQVVLENYAFPGGMMIGTDSHTVNAGGLGMVAIGVGGADAVDEMAGMAWELKFPKLIGVK

SEQ ID NO: 151238 - protein, 136 aa, Unknown
  Bacterial polypetide isolated from the Sargasso Sea
EYKKRGTDLVVFGGKEYGTGSSRDWAAKGTKLLGIKAIIAESFERIHRSNLIGMGILPLQFNDGTDRLNLKLKGSELISINNIEKGFLPQDQVELEIKYLSGEIKKIKTLCRIDTNNELEYYKNGGILQYVLRKMI

SEQ ID NO: 151239 - protein, 131 aa, Unknown
  Bacterial polypetide isolated from the Sargasso Sea
DIPLIVIAGSQYGTGSSRDWAAKGTLLLGVKAVISTSFERIHRSNLVGMGVLPLCFKSGEDAESLGLDGTEYFSIPINEDVKPLQMIDIVATKEDGKNIIFQAQVRLDTPVEVEYYMNGGILHTVLRNLAK

SEQ ID NO: 151240 - protein, 48 aa, Unknown
  Bacterial polypetide isolated from the Sargasso Sea
VTTDHISPAGSIQKNSPTGKYFREHQILPKEYNSYGSRRGNHEVMMRG

SEQ ID NO: 151241 - protein, 176 aa, Unknown
  Bacterial polypetide isolated from the Sargasso Sea
MSQNNFGCCIDFESGEGTASIYSLEELQKRGIGTINNLPFSIRILLEQALRNVEESNSNPADVNLLANWNPSENSSQEIPYRPARVILQDFTGVPAVVDLAALRSAVVELGGDPSLINPRVPVDLVIDHSIQVDVFGSSNALKNNMDIEFKRNRERYEFLKWGKQAFDNFNVYLPG

SEQ ID NO: 151242 - protein, 297 aa, Unknown
  Bacterial polypetide isolated from the Sargasso Sea
KRDDIKEGESNSIVSSFNRNFPARNDGNAETLSFIGSPETVIGLALGGTLDFNFLDDTLTSKNGEEITLNPPIADELPDKGFEETLEGFIQPTPGDDVEVVIDPESNRLQRLTPFEAPNESEYESMSVLMKAEGKCTTDHISPAGKWLQFRGHLENISQNLFNGVNNSFAENAGDGVNVLTKEVDTLPNIAKNYHAENVSWVAVGDENYGEGSSREHAAMEPRFRGCKVVLVKSFARIHEANLKKQGILPLVFDDKNDYEKIEQFDKMTIKSLSDIKVDTPIEIVLEKENGEQETIK

SEQ ID NO: 151243 - protein, 320 aa, Unknown
  Bacterial polypetide isolated from the Sargasso Sea
LLPDTVGTGGDSHTRFPIGISFPAGSGLVAFAATLGVMPLDMPESVLVRFKGDMQPGITLRDLVNAIPYAAIQNGLLTVEKKGKKNIFSGRCLEIEGLPNMKVEQAFELSDASAERSASGCTVRLNKEPIVEYLNSNIVMLRWMIASGYGDAKTLERRAQAMEEWILNPELLEPDKDAEYAEVIEIDLNEIKEPLLACPNDPDDIKPLSEVANTEIQEVFIGSCMTNIGHFRAAGTLLEKYNGIKARLWVVPPTKMDEKQLIEEGIYNIFGVSGARTEVPGCSLCMGNQARVLANSTVVSTSTRNFPNRLGDGADVFLAS

SEQ ID NO: 151244 - protein, 260 aa, Unknown
  Bacterial polypetide isolated from the Sargasso Sea
QDYGDFAPDRVAMQDATAQMALLQFMQADLPETAVPTTVHCDHLIQAYEGAASDLQVANKTHKEVFDFLRTASEKYEIGFWGPGAGIIHQVVLEQYAFPGGMMIGTDSHTPNAGGLSMIAIGVGGADAVDVMAGMPFNTKIPSLIGVKLTGSLSGWSSPKDIILKVAEILTVKGATNAIVEYFGEGTKTISTTGKATITNMGAEIGATCSIFPYDEKGSAYLKATGRDEIAELADSRMDLLTADDEVLENPEEFFKQVIE

SEQ ID NO: 151245 - protein, 290 aa, Unknown
  Bacterial polypetide isolated from the Sargasso Sea
EGLPDLKLEQAFELTDASAERSCAGCTIKLSEQTVSEYLRSNVALLKNMIARGYSDARTLARRIKEMEAWLANPQLLSADSDAEYAEVLDINLDELTEPVLACPNDPDNVKLLSEVAGDPVQEVFIGSCMTNIGHYRAAAKVLEGAGSNKARLWVCPPTRMDEETLKAEGYYATFEAAGSRMEMPGCSLCMGNQARVEDNTTVFSTSTRNFNNRLGKGAQVYLGSAELAAVCALLGRLPTGEEYRTIAAEKIDPLSGELYRYLNFDQIDGFADQGRVVSSDAEAAVLANA

SEQ ID NO: 151246 - protein, 127 aa, Unknown
  Bacterial polypetide isolated from the Sargasso Sea
MSEKTEISINNSNFRIFNIKKYKIDHLPYSLRVLMENYLRNESDNSKFQSIIDKFINWDGSADKNTELTFYPSRVIMQDFTGVPAVVDLASMRDAMKSLDASKSDVVNPQCQTDLVIDHSVMVDHFG

SEQ ID NO: 151247 - protein, 206 aa, Unknown
  Bacterial polypetide isolated from the Sargasso Sea
MNQTDLIKKIYDNYLSKITEANSFFNRPLTYTEKILFSHLSENMDTVPERTKTFCTFSPDRVAMQDATAQMALLQFINAGMQTTAVPTTVHCDHLITAIKGADDDLNNALLTNKEVYDFLKSVCAKYGIGFWKPGAGIIHQTILENYAVPGTMMIGTDSHTPNAGGLGMIAIGVGGADAVDVMTNSPWEVNWPGIIGVKLTGKLSD

SEQ ID NO: 151248 - protein, 106 aa, Unknown
  Bacterial polypetide isolated from the Sargasso Sea
VEFQRNQERYRFLRWGQDAFSNFEVFPPNTGIVHQVNLEYLGRVVFSKDDSLAYPDTLVGTDSHTTMINGIGCLGWGVGGIEADAAMLGQPITMLLPEVIGVSVKG

SEQ ID NO: 151249 - protein, 96 aa, Unknown
  Bacterial polypetide isolated from the Sargasso Sea
SHTTLVNGLSVLGWGVGGIEAEAGMLGQPISMLIPEVIGFEIKGKLSEGTTATDLVLTIVKMLRDKGVVGKFVEFYGEGLKNLTLADRATIANMAL

SEQ ID NO: 151250 - protein, 276 aa, Unknown
  Bacterial polypetide isolated from the Sargasso Sea
IHGKIMEIEGLPNLKLEQAFELTDATAERSCAGSTILLSQETVQEYLKSNICLLEKMIEGNYEDSKSISRRINDMKNWLKKPSLIQPDSNAQYEEIIEIDLAKVTQPIVACPNDPDNVKEITDVANTNIDEVFIGSCMTNIGHYRAAAKVLEGVQNLKAKLWICPPTKMDEETLKAEGYYKIFEDCGARLELPGCSLCMGNQARVDEGSVVFSTSTRNFDNRLGKNAQVFLGSAELAAVCALLGKIPEVEEYQDITKNKINPYSDELYRYLQFDEI

SEQ ID NO: 151251 - protein, 100 aa, Unknown
  Bacterial polypetide isolated from the Sargasso Sea
NMTDDPEGFIEIKNARPLLILGDTVTTDHISPAGSIQKEGPTGEYFMKHQIQQKDFNSYGARRGNHEVMMRGAFSNIRIRNEVAPGKEGGYTKLYPEGKL

SEQ ID NO: 151252 - protein, 111 aa, Unknown
  Bacterial polypetide isolated from the Sargasso Sea
GTNLLGVKAVIAESFERIHRSNLGGMGVIPFEFTGGDTRGSLNLTGEESFDITGLEGDMKPQAEVPCTITYADGTTKDITLKSRIDTAVEKEYVENGGVLHYVLRNLAKSA

SEQ ID NO: 151253 - protein, 95 aa, Unknown
  Bacterial polypetide isolated from the Sargasso Sea
TGIRAVADLAAMREAIKEKNKDPKSINPLSQVDLVIDHSVQVDEFAKKNSLEKNVEIEFKRNGERYSFLKWIQRAFNNFRIVPPGTGICHQVNLE

SEQ ID NO: 151254 - protein, 198 aa, Unknown
  Bacterial polypetide isolated from the Sargasso Sea
MTPGKKNSYNSIKSIDIDGKKYKYFSIKEAEKNGLDGISKLPKSLLVLLENLLRFEDDITVTKNQIEAIKNWLKNKKSNTEIAYRPARILLQDYTGIPAVADLAAMREAVKERNKDPNKINPLSPVDLVIDHSVQVDDFANKSSLKKNVDKEFNRNGERYSFLKWGQQAFDNFRIVPPGTGICHQVNLEYLSKVVGKT

SEQ ID NO: 151255 - protein, 167 aa, Unknown
  Bacterial polypetide isolated from the Sargasso Sea
MSYDRPSRGAGGYGRNNRGGGRFGRDRPPREMHKATCAECGKECEVPFKPTGEKPVYCDECFQNHKPERSDRGGGRFGGRGGGGYGGNRGGGRFGRDRDGGRGGGRFGGRGGGRFGRDRPSREMHKATCAECGKECEVPFKPNGQKPVYCDECFQNHKPERSDRGRY

SEQ ID NO: 151256 - protein, 199 aa, Unknown
  Bacterial polypetide isolated from the Sargasso Sea
MFDIDLIKTLYSRLPEQTLLAKNKLGRPLTLSEKILFSHLSLNDFKDNFKRGESYVDFLPDRVAMQDATAQMALLQFMMAGKEKVAVPSTVHCDHLIQAKIDASVDLDSALDVNDEVYRFLESVSNKYGIGFWKPGAGIIHQVILENYAFPGGMMVGTDSHTVNAGGLGMVAIGVGGADAVDVMAGMPWELKLPKLIGV

SEQ ID NO: 151257 - protein, 150 aa, Unknown
  Bacterial polypetide isolated from the Sargasso Sea
TNKVVNQLNGEHSEVPAAARAYKAEGVPTIVVGDHNYGEGSSREHAAMEPRHLGVRAVIVKSFARIHETNLKKQGMLGLTFAKENDYDLIREDDTFNFVDLVDFAPEKQLHLEAVHADGTKDMIALNHTYNAQQIEWFKAGSALNMIRKQ

SEQ ID NO: 151258 - protein, 171 aa, Unknown
  Bacterial polypetide isolated from the Sargasso Sea
FANIRIRNEMAPGTEGGFTKLYPEEKVLPIYDAVVEYKKRGTDLVVVGGKEYGTGSSRDWAAKGTKLLGIKAVLAESFERIHRSNLIGMGILPLQFINDVNRKNLQLIGSELISILNIEKGVNPSDEVIVEIKYTSGEIKKIKTLCRIDTKNELEYYKNGGILQYVLRNMI

SEQ ID NO: 151259 - protein, 198 aa, Unknown
  Bacterial polypetide isolated from the Sargasso Sea
MKPGQKNSYQSLKSIKIEGKKYKYFSLLEAEKNGLKGISKLPKSLKVILENLLRYEDEKTVTKDQIQELRNWLQNKKSNTEIAYRPARVLLQDYTGIPAVADLAAMREAVKKKNKDPNKINPLSNVDLVIDHSVQVDQFANKNSLEKNVDIEFKRNGERYSFLKWGQQAFNNFRIVPPGTGICHQVNLEYLSKVVWIA

SEQ ID NO: 151260 - protein, 165 aa, Unknown
  Bacterial polypetide isolated from the Sargasso Sea
QPIVCAPNDPDDARLLSEVQGDQIDEVFIGSCMTNIGHFRAAGELLEAHGAPVSTRMWICPPTRMDEHQLMEEGYYAIFGRAGARTEMPGCSLCMGNQARVAPKSTVLSTSTRNFPNRLGEGANVYLTSAELAAIGALLGKLPTPAEYLEYAGKIDSMADEIYRY

SEQ ID NO: 151261 - protein, 171 aa, Unknown
  Bacterial polypetide isolated from the Sargasso Sea
NDPDNVKEISDVANTNIDEVFIGSCMTNIGHYRAAAKVLEGVHDLKAKLWICPPTKMDEETLKAEGYYKIFENCGARLELPGCSLCMGNQARVDEGSVVFSTSTRNFDNRLGKNAQVYLGSAELAAVCALLGKIPEVEEYQDITKNKINPYSDELYRYLQFDEIHNFSLSK

SEQ ID NO: 151262 - protein, 271 aa, Unknown
  Bacterial polypetide isolated from the Sargasso Sea
NRKDSPLTLAEKVLYGHAKDVKNISLNRGKDFGDFLPDRVAMQDATAQMALLQFMQAELSETAVPTSVHCDHLIQAYEGANSDLKVANKTHKEVFDFLRTASEKYNIGFWGPGAGIIHQVVLEQYAFPGGMMIGTDSHTPNAGGLGMVAIGVGGADAVDVMAGMPFNTKIPKLIGVRLTGKLSGWTAPKDIILKVAEILTVKGGTNAIVEYFGEGTESISTTGKATITNMGAEIGATCSIFPFDLKGEEYLKATGRGNIASLAGENMHLLT

SEQ ID NO: 151263 - protein, 195 aa, Unknown
  Bacterial polypetide isolated from the Sargasso Sea
MIFDLEMIKKVYSSIKQKVDSARKVCNHPLTLSEKILYSHLWDENPNKPFLRGKDYVDFAPDRIACQDATAQMALLQFMQAGKKKVAVPTTVHCDHLIQARIGADEDLQNAINTSNEVFNFLESVSNKYGIGFWKPGAGIIHQVVLENYAFPGGMMIGTDSHTVNAGGLGMVAIGVGGADAVDVMAGMAWELKFP

SEQ ID NO: 151264 - protein, 217 aa, Unknown
  Bacterial polypetide isolated from the Sargasso Sea
NPVLMEADDDAEYAAVIEIDLNEIKEPLLACPNDPDDIKTLSEVANTNIDEVFIGSCMTNIGHFRAAGKLLENASELPSKLWVSPPTKMDKHQLTQEGYYEIFENAGVQLEMPGCSLCMGNQARVEAEATVVSTSTRNFPNRLGDGANVFLASAEVAAIAATLGHIPTADEYSNYMSEINAMSADVYRYLNFHEIASYKEAANSAILPSVTIEEVKS

SEQ ID NO: 151265 - protein, 105 aa, Unknown
  Bacterial polypetide isolated from the Sargasso Sea
SPHIKANYLASPPLVVAYAIAGHMEVDLYKDSLGKDKEGKDVFLKDIWPSNKEIEETLKDSLNAEMFIQRYSNVSEGPTQWQKIKTDTSSIYKWDEGSTYVKKPP

SEQ ID NO: 151266 - protein, 106 aa, Unknown
  Bacterial polypetide isolated from the Sargasso Sea
KILGVKTVIAESFERIHRSNLIGMGILPLQFKDGMNRINLNLKGSELISVLDIEKGINPSDIVKLEIKYLSGDIKTIDTLCRIDTKNELEYYKNGGILQYVLRNMI

SEQ ID NO: 151267 - protein, 266 aa, Unknown
  Bacterial polypetide isolated from the Sargasso Sea
RERKNTPLTLAEKLLFGHATDINSVSLNKGEDYGDFAPDRVAMQDATAQMALLQFMQADLPETAVPTTVHCDHLIQAYEGAASDLQVANKTHKEVFDFLRTASEKYDIGFWGPGAGIIHQVVLEQYAFPGGMMIGTDSHTPNAGGLSMIAIGVGGADAVDVMAGMPFNTKIPSLIGVKLTGSLSGWSSPKDIILKVAEILTVKGATNAIVEYFGEGTKTISTTGKATITNMGAEIGATCSIFPYDEKGSAYLKATGRDEIAELADS

SEQ ID NO: 151268 - protein, 207 aa, Unknown
  Bacterial polypetide isolated from the Sargasso Sea
WNGENIVGAKLLIKAKGKCTTDHISMAGPWLKYRGHLNNISNNMLTGATNFFNDKTNLVKNQLNGKYGTVPDVQRDYLFNLIQTIVVGDENYGEGSSREHAAMEPRFLGVRIVLVRSFARIHETNLKKQGMLALTFKDKSDYDLILEDDTFDLIDLQDFSVDNPLTIVAKHKDGSQNKILCNHTYNDIQIEWFKAGSALNLIRKKQS

SEQ ID NO: 151269 - protein, 138 aa, Unknown
  Bacterial polypetide isolated from the Sargasso Sea
MTCLNSFNTQKNIIIDKVEYRYFDLNILSKIYNFQLHRIPNSIKIIIENLLRNEDGEAVTREMIDKLCKKITEPLENFEISFTPTRVLMQDFTGVPAVADLAAMRDALRNKGINPNNINPLSRVDLVIDHSVMVDHFG

SEQ ID NO: 151270 - protein, 98 aa, Unknown
  Bacterial polypetide isolated from the Sargasso Sea
IGNSGPLPEPVVEAINDGDLVAASVLSGNRNFEGRVNPHVKANYLASPPLVVAYSIAGRVDVDLMKEPIGEDSDGNEVYLIGDLGRVSRTSPIQWLSP

SEQ ID NO: 151271 - protein, 299 aa, Unknown
  Bacterial polypetide isolated from the Sargasso Sea
KSFLNDNSTLTSGKVCLAAITSCTNTSNPIVLLMSGLIAKKAVELGLKVPWWVKTSFAPGSKVVREYLDKAGLQVFLNKLGFNIVGYGCTTCIGNSGPLDDKVSKDIEKNKLNVCSIISGNRNFEGRIHPLIKSNFLASPPLVIIYALSGRINIDLNNEEIGISKGKKIFLKDLWPSSKEVKLLSEKVLKEELFKKNYKDIFKGDPIWEGIKVKSSSTFNWSLNSTYVKKPPFLENESNKQTDIFNARPLLILGDSITTDHISPAGVIKESSEAGKYLSERQIKNYDFNSFGSRRGNHE

SEQ ID NO: 151272 - protein, 167 aa, Unknown
  Bacterial polypetide isolated from the Sargasso Sea
RIKNEIAPDTEGGFTKLYPEEKIMSVYDAVVEYKKRGTDLVVIGGKEYGTGSSRDWAAKGTKLLGIKAVLAESFERIHRSNLIGMGVLPLQFIDDANRNNLNLRGPELISVINIEKRLNPSDKVEVHVKYQSGELKKIKMLCRIDTKNELEYYKNGGILQYVLRKMI

SEQ ID NO: 151273 - protein, 168 aa, Unknown
  Bacterial polypetide isolated from the Sargasso Sea
MSYDRPSRGAGGYGRNNRGGGRFGRDRPPREMHKATCSECGKECEVPFKPTGQKPVYCDECFQNHKPERSDRGGGRFGGRGGGGYGGNRGGGRFGRDRDGGRGGGRFGGNRGGGRFGRDRPPREMHKATCAECGKECEVPFKPNGQKPVYCDECFQNHKPERSDRGRY

SEQ ID NO: 151274 - protein, 103 aa, Unknown
  Bacterial polypetide isolated from the Sargasso Sea
KAVIAESFERIHRSNLIGMGVLPLQFPEKMSRQNLNLKGSELISIINIEKGINPRDQLDVEIKYVTGYIKKIKMLCRIDTKNELEYYKNGGILQYVLRNMING

SEQ ID NO: 151275 - protein, 214 aa, Unknown
  Bacterial polypetide isolated from the Sargasso Sea
MDLSRTPIELVESVYKTLTENISTIRERKNAPLTLAEKILFGHATDPSSISLDKGEDYGDFAPDRVAMQDATAQMALLQFMQAGMEKTAVPSTVHCDHLIQAYEGASSDLAVANQTHKEVFDFLRSASQKFGIGFWGPGAGIIHQVVLEQYAFPGGMMIGTDSHTPNAGGLGMVAIGVGGADAVDVMAGMPFNTKIPKLIGVKLTGSLSGWSFT

SEQ ID NO: 151276 - protein, 197 aa, Unknown
  Bacterial polypetide isolated from the Sargasso Sea
MKPGNKNSYKSLSDLEINGKNYKYYSLKKAELNGLEGVSKLPKSLKVLLENLLRYEDDISVNKKQIEAVKNWLDTKKSKTEIAYRPARVLLQDYTGIPAVADLAAMREAVKEKNKDPNTINPLSAVDLVIDHSVQVDQSAKKDSFEKNVDIEFKRNGERYSFLKWGQSAFNNFRIVPPGTGICHQVNLEYLSKVVWS

SEQ ID NO: 151277 - protein, 53 aa, Unknown
  Bacterial polypetide isolated from the Sargasso Sea
MEEIEYGTGSSRDWAAKGTKLLGIKAVLAESFERIHRSNLIGMGVLPLQFIDN

SEQ ID NO: 151278 - protein, 136 aa, Unknown
  Bacterial polypetide isolated from the Sargasso Sea
MEINGTEHKFYNLQELGEKYKELPFSIKVLLESAVRNCDEFQILSSDVEKILNWTDSQAKGESVEVPFLPSRVVLQDFTGVPAVVDFAAMRDAVKALGGNPEDINPRCPSDLVIDHSVQVDVSRVSDSKAKNEALE

SEQ ID NO: 151279 - protein, 87 aa, Unknown
  Bacterial polypetide isolated from the Sargasso Sea
YRPARVLMQDFTGVPAVVDLAAMREAMVELGGDAQKINPLSPVDLIIDHSVMIDHFGNEKAFRANVDKEFERNTERYEFLACGFQGI

SEQ ID NO: 151280 - protein, 153 aa, Unknown
  Bacterial polypetide isolated from the Sargasso Sea
MPVAANTPIDLIENVYANLAANMAMGREKLGRSLTLAEKVLINHLASHDQELERGVSYVDLRPDRVAMQDATAQMAWLQFMTAGLSEVAVPTTTHCDHLIQARDDGKTDLLAASENNEEVYDFLESVCAKYGAGFWMPGSGIIHQVVLEQYAF

SEQ ID NO: 151281 - protein, 222 aa, Unknown
  Bacterial polypetide isolated from the Sargasso Sea
SMNERINAARAILGSPLTLTEKILYSHLSTGNPSEQFKRGISYVDFLPDRVGMQDATAQMALLQFMMAGREKVAVPSTVHCDHLIQAKENASSDLAQAMDANGEVYDFLESVSNKYGIGFWKPGAGIIHQVILENYAFPGGMMIGTDSHTVNAGGLGMIAIGVGGADAVDVMAGMPWELKFPKLIGVRLTGEMNKWTSAKDVILKVAGILTVKGGTDAIVEY

SEQ ID NO: 151282 - protein, 231 aa, Unknown
  Bacterial polypetide isolated from the Sargasso Sea
YGDRRTLERRIQGMEKWLADPQLLEGDADAEYAAVIDINLDEIKEPILCAPNDPDDARLLSDVAGSKIDEVFIGSCMTNIGHFRAAGKLLDSHKGQLPTRLWVAPPTRMDAAQLTEEGYYSVFGKSGARIEIPGCSLCMGNQARVADGATVVSTSTRNFPNRLGTGANVYLASAELAAVASLLGKLPTPQEYQAFMEQVDKTATDTYRYLNFDRLSQYTEKADGVIFQTAV

SEQ ID NO: 151283 - protein, 232 aa, Unknown
  Bacterial polypetide isolated from the Sargasso Sea
VFSGRCLEIEGLPNMKVEQAFELSDASAERSASGCTVKLNKEPILEYLQSNIVMLRWMIASGYGDPKTLERRAQSMEEWILNPKLLEADDNAEYAEVIEIDLNEIKEPLLACPNDPDDIKPLSEVANTKIQEVFIGSCMTNIGHFRAAGTLLEKYKNIKARLWVVPPTKMDEKQLIEEGIYNIFGVSGARTEVPGCSLCMGNQARVLANSTVVSTSTRNFPNRLGDGANVFL

SEQ ID NO: 151284 - protein, 128 aa, Unknown
  Bacterial polypetide isolated from the Sargasso Sea
TPLVVIGGKEYGTGSSRDWAAKGVALLGVRAVLVESFERIHRSNLVGMGVLPLQFLEGQSAAELGIDGTETFSISQPQVGASEVKIDMIRADGSAEEFSVQVRIDTPKEWDYYCHGGILPYMVRQLLT

SEQ ID NO: 151285 - protein, 136 aa, Unknown
  Bacterial polypetide isolated from the Sargasso Sea
EEGVPLVVVGGKEYGTGSSRDWAAKGTTLLGARAVIVESFERIHRSNLIGMGVLPLQFTGGDTRGSLGLDGTETFDIKGVADGLQPRSDLDCTIHRADGNSVDVKLLCRIDTLDELDYYKHGGILQYVIRNMLEAA

SEQ ID NO: 151286 - protein, 192 aa, Unknown
  Bacterial polypetide isolated from the Sargasso Sea
MKPGTKNSYNSLSEIKINSKNYKYYSLSKAESNGLKGISKLPKSLKVLLENLLRYEDDLSVTKNQIDALRDWLKSKKSTTEIAYRPARVLLQDYTGIPAVADLAAMREAVKEKNIDPNSINPLSTVDLVIDHSVQVDQSSKADSFENNVNIEFKRNAERYSFLKWGQDAFNNFRIVPPGTGICHQVNLEYLS

SEQ ID NO: 151287 - protein, 218 aa, Unknown
  Bacterial polypetide isolated from the Sargasso Sea
NRNFAKRADGNPNTHAFVGSPELVTALAIAGNLSFDPQVDTLLNDSGFEVKLDPPKGNELPKNGFSVDNSGYQAPTKNGAKVEVIIDKNSERLQLLEPFSPWGKRNINGARLLIKAKGKCTTDHISMAGPWLRYRGHLDNISENMLIGATNFFNNKVNVVKNHLNNTYDTVPSVQRDYKFNNVPSIVVGDENYGEGSSREHAAMEPRFLGVLAVIVKS

SEQ ID NO: 151288 - protein, 217 aa, Unknown
  Bacterial polypetide isolated from the Sargasso Sea
MDFESNKFLDELTVGKKFSFFSLDKAQDLVKFELSSLPFSYRLLLENLIRKSNPSCDNKLEIINLIKMNSGSEIFFSPSRVLMQDYTGVPAIADLASMRDKMVKKKRNPQLINPLVPVSLVVDHSISVDSASSKDSLEINVKKEFLRNSERYSLLKWAQKSLKNFSLFPPGSGICHQINIEYLTEIVSEKKNFLYLDSVVGTDSHTTMVNSLSVLGW

SEQ ID NO: 151289 - protein, 204 aa, Unknown
  Bacterial polypetide isolated from the Sargasso Sea
MKPGIKNSYNSLSDLKVQGKNYKFYSLNKAEENGLDGIKKLPKSLKVLLENLLRYEDDSSVTKNQINAIKNWLKEKKSKTEIAYRPARVLLQDYTGIPAVADLAAMREAVKEKKRDPNTINPLSAVDLVIDHSVQVDQSAKSDSFDKNVEIEFKRNGERYSFLKWGQQAFNNFRIVPPGTGICHQVNLEYLSKVVWTEEFKGES

SEQ ID NO: 151290 - protein, 252 aa, Unknown
  Bacterial polypetide isolated from the Sargasso Sea
LRSNVALLKNMIARGYSDARTLARRIKEMEAWLANPQLMSADTDAEYAEVLEINLDELTEPVVACPNDPDNVKLLSEVAGDPVQEVFIGSCMTNIGHYRAAAKVLEGAGQNTARLWVCPPTRMDEETLKEEGYYATFEAAGSRMEMPGCSLCMGNQARVEDNTTVFSTSTRNFNNRLGKGAQVYLGSAELAAVCAQLGRIPTPEEYRRIAAEKIDPLSDELYRYLNFDQISGFEDQGRVVSADDEATVLAQA

SEQ ID NO: 151291 - protein, 205 aa, Unknown
  Bacterial polypetide isolated from the Sargasso Sea
MKPGIKNSYKSLSDLTVDGKNYKIYSLSKAESNGLDGISKLPKSLKVLLENLLRYEDDLTVTKNQIEAIKDWIKNKKSKTEIAYRPARVLLQDYTGIPAVADLAAMREAVKDKNKDPNSINPLSAVDLVIDHSVQVDQSAKSDSFEKNVEIEFERNGERYSFLKWGQQAFDNFRIVPPGTGICHQVNLEYLSKKVWSEEFEGVKY

SEQ ID NO: 151292 - protein, 210 aa, Unknown
  Bacterial polypetide isolated from the Sargasso Sea
MTPGNKNSYNSLKKIIINNKEYYYYSLNEAENNGLEGINKLPKSLKVLLENLLRYEDDLSVTKSQIEAIKNWLKTKKSKTEIAYRPARVLLQDYTGIPAVADLAAMREAVKEKNKDPKTINPLSTVDLVIDHSVQVDQFANPDSFEKNVDIEFERNSERYSFLKWGQQAFNNFRIVPPGTGICHQVNLEYLSKVVWLEEFKGDKYLFPEY

SEQ ID NO: 151293 - protein, 266 aa, Unknown
  Bacterial polypetide isolated from the Sargasso Sea
TAFELTDATAERSCAGSTILLSQETVQEYLRSNICLLEKMIESNYEDSKSISRRINDMKNWLKKAELIQPDSNAQYNETIEIDLAKVTQPIVACPNDPDNVKEITDVANTNIDEVFIGSCMTNIGHYRAAAKVLEGVQNLKSKLWICPPTKMDEETLKAEGYYKIFENCGARLELPGCSLCMGNQARVDEGSVVFSTSTRNFDNRLGKNAQVFLGSAELAAVCALLGKIPDVEEYQDITKNKINPYSDELYRYLQFDEIPDFSLSK

SEQ ID NO: 151294 - protein, 333 aa, Unknown
  Bacterial polypetide isolated from the Sargasso Sea
MPLNMPESVLVRFNGKLLPGITLRDLVNAIPFFAIKKGLLTVEKANKKNIFNGKIMEIEGLPNLKLEQAFELTDATAERSCAGSTILLSQETVQEYLRSNICLLEKMIESNYEDSKSISRRINDMKNWLEKPSLIQPDKNAQYEEIIEIDLAKVTQPIVACPNDPDNVKEISDVANTNIDEVFIGSCMTNIGHYRAAAKVLEGVQNLKAKLWICPPTKMDEETLKAEGYYKIFENCGARLELPGCSLCMGNQARVDEGSVVFSTSTRNFDNRLGKNAQVFLGSAELAAVCALLGKIPELEEYQDITKNKINPYSDELYRYLQFDEIHDFSLSK

SEQ ID NO: 151295 - protein, 215 aa, Unknown
  Bacterial polypetide isolated from the Sargasso Sea
MKSLDSFKLKANLSIDSKNYKYFDLKKLSEQFDFKLNKIPNSIKIILENLVRNEDSTSINKEMIKNLCSKINQSKEGKKNIEIAFFPTRVLMQDFTGVPAVADLAAMRNALKSKGIDPKKINPLSRVDLIIDHSVMVDNFGNSNSYKKNVQREFERNKERYQFLKWGQESFENFYLVPPGAGICHQVNLENIAKTIWLKKINGNNYLFPRFCCRN

SEQ ID NO: 151296 - protein, 715 aa, Unknown
  Bacterial polypetide isolated from the Sargasso Sea
LLMFDSFHDVKEKADKGNANAKAVLQSWADAEWFTSKPAIPEKITVTVFKVTGETNTDDLSPAPDAWSRPDIPLHALAMLKNVRDGIEPDVPGSKGPVKQIEALIAKGFPLAYVGDVVGTGSSRKSATNSVLWFMGEDMPFVPNKRTGGVCLGGKIAPIFFNTMEDSGSLPIELDVSKMNMGDVIDIFPHQGVVKRHGTEEVISTFELRSNVLLDEVRAGGRIPLIIGRGLTDKAREALGLAHSTVFERPAVTEVTNKGFTLAQKLVGKACGVKGIRPGQYCEPKMTTVGSQDTTGPMTRDELKDLACLGFSADLVMQSFCHTAAYPKPVDVNTHHTLPDFIMNRGGISLRPGDGVIHSWLNRMLLPDTVGTGGDSHTRFPIGISFPAGSGLVAFAAATGVMPLDMPESVLVRFKGEMQPGITLRDLVHAIPYYAIQQGLLTVEKKGKVNIFSGRVLEIEGLEHLTAEQAFELSDASAERSAAGCTITLSEASVAEYLESNIVMLKWMLSEGYGDVRTIERRIQAMQAWLADPKLERADADAEYAAVIEIDLADIKEPILCAPNDPDDARLLSSVEGDKIDEVFIGSCMTNIGHFRAAGKLLDKFKGQIPTRLWIAPPTKMDKDQLTEEGYYGIYGRVGARIEIPGCSLCMGNQARVGDNTTVVSTSTRNFPNRLSQGANVYLASAELAAVASIIGRLPTVPEYLDTRSRLKRRL

SEQ ID NO: 151297 - protein, 859 aa, Unknown
  Bacterial polypetide isolated from the Sargasso Sea
MLDNYKKHVEERAKENIPPLPLDVEQTSELINLLKSEHDESELLLFLLKERVPAGVDQSAYVKAAFLSDITSGKTSSPYIDKKKAVQILGTMLGGYNIEPLINCLKIDKLGEEAANALSETLLIFDSFNEIFELSKTNKYAKKVIDSWAAGEWFTKKLEIPEQIKLTVFKVPGEINTDDLSPATDAWSRPDIPLHALAMFKMPREGLEKPLETIEKLKEKGNPLVFVGDVVGTGSSRKSATNSVLWHMGDEIPCIPNKKEGGFCFGGKIAPIFFNTLEDSGAFPIEMDVTKMEMGQEVILEPFNGQVLDAKNNEIITKFNLKTDVILDEVRANGRIPLIIGRQLTDKTREALSLGPTDIFRRPDSKDNSTKGFTLAQKMVGKACGVDGVRPGTYCEPRMTTVGSQDTTGPMTRDELKELACLGFSADLVMQSFCHTAAYPKPVDVETQHSLPDFIMNRGGVSLRPGDGIIHSWMNRMLLPDTVGTGGDSHTRFPIGISFPAGSGLVAFAATLGVMPLDMPESVLVRFKGDMQPGITLRDLVNAIPYAAIQKGLLTVEKKGKKNIFSGKCLEIEGLPNMKVEQAFELSDASAERSASGCTVLLNEEPILEYLNSNIIMLRWMIASGYGDAKTLERRAQAMEEWVLNPQLLKPDQDAEYAEVIEIDLNEIKEPLLACPNDPDDIKPLSDVENTPIQEVFIGSCMTNIGHFRAASMLLKKYNQTNARLWVVPPTKMDEQQLIEEGEYQIFKDLGARTELPGCSLCMGNQARVIANSTVISTSTRNFPNRMGDGADVFLASAELSAIASILGKIPTVDEYHQYMNDINPFSENIYRYLNFNEIDTYVASANSAEIPTINIVNP

SEQ ID NO: 151298 - protein, 768 aa, Unknown
  Bacterial polypetide isolated from the Sargasso Sea
MLGGYNIQPLIECLKNDELADDAVDALSKTLLIFDAFNEVFELSKTNKYAEQVIKNWADAKWFTDKEDLEEKITLTVFKVSGEINTDDLSPAPDAWSRPDIPLHALAMFKMPRSGLSDPLETIEKLKEKGNPLVFVGDVVGTGSSRKSATNSVLWHMGDEIPFIPNKKEGGFCFGGKIAPIFFNTLEDSGAFPIEMDVSKMITGQEVILEPFKGTVTDANTNEVISEFKLKTDVILDEVRANGRIPLIIGRQLTDKSREALGLETSDVFRRPNAKDKSTKGFTLAQKMVGKACGVDGIRPGTYCEPRMSTVGSQDTTGPMTRDELKELACLGFSADLVMQSFCHTAAYPKPVDIETQHNLPDFIMNRGGVSLRPGDGIIHSWMNRMLLPDSVGTGGDSHTRFPIGISFPAGSGLVAFAATLGVMPLDMPESVLVRFKGEMQPGITLRDLVNAIPYAALQTGLLTIDKDGKKNIFSGRCLEIEGLPDMKVEQAFELSDASAERSASGCTVRLNKEPIIEYLNSNIVMLRWMIASGYGDVKTLERRAQAMEEWILNPELLEPDKDAEYAEIIEIDLNEIKEPLLACPNDPDDIKPLSEVANTKVQEVFIGSCMTNIGHFRAAGTLLEKYKGIKARLWVVPPTKMDEKQLIEEGIYNIFGVSGARTELPGCSLCMGNQARVLANSTVISTSTRNFPNRLGDGANVFLASAELSAISAVLGKLPTVEEYHQYMSDINPLSDQIYRYLNFNEIDTYVQSANSAEIPSINIVNP

SEQ ID NO: 151299 - protein, 224 aa, Unknown
  Bacterial polypetide isolated from the Sargasso Sea
MFDLAMIKSVYEHMNERINAARVILGRPLTLTEKILYSHLATGNPSEQFKRGRSYVDFLPDRVGMQDATAQMALLQFMMAGREKVAVPSTVHCDHLIQAKESASSDLAQAMDVNGEVYDFLESVSNKYGIGFWKPGAGIIHQVILENYAFPGGMMIGTDSHTVNAGGLGMIAIGVGGADAVDVMAGMPWELKFPKLIGVRLTGEMNKWTSAKDVILKVAGILTV

SEQ ID NO: 151300 - protein, 207 aa, Unknown
  Bacterial polypetide isolated from the Sargasso Sea
DAEYAEIIEIDFNEIKEPLLACPNDPDDIKPLSDVANTKIQEVFIGSCMTNIGHFRAAGTLLEKYKNLKARLWVVPPTKMDEKQLIEEGIYNIFGVSGARTEVPGCSLCMGNQARVLANSTVVSTSTRNFPNRLGDGANVFLASAELSAICSVLGKIPTIEQYHQYMSDINPLSDQIYRYLNFNEIDTYVESANNAEIPAINIVNPG

SEQ ID NO: 151301 - protein, 278 aa, Unknown
  Bacterial polypetide isolated from the Sargasso Sea
MEIEGLPNLKLEQAFELTDATAERSCAGSTILLSQETVQEYLKSNICLLEKMIESNYEDSKSISRRINDMKNWLKKPSLIQPDSNAQYEEIIEIDLAKVTQPIVACPNDPDNVKEITDVANTNIDEVFIGSCMTNIGHYRAAAKVLEGVQNLKAKLWICPPTKMDEETLKAEGYYKIFEDCGARLELPGCSLCMGNQARVDEGSVVFSTSTRNFDNRLGKNAQVFLGSAELAAVCALLGKIPEIEEYQDITKNKINPYSDELYRYLQFDEIHDFSLTK

SEQ ID NO: 151302 - protein, 215 aa, Unknown
  Bacterial polypetide isolated from the Sargasso Sea
MTPGNKNSYKSLKKITVNDKEYNYYSLNEAEKNGLEGIDKLPKSLKVLLENLLRYEDDLSVTKSQIEAIKNWLKTKKSKTEIAYRPARVLLQDYTGIPAVADLAAMREAVKEKNKDPNTINPLSAVDLVIDHSVQVDQSAKADSFEKNVDIEFERNGERYSFLKWGQQAFDNFRIVPPGTGICHQVNLEYLSKVVWSEEFKGEKYLFPRYFSWNG

SEQ ID NO: 151303 - protein, 384 aa, Unknown
  Bacterial polypetide isolated from the Sargasso Sea
MLLPDTVGTGGDSHTRFPIGISFPAGSGLVAFAATLGVMPLDMPESVLVRFKGDMQPGITLRDLVNAIPYAALQRGLLTIDKDGKKNVFSGRCLEIEGLPNMKVEQAFELSDASAERSASGCTVKLNKEPIIEYLQSNIVMLRWMIASGYGDAKTLERRAQSMEEWILNPQLLEADKDAEYAEIIEIDLNEIKEPLLACPNDPDDIKPLSDVANTKIQEVFIGSCMTNIGHFRAAGTLLEKYKNLKARLWVVPPTKMDEKQLIEEGIYNIFGVSGARTEVPGCSLCMGNQARVLANSTVVSTSTRNFPNRLGDGANVFLASAELSAICSVLGKIPTIEQYHQYMNDINPLSDQIYRYLNFNEIDTYVESANNAEIPAINIVNPS

SEQ ID NO: 151304 - protein, 859 aa, Unknown
  Bacterial polypetide isolated from the Sargasso Sea
MLQDYKIHCEERKEQGIPPLPLSAQQTSELVELLKSEHEESELLLELLKERTPAGVDQSAYVKAGFLADITTGKTTSPYITKKEAVIILGTMLGGYNIQPLVKCLEDDELGEEAANALSKTLLIFDAFNEILELSETNKNAKAVINAWAEGTWFQEKEEIPEQIKLTVYKVPGEINTDDLSPATDAWSRPDIPLHALAMFKMPREGLEKPLETIEELKKKGNPLVFVGDVVGTGSSRKSATNSVLWHMGDEIPYIPNKKEGGFCFGGKIAPIFFNTLEDSGAFPVECDVSKLKMGQEIIFEPYGGKISDANSGEILSTFELKTPVLLDEVRANGRIPLIIGRQLTDKTREALGLEVTDIFSRPDAEDSSKKGFTLAQKMVGKACGVKGIRPGTYCEPRMTTVGSQDTTGPMTRDELKELACLGFSADLVMQSFCHTAAYPKPVDIDTQHTLPDFIMNRGGVSLKPGDGIIHSWLNRMLLPDGVGTGGDSHTRFPLGISFPAGSGLVAFAAALGVMPLDMPESVLVRFKGKMQPGITLRDLVNAIPYAAIQKGLLTVEKEGKKNVFSGRCLEIEGLPNLKVEQAFELSDASAERSASGCTVRLNKEPIIEYLKSNIVMLRWMIGCDYGDAKTLERRAQAMEEWIKNPELLEPDKDAEYAEIIEIDLNKITEPLLACPNDPDDIKPLSAVAETKIDEVFIGSCMTNIGHFRAAGHLLKKYNGTKARLWVVPPTKMDEKQLMEEGIYNVFGTSGARTELPGCSLCMGNQARVLANSTVVSTSTRNFPNRLGDGADVFLASAELAAISSVLGKLPSPQEYLKYMEDINPLAEDIYRYLNFNELDSYVESANAANIPAINIVNA

SEQ ID NO: 151305 - protein, 281 aa, Unknown
  Bacterial polypetide isolated from the Sargasso Sea
REKYDQVYQGGSLWENLNVSNSEDYNWPDSTYIKKPPYLNHAENNQIKDIELARPIVLLGDSVTTDHISPSSVITKGTAAWDYLTNLGLDSKDFNNYLTRRANHEIVERSTFASLRLRNLMVPNQEGSFTVKYPENKVMRIYEAAIQYKKDKKEIIVIAGENYGCGSSRDVAAKGPLLIGVRAIVAKGFERIHRSNLIGMGLLPLEFENGQGINELKIESSDQFSLLGLNDITNENKKVLMKIHKQTGDIIEVTLNARLDVPEEVNFWKNGGILPTAYKEA

SEQ ID NO: 151306 - protein, 299 aa, Unknown
  Bacterial polypetide isolated from the Sargasso Sea
SNIEVDKIVNEFYKAETFREKYDQVYQGGSLWENLNVSNSEDYNWPDSTYIKKPPYLNHAENNQIKDIELARPIVLLGDSVTTDHISPSSVITKGTAAWDYLTDLGLDSKDFNNYLTRRANHEIVERSTFASLRLRNLMVPNQEGSFTVKYPENKVMRIYEAAIQYKKDKKEIIVIAGENYGCGSSRDVAAKGPLLIGVRAIVAKGFERIHRSNLIGMGLLPLEFEKGQGINELNIESTDQFSLLGLNHITNENKKVLMKIHKQTGDIIEVSLNARLDVPEEVNFWKNGGILPTAYKEA

SEQ ID NO: 151307 - protein, 264 aa, Unknown
  Bacterial polypetide isolated from the Sargasso Sea
MSDTITDEEGNEISLSPPVAEELPESGFETTLEGFIQPDDGEVEIIIDPESNRLQALVPFSPFEDKNYHSMTVLMKASGKCTTDHISPAGKWLQFRGHLENISQNLFIGVNNAFTKNAGEGINQLDNSVMSLPDIAKSYHEEGINWIAVGDENYGEGSSREHAAMEPRFRGCKVVLVKSFARIHEANLKKQGILPLTFENKDDYDLIEQEDKITIENLEAIAPDTSINITIEKTDGETKDIKANHSLSDEQIEWFKAGSALNSI

SEQ ID NO: 151308 - protein, 120 aa, Unknown
  Bacterial polypetide isolated from the Sargasso Sea
GTGSSRDWAAKGTQLLGIRAVVARSFERIHRSNLVGMGVLPLQFKAGDSWETLGLTGNEVIDVVPDAALTPQSDARLVIHRADGTRQEVTVTLRIDTSIEVDYYQAGGILPFVLRQLLEG

SEQ ID NO: 151309 - protein, 105 aa, Unknown
  Bacterial polypetide isolated from the Sargasso Sea
LLGVKTVIAESFERIHRSNLIGMGILPLQFIDNIDRKNLKLIGSELISIINLENGINPSDKVKVEIKYASGEIKTIQALCRIDTKNELEYYKNGGILQFVLRNMI

SEQ ID NO: 151310 - protein, 283 aa, Unknown
  Bacterial polypetide isolated from the Sargasso Sea
MKVKQAFELSDASAERSSSGCTVRLNKEPIIEYLNSNIVMLRWMIASGYGDAKTLERRAQAMEEWILNPELLEPDANAEYAEIIEIDLNEIKEPLLACPNDPDDIKPLSAVENTEIQEVFIGSCMTNIGHFRAAGTLLEKYNGTKARLWVVPPTKMDEKQLIEEGIYNIFGVSGARTEVPGCSLCMGNQARVLANSTVVSTSTRNFPNRLGDGADVFLASAELAAISSVLGRLPTVDEYHKYMSDINPLADEIYRYLNFNEIDSYVESANSAEIPAINIVNPL

SEQ ID NO: 151311 - protein, 144 aa, Unknown
  Bacterial polypetide isolated from the Sargasso Sea
MPVYDAVIDYKRRGTDLVVIGGKEYGTGSSRDWAAKGTKLLGIKAILAESFERIHRSNLIGMGVLPLQFIDGMNRENLDLKGPELISILNIEKRLNQSDHVDVEIKHQSGELKKIKMLCRIDTKNELEYYKNGGILQYVLRKML

SEQ ID NO: 151312 - protein, 179 aa, Unknown
  Bacterial polypetide isolated from the Sargasso Sea
RYDEGYFCNIRIKNEMLDNIEGGYTIHYPSKKQMSIYDASIKYNKSKTPLVVIAGKDYGMGSSRDWAAKGTNLLGVKAVIAESYERIHRSNLIGMGVLPFVFKDGENRKSLKLEGPEKITISGIKDNLKPQSFYNAMIVYKNGKNITTEIKLLVNTSTEVEYLNSGGILQYVLKELVNS

SEQ ID NO: 151313 - protein, 533 aa, Unknown
  Bacterial polypetide isolated from the Sargasso Sea
FTKCFNTSNEVFNFLESVSNKYGIGFWKPGAGIIHQVVLENYAFPGGMMIGTDSHTVNAGGLGMVAIGVGGADAVDVMAGMAWELKFPKLIGVKLTGKLSGWTAPKDVILKVAGILTVKGGTGAIIEYFGPGAEELSCTGKGTICNMGAEVGATTSTFGYDESMEKYLRVTGRDLVADEANKIKEYLTGDPEVYENPEKYFDELIEINLSELEPHINGPFSPDIATPVSKMADTLLENDWPRKIEWGLIGSCTNSSYEDLSRASSIANQALEKNLSTKADFGINPGSEQVRYTAERDGLLNIFEKLDAKIFTNACGPCIGQWARKGADKEEKNSIIHSFNRNFAKRADGNPNTHAFVASPEMVAAIAISGDLAFNPMKDKLVNNEGVEVSLEEPKGWELPPNGFDVEDNGYIDPVEDGSNIEVIIDPKSKRLEKLEPFKPWDGKNIMDAKLLIKAFGKCTTDHISMAGPWLRFRGHLDNISNNCLIGAINAFNKKTNFVKNQLTGKYDGVPDVQRNYKENNISTVVIGDHNYG

SEQ ID NO: 151314 - protein, 195 aa, Unknown
  Bacterial polypetide isolated from the Sargasso Sea
MKPGNKNSFNSKSIIKINNNEYTYYSIPNAEKNGLSGVSKLPKSLKVLLENLLRYEDDLTVNKSQILAIKDWLQTKKSNTEIAYRPARVLLQDYTGIPAVADLAAMREAVKEKDKDPNKINPLSSVDLVIDHSVQVDQSAKEDSFDKNVEIEFKRNGERYSFLKWGQNAFNNFRIVPPGTGICHQVNLEYLSKVV

SEQ ID NO: 151315 - protein, 470 aa, Unknown
  Bacterial polypetide isolated from the Sargasso Sea
ELANEIKDHLKADDEVHSNPEKYYDEVIEINLSKLEPHIVGPYSPDLSREISEMPDAVNKNNYDDNLKVGLIGSCTNSSYEDIERAAHVAKQALGAGLKAKSEFYITPGSNQIKATMERDGYTKIFEDLGGKVLANACGPCIGQWKRSDIAEGEKNTIITSFNRNFAKRNDGNAATESFVASPEIVTALAISGKLSFNPSKDKITLSDGSSFSFESPSGSELPEMGFEKIGSDDFLKAELRPNTEVAINPNSDRLQVLEPFVKWDKEEMNDLKILLKAEGKCTTDHVSPAGPWLKYRGHLENISQNMYSGALNAFTKTNGEAIDLINDKTENIYEVAKTYKDNNIDWVAVADENYGEGSSREHAAMEPRFMGCKIIIAKSFARIAQTNLKKQGIIPLIFKDKSDYDKIEAHDTISTMNLKDFDNKTNLKLSLNKPDGSSEIIETLHTFSKNQIEWFKAGSALNLIAKKSN

SEQ ID NO: 151316 - protein, 328 aa, Unknown
  Bacterial polypetide isolated from the Sargasso Sea
PGITLRDLVNAIPYAAIQKGLLTVEKKGKKNVFSGRCLEIEGLPNMKVEQAFELSDASAERSSSGCTVRLNKEPIIEYLNSNIVMLRWMIASGYGDAKTLERRAQAMEEWILKPELLEPDENAEYAEIIEINLNEIKEPLLACPNDPDDIKPLSAVENTEIQEVFIGSCMTNIGHFRAAGALLEKYNGTKARLWVVPPTKMDEKQLIEEGIYNIFGVSGARTEVPGCSLCMGNQARVLANSTVVSTSTRNFPNRLGDGADVFLASAELAAISSVLGRLPTVDEYHKYMSDINPLADEIYRYLNFNEIDSYVQSANSAEIPAINIVNPL

SEQ ID NO: 151317 - protein, 427 aa, Unknown
  Bacterial polypetide isolated from the Sargasso Sea
SLAPGSKAVTLYLEEAGLCRELEQLGFGVVAYACTSCNGMSGALDPAIQKEIVDRDLYATAVLSGNRNFDGRIHPYAKQAFLASPPLVVAYAIAGTIRFDIEKDVLGVDAQGNEIRLKDIWPSDAEIDAIVASSVKPEQFRKVYEPMFAVSVDTGEKADPLYDWRPMSTYIRRPPYWEGALAGERTLKGMRPLAVLGDNITTDHLSPSNAILADSASGEYLAKMGLPEEDFNSYATHRGDHLTAQRATFANPTLKNEMVLEDGKVKAGSLARIEPEGKVTRMWEAIETYMERKQPLIVIAGADYGQGSSRDWAAKGVRLAGAEAIVAEGFERIHRTNLVGMGVLPLEFKPGVNRLTLGIDGTETFDVIGERKPRTDLMLVIHRKNGERVEVPVTCRLDTAEEVSIYEAGGVLQRFAQDFLESTKAAA

SEQ ID NO: 151318 - protein, 729 aa, Unknown
  Bacterial polypetide isolated from the Sargasso Sea
AANVLSRTLLIFDAFNEIFELSKTNEHAKKVVEEWANATWFTEKTDIEEQIKLTVYKVTGEINTDDLSPAPDAWSRPDIPLHALAMFKMPRTGLDDPLGTIEKLKEKGNPLVFVGDVVGTGSSRKSATNSVLWHMGDEIPCIPNKKEGGYCFGGKIAPIFFNTLEDSGAFPIEMDVSKMLMGQEIILEPLNGRVLDANTKEVISEFELKTDVLLDEVRANGRIPLIIGRQLTDKSREALGLDISKVFRRPDAKDKSKAGFTLAQKMVGKACGVDGVRPGTYCEPRMTTVGSQDTTGPMTRDELKELACLGFSADLVMQSFCHTAAYPKPVDIETQHNLPDFIMNRGGVSLRPGDGIIHSWMNRMLLPDTVGTGGDSHTRFPIGISFPAGSGLVAFAATLGVMPLDMPESVLVRFKGDMQPGITLRDLVNAIPYAALQRGLLTIDKDGKKNVFSGRCLEIEGLPNMKVEQAFELSDASAERSASGCTVKLNKEPIIEYLQSNIVMLRWMIASGYGDAKTLERRAQSMEEWILNPQLLEADKDAEYAEIIEIDLNEIKEPLLACPNDPDDIKPLSDVANTKIQEVFIGSCMTNIGHFRAAGTLLEKYKNLKARLWVVPPTKMDEKQLIEEGIYNIFGVSGARTEVPGCSLCMGNQARVLANSTVVSTSTRNFPNRLGDGANVFLASAELSAICSVLGKIPTIEQYHQYMSDINPLSDQIYRYLNFNEIDTY

SEQ ID NO: 151319 - protein, 163 aa, Unknown
  Bacterial polypetide isolated from the Sargasso Sea
MSYDRPSRGAGGYGRNNRGGGRFGRDRPPREMHKATCSECGKECEVPFKPTGQKPVYCDECFQNHKPERSDRGGGRFGGRGGGGYGGNRGGGRFGGRGGGGYGGNRGGGRFGRDRPPREMHKATCAECGKECEVPFKPNGQKPVYCDECFQNHKPERSDRGRY

SEQ ID NO: 151320 - protein, 335 aa, Unknown
  Bacterial polypetide isolated from the Sargasso Sea
ETEPLGKGLQGEDVYLRDIWPSADDMAEVTPFAQDAENVLNLYATTAEQNLWESLPAPKGDLFTWSEDSTYMQRPPFFDGVTCEIPQPGEIRGARALAILGDSVTTDHINPGGAIPPESESGKFLISLGVEPRDFNSYISRRAHDRVMVRSSFANVRLRNLMVPGEEGSVTLHQPDGERMSIFAAATKYAAENVPMIVFAGNEYGNGSSRDWAAKGPRLLGVRAVIARSFERIHRSNLVGMGILPLEFEEGDSAQSLHLSGDELFDLPGDLGAIRAGQMLDLVVHRGNGETATVRLRARIDSEIEETYFRHGGILPYVLRDRLARQAQSAELHLS

SEQ ID NO: 151321 - protein, 538 aa, Unknown
  Bacterial polypetide isolated from the Sargasso Sea
LKLAGILTVKGGTGKIIEYFGEGTETISCTGKATITNMGAEVGATTSIFPYDQKMYEYLSATGRKDIAELANTIKEHLKADNKVHSNPEKYYDEVIEINLSELEPHIVGPYSPDLSREISEMPDAVNKNNYDDNLKVGLIGSCTNSSYEDIERAAHVAKQALGAGLKAKSEFYITPGSNQIKATMERDGYTKIFEDLGGKVLANACGPCIGQWKRSDIAEGEKNTIITSFNRNFAKRNDGNAATESFVASPEIVTALAISGKLSFNPSKDKITLSDGSSFSFESPSGSELPEMGFEKIGSDDFLKAELRPNTEVAINPDSDRLQVLKPFVKWNEDEMNDLKILLKAEGKCTTDHVSPAGPWLKYRGHLENISQNMYSGALNAFTKTNGEAIDLINDKTENIYEVAKTYKENNIDWIAVADENYGEGSSREHAAMEPRFMGCKIIIAKSFARIAQTNLKKQGILPLIFKDKSDYDKIEAHDSISTINLKDFDNETNLKLSLNKPDGSSEIIETLHTFSKNQIEWFKAGSALNLIAKKSN

SEQ ID NO: 151322 - protein, 114 aa, Unknown
  Bacterial polypetide isolated from the Sargasso Sea
RDWAAKGTKLLGVKVVIAESFERIHRSNLIGMGILPLQFLDNIDRIKLELKGSELITIIDIEKGINTSGSVYVEIKYASGDIKKIKTLCRIDTKNELEYYKNGGILQFVLRNMI

SEQ ID NO: 151323 - protein, 377 aa, Unknown
  Bacterial polypetide isolated from the Sargasso Sea
GFWGPGAGIIHQVVLEQYAFPGGMMIGTDSHTPNAGGLGMVAIGVGGADAVDVMAGMPFNTKIPKLIGVKLTGSLSGWSSPKDIILKVAEILTVKGGTNAIVEYFGEGTSSISTTGKSTITNMGAEIGATCSIFPYDSKGSDYLVSTGRADIAELAATRMDLLTADQEVLDEPEKYFDQVIEIDLDTLEPHIVGPHTPDLARPITDLKEDVEENEYPIKISSALIGSCTNSSYEDIGRAAFIAREAAKHGLKAKVPLMVTPGSEQTRATIERDGYLKDLEDIGAVVLANACGPCIGQWKRDDIKEGESNSIVSSFNRNFPARNDGNAETLSFIGSPETVIGLALGGRLDFNFLSDTLTDEEGNEITLNPPVADELPE

SEQ ID NO: 151324 - protein, 402 aa, Unknown
  Bacterial polypetide isolated from the Sargasso Sea
TADLVMQSFCHTAAYPKPVDLLTHKELPDFISQRGGVALKPGDGIIHSWLNRMLLPDTVGTGGDSHTRFPLGISFPGGSGIVAFAAAIGSMPLNMPESVLVKFKGDLLPGITLRDLVNAIPLFAIKKGLLTVEKANKKNIFNGKIMEIEGLPNLKLEQAFELTDATAERSCAGSTILLSQETVQEYIRSNICLLEKMIESNYEDSKSISRRINDMKNWLKKPELIQPDLNASYEEIIEIDLSQVKQPIVACPNDPDNVKEIVDVANTNIDEVFIGSCMTNIGHYRAAAKVLEGVKNLKAKLWICPPTKMDEETLKQEGYYEIFENCGARLELPGCSLCMGNQARVDEGSVVFSTSTRNFDNRLGKNAQVFLGSAELAAVCALLGKIPEIEEYQDITKNKINP

SEQ ID NO: 151325 - protein, 510 aa, Unknown
  Bacterial polypetide isolated from the Sargasso Sea
EFFGEGAEALTLGDRATISNMTPEFGATAAMFYIDQQTLDYLTLTGRSDEQVKLVETYAKTTGLWSDDLKHAEYPRTLHFDLSSVVRTIAGPSNPHARVPTSELAARGISGVVENEPGLMPDGAVIIAAITSCTNTSNPRNVIAAGLLARNANAKGLSRKPWVKSSLAPGSKAVQLYLEEANLLPELESLGFGIVGFACTTCNGMSGALDPVIQQEVIDRDLYATAVLSGNRNFDGRIHPYAKQAFLASPPLVVAYAIAGTIRFDIEKDVLGHDKDGNPVRLIDIWPSDAEIDAVIAKSVKPEQFRRVYEPMFDLSVDYGDKVTPLYDWRPQSTYIRRPPYWEGALAGERTLKGMRPLAVLGDNITTDHLSPSNAIMMDSAAGEYLHKMGLPEEDFNSYATHRGDHLTAQRATFANPKLKNEMAIVDGKVKQGSLARIEPEGQVTRMWEAIETYMDRKQPLIIIAGADYGQGSSRDWAAKGVRLAGVEAIVAEGFERIHRTNLVGMGVLP

SEQ ID NO: 151326 - protein, 177 aa, Unknown
  Bacterial polypetide isolated from the Sargasso Sea
SEVAKTNIDEVFIGSCMTNIGHFRAAGKLLDKVTELPSRLWISPPTKMDKHQLTEEGYYDIFEKAGVRLEMPGCSLCMGNQARVEAESTVVSTSTRNFPNRLGDGANVFLASAELAAISATLGYIPTIEEYNEIMAEINTMGSDVYRYLNFHEIASYKEAANNAVLPTLTIEEVKLN

SEQ ID NO: 151327 - protein, 170 aa, Unknown
  Bacterial polypetide isolated from the Sargasso Sea
IKNEMVPGIEGGITSHQPSEEIMSIYDAAIKYTDEGIPLVVIGGKEYGTGSSRDWAAKGTRLLGVKAVIVESFERIHRSNLIGMGVLPLQFLDGMHRESLGLTGKELISLTGLKEGVKAKMEVSCKIVWEKGEEKNIKLLCRIDTADEVEYYRHGGILQYVLRSLMKSKV

SEQ ID NO: 151328 - protein, 386 aa, Unknown
  Bacterial polypetide isolated from the Sargasso Sea
RDELKELACLGFNSDLVMQSFCHTAAYPLPKDIETQHTLPEFIQTRGGVALKPGDGIIHSWLNRMLLPDMVGTGGDSHTRFPLGISFPAGSGLVAFGAALGVMPLDMPESVLVRFKGELQPGITLRDLVNAIPYAALQTGQLTLPKEGKVNVFSGKCLEIEGLPDLKVEQAFELSDASAERSASGCTIKLNEEPIREYLESNIILLRWLISEGYEDEKTLERRAQAMESWLENPVLMEADDDAEYAAVLEIDLNEITEPLLACPNDPDDIKPLSEVAETNIDEVFIGSCMTNIGHFRAAGKLLDKVTKLPSRLWISPPTKMDKHQLTEEGYYDIFEKAGVRLEMPGCSLCMGNQARVEAESTVVSTSTRNFPNRLGDGAKRISSIC

SEQ ID NO: 151329 - protein, 595 aa, Unknown
  Bacterial polypetide isolated from the Sargasso Sea
GKIAPIFFNTLEDSGALAFECDVSKMKLGDVIEIYPYEKKVLNSETQELLCSYEYKSNTLLDGVRAGGRIPLIIGRSLTDETREILNLDSSSVFTRPEEAEKSEKGFTLAQKMVGRACGVEGIRPGIYCEPRMSTVGSQDTTGPMTRDELKELACLGFNSDLVMQSFCHTAAYPLPKDIETQHTLPEFIQTRGGVALRPGDGIIHSWLNRMLLPDMVGTGGDSHTRFPLGISFPAGSGLVAFGAALGVMPLDMPESVLVKFTGEIQPGITLRDLVNAIPYAALQSGQLTLPKEGKINIFSGRCLEIEGLPDLKVEQAFELSDASAERSASGCTIKLNEEPIREYLESNVTLLRWLISEGYEDKKTLERRAQAMEAWLKNPVLMQADDDAEYAAVIEIDLNQITEPLLACPNDPDDIKPLSEVANTHIDEVFIGSCMTNIGHFRAAGKLLKNESKLPSKLWVSPPTKMDKHQLTEEGYYEIFEKAGVQLEMPGCSLCMGNQARVEAESTVVSTSTRNFPNRLGDGANVFLASAEVAAISATLGHIPTKEEYSEYMSEINSMGTDVYRYLNFHEIASYKEAADNAILPSVTIEEIKI

SEQ ID NO: 151330 - protein, 589 aa, Unknown
  Bacterial polypetide isolated from the Sargasso Sea
SHIFNTLEDSGAFPIEMDVSKMLMGQEIILEPLNGRVLDANTNEVISEFELKTDVLLDEVRANGRIPLIIGRQLTDKSREALGLDTSKVFRRPDAKDKSKSGFTLAQKMVGKACGVDGVRPGTYCEPRMTTVGSQDTTGPMTRDELKELACLGFSADLVMQSFCHTAAYPKPVDIETQHSLPDFIMNRGGVSLRPGDGIIHSWMNRMLLPDTVGTGGDSHTRFPIGISFPAGSGLVAFAATLGVMPLDMPESVLVRFKGDMQPGITLRDLVNAIPYAALQRGLLTIDKDGKKNVFSGRCLEIEGLPAMKVEQAFELSDASAERSASGCTVKLNKEPIIEYLQSNIVMLRWMIASGYGDAKTLERRAQSMEEWILNPQLLEADKNAEYAEIIEIDLNEIKEPLLACPNDPDDIKPLSDVANTKIQEVFIGSCMTNIGHFRAAGTLLEKYKNLKARLWVVPPTKMDEKQLIEEGIYNIFGVSGARTEVPGCSLCMGNQARVLANSTVISTSTRNFPNRLGDGANVFLASAELSAISSVLGKLPTVEEYHQYMNDINPLADQIYRYLNFNEIDTYVQSANSAEIPAINIVNP

SEQ ID NO: 151331 - protein, 860 aa, Unknown
  Bacterial polypetide isolated from the Sargasso Sea
MLKEYKAHVKERAEQGIPPLPLNAEQVASLVELIKGPPSGEEDFVLNLLTNRVPAGVDPAAYVKAAFLTDIAKEKANSPLIDKKLATELLGTMLGGYNVESLIELLEDEEVGAIAADGLSNTLLMFNAKHDVIELSKKNEHAKRVVDSWSNAEWFTSKPKLPEVIKAIVFKVDGEINTDDLSPAQDAPSRPDIPLHALAMLKKTFKDPIDTINKLEESGLPVVFVGDVVGTGSSRKSATNSLLWHIGEDIPYIPNKRQAGICIGGKIAPIFFNTLEDSGALAFECDVSKMNLGDVIEIYPYEKKVVSADSGEVLCEYEYKSNTLLDGVRAGGRIPLIIGRSLTDETREILNLDSSNAFVRPEEAKKNNKGFTLAQKMVGRACGVEGIRPGIYCEPRMSTVGSQDTTGPMTRDELKELACLGFNSDLVMQSFCHTAAYPLPKDIETQHTLPEFIQTRGGVALKPGDGIIHSWLNRMLLPDMVGTGGDSHTRFPIGISFPAGSGLVAFGAALGVMPLDMPESVLVRFKGELQPGITLRDLVNAIPYAALQTGQLTLPKEGKINVFSGKCLEIEGLPNLKVEQAFELSDASAERSASGCTIKLNEEPIREYLESNIILLRWLISEGYEDERTLERRAQAMEAWLDNPVLMEADKDAEYAAVIEIDLDEITEPLLACPNDPDDIKPLSEVAKTNIDEVFIGSCMTNIGHFRAAGKLLDKVTELPSRLWISPPTKMDKHQLTEEGYYDIFENAGVRLEMPGCSLCMGNQARVEAESTVVSTSTRNFPNRLGDGANVFLASAELAAISATLGYIPSIEEYNEFMSEINTMGADVYRYLNFHEIASYKEAAKNAILPSITIEEVKVN

SEQ ID NO: 151332 - protein, 118 aa, Unknown
  Bacterial polypetide isolated from the Sargasso Sea
MDHLEIGQQKEQNYLGIKTVIAESFERIHRSNLIGMGILPLQFIDGMNRSNLNLKGSELISVLNIEKGLSPSDKVELEIKYMSGDIKKIKTLCRIDTKNELEYYKNGGILQYVLRNMM

SEQ ID NO: 151333 - protein, 857 aa, Unknown
  Bacterial polypetide isolated from the Sargasso Sea
MKNLETLLKDYADHVAERAAKGIPPLPLNAEQTNCITKLLEQDSTYDSSYLLDLLINRVPPGVDEAAYVKASWLTAIVNSEKYCKSINPEKAIEILGTMIGGYNVNSLVEILKGENSLLAKKAAEVLKNIILVYDSANEIYELSHSNIYAKEVVNSWANAEWFINKKVLEKEITCLVFKVDGETNTDDLSPAVHATTRPDIPMHALAMLEFKKPDGLKILDNLKKQNLPIAYVGDVVGTGSSRKSAINSLIWHIGEDIAFVPNKKTGGIIIGSKIAPIFFNTAQDSGALPIEADVSQMKTGDVIKIYPYKGIIKKIEKDSNTEELISKFELYPSTLTDEIQAGGRINLMIGRSLTDKIRNKLDYQPSEIFTRPQNPTESNAGFTQAQKIVGKACGLEGVRPGMTCEPIMTTVGSQDTTGPMTRDELKELACLGFTADLVMQSFCHTAAYPKPVDLVTHKELPDFISQRGGVALKPGDGIIHSWLNRMLLPDTVGTGGDSHTRFPLGISFPGGSGIVAFAAAIGSMPLNMPESVLIKFKGELLPGITLRDLVNAIPLFAIKKGLLTVEKANKKNIFNGKIMEIEGLPNLKLEQAFELTDATAERSCAGSTILLSQETVQEYLKSNICLLEKMIESNYEDSKSISRRINDMKNWLKKPSLIQPDSNAEYEEIIEIDLAKVTQPIVACPNDPDNVKEITEVANTNIDEVFIGSCMTNIGHYRAAAKVLEGVQNLKAKLWICPPTKMDEETLKAEGYYKIFEDCGARLELPGCSLCMGNQARVDEGSIVFSTSTRNFDNRLGKNAQVFLGSAELAAVCALLGKIPEIEEYQDITKNKINPYSEELYRYLQFDEIIDFSLSK

SEQ ID NO: 151334 - protein, 245 aa, Unknown
  Bacterial polypetide isolated from the Sargasso Sea
MDLSRTPIELVESVYKTLTENISTIRERKNAPLTLAEKILFGHSTDPSSISLDKGEEYGDFAPDRVAMQDATAQMALLQFMQAGMEKTAVPSTVHCDHLIQAYEGASSDLAVANQTHKEVFDFLRSASQKFGIGFWGPGAGIIHQVVLEQYAFPGGMMIGTDSHTPNAGGLGMVAIGVGGADAVDVMAGMPFNTKIPKLIGVKLTGSLSGWSSPKDVILKVAEILTVKGGTNAIVEYFGEGTSSK

SEQ ID NO: 151335 - protein, 114 aa, Unknown
  Bacterial polypetide isolated from the Sargasso Sea
MGCKGTKLLGVKAVIAESFERIHRSNLIGMGVLPLQFIEKMNRQNLNLKGSELISVLGLEKGINPGDHLEVEIKYATGDIKKIKMLCRIDTKNELEYYKNGGILQYVLRNMING

SEQ ID NO: 151336 - protein, 324 aa, Unknown
  Bacterial polypetide isolated from the Sargasso Sea
DVVNAIPYVAIEKGLLTVEKAGKKNVFNGRIMEIEGLPDLKLEQAFELTDATAERSCAGSTIKLSVDTVSEYLRSNVALLKNMIARGYSDARTLARRIKAMEDWLANPQLLEADADAEYAAVIDIDLNAITEPIVACPNDPDNVKTLSNVSGNKVDEVFIGSCMTNIGHYRAAATVLEGQGQNTARLWVCPPTRMDEETLKAEGYYATFEAAGSRMEMPGCSLCMGNQARVEDNTTVFSTSTRNFNNRLGNGAQVYLGSAELAAVCAQLGRIPSREEYLAVAAERIDPNSAELYRYLNFDQVQGFADEGRVLSQAEEEKLLAEA

SEQ ID NO: 151337 - protein, 289 aa, Unknown
  Bacterial polypetide isolated from the Sargasso Sea
FIGSPETVIGLALGGTLEFDFLNDTLINEDGEEVKLSPPTAEELPLEGFESTLEGFVQPKENSEVEVVISPDSERLQALTPFDSFDASNYIDMTVIMKAVGKCTTDHISPAGKWLRFRGHLENISQNLFIGVNNAFSEESGTGVNTLNNEIMTLPDLAKTYHENNINWIAIGDENYGEGSSREHAAMEPRFRGCRVVLVKSFARIHEANLKKQGILPLTFEDKADYEKIEQNDKLTIKNLENLSPGSKVTVSIQKEDGSTVDIDTSHSLSEEQISWFESGSALNYIKSN

SEQ ID NO: 151338 - protein, 551 aa, Unknown
  Bacterial polypetide isolated from the Sargasso Sea
YPYEGIIKKIEQDSNTEELISKFDLYPSTLTDEIQAGGRINLMIGRSLTDKIRNKLDYLPSEIFTRPQNPTESNAGFTQAQKIVGKACGLDGVRPGMTCEPIMTTVGSQDTTGPMTRDELKELACLGFTADLVMQSFCHTAAYPKPVDLVTHKELPDFISQRGGVALKPGDGIIHSWLNRMLLPDTVGTGGDSHTRFPLGISFPGGSGIVAFAAAIGSMPLNMPESVLVKFKGELLPGITLRDLVNAIPLFAIKKGLLTVEKANKKNIFNGKIMEIEGLPNLKLEQAFELTDATAERSCAGSTILLSQETVQEYLRSNICLLEKMIESNYEDSKSISRRINDMKNWLKKPSLIQPDSNAQYEEIIEIDLAKVKQPIVACPNDPDNVKEITDVANTNIDEVFIGSCMTNIGHYRAAAKVLEGVQNLKAKLWICPPTKMDEETLKAEGYYKIFEDCGARLELPGCSLCMGNQARVDEGSVVFSTSTRNFDNRLGKNAQVFLGSAELAAVCALLGKIPEVEEYQDITKNKINPYSDELYRYLQFDEIKDFSLTK

SEQ ID NO: 151339 - protein, 169 aa, Unknown
  Bacterial polypetide isolated from the Sargasso Sea
NIRIRNEMAPGTEGGFTKLYPEEKVMPVYDAVVEYKKRGIDLVVIGGKEYGTGSSRDWAAKGTKLLGVKAVLAESFERIHRSNLIGMGVLPLQFVGDMNRENLNLKGSELISIIDIEKGINPRDEVEVEFKYQSGDIKKIKMLCRIDTKNELEYYKNGGILQYVLRNMI

SEQ ID NO: 151340 - protein, 359 aa, Unknown
  Bacterial polypetide isolated from the Sargasso Sea
AGSGLVAFAATLGVMPLDMPESVLVKFHGEMQPGITLRDLVNAIPYAAIQKGLLTVEKKGKKNVFSGRCLEIEGLPNMKVEQAFELSDASAERSASGCTVLLNKEPIIEYLNSNIVMLRWMIASGYGEAKTLERRAQAMEEWILNPELLEPDKNAEYAEIIEIDLNEIKEPLLACPNDPDDIKPLSAVENTEIQEVFIGSCMTNIGHFRAAGTLLEKYNGTKARLWVVPPTKMDEKQLIEEGIYNIFGVSGARTEVPGCSLCMGNQARVLANSTVISTSTRNFPNRLGDGADVFLASAELSAISAVLGRLPTVDEYHKYMADINPLADEIYRYLNFNEIDSYVESANSAEIPAINIVNP

SEQ ID NO: 151341 - protein, 500 aa, Unknown
  Bacterial polypetide isolated from the Sargasso Sea
VNAGGLGMVAIGVGGADAVDVMAGMAWELKFPKLIGVRLTGKLSGWTAPKDVILKVAGILTVKGGTGAIIEYFGPGAEELSCTGKGTICNMGAEVGATTSTFGYDESMEKYLRVTGRDLVADEANKIKEYLTGDPEVYENPEKYFDELIEINLSELEPHINGPFSPDIATPVSKMADTLVENDWPRKIEWGLIGSCTNSSYEDLSRASSIANQALEKNLSTKADFGINPGSEQVRFTAERDGLLNIFEKLDAKIFTNACGPCIGQWSRKDADKEEKNSIIHSFNRNFAKRADGNPNTHAFVASPEMVAAIAISGDLAFNPMKDKLLNNEGVEVSLEEPKGWELPPNGFDVEDNGYIDPVEDGSNIEVIIDPESKRLERLEPFKPWDGKNIMGAKLLIKAFGKCTTDHISMAGPWLRFRGHLDNISNNCLIGAVNAFNKKTNFVKNQLTGKYGGVPDVQRNYKENNISTVVVGDHNYGEGSSREHAAMEPRHLGVKVVLVK

SEQ ID NO: 151342 - protein, 344 aa, Unknown
  Bacterial polypetide isolated from the Sargasso Sea
GPDRVTCQDATAQMALLQFMQAGKQKVAVPTTVHCDHLILAQSGAKKDLQQANKVSSEVFDFLESTSKKYGIGFWKPGAGIIHQVVLENYAFPGGMMIGTDSHTVNAGGLGMVAIGVGGADAVDVMAGMPWELKFPKLIGVHLKGNLNGWSSAKDVILKVAGILTVKGGTGAIIEYFGEGAKSLSCTGKGTICNMGAEVGATTSIFGYDESMERYLNSTGRTDIVKAAEEVKHHLTADPEVYANPEEYFDQVIEINLDELSPHLNGPFTPDLATPVSEMKEKAAKEKWPLDVDWGLIGSCTNSSYEDLSRAASIASQAKKSKLKIKSKLGINPGSEQVRYTAER

SEQ ID NO: 151343 - protein, 340 aa, Unknown
  Bacterial polypetide isolated from the Sargasso Sea
IFFSPSRVLMQDYTGVPAIADLASMRDKMAKKKRDPELINPLVPVSLIVDHSISVDSSSSDDSLKINVQKEFLRNSERYSLLKWAQKSLKNFSLFPPGSGICHQINIEYLTEIVCEKKKILFLDSVVGTDSHTTMVNALSVLGWGVGGIEAEAVMLGQPISMKIPEVLGVMLEGKLKEGVTATDVVLTITEKLRKINVVGKFVEFFGDGLSSLSLSERSTISNMAPEYGATCGLFPIDNETLKYLRLTGRDERKIGIIEHYCKSQHLWHDENSKKIKYADNLKLDLSKIEACVSGPKRPQDRIVLRDIPKTYMNSLDKNEKKLLKNNNDSLTNGKICLAA

SEQ ID NO: 151344 - protein, 144 aa, Unknown
  Bacterial polypetide isolated from the Sargasso Sea
MPIYDAVVEYKKRGTDLIVVGGKEYGTGSSRDWAAKGTKLLGIKAVIAESFERIHRSNLIGMGILPLQFINGIDRKKIGLIGSELISVLGIEDGVNPSDNVEVEIKYQSGEIKKIQTLCRIDTKNELEYYKNGGILQFVLRNMM

SEQ ID NO: 151345 - protein, 157 aa, Unknown
  Bacterial polypetide isolated from the Sargasso Sea
EGGYTKLYPEGKVMPVYDAVVEYKKRGTDLIVIGGKEYGTGSSRDWAAKGTKLLGVKVVIAESFERIHRSNLIGMGILPLQFVGNIDRIKLGLKGSELITIIDIDKGINPSGSVDVEIKYASGDIKKIKTLCRIDTKNELEYYKNGGILQFVLRNMI

SEQ ID NO: 151346 - protein, 204 aa, Unknown
  Bacterial polypetide isolated from the Sargasso Sea
DSHTTMVNGLSVLGWGVGGIEAEAGMLGQPISMLIPEVVGFELKNKMPEGTTATDLVLTVVKILRDKGVVGKFVEFYGNGLKNLSLADRATIANMAPEYGATCGFFPIDDETLKYLRFSGRGEHTVVTVEKYAKEQGLWASDNIEFTDTVSLDMSSIVPTISGPKRPQDKVLLTEAAPGFKKVFEKTTGRKERNISKVTETNFE

SEQ ID NO: 151347 - protein, 301 aa, Unknown
  Bacterial polypetide isolated from the Sargasso Sea
MQADLPETAVPTTVHCDHLIQAYEGAASDLQVANKTHKEVFDFLRTASEKYEIGFWGPGAGIIHQVVLEQYAFPGGMMIGTDSHTPNAGGLSMIAIGVGGADAVDVMAGMPFNTKIPSLIGVKLTGSLSGWTSPKDIILKVAEILTVKGATNAIVEYFGEGTKTISTTGKATITNMGAEIGATCSIFPYDEKGSAYLKATGRDEIAELADSRMDLLTADNEVLENPEEFFNQVIEINLDELEPHIVGPHTPDLARPISGLKKDANDNEYPVKISSALIGSCTNSSYEDIGRAAFIAREAAK

SEQ ID NO: 151348 - protein, 173 aa, Unknown
  Bacterial polypetide isolated from the Sargasso Sea
FANIRIKNEMAPGTEGGFTTLYPEKKVMPIYDAVVEYKKRGVDLVVIGGKEYGTGSSRDWAAKGTKLLGVKAVIAESFERIHRSNLIGMGVLPLQFPDKMSRQNLNLKGSELISVINIEKGINPGDQLDIEIKYVTGDIKKIKMLCRIDTKNELEYYKNGGILQYVLRNMING

SEQ ID NO: 151349 - protein, 265 aa, Unknown
  Bacterial polypetide isolated from the Sargasso Sea
MSQKNFGCCIDFESGEGTASIYSLEELQKKGVGTIDKLPFSIRILLEQALRNVEESKSNAEEVNLLANWDASEKSSEEIPFRPTRVILQDFTGVPAIVDLAALRSAVVEMEGNPEVINPRVPVDLVIDHSIQVDVFGSSDALKKNMDIEFKRNRERYEFLKWGKQAFDNFSVYPPGVGIVHQVNLETVASVVQFRNGVFFPDTLVGTDSHTTMINGLGVMGWGVGGIEAESVMLGQPIYMLIPEVIGFRLHGQLSEGTTATDLVL

SEQ ID NO: 151350 - protein, 247 aa, Unknown
  Bacterial polypetide isolated from the Sargasso Sea
MKPGNKNSFKSLKLIKINNKDYKYFSLVEAEKNGLKGISNLPKSLKVLLENLLRYEDDLSVTKDQIEAVQKWLKEKKSNTEIAYRPARVLLQDYTGIPAVADLAAMREAVKKKNKDPNTINPLSAVDLVIDHSVQVDQSAKPDSFEKNVDIEFKRNGERYSFLKWGQQAFNNFRIVPPGTGICHQVNLEYLSKVVWSEKYQEEEYLFPDTLVGTDSHTTMVNGLSVLGWGVGGIEAEAGMLGQPISM

SEQ ID NO: 151351 - protein, 308 aa, Unknown
  Bacterial polypetide isolated from the Sargasso Sea
GALPAKIEQARRLLNRPLTLTEKILYAHSDQLPDTPYQRGKSYVMFRPDRVAMQDATAQMALLQFMQAGRSKVAVPSTVHCDHLILAQLGAEKDLSHSMQVNQEVFDFLASVSNKYGIGFWKPGAGIIHQVVLENYAFPGGLMIGTDSHTVNAGGLGMVAIGVGGADAVDVMAGMPWELKFPKTVGVVLKGKLGGWTSAKDVILKVAGILTVKGGTGKIVEYIGPGAESLSCTGKGTICNMGAEIGATTSLFGYDHSMHRYLEATGRKDVADLADAVAEHLIPDPAVVQDPYTYYDEVIEIDLSTLEP

SEQ ID NO: 151352 - protein, 175 aa, Unknown
  Bacterial polypetide isolated from the Sargasso Sea
GTFANIRIRNEMLNGIEGGFTKDLEGNTNSIFDAAMSFKKEKTPLVIIAGKEYGAGSSRDWAAKGTSLLGVKAVIAESFERIHRSNLIGMGVIPFEFEKGINRKELNLNGSETISIFGLAGELEPSMILNAQVLYGGSNALNFKIKCRIDTKVELEYVRHGGVLHYVLRDLAKAK

SEQ ID NO: 151353 - protein, 275 aa, Unknown
  Bacterial polypetide isolated from the Sargasso Sea
MKPGNKNSYKTLKSININDKIYKYYSLKEAEKNGLTNISKLPKSLKVLLENLLRYEDGLSVTKDQIEAIKNWLKEKKSNTEIAYRPARVLLQDYTGIPAVADLAAMREAVKEKNKDPNTINPLSKVDLVIDHSVQVDKFAKSDSFEKNVDIEFERNGERYSFLKWGQQAFNNFRIVPPGTGICHQVNLEYLSKVVWSEKYKEDNYLFPDTLVGTDSHTTMVNGLSVLGWGVGGIEAEAGMLGQPISMLIPEVIGFEFTNKLPEGTTATDLVLTVV

SEQ ID NO: 151354 - protein, 157 aa, Unknown
  Bacterial polypetide isolated from the Sargasso Sea
MSVKDSLKSRAQLAVGDSTYLYHSLAQAAETLPELKRLPKSLKVLLENLLRNEDGETVTQDDIKAMADWLKERRSDREIQYRPARVLMQDFTGVPAVVDLAAMRDAVARANGDPEQINPLSPVDLVIDHSVMVDRFASDQAFAQNVEIEMQRNGERY

SEQ ID NO: 151355 - protein, 295 aa, Unknown
  Bacterial polypetide isolated from the Sargasso Sea
KRPLTFTEKVLFNHIDFGENQVFSELKRGSSYANFNPDRVAMQDATAQMALLQFIMAGRAKVSVPTTVHCDHLIQAKVGADQDLINAKESNSEVYAFLESVSKKYGIGFWKPGAGIIHQVVLENYAFPGGMMIGTDSHTVNAGGLGMVAIGVGGADAVDVMVGMPWELKFPKLIGVCLKGELSGWASAKDVILKVAGILTVKGGTGSIVEYFGSGAEKLSCTGKGTICNMGAEIGATTSIFSYDKNMSNYLRSTGRNELADIADQNANYLSGDRDVYSDPEKYFDEVITIDLDIL

SEQ ID NO: 151356 - protein, 245 aa, Unknown
  Bacterial polypetide isolated from the Sargasso Sea
VHCDHLILAKHGAEKDLKRANSVSSEVFEFLKTVSNKYGIGFWKPGAGIIHQVVLENYAFPGGMMIGTDSHTVNAGGLGMVAIGVGGADAVDVMAGMPWELKFPKIIGVKLTGELSGWTAPKDVILKVAGILSVKGGTGYIIEYFGPGAKSMSCTGKGTICNMGAEVGATTSTFGYDESMERYLRATGRSKIADSANKIKEYLTGDEEVYRNPEKYFDQLIEIDLSELKPHLNGPFTPDLATPIS

SEQ ID NO: 151357 - protein, 333 aa, Unknown
  Bacterial polypetide isolated from the Sargasso Sea
ATISNMAPEYGATCGFFPTDKETLNYLKLTGKDDQHLNIVEKYSKIQSLWAEENYNPEFNKKIILDLNIIEPSVAGPKRPQDKILLKNVPNEFQNIEPNSKKYDKSNLKPGDIVIAAITSCTNTSNPSVMLAAGLVAKKAIELGLKIKPSVKTSLAPGSKVVSDYLDKAGLTFYLDKIGFNTVGYGCTTCIGNSGPLDNWVEEEITSNNLTVCSVLSGNRNFEGRVHQLVKANFLASPPLVVAYAIAGNINKNLITEPITKSSSGKQIFLRDLWPTNDEIKTLLDSCLTTDMFKKRYQEIYEGDENWKSIKSEKNMTYNWNDTSTYIKHPPFF

SEQ ID NO: 151358 - protein, 227 aa, Unknown
  Bacterial polypetide isolated from the Sargasso Sea
YSGPLDEWVSDEIKKNNLTVCSVLSGNRNFEGRVHQEVKANFLASPPLVVAYAIAGNININLTTDYIGKSKFGKKIFLKDLWPSNTEISQTLSKCLTPNMFKERYKEIYKGDDNWKSINNSKNTTYDWNDTSTYIKHPPFFDTQKKFELKDIKDARILALLGDSVTTDHISPAGSIKEDSPAGLYLTDRQINLKNFNSYGSRRGNHEIMMRGTFANIRIKNQILDNV

SEQ ID NO: 151359 - protein, 250 aa, Unknown
  Bacterial polypetide isolated from the Sargasso Sea
MKPGNKNSYKSLSDLEVNGKNYKYYSLRKAELNGLEGISKLPKSLKVLLENLLRYEDDISVNKKQIEAVKNWLDTKKSKTEIAYRPARVLLQDYTGIPAVADLAAMREAVKEKNKDPNTINPLSAVDLVIDHSVQVDQSAKKDSFEKNVDIEFKRNGERYSFLKWGQSAFDNFRIVPPGTGICHQVNLEYLSKVVWSEEFKGDKYLFPDTLVGTDSHTTMVNGLSVLGWGVGGIEAEAGMLGQPISMLIP

SEQ ID NO: 151360 - protein, 254 aa, Unknown
  Bacterial polypetide isolated from the Sargasso Sea
PPKGYELPPKGFDVEEQGFQAPDSTKKDIKVIVNSDSNRLQLLKPFDKWDNKDLNDLKLLIKAKDKCTTDHISMAGPWLKFRGHLDNISNNLLLGATNAFNNTVNLVKNQITNEYDETPKVARYYKNNNISSIVIGDENYGEGSSREHAAMEPRYMNVKVVVVKSFARIHETNLKKQGILALTFNDKSDYDKILEDDTFNIKGLQKFAPNQNLICEICHSNQTKDIIELKHTYNKNQIEWFKAGSALNLISKQS

SEQ ID NO: 151361 - protein, 239 aa, Unknown
  Bacterial polypetide isolated from the Sargasso Sea
MAPEYGATCGFFPIDDETLRYLRNTGRDEDRVALVEAYAKENGFWRSKDYSPVYTDTLHLNMDSIVPAISGPKRPQDYVALNEAQGAFRAEMKDTFDRPLGKKVPVENEDYEMESGKVVIASITSCTNTSNPYVMISAGIVARKAAALGLQRQPWVKTSLAPGSQVVSAYLEASGLQEDLDKVGFNLVGYGCTTCIGNSGPIQSEISQAITDGDLVATAVLSGNRNFEGRISPDVRANY

SEQ ID NO: 151362 - protein, 219 aa, Unknown
  Bacterial polypetide isolated from the Sargasso Sea
ANILGIFGDSVTTDHISPAGAIKDDGPAGDYLKDKKVSKNDFNSFGARRGNHQVMMRGTFANIRIKNEMLNNVEGGYTIHYPSKKQMSIYDASIKYQKAKTPLIIIAGKDYGMGSSRDWAAKGTKLLGIRAVIAESYERIHRSNLVGMGVLPFKFEGKDNRKSLKLLGSESVNILDIYENLKPQGLYEASIEYSNGITKKIKIRLLVNNVTEIEYLETG

SEQ ID NO: 151363 - protein, 258 aa, Unknown
  Bacterial polypetide isolated from the Sargasso Sea
MVNSLSVLGWGVGGIEAEAAMLGQAISMNIPEVIGFQLKGALKEGITATDLVLSITKTLRDKGVVGKFVEFYGSGLKNLSLADRATISNMAPEYGATCGFFPTDEETINYLKLTGKDNDHLNIVEEYSKKQTLWADENYSPEYSDKILLDLDTIEPSLAGPKRPQDKILLKDIPTEFSKIVKNLNTSKNKLNTGDIVIAAITSCTNTSNPSVMIAAGLIAKKASELGLEVKSWVKTSLAPGSKVVSDYLNKSGLTQIS

SEQ ID NO: 151364 - protein, 252 aa, Unknown
  Bacterial polypetide isolated from the Sargasso Sea
PWVKTSLAPGSKVVSDYLEKAELSEFLNKIGFNLVGYGCTTCIGNSGPLNEWVSKEITDNDLTVCSVLSGNRNFEGRVHQEVKANFLASPPLVVAFALAGNINVNLFTDPIGISKSGDKVFLKDLWPSSNEINDIVNKSLSTDMFLKRYEEIYAGDNNWKSINSVSETTYTWNASSTYIKRPPFFESDGNEVKDIINARILALLGDSVTTDHISPAGAIKSDSPAGRYLNERQILRKDFNSYGSRRGNHEII

SEQ ID NO: 151365 - protein, 194 aa, Unknown
  Bacterial polypetide isolated from the Sargasso Sea
MDNKDFLTEIELPNKKLTYYSLPKLSHDFSFDLESMPYSLRILLENLIRNFDNKIVDEDLIKKFISDKKEKFEIPFRPARVILQDFTGVPCIADLAAMRDVVAQLGGDTNSINPNVPVDLVIDHSVQVDYFKERDSLILNTKLEFERNQERYSFLRWAQKAFANFRAVPPGNGIVHQVNLEYLAKLVQKGKKKT

SEQ ID NO: 151366 - protein, 168 aa, Unknown
  Bacterial polypetide isolated from the Sargasso Sea
FYSQSLGKDKNGKEIYLKDIWPSNKEIEETLRNSLNAEMFIKRYSNISEGPIQWQKIKTEKSSIYNWDEGSTYVKKPPFFENLPDQPEGFKEIKNARPLLILGDMITTDHISPAGSINKESPTGEYFMEHQILPKDYNSYGSRRGNHEVMMRGTFANIRIKNEIVPGI

SEQ ID NO: 151367 - protein, 192 aa, Unknown
  Bacterial polypetide isolated from the Sargasso Sea
MKINSKDSFKSLKKLKVDNKIYNIFSLKEAEKNGLKDISKLPKSIKILLENLLRFEDEKSVKKEQILSIQSWLDKKNSKTEIAFRPARVLMQDYTGIPAVADLAAMRDAVKLKKKDPKKINPLSTVDLVIDHSVMVDAYASKDSFKKNVEKEFSRNGERYSFLKWGQQAFNNFRVVPPGTGICHQVNLEYLS

SEQ ID NO: 151368 - protein, 278 aa, Unknown
  Bacterial polypetide isolated from the Sargasso Sea
NNAKKSNSEVYNFLESVSKKYGIGFWEPGAGIIHQVVLENYAFPGGMMVGTDSHTVNAGGLGMVAIGVGGADAVDVMVGMPWELKFPKLIGVCLEGELNGWASAKDIILKVAGMLTVKGGTGSIVEYFGPGAEKLSCTGKGTICNMGAEIGATTSIFSYDKNMSNYLRSTGRNELADIADQNADLLCGDRDVYSDPEKYFDKVITIDLNNLEPHINGPFTPDLATPISEFAKSAEENAWPLKLDVGLIGSCTNSSYEDITRAASIAKQAKEKKIKVKS

SEQ ID NO: 151369 - protein, 305 aa, Unknown
  Bacterial polypetide isolated from the Sargasso Sea
FAAGKNKVAVPSTVHCDHLILAESGADQDLNQALKDNKEVYNFLSSVSKKYGIGFWKPGAGIIHQVLLENYAFPGAMMIGTDSHTVNAGGLGMVAVGVGGADAVDVMAGMPWELKFPKLVGVVLKGKLSGWASSKDVILKVAGILTVKGGTGKIVEYIGEGAESLSCTGKGTICNMGAEIGATTSLFGYDDSMARYLDATGRSIVTEFASACRDDLNPDPEVLQNPEAYYDEVIEIDLSTLEPYINGPFTPDKAWPISEFAQAVKDNGYPQELEVGLIGSCTNSSYEDLTRAASLAKQAKDKHLK

SEQ ID NO: 151370 - protein, 176 aa, Unknown
  Bacterial polypetide isolated from the Sargasso Sea
MTVQSQTPIELVKSVYSNFEDRLPYGRKALGRSLTLAEKILINHLKDPSSTEMNRGVSYVDLHPDRVAMQDATAQMAWLQFMTAGLPEVQVPTTTHCDHLIQARIDGDTDLSVAVDNNSEVYDFLESVCAKYGAGFWKPGSGIIHQVILEQYAFPGGMMIGTDSHTPNAGGLGMIA

SEQ ID NO: 151371 - protein, 229 aa, Unknown
  Bacterial polypetide isolated from the Sargasso Sea
MTPGNKNSYNSLKKIKVNGKEYNYYSLNESEKNGLEGINKLPKSLKVLLENLLRYEDDLSVTKSQIEAIKNWLKTKKSKTEIAYRPARVLLQDYTGIPAVADLAAMREAVKEKNKDPKTINPLSAVDLVIDHSVQVDQSAKADSFEKNVDIEFERNGERYSFLKWGQQAFDNFRIVPPGTGICHQVNLEYLSKVVWSEEFKGEKYLFPDTLVGTDSHTTMVNGLSVLGW

SEQ ID NO: 151372 - protein, 306 aa, Unknown
  Bacterial polypetide isolated from the Sargasso Sea
PSGCTDRATISNMSPEFGCTDTHWPIDAQTLDYMRKTSRPEAHIDMVEAYAKANLLWRDDNAEIEYTDVIELDLGTVEPTISGPKRPQDKILLREAKGQIDKLLNDFGSKRQSIEVKTKGYGDFTLDEASVVIAAITSCTNTSNPSVMIGAGLVAKKANEKGLTTKPWVKSSLAPGSRVVTEYLDKSDLSKELDKLKFNTVGYGCTTCIGNSGDMIDEVQKAVIDNNLIVCSALSGNRNFEARIHPNIKMNFLASPMLVVAYALAGTMDFDMSKDPLGEDQDGNPVYLKDIWPSSAEIQEVMTRVL

SEQ ID NO: 151373 - protein, 290 aa, Unknown
  Bacterial polypetide isolated from the Sargasso Sea
KILLKEVPKEFNKIDNNPNVSKNKLNTGDIVIAAITSCTNTSNPNVMIAAGLVAKKAIELGLSVKPWVKTSLAPGSKVVSDYLDKAGLSEYLDMLGFNTVGYGCTTCIGNSGPLDEWVSDEIKLNNITVCSVLSGNRNFEGRVHQEVKANFLASPPLVVAYAIAGNININLTIDSLGKSKTGEDIFLKDLWPSNIEINKTLNLCLTPKMFIDRYEEIYKGDDNWKSINSSKNTTYNWNDNSTYIKHPPFFNEQNDFELKDIQNARILALLGDSVTTDHISPAGSIKEDSP

SEQ ID NO: 151374 - protein, 315 aa, Unknown
  Bacterial polypetide isolated from the Sargasso Sea
MALLQFMMAGREKVAVPSTVHCDHLIQAKINAGQDLLTSKKNNDEVFSFLQSVSNKYGIGFWKPGAGIIHQVLLENYAFPGGMMIGTDSHTVNAGGLGMIAIGVGGADAVDAMTGMPWELKFPKIVGVELKGTLNGWTSPKDVILKLAGIVSAKGGTGCIIEYFGSGADVISCTGKGTICNMGAEIGATTSIFGYDNKMEEYLIATGRDEVAALANNYKEYLKADSEVLDNPEKYYDKLITIDLSLLEPHINGPFSPDIATPISKMKEVAKKNNWPTKIDVGLIGSCTNSSYEDISRASSIARQATQKGLKTKSE

SEQ ID NO: 151375 - protein, 194 aa, Unknown
  Bacterial polypetide isolated from the Sargasso Sea
KIGFNLVGYGCTTCIGNSGPLEGWISTIIKDKNLTVCSVLSGNRNFEGRVHQEVKANFLASPPLVVAFALAGNMNVDIFNEPIGIGKLGKEIFLKDIWPSSYEINNIVDNSLSTDMFKKRYKEIYNGDSNWQSIKSNSNKTYSWSPASTYIKHPPFFADQEEEIKDIINARILAMLGDSVTTDHISSSWCNKVR

SEQ ID NO: 151376 - protein, 248 aa, Unknown
  Bacterial polypetide isolated from the Sargasso Sea
NENGEKVLLDPPKGFELPPNGFGVDDLGFQNPSDDGTNLKVLINNNSDRLQKLEPFEKWDGSDTMTLSLLVKVSGKCTTDHISMAGPWLRFRGHLDNISNNLLIGATNSFNNTVNLVKNKLTNQYEEIPKVARYYKNNDISSIIIGEENYGEGSSREHAAMEPRYMGVKAVLVKSFARIHETNLKKQGILALTFVNKSDYNKIKEDDSFSILNLNSFLPDSNLEIQINHKDESSEIIEVCHTYNINQI

SEQ ID NO: 151377 - protein, 164 aa, Unknown
  Bacterial polypetide isolated from the Sargasso Sea
NEIAPGTEGGFTKLYPEGKVMPIYDAVVEYKKRGTDLIVIGGKEYGTGSSRDWAAKGTKLLGIKAVIAESFERIHRSNLIGMGILPLQFMEGVDRKKLKLTGSELISILKIENGINPSDKIEIEIKYQSGDIKKIKTLCRIDTQNELEYYKNGGILQFVLRNMM

SEQ ID NO: 151378 - protein, 178 aa, Unknown
  Bacterial polypetide isolated from the Sargasso Sea
MVRGTFGNLRIKNEILKDVEGGFTKYFPTNKQMSIYQAATEYAKNNTPLIVIAGKEYGTGSSRDWAAKGTKLLGIKAVIAESFERIHRSNLIGMGVLPLEFQDGQNRKTLQLSGYEKFSIKGIEKIKPQTNLKCEIQFDKKNLLINLRCRIDTKKELDYYKAGGILNYVLNSIIDKAS

SEQ ID NO: 151379 - protein, 199 aa, Unknown
  Bacterial polypetide isolated from the Sargasso Sea
TDKVDRLPFTHKILLENALRYSEDDNEGPKDVETILNWDSKSDRSTEISFTPSRVILQDFTGVPAVVDLATMRDAVVSMQGNPNDINPLSPAELVIDHSVQVDHFGSLDALEKNNKVEFQRNQERYRFLRWGQDAFSNFEVVPPNTGIVHQVNLEYLGRVVFSKDDSLAYPDTLVGTDSHTTMINGIGCLGWGVGGIEA

SEQ ID NO: 151380 - protein, 153 aa, Unknown
  Bacterial polypetide isolated from the Sargasso Sea
YFPNNKKMSIYEAAIEYAKKNTPLIVIAGKEYGTGSSRDWAAKGTKLLGIKAVIAESFERIHRSNLIGMGVLPLEFQDGQNRKTLKLSGNEKFSIKGIKLIKPQSNLQCEIHFNKKNVLINLKCRIDTKKELDYYKAGGILNYVLNTIIDKAS

SEQ ID NO: 151381 - protein, 165 aa, Unknown
  Bacterial polypetide isolated from the Sargasso Sea
EIIPGTEGGITKSFVSNKKMSIYDASIEYSKNNIPLVIVAGKEYGTGSSRDWAAKGTKLLGIKAVIAESFERIHRSNLIGMGVLPLQFTSNQNRLSLNLNGSEKISIKNIINIFPNMEFDCEIISENEARLIKLLCRIDTKKEIEYYKAGGILQYVLKSIIDKAS

SEQ ID NO: 151382 - protein, 286 aa, Unknown
  Bacterial polypetide isolated from the Sargasso Sea
MDLSVTPASLVSSVYEKLTENINSLRARKDAPLTLAEKLLFGHATDISSVSLNKGEDYGDFAPDRVAMQDATAQMALLQFMQADLPETAVPTTVHCDHLIQAYEGASTDLQVANKTHKEVFDFLRTASEKYEIGFWGPGAGIIHQVVLEQYAFPGGMMIGTDSHTPNAGGLSMIAIGVGGADAVDVMAGMPFNTKIPNLIGVKLTGSLSGWTSPKDIILKVAEILTVKGATNAIVEYFGEGTQTISTTGKATITNMGAEIGATCSIFPYDEKGSDYLKATGREELA

SEQ ID NO: 151383 - protein, 288 aa, Unknown
  Bacterial polypetide isolated from the Sargasso Sea
SDSAIVEQNNEIYDLNHGDVVIAAITSCTNTSNPGVMIAAGLLAREARKRGLNVKPWVKTSLAPGSRVVTEYYDVNGLTEDLDALGFHNVGYGCTTCIGNSGPLDASIEAAIDEANLIVGSVISGNRNFEGRVHQKVKASYLASPPLVVAYALAGTLDIDFEKDPLGISADGQRVMLSDVWPSEEDVAKAMANIRPEMFTERYGTVMQEDRWDAIPAESTPIYPWDEASTYIRLPSFFQNISMEVPPIEPISDASVLLFLGDSVTTDHISPAGAFPEDGPAGRWLTER

SEQ ID NO: 151384 - protein, 101 aa, Unknown
  Bacterial polypetide isolated from the Sargasso Sea
FWDQGSTYVKKPPFFDNLSDEPDGFKQIKDARPLLILGDMVTTDHISPAGSIQKESPTGDYFMKHQILPKDYNSYGSRRGNHEVMMRGTFANIRIRNEIAP

SEQ ID NO: 151385 - protein, 245 aa, Unknown
  Bacterial polypetide isolated from the Sargasso Sea
CRIDFESGEGTSSIYSLEALQKKGVGHIDNLPFSIRILLEQALRNVEESKSNPEDVNLLANWNASENSPEEIPYRPARVILQDFTGVPAVVDLAALRSAVVEMEGDPAVINPRVPVDLVIDHSIQVDVFGSSDALKKNMDIEFKRNRERYEFLKWGKQAFDNFNVYPPGVGIVHQVNLETVASVVQFRNGVCFPDTLVGTDSHTTMINGLGVMGWGVGGIEAESVMLGQPIYMLVPEVIGFRLHG

SEQ ID NO: 151386 - protein, 273 aa, Unknown
  Bacterial polypetide isolated from the Sargasso Sea
TGIFALGGSLSFNPLKDSLETDDGKKITLSPPPIAPEVPEKGFVVAKDVYISPSEKPEDVEVIIDPNSDRLQKLEPFKPWNGDDFTELSLMIKAKGKCTTDHISPAGPWLRLRGHLDKLSDNLLLGAVNAFSSDVGKTKNMLTNEIENCAEIARKYKKENINWLIVGDTNYGEGSSREHAAMTPRFLGCVVVIAKSFARIHETNLKKQGILALTFDDVDDYEKINEDDKISITGLENFVENSVVTCELKHTDGKSEKISLRHSYNSSQIEWFK

SEQ ID NO: 151387 - protein, 328 aa, Unknown
  Bacterial polypetide isolated from the Sargasso Sea
SVCAKYGAGFWKPESGIIHQVVLEQYAFPGGMIIGTDSHTPNGGGLGMIAIGVGGADAVDVMTGFPWNVRWPKLIGVHLTGSLNGWSAPKDVILKVAEILTVKGGTGAIVEYFGEGADNLSATGKATICNMGAEIGATTSIFPYDQAIERYLRSTSREAVADLANQHAGDLRADDEVLENPEKFFDQVIEIDLSQLRPHINGPHTPDLARELKDLGSEATENGWPLEISAALIGSCTNSSYEDITRAASIAREAAASGLKTQTRLLITPGSEKVRATITRDGLLADFEALGAVVLANACGPCIGQWDRSLEDRVAGTPNVIVTSYNKK

SEQ ID NO: 151388 - protein, 255 aa, Unknown
  Bacterial polypetide isolated from the Sargasso Sea
MKPGNRNSFKSLKSIKINNKNYKYFSLIEAEKNGLAGISNLPKSLKVLLENLLRYEDDLSVTKNQIEAIQNWLKEKKSNTEIAYRPARVLLQDYTGIPAVADLAAMREAVKEKNKDPNTINPLSAVDLVIDHSVQVDQSAKSDSFERNVEIEFKRNSERYSFLKWGQQAFDNFRIVPPGTGICHQVNLEYLSKVVWSKKYKDDEYLFPDTLVGTDSHTTMVNGLSVLGWGVGGIEAEAGMLGQPISMLIPEVIGF

SEQ ID NO: 151389 - protein, 170 aa, Unknown
  Bacterial polypetide isolated from the Sargasso Sea
CNIRIRNEIAPGTEGGFTKIYPEGKVVSIYDAVVEYKKRGTDLIVIGGKEYGTGSSRDWAAKGTKLLGIKAVIAESFERIHRSNLIGMGILPLQFMSGVDRKKLNLIGSELISILKIENGINPSDKIEVEIKYQSGDIKKTQTLCRIDTKNELEYYKNGGILQFVLRKMM

SEQ ID NO: 151390 - protein, 217 aa, Unknown
  Bacterial polypetide isolated from the Sargasso Sea
MSDHTNSFSINEKSYKYFDLKSLDTDKVDRLPFTHKILLENALRYSEDDNEGPKDVETILNWDSKSDRSTEISFTPSRVILQDFTGVPAVVDLATMRDAVVSMEGNPNDINPLSPAELVIDHSVQVDHFGSLDALEKNNKVEFQRNQERYRFLRWGQDAFSNFEVVPPNTGIVHQVNLEYLGRVVFSKDDSLAYPDTLVGTDSHTTMINGIGCLGWG

SEQ ID NO: 151391 - protein, 277 aa, Unknown
  Bacterial polypetide isolated from the Sargasso Sea
MKPGTKNSYNSLSEIKINNKIYKIFSLSKAENNGLSGISKLPKSLKVLLENLLRYEDDLTVNKNQIEAIKNWLEEKKSKTEIAYRPARVLLQDYTGIPAVADLAAMREAVKEKNKDPKTINPLSTVDLVIDHSVQVDQAAKSDSFDKNVEIEFSRNGERYSFLKWGQQAFNNFRIVPPGTGICHQVNLEYLSKVVWTAKYEDHDYLFPDTLVGTDSHTTMVNGLSVLGWGVGGIEAEAGMLGQPISMLIPEVIGFEVKGKMPEGTTATDLVLTVVKM

SEQ ID NO: 151392 - protein, 259 aa, Unknown
  Bacterial polypetide isolated from the Sargasso Sea
ISTYVKHPPYFEDMNFSQGNISNILNARVLGIFGDSVTTDHISPAGSIKTNGPAGDYLKSKSVKIHDFNSFGARRGNHEVMMRGTFSNIRIKNEMLDGIEGGYTKHYPSKKQMSIFDAAIKYKKENKPLVIFSGKDYGMGSSRDWAAKGTNLLGVKAVIAESYERIHRSNLVGMGVLPLQFNKGQNRKSLKLNGSEVISITGLDKEITPNMILPMTIKYSSGKIFETKVNCLIKTVNEVEYLQTGGILQYVLKNLAETA

SEQ ID NO: 151393 - protein, 176 aa, Unknown
  Bacterial polypetide isolated from the Sargasso Sea
MMRGTFANIRIRNEMAPGTEGGYTKIYPEGEVLPVYDAVVEYKKRNTDLVVIGGKEYGTGSSRDWAAKGTKLLGVKAVIAESFERIHRSNLIGMGILPLQFKDNVNRKNLNLIGSELISVIDIEKGIKPSDEVTLEIKYVSGEIKKIKTLCRIDTKNELEYYKNGGILQYVLRNMI

SEQ ID NO: 151394 - protein, 139 aa, Unknown
  Bacterial polypetide isolated from the Sargasso Sea
AVVEYKKRGIDLVVIGGKEYGTGSSRDWAAKGTKLLGIKVVIAESFERIHRSNLIGMGILPLQFMPGFDRKKINLIGSELISIIDFEKGIDPSEKVKVEVKYESGEIKIIETICRIDTKNEMEYYKNGGILQYVLRNMI

SEQ ID NO: 151395 - protein, 248 aa, Unknown
  Bacterial polypetide isolated from the Sargasso Sea
LQFMMAGKDKVSVPSTVHCDHLIQAKVDASSDLNSALDMNNEVFDFLESVSNKYGIGFWKPGAGIIHQVILENYAFPGGMMIGTDSHTVNAGGLGMIAIGVGGADAVDVMTGMPWELKLPKLIGVKLSGELSGWASPKDVILKLAGILTVKGGTGSIIEYFGDGVSTLSCTGKGTICNMGAEIGATTSIFSYDNKMEEYLNATGRSELADMANKIKEFLVPDLEVIDNPKKFFDDVIEINLSKLEPHL

SEQ ID NO: 151396 - protein, 281 aa, Unknown
  Bacterial polypetide isolated from the Sargasso Sea
VGGIEAESAMLGQPISINTPKVVGFKITGSLKEGVTATDLVLTITEKLRSHGVVGKFIEFYGPSLANLTLADRATISNMAPEYGATCGYFPTDEETLKYLKLSGKETHQIELISEYTKLQKLWHYSNQESKYDDIINFVLNDVTPSVSGPKRPQDRISLKDVPPSFKKMINNNVKDKRIKNEIISGDIVIAAITSCTNTSNPNVMIAAGLVAKKAFELGLKVKPWVKTSLAPGSKVVSDYLDKSDLSKYLNALGFRLVGYGCTTCIGNSGSLNQEISNQIK

SEQ ID NO: 151397 - protein, 215 aa, Unknown
  Bacterial polypetide isolated from the Sargasso Sea
ISPAGSIQKESPTGEYFMKNQILTKDYNSYGARRGNHEVMMRGTFANIRIRNEIAPETEGGFTKLYPEEKIMPVYDAVVEYKRRGVDLVVVGGKEYGTGSSRDWAAKGTKLLGIKAILAESFERIHRSNLIGMGVLPLQFIDKMNRKNLNLNGSELISILKIEKGLKPSDHLDVEIKYQSGELKKIKMLCRIDTKNELEYYKNGGILQYVLRKMI

SEQ ID NO: 151398 - protein, 134 aa, Unknown
  Bacterial polypetide isolated from the Sargasso Sea
HSVPLVVLAGKEYGTGSSRDWAAKGTKLLGIRAIIAESFERIHRSNLIGMGVLPFEFTEGQTRINLSIEGDEKISILGISQIAPNKIIECTISGKDFSKKIKLRCRIDTIKELEYFKAGGILQYVLNSIIDKAS

SEQ ID NO: 151399 - protein, 248 aa, Unknown
  Bacterial polypetide isolated from the Sargasso Sea
MDYKSDINCKNKDFTIYNISKSQIAHLPYSLRVLFENYVRNNSSKLSQSVIDNFISWSGDITTPTELSFYPSRVIMQDFTGVPAVVDLASMRDAVKKSNGNPSLINPQCQTDLVIDHSVMVDHHGSEKSMELNTKLEYSRNSERYRLLKWGQKAFKNFRIVPPSNGIIHQINIEFISQVVFEKNRNLYPDTVVGTDSHTTMVNGLGVLGWGVGGIEAEAAMLGQPIPMLLPEVIGFRLDGQLAKTSTA

SEQ ID NO: 151400 - protein, 160 aa, Unknown
  Bacterial polypetide isolated from the Sargasso Sea
PGTEGGFTKLYPENKVMPVYDAVVEYKKRGTDLVVIGGKEYGTGSSRDWAAKGTKLLGIKVVIAESFERIHRSNLIGMGILPLQFTDGFNRNKLNLIGSELITILDFEKGVNPTDKVKVEFKYATGDTKIIETICRIDTKNELEYYKNGGILQYVLRNMI

SEQ ID NO: 151401 - protein, 257 aa, Unknown
  Bacterial polypetide isolated from the Sargasso Sea
VIPPGNGIMHQINLEKMSPVIQVRDGVAFPDTCVGTDSHTPHVDALGVIAIGVGGLEAESVMLGRASWMRLPESVGVELTGKLQPGITATDMVLALTEFLRQQKVVGAWLEFFGEGASALTLGDRATISNMAPEYGATAAMFYIDAQTIAYLKLTGREDEQVALVEQYARHTGLWADDLKGAQYERSLSFDLSSVVRNMAGPSNPHARLATRDLASKGIAGQWDDVPGQMPDGAVIIAAITSCTNTSNPRNVIAAGL

SEQ ID NO: 151402 - protein, 263 aa, Unknown
  Bacterial polypetide isolated from the Sargasso Sea
MKPGTKNSFNSLSEIQINDKRYKIFSLSKAEANGLNGISKLPKSLKVLLENLLRYEDDLSVNRNQIEAIKDWLKEKKSKTEIAYRPARVLLQDYTGIPAVADLAAMREAVKEKNKDPNTINPLSAVDLVIDHSVQVDQSAKSDSFDKNVEIEFNRNGERYSFLKWGQQAFDNFRIVPPGTGICHQVNLEYLSKVVWSAKYKDDNYLFPDTLVGTDSHTTMVNGLSVLGWGVGGIEAEAGMLGQPISMLIPEVIGFEVKNKMPE

SEQ ID NO: 151403 - protein, 325 aa, Unknown
  Bacterial polypetide isolated from the Sargasso Sea
SNLTNVVGPHTPDLVRPILKLADDVKKNDYLDNISVALIGSCTNSSYEDMSRAASLAKQAQSKGIKAKIPLLVTPGSEQIRATIERDGQIDLLKSIGATVLANACGPCIGQWSRPELKKGEQNTIVTSYNRNFPGRNDGKRETMNFIASPELVIALALGGNLSFNPLDDSLTSSDGKTFKLDAPEKAPDVPDSGFVDAEDVYVSPSENPGSVQVLIDPNSERLQKLEPFGVWDGKDLDELRVMIKAKGKCTTDHISPAGPWLRLRGHLDKLSDNLLLGAVNAFNDQVGQAKNMLSNEIESCAQIARQYKEKKISWVIVGDNHYGE

SEQ ID NO: 151404 - protein, 148 aa, Unknown
  Bacterial polypetide isolated from the Sargasso Sea
MSSTDPFDSIREFETSSGKHASYASLHVLEESENIDLSSLPYSIRILLEAALRKCDGFLVTQEDVKRIASWSPTQSPAEIPFMPSRVILQDFTGVPAVVDIAALRDAMVALGGDPSKVNPQVPVDLVIDHSVQVDISGLFPDAEERNL

SEQ ID NO: 151405 - protein, 207 aa, Unknown
  Bacterial polypetide isolated from the Sargasso Sea
PAGDYLKSKSVKIHDFNSFGARRGNHEVMMRGTFSNIRIKNEMLDGIEGGYTKHYPSKKQMSIFDAAIKYKKENKPLIIFSGKDYGMGSSRDWAAKGTNLLGVKAVVAESYERIHRSNLVGMGVLPLQFYKGQNRKSLKLTGSEIISIAGLDNEITPNMILPMTIKYSSGKIFETKVNCLIKTVNEVEYLQTGGILQYVLKNLAETA

SEQ ID NO: 151406 - protein, 298 aa, Unknown
  Bacterial polypetide isolated from the Sargasso Sea
QPISMVVPEVIGFEIKGKIKEGITATDLVLTITEQLRKKGVVGKFVEFFGEGLKELSIPDRATISNMAPEYGATCGFFPIDEETIKFLKVSGRDENGIQLVKKYAKLQGLWEDYKKNDRVYTDKMQLNLSHILPSLAGPKRPQDKIVLSKVSNEFLKSLKTEFSQKKLINLSKVNGAKFEIDHGHVAIAAITSCTNTSNPSVMVGAGLLAKKAAGLGLKTKPWVKTSLAPGSKIVTDYLTKSGLQKYLDHLGFHLVGFGCTTCIGNSGPLDKNISDTISKNNLIVSGVLSGNRNLKEE

SEQ ID NO: 151407 - protein, 305 aa, Unknown
  Bacterial polypetide isolated from the Sargasso Sea
LIVDHSLAVEHAGFEEDAFEKNRAIEDRRNDDRFHFINWTKTAFKNVDVIPPGNGIMHQINLERMSPVIESRDGVAFPDTLVGTDSHTPHVDALGVIAIGVGGLEAESVMLGRASYMRLPDIVGVELTGKPQPGITATDIVLALTEFLRKQRVVSAFLEFYGEGASHLTLGDRATISNMTPEYGATAAMFYIDQQTIDYLRLTGREEDQIALVENYAKHTGLWADDLKTAEYERVLTFDLSSVGRNMAGPSNPHARLATSDLASRGIAAKWEQEDDKMPDGAVIIAAITSCTNTSNPRNVIAAGL

SEQ ID NO: 151408 - protein, 257 aa, Unknown
  Bacterial polypetide isolated from the Sargasso Sea
TLTEKILFSHLAEDDKNLDYKRGESYVSFSPDRVAMQDATAQMALLQFMMAGKDKVAVPTTTHCDHLIQAKVGAEKDLEIAKDINTEVYDFLESVSNKYGVGFWKPGAGIIHQVVLENYAFPGGMMIGTDSHTVNAGGLGMVAIGVGGADAVDVMAGMPWELKFPKLIGVKLTGKMNGWTSAKDVILKLAGILTVKGGTGAIVEYFGDGADKISCTGKGTICNMGAEIGATTSIFSYDKKMGEYLRSTGRKELALLA

SEQ ID NO: 151409 - protein, 208 aa, Unknown
  Bacterial polypetide isolated from the Sargasso Sea
CPSGQFLISNDVPRSQFNSYGSRRGNHNIMARGTFGNIRLRNNLVPESEGDWTIYHPENKKMRIFEASEKYKSDNTPLIVIAGKEYGTGSSRDWAAKGPNLLGVKLVIAHSYERIHRSNLIGMGVMPTEFMDDDSFESLGLNGSEYFSFEEVNDSTKPMATLKVNARRDVNFDINFNVKLRIDTEVEKKYLLNGGVLQFVLRNMFQNS

SEQ ID NO: 151410 - protein, 261 aa, Unknown
  Bacterial polypetide isolated from the Sargasso Sea
RTELADAYGKADELNARVPVNGADFTLGHGDIAIAAITSCTNTSNPSVLVAAGLLARKARARGLVPKPWVRATLSPGSKVVTDYLVRSGLQEDLDALGFALTGYGCMTCIGNSGSLETSISEAINRNGLVTAAVLSGNRNFEGRISPDVRANYLASPPLVVAYALLGSVSRDISTEPLGNGADGQPVYLRDVWPSNAEVAATIATSIDPEMFAARYADVYEGDARWRALAVKKGATYEWPTSSTYIAEPPFFEALDRQPAP

SEQ ID NO: 151411 - protein, 126 aa, Unknown
  Bacterial polypetide isolated from the Sargasso Sea
GGKEYGTGSSRDWAAKGTKLLGVKAVIAESFERIHRSNLIGMGVLPLQFVENMNRQNLNLKGSELISVLGLEKGINPGDHLEVEIKYATGDIKKIKMLCRIDTKNELEYYKNGGILQYVLRNMING

SEQ ID NO: 151412 - protein, 146 aa, Unknown
  Bacterial polypetide isolated from the Sargasso Sea
ANYLASPPLVVAYALAGHMEVDLIKDPLGKNNDGKDIYLKDIWPTNKEIEETLSKSLNPDMFVKRYSNVSLGPAQWQKIKTEKSSIYNWDESSTYVKRPPFFDSLPEKPEGFKEIKDARPLLILGDMVTTDHISPAGSIQKDSPTG

SEQ ID NO: 151413 - protein, 286 aa, Unknown
  Bacterial polypetide isolated from the Sargasso Sea
AVPTTVHCDHLIQAKVGAEQDLINAKQSNSEVYNFLESVSKKYGIGFWEPGAGIIHQVVLENYAFPGGMMVGTDSHTVNAGGLGMVAIGVGGADAVDVMVGMPWELKFPKLIGVCLKGELSGWVSAKDVILKVAGILTVKGGTGSIVEYFGPGADKLSCTGKGTICNMGAEIGATTSIFSYDQNMSNYLRSTDRHELADLADQNADYLCGDKEVYNNPEKYFDEVITIDLDTLEPHINGPFTPDLATPISKFAESAKENGWPLKLDVGLIGSCTNSSYEDITRAAS

SEQ ID NO: 151414 - protein, 278 aa, Unknown
  Bacterial polypetide isolated from the Sargasso Sea
GFFPIDSLTIEYLKMTGKDEEHLKIVDNYSKECGFFRDDSQNIKYTDTLSLDMSKVQACLSGPKRPQDRVLLSDVKKISEKEISNLKKTEKTTGVINDGDILIAAITSCTNTSNPSVIIGAGLLAKNAIEKGLSTKDWVKTSLAPGSRVVENYLKKADLLDSLNQLGFNIVGYGCTTCIGNSGPLDEKYVKEINDRDLVVSSILSGNRNFEGRIHPEIKMNFLASPMLVVAYSLVGKINVDINQTILGQDANGVDVYLKDIWPSNSEINDVMAKTIDG

SEQ ID NO: 151415 - protein, 276 aa, Unknown
  Bacterial polypetide isolated from the Sargasso Sea
SLADRSTISNMAPEYGATCGFFSTDQETLNYLELSGKDEHQLKIVKEYTKVQKLWIEDDYNPSFDETLYLDLDTIDASVAGPKRPQDKIFVRDIPKVFNKINNSAFNIQDNRKEMQSGDIVIAAITSCTNTSNPNVMIAAGLVAKNAVELGLKVKPWVKTSLAPGSKVVSDYLEKADLSNFLNEIGFNLVGYGCTTCIGNSGPLNEWVSKEIKNKNLTVCSVLSGNRNFEGRVHQEVKANFLASPPLVVAFAIAGNMNINLFDDPIGISKYGEEVF

SEQ ID NO: 151416 - protein, 160 aa, Unknown
  Bacterial polypetide isolated from the Sargasso Sea
PGTEGGFTKLYPEGKIMSIYEAAMEYKKRGNDLVVIAGKEYGAGSSRDWAAKGTKLLGVKAVIVESFERIHRSNLIGMGILPLQFKHGFNRKKLNLKGSELFTILGMEKGITPGQEVECEIKYDNGVAKKINLLSRIDTANEVEYYKNDGILKYVLRSML

SEQ ID NO: 151417 - protein, 186 aa, Unknown
  Bacterial polypetide isolated from the Sargasso Sea
MGLKTLNEYSYFSIEEVLSASEIIKLPYSVRILLENMIRVHNFNLGTQDDIKNVSSWTPVSISQKEIPFLPSRVVLQDFTGVPAVVDLATMRDAAKNLGFSPQKVNPLVRSDLVIDHSIQVDFYKTSEALQKNTEIEFRRNIERYKFLKWGQQAFDNLRIIPPGVGIVHQVNLEYLAPRYFRNRKR

SEQ ID NO: 151418 - protein, 227 aa, Unknown
  Bacterial polypetide isolated from the Sargasso Sea
MKPGNKNSYKSLTSIIINEKEYNYFSLKIAEKNGLKGIEKLPKSLKVLLENLLRYEDGTTVTKNQILALQKWLKDKKSETEIAYRPARVLLQDYTGIPAVADLAAMREAVKEKNKDPQIINPLSSVDLVIDHSVQVDKFSTPDSLKKNVEIEFQRNAERYSFLKWGQQAFDNFRIVPPGTGICHQVNLEYLSKVVWKEKFKDKDYIFPDTLVGTDSHTTMVNGLSVL

SEQ ID NO: 151419 - protein, 134 aa, Unknown
  Bacterial polypetide isolated from the Sargasso Sea
KRKNDLIVVAGKEYGTGSSRDWAAKGTKLLGIKAVLAESFERIHRSNLVGMGVLPLQFKDGYDRKKLKIMGSELVTVIDIEKGVKPRSEVICEIKYKNGTAKKINLLSRIDTENEIEYYKNGGILQYVLRNMLN

SEQ ID NO: 151420 - protein, 223 aa, Unknown
  Bacterial polypetide isolated from the Sargasso Sea
EGVTATDLVLRIVEMLRQKGVVEKFVEFFGIGLSALPLADRATVANMAPEYGATMGFFPIDSETLNYLRNTGRPEELVQRVEIYSKEQGLFRTESTPDPEYSDFLELDLESVEPSLAGPKRPQDRVPLNSMHSTWKKTLQAPMKERGFELESSQLESSVNLKDTGSSLKHGSVVIAAITSCTNTSNPSVMMAAGLLAEKCGGKRTTSQKLGENFSRSGIQSGN

SEQ ID NO: 151421 - protein, 324 aa, Unknown
  Bacterial polypetide isolated from the Sargasso Sea
GPHTPDLARPISGLKEDANANDYPLKISSALIGSCTNSSYEDIGRAAFIAREAAKHGLKAKVPLMVTPGSEQTRATIERDGYLKDLEAIGATVLANACGPCIGQWKRDDIKEGESNSIVSSFNRNFPARNDGNAETLSFIGSPETVIGLALGGTLDFNFLDDTLISKDGEEITLNPPIADELPDKGFEETLEGFIQPTPGDDVEVVIDPESNRLQRLTPFEAPNESEYESMSVLMKAEGKCTTDHISPAGKWLQFRGHLENISQNLFNGVNNAFAENAGDGVNVLTKEVDTLPNIAKNYHAENVSWVAVGDENYGEGSSREHAA

SEQ ID NO: 151422 - protein, 200 aa, Unknown
  Bacterial polypetide isolated from the Sargasso Sea
MKHQIQQKDFNSYGARRGNHEVMMRGTFGNIKIRNEMAPGTEGGFTTLQPDGKVMSVYEAAMEYKKRNNDLVVIAGKEYGTGSSRDWAAKGTKLLGIKAVLAESFERIHRSNLIGMGVLPLQFKEGFDRKKLNITGAELVSVIDIDKGVKPRQEVTCEIKYQDGTSKKIQMLCRIDTANEVEYYKNGGILQYVLRNMLAN

SEQ ID NO: 151423 - protein, 246 aa, Unknown
  Bacterial polypetide isolated from the Sargasso Sea
MKINSKDSFKSLKKLQVDNKIYNIFSLKEAERNGLEGISKLPKSIKVLLENLLRFEDEKSVKKEQILSTKSQLDKKNSKTEIAFRPTRVLMQDYTGIPAVADLAAMRDAVKSKKKDPKKINPLSTVDLVIDHSVMVDTYASKDSFKKNVEKEFLRNEERYSFLKWGQQAFNNFRVVPPGAGICHQVNLEYLSKVVWSSDGFAYPDTLVGTDSHTTMVNGLSVLGWGVGGIEAEAAMLGQPISMLIP

SEQ ID NO: 151424 - protein, 234 aa, Unknown
  Bacterial polypetide isolated from the Sargasso Sea
NFLESVSNKYGIGFWEPGAGIIHQVILENYAFPGGMMIGTDSHTVNAGGLGMIAIGVGGADAVDVMAGMPWELLFPKLIGIKLTGELNGWTSSKDVILKVAGLLSVKGGTGAIIEYFGSGAKNLSCTGKGTICNMGAEIGATTSVFAYDENMAKYLQATGRSEVVELADNYRDYLQADMEVYAEPESYFDQVIEINLSELEPHLNGPFTPDLATPISQMTKVAKKNNWPTKIEV

SEQ ID NO: 151425 - protein, 254 aa, Unknown
  Bacterial polypetide isolated from the Sargasso Sea
TIERDGYLKDLEDIGAVVLANACGPCIGQWKRDDIKEGESNSIVSSFNRNFPARNDGNAETLSFIGSPESVIGLALGGRLDFNFLSDTITDEEGNEISLSPPVAEELPESGFETTLEGFIQPDDGEVEIIIDPESNRLQALVPFSPFEDKNYHSMTVLMKASGKCTTDHISPAGKWLQFRGHLENISQNLFIGVNNAFTENAGEGINQLDNSTMSLPDIAKSYHEEGINWIAVGDENYGEGSSREHAAMEPRFR

SEQ ID NO: 151426 - protein, 125 aa, Unknown
  Bacterial polypetide isolated from the Sargasso Sea
VAGKEYGTGSSRDWAAKGTNLLGAKAVIAESYERIHRSNLIGMGVLPLQFPEGTDRKTLNLDGTEEVDIPDLNNNLKPGDTITVIFRRDGKEQKVAAISRLDTAAEVEYYKNGGILHYVLRQMMQ

SEQ ID NO: 151427 - protein, 285 aa, Unknown
  Bacterial polypetide isolated from the Sargasso Sea
VAGPKRPQDKILLKDISKSFKNLDPTPIIKNKPVNQIQSGDIVIAAITSCTNTSNPFVMIAAGLVAKKAIAFGLNVKPWVKTSLSPGSKVVSDYLDISGLTSNLNKIGFNLVGYGCTTCIGNSGPLKDWISKEIKNKDLSVCSILSGNRNFEGRIHQEVKANYLASPPLVIAYALVGNININIQNDPIGKSIDGKNIFLRDIWPSTKEINKVLEDSISSELFTKRYSEIYQGDENWKSIKSIKNTTYDWKPSSTYIKHPPFFEKSTSKNLIDLTDARILVMLGDS

SEQ ID NO: 151428 - protein, 318 aa, Unknown
  Bacterial polypetide isolated from the Sargasso Sea
AEAAMLGQPIPMLLPEVIGFELTGELGQTTTATDLVLTIVQMLREKNVVGKFVEFYGSGLDSLTIADRCTISNMAPEYGATCGFFPIDSLTIEYLKMTGKDEEHLKIVDNYSKECGFFRDDSQNIKYTDTLSLDMSKVQACLSGPKRPQDRVLLSDVKKISEKEISNLKKTEKTDGIINDGDILIAAITSCTNTSNPSVIIGAGLLAKNAIQKGLSTKDWVKTSLAPGSRVVENYLKKADLLDSLNQLGFNIVGYGCTTCIGNSGPLDEKYVKEINDRDLVVSSILSGNRNFEGRIHPEIKMNFLASPMLCVAYSLVG

SEQ ID NO: 151429 - protein, 208 aa, Unknown
  Bacterial polypetide isolated from the Sargasso Sea
GLSVLGWGVGGIEAEAGMLGQPISMLIPEVMGFEITNKLPEGTTATDLVLTVVKMLRDKGVVGKFVEFYGKGLKNLTLADRATIANMAPEYGATCGFFPIDNETLKYLKFSGRDSQIIDIVETYAKEQGLWESRDIIFTDSLSLDMSTVVPTISGPKRPQDKVLLTAAAKNFKKVFEESSKKNSLTVSKVENEKFSIKDGDILIAAIT

SEQ ID NO: 151430 - protein, 231 aa, Unknown
  Bacterial polypetide isolated from the Sargasso Sea
MGAVIPAISGPKRPQDHLDLRKAKDAFHLEMKNNFKRPVDKLVKVKGQDFSLSSGKVVIASITSCTNTSNPFVMVAAGLVARKARQLGLKSKPWVKTSLAPGSKVVSDYLSRSNLQEDLDCIGFNLVGYGCTTCIGNSGPLSPEISDAIHSGDLVVTSVLSGNRNFEGRISPDIRANYLASPPLVVIYSLCGDMNIDVTSEPLAVSEGGKEIFLKDLWPTSEEVNNVIKAC

SEQ ID NO: 151431 - protein, 140 aa, Unknown
  Bacterial polypetide isolated from the Sargasso Sea
DAVVEYKKREIDLVVMEQGEYGTGSSRDWAAKGTKLLGVKMVIAESFERIHRSNLVGMGILPLQFIDNINRKNLNLLGSELISVIDIENGINPGDKVEVQFKYQSGDIKKIKMLCRIDTKNELEYYKNGGILQYVLRKMI

SEQ ID NO: 151432 - protein, 272 aa, Unknown
  Bacterial polypetide isolated from the Sargasso Sea
MKPGNKNSFNSLKSININGLNYNYYSIAEAEKNGLYGVSKLPKSIKVLLENLLRYEDGKTVTKNQIEAIKEWLNKKKSNTEIAYRPARILLQDYTGIPAVADLAAMRDAVKEKNKDPNSINPLSQVDLVIDHSVQVDQYAKKDSLEKNVEIEFKRNGERYSFLKWGQQAFNNFRIVPPGTGICHQVNLEYLSKVVWSEKHNAKEYLFPDTLVGTDSHTTMVNGLSVLGWGVGGIEAEAGMLGQPISMLIPEVIGFKFTNKLSEGTTATDLVL

SEQ ID NO: 151433 - protein, 198 aa, Unknown
  Bacterial polypetide isolated from the Sargasso Sea
PISMVVPEFIGFEIKGKIKEGITATDLVLTITEKLRKKGVVGKFVEFYGKGLKDLSVPDRATISNMAPEYGATCGFFPTDEETIKFLKVSGRPIEEIRLVEKYSKIQGFWEDYKENKRVYTETMKLDLSCIEPSLAGPKRPQDKILLTNVANKFVSSFENEFGNSKVENPSSVKNEKFKIDNGHVVIAAITSCTNTSN

SEQ ID NO: 151434 - protein, 273 aa, Unknown
  Bacterial polypetide isolated from the Sargasso Sea
MKPGTKNSYRSLSDLMVDGKNFKFYSLSKAESNGLDGISKLPKSLKVLLENLLRYEDDLTVTKNQIEAIKIWLKDKKSKTEIAYRPARVLLQDYTGIPAVADLAAMREAVKEKNKDPNTINPLSAVDLVIDHSVQVDQSAKKDSFDKNVEIEFNRNGERYSFLKWGQQAFNNFRIVPPGTGICHQVNLEYLSKVVWSEDFNNESYLFPDTLVGTDSHTTMVNGLSVLGWGVGGIEAEAGMLGQPISMLIPEVIGFEVKDKMPEGTTATDLVLT

SEQ ID NO: 151435 - protein, 222 aa, Unknown
  Bacterial polypetide isolated from the Sargasso Sea
EDDLSVTKDQIEALKNWVNKKKSNTEIAYRPARVLLQDYTGIPAVADLAAMREAVKEKNKDPNTINPLSSVDLVIDHSVQVDQSAKSDSFEKNVDIEFKRNGERYSFLKWGQQAFNNFRIVPPGTGICHQVNLEYLSKVVWSEKYKGDEYLFPDTLVGTDSHTTMVNGLSVLGWGVGGIEAEAGMLGQPISMLIPEVIGFEFKNKMPEGTTATDLVLTVVKI

SEQ ID NO: 151436 - protein, 306 aa, Unknown
  Bacterial polypetide isolated from the Sargasso Sea
YGHIDSESAINSAIRGVSYDEFNPDRVAMQDATAQMALLQFMMAGKSRVAVPSTVHCDHLIQAKIGSDADLLRAKDSNSEVYDFLESVSKKYGIGFWKPGAGIIHQVVLENYAFPGGMMIGTDSHTVNAGGLGMVAIGVGGADAVDVMVGMPWELKFPKLIGVRLIGKMSGWTSSKDVILKLAGMLTVKGGTGSIIEYFGEGAESISCTGKGTICNMGAEIGATTSIFPYDRNMSRYLKATNRNDLARLADDIEHHLKADEKVYKKPEKFYDEVIEIDLNALEPYVNGPFTPDLATPIPNLKEKQK

SEQ ID NO: 151437 - protein, 180 aa, Unknown
  Bacterial polypetide isolated from the Sargasso Sea
EVMLRGTFGNIRLKNELVPNTEGGITKYFFDGKKTSIFEAAMKYRKNNIPLVVLAGKEYGTGSSRDWAAKGTRLLGVRAVIAESFERIHRSNLIGMGVLPLEFTKGQNRKNLFIRGDEEFTIMNIKSLKPKKTIICEIKNKEKIKKINLLCRIDTAIELQYFQAGGTLHYILNKILLESK

SEQ ID NO: 151438 - protein, 202 aa, Unknown
  Bacterial polypetide isolated from the Sargasso Sea
MKINSKNSFDSIDNLKISGKNYKFFSLKKAEKNGLKGINKLPKSLKVLLENLLRFEDNKTVDKKQINALKDWLKSQSSKTEIAYRPSRVLLQDYTGIPAVADLAAMRDALKSKNKDPNKINPLSTVDLVIDHSVMVDNYANTDSFSKNVEREFNRNSERYSFLKWGQNAFNNFRVVPPGTGICHQVNLEYLSKVCLDNKNSE

SEQ ID NO: 151439 - protein, 218 aa, Unknown
  Bacterial polypetide isolated from the Sargasso Sea
MRSSSVAISIKTVQEQYASLASRVDLWRKTLGRSLTLSEKILFSHLQSDHDLKNLKRGESFLMLNPDRVAMQDATAQMALLQFIQSKRSQVSVPTTVHCDHLIIAHMGVNSDIKVARKDNAEVFDFLKSASQKYGIGFWGPGSGIIHQVVFENYAYPGALMIGTDSHTPNAGGLGMLAIGVGGADAVDVLTGSPWELLNPQYYCCETKRSASVLDQFK

SEQ ID NO: 151440 - protein, 137 aa, Unknown
  Bacterial polypetide isolated from the Sargasso Sea
EYKKRNNDLVVIAGKEYGTGSSRDWAAKGTKLLGIKAVLAESFERIHRSNLVGMGVLPLQFKEGFDRKKLKITGAELVTIIDIEKGIKPRAEVTCEIKFKDGTIKKIQALSRIDTENEIEYYKNGGILQYVLRNMLN

SEQ ID NO: 151441 - protein, 208 aa, Unknown
  Bacterial polypetide isolated from the Sargasso Sea
MAFDIEMIKQVYATMAERVDKAREIVGRPLTLSEKILYSHLWDGNPTTAYTRGKDYVDFAPDRVACQDATAQMALLQFMHANKKTVAVPTTVHCDHLILAKDGAKKDLALANNQSKEVFDFLSSVSDKYGIGFWKPGSGIIHQIVLENYAFPGGMMIGTDSHTVNAGGLGMLAIGVGGADAVDVMSGMSWELKFPKLIGVKLTGKLSG

SEQ ID NO: 151442 - protein, 131 aa, Unknown
  Bacterial polypetide isolated from the Sargasso Sea
LVVIAGKEYGAGSSRDWAAKGTSLLGVKAVIAESFERIHRSNLVGMGVIPLEFIDGLNADELEITGTENVTILGLEEGLRPRSHVSVCIKNLTGKRRVFEVRCRIDTEVEKTYVENGGVLHYVLRKLANSS

SEQ ID NO: 151443 - protein, 164 aa, Unknown
  Bacterial polypetide isolated from the Sargasso Sea
NEMAPGTEGGFTKLFPEGKVMTVYDAVVQYKKRGTDLVVIGGKEYGTGSSRDWAAKGTKLLGVKTVIAESFERIHRSNLIGMGILPLQFIDGMNRSNLNLKGSELISVLNIEKGLSPSDKVELEIKYISGDIKKIKTLCRIDTKNELEYYKNGGILQYVLRNMI

SEQ ID NO: 151444 - protein, 291 aa, Unknown
  Bacterial polypetide isolated from the Sargasso Sea
LSVLGWGVGGIEAEAVMLGQPISMQLPEVIGVELSGKLSDGVTATDLVLNITENLRKLGVVGKFVEFYGDGLKTLNLSERSTISNMAPEYGATCGIFPIDNETLDYLDITGRSDKQIKIVEKYSKEQLIWHTNFEKIKYNEKISINLNKIEPCIAGPKRPQDKINLGDVPKKFKDTLEVEEKIIRQDVNNLTHGKVCIAAITSCTNTSNPSVLIMAGLIAKKAVELGIKVPWWVKTSFAPGSKVVDKYLTKSNLLEYLNKLGFNIIGYGCTTCIGNSGPLDKKVNEEIISK

SEQ ID NO: 151445 - protein, 273 aa, Unknown
  Bacterial polypetide isolated from the Sargasso Sea
DKETLNYLKLTGKTSHHLKIIEEYTKKQNLWFDENYSPDFDEYINLDLNNIEASLAGPKRPQDKIFLKDIPSTFKKVFLNTDKEKKSNENIQNGDIVIAAITSCTNTSNPNVMVAAGLLAKKAIKLGLNKKPWVKTSLAPGSKVVSDYLEKAGLSKYLDELGFNLVGYGCTTCIGNSGPLDEWISNKIKNKKLTVCSILSGNRNFEGRVHQEVKANFLASPPLVVAFALLGTINFDIINKSFGVDKNGKEIFLKDLWPTTSEINNVVSQSLSS

SEQ ID NO: 151446 - protein, 307 aa, Unknown
  Bacterial polypetide isolated from the Sargasso Sea
VDVMGGMPWELKYPKIIGVNLTGQLSGWASPKDVILKLAGILTVKGATNAIVEYFGPGTSQLSATGKGTICNMGAEIGATTSVFPYDEKMAAYLKVTGRERIVPMVEEIKHMLIADDEVTSNPELYYDQVIHIDLSTLEPYINGPFTPDLATPISQFSKKAVENKWPLDLEVGLIGSCTNSSYEDMKRAESIAKQAVEKNLSAKSEFTITPGSEMIRLTVERDGVLDTFDSMGGTVLANACGPCIGQWARHTDDPNRKNSIITSFNRNFAKRNDGNPNTHSFVASPEIVTAMALAGRLDFNPLTDSI

SEQ ID NO: 151447 - protein, 262 aa, Unknown
  Bacterial polypetide isolated from the Sargasso Sea
MKPGTKNSYNSLSEIEINKKKYKFYSLKKAEENGLDGISKLPKSLKVLLENLLRYEDDLSVNKKQIESIQQWLKDKKSKTEIAYRPARVLLQDYTGIPAVADLAAMREAVKEKNKDPNTINPLSAVDLVIDHSVQVDQSAKANSFDKNVEIEFNRNGERYSFLKWGQQAFNNFRIVPPGTGICHQVNLEYLSKVVWCEKFNSENYLFPDTLVGTDSHTTMVNGLSVLGWGVGGIEAEAGMLGQPISMLIPEVIGFELQGKYQ

SEQ ID NO: 151448 - protein, 149 aa, Unknown
  Bacterial polypetide isolated from the Sargasso Sea
DGKVMSVYEAAMEYKKRNNDLVVIAGKEYGTGSSRDWAAKGTKLLGIKAVLAESFERIHRSNLVGMGVLPLQFKEGFDRKKLKITGAELITIIDIEKGIKPRAEVACEIKYKDGTIKKIQALSRIDTENEIEYYKNGGILQFVLRNMLN

SEQ ID NO: 151449 - protein, 158 aa, Unknown
  Bacterial polypetide isolated from the Sargasso Sea
GGNTLYQPSGEKLSIYDAAMRYQAEGVPLVVIAGKEYGTGSSRDWAAKGTNLLGVKAVIAESFERIHRSNLIGMGVLALQFVGDQTRQSLGLNGTEKLSIRGLGADIAPRQMLTVDVERADGSRDSFQVLSRIDTLNEVQYFKAGGILHYVLRQLIGS

SEQ ID NO: 151450 - protein, 122 aa, Unknown
  Bacterial polypetide isolated from the Sargasso Sea
EYGTGSSRDWAAKGTKLLGIKAVIAESFERIHRSNLVGMGILPLEFKAGFDRKKLNIKGTELFTIIDIEKGINPRAEVSCEIKYADGSSKTIKLLSRIDTENEIEYYKNGGILQYVLRNMLN

SEQ ID NO: 151451 - protein, 157 aa, Unknown
  Bacterial polypetide isolated from the Sargasso Sea
LLKWGQQAFKNLRIVPPNNGIIHQINIEYIARVIYEKEGMLYPDTVVGTDSHTTMVNGLGVLGWGVGGIEAEAAMLGQPIPMLLPEVIGFELTGELGQTTTATDLVLTIVQMLREKNVVGKFVEFYGSGLDSLTIADRCTISNMAPEYGATCGFFPN

SEQ ID NO: 151452 - protein, 206 aa, Unknown
  Bacterial polypetide isolated from the Sargasso Sea
GSFKDTTPAGKHLIENSVNVKDFNSYGSRRGNFKIMQRGTFANVRLSNKLVPQKTGGFTKHLPNGNEMSIYDAAQEYKKTDTNLIIFAGKDYGCGSSRDWAAKGTKLLGVKAVIAESFERIHRSNLVGMGIMPLQFNNGDTFDSLGLSMESSFTIESIHKTAKTVFIIEDSSSKKFEVKVRIDTAKEWEYFVNDGILNYVLKKLAN

SEQ ID NO: 151453 - protein, 281 aa, Unknown
  Bacterial polypetide isolated from the Sargasso Sea
VELYCKHQGLWGFNDEPNFNEKLELSLNDVEAVVAGPNKPHQKLPLSALKEEFQKDFSPSEKDVSYNNQEVFKDGSVVIASITSCTNTSNPSLVMGAGLVAKKAVEKGLTIPSYVKTSLAPGSQVATEYLEESGLLTPLETLGFNVAAYGCATCIGNSGPLDESIEKAIKENDMTVAAVLSGNRNFEGRVHPLTKANYLASPPLVIAYALAGTVNIDLENEPLGKDLSGNDVYLKDIWFTSKELLDATKISANSDYYKDIYSDVFNANDQWNALPISGGET

SEQ ID NO: 151454 - protein, 277 aa, Unknown
  Bacterial polypetide isolated from the Sargasso Sea
MLIPDVVGFRLIGALPEGVTATDLVLTVTQMLRRHGVVGRFVEFCGPGLDVLPLADRATIANMAPEYGATCGFFPVDEATLTYLRLTGRDPARVTLVEAYAKAQGLWRDAASPEPMFTDMLELDLATVLPSVAGPRRPQDRVLLKDAAEGLRAELTSGYGKAGELATRVPVNGKDFTLGHGDITIAAITSCTNTSNPSVLVAAGLVARKARALGLVPKPWVRATLSPGSQVVTDYLIRSGLQDDLDALGFALTGYGCMICIGNSGSLDAPISEAINA

SEQ ID NO: 151455 - protein, 234 aa, Unknown
  Bacterial polypetide isolated from the Sargasso Sea
PITDKLINQEGDEVILYPPIGIELPSKGFEYEDNGYIEPSVDGSKIEVVVKENSQRLEILKPFKPWNGQNIIGAKLLIKAFGKCTTDHISMAGPWLRYRGHLDNISNNCLIGAVNAFNQKTNFVKNQLDGEYGAVPDIQRKYKESGIETIVVGDYNYGEGSSREHAAMEPRHLGVKVVLVKSFARIHETNLKKQGMLALTFENESDYDLIQEDDTFNLIDLKDFSPNKSITIEI

SEQ ID NO: 151456 - protein, 159 aa, Unknown
  Bacterial polypetide isolated from the Sargasso Sea
EGGITKFFNTNKQMSIYDAAIEYSKTEIPLVIFAGKEYGTGSSRDWAAKGTKLLGIKAVIAESFERIHRSNLIGMGVLPLQFIGNQNNKSLNLNGSEIITIKSLESIYPNSELFCEIKSSEETKEIKLLCRIDTIKELDYYKQGGILNYVLNSIIKKTS

SEQ ID NO: 151457 - protein, 178 aa, Unknown
  Bacterial polypetide isolated from the Sargasso Sea
IKIKSSSTFNWSINSTYIKKPPFLENELSKSNDIFEARPLLILGDSITTDHISPAGFIKEKSEAGKYLLERQIKNDNFNSFGARRGNHEIMVRGTFSNLRIKNLMVNRQGGYSKHFPSEIEDEVYNIAEMYSNQKVPLIVVAGKEYGTGSSRDWAAKGTKLLGVRVVLAESFERIHRS

SEQ ID NO: 151458 - protein, 171 aa, Unknown
  Bacterial polypetide isolated from the Sargasso Sea
GNIRIRNEMAPGTEGGFTILQPDGKQMSVYEAAEEYKKRGNSLVVIAGKEYGTGSSRDWAAKGTKLLGIKAVIAESFERIHRSNLVGMGILPLEFKAGFDRKKLNIKGTELFTIIDIEKGINPRAEVSCEIKYADGSSKTIKLLSRIDTENEIEYYKNGGILQYVLRNMIN

SEQ ID NO: 151459 - protein, 263 aa, Unknown
  Bacterial polypetide isolated from the Sargasso Sea
MIPGKKNSFKSLKIININGDEYSYYSLIEAEKNGLQGISKLPKSLKVLLENLLRYEDDISVTKNQIEAIKNWLKNKKSNTEIAYRPARVLLQDYTGIPAVADLAAMREAVKKKNKDPNNINPLSQVDLVIDHSVQVDKFAEKNSIDQNVEIEFQRNNERYSFLKWGQQAFNNFRIVPPGTGICHQVNLEYLSKVVWSEKFNGKNYLFPDTLVGTDSHTTMVNALSVLGWGVGGIEAEAGMLGQPISMLIPEVIGFKITNKLPE

SEQ ID NO: 151460 - protein, 243 aa, Unknown
  Bacterial polypetide isolated from the Sargasso Sea
VKANYLASPPLVVAYAIAGSMNLDLYKDSLGKDANGKDIFLKDIWPSNQEIEEVLKNSLNPEMFINRYSNISNGPEQWQKIKTESSSIYNWDDNSTYVKKPPFFENLSDEPEGFKEIKDARPLLILGDMVTTDHISPAGTIQKESPTGEYFMHHQILPKDYNSYGARRGNHEVMTRGTFGNIRIRNEIASGTEGGYTKIFPENKVMSIYDAAIEYKKRGTDLIVVGGNRVWNWILKRLGCQGD

SEQ ID NO: 151461 - protein, 191 aa, Unknown
  Bacterial polypetide isolated from the Sargasso Sea
FNQYGTRRGNHEVMMRGTFANIRIRNHMLGPNGKEGGYTIHYPSKEEMSIFDAAMEYKKEGVPLVIFAGGEYGNGSSRDWAAKGTNLLGVRAVIAESYERIHRSNLVGMGVIPFTFEDGATWESLGLKGDETVTIEGLADIKPREKKIAKVTFADGTIKDVPILCRIDTLDELTYVNNGGILQTVLRDLAA

SEQ ID NO: 151462 - protein, 263 aa, Unknown
  Bacterial polypetide isolated from the Sargasso Sea
MAPGSRVVTSYLEKSGLDKHLNNLGFNTVGFGCTTCIGNSGPLDQDISEEIEHSNLVVASVLSGNRNFEGRIHPLVKANFLASPLLVIAYSITGTVDVDLTSDPLGKDKNGRNVFLSDVWPSSKEIQDKIDNSINSEMYNEQYSKAIAGNLEWNNLSSDAGENYNWDKESTYIQKAPFFDNFSREIDPPKPIENARLLCLLGDSVTTDHISPAGSIPELAPSGQFLISNDVPRIQFNSYGSRRGNHNIMARGTFGNIRLRNML

SEQ ID NO: 151463 - protein, 304 aa, Unknown
  Bacterial polypetide isolated from the Sargasso Sea
FGTVRSSLSGPKRPQDKIFLNNVKDVFSKEFHNLNNDPENLSDGSVVVAAITSCTNTSNPSVMMGAALLAKKIYQKGLSPKPWVKTSMAPGSRVVTSYLEKSGLDKYLDLLGFNTVGFGCTTCIGNSGPLDQNISEEIEHSNLTVASVLSGNRNFEGRIHPLVKANFLASPLLVIAYSIAGTVDIDLTNSSLGKDESGKEVFLSDVWPSSKEINYEISKSINSNMYNEQYSNAIKGNIEWNNLSSDTGENYNWDNESTYIQRAPFFDNFSKEVKSPKPVKNARVLCLLGDSVTTDHISPAGSIT

SEQ ID NO: 151464 - protein, 180 aa, Unknown
  Bacterial polypetide isolated from the Sargasso Sea
MFKERYKEIYKGDDNWKLINNSKKTTYDWNDTSTYIKHPPFFDSQNKFELKDINEARILALLGDSVTTDHISPAGSIKEDSPAGLYLKERQINSKNFNSYGSRRGNHEIMMRGTFANIRIKNLILDNVEGGFTKSFISNKQMSIYDAAQEYINSNIDTVIIAGKDMAQVRPEIGQQRAQD

SEQ ID NO: 151465 - protein, 241 aa, Unknown
  Bacterial polypetide isolated from the Sargasso Sea
MKPGNINTFKSLKSINIDNRSYKFYSLKESEKNGLSGISKLPKSLKVLLENLLRYEDDLSVNKKQIKAVHEWLNEKRSKTEIAYRPARVLLQDYTGIPAVADLAAMREAVKEKNKDPNTINPLSSVDLVIDHSVQVDQSAQSDSFEKNVDIEFKRNGERYSFLKWGQQAFNNFRIVPPGTGICHQVNLEYLSKVVWSEKYKGEDYLFPDTLVGTDSHTTMVNGLSVLGWGVGGIEAEAGML

SEQ ID NO: 151466 - protein, 255 aa, Unknown
  Bacterial polypetide isolated from the Sargasso Sea
MIAAITSCTNTSNPSVLLAAGLLAKKAVEAGLEVAPHIKTSLAPGSRVVTKYLEAAGLLPYLEKLGFGVTAYGCTTCIGNAGDLTPELNDAIVKNDIVAAAVLSGNRNFEARIHPNIRANFLASPPLVVAYAIAGNVTRDLMTEPVGKGKKGKDVYLGDIWPTSDEIAKLMKFAMNADTFRTNYEQVKKPSKLWANVKGTKGQVYDWPKSTYIAEPPFFESFGMTPAVASASVKGARALGVFGDSVTTDHISPAG

SEQ ID NO: 151467 - protein, 218 aa, Unknown
  Bacterial polypetide isolated from the Sargasso Sea
MKFNSKNSFKSLDNISSSGRNYKIFNLKKAEKHGLDGISKLPKSLKVLLENLLRCEDDLTVDKKQILAIKEWLKNKKSNTEIAYRPARVLMQDYTGIPAVADLAAMRDAVKDKNKDPEKINPLSTVDLVIDHSVMVDEYASGKSFDKNVEREFSRNGERYSFLKWGQKAFDNFRVVPPGTGICHQVNLEYLSKVVWSSKSGKDLYAYPDTLVEQTATL

SEQ ID NO: 151468 - protein, 293 aa, Unknown
  Bacterial polypetide isolated from the Sargasso Sea
LERMSPVIQNRDGVAFPDTLVGTDSHTPHVDALGVIAVGVGGLEAESVMLGRASYMRLPDIVGVELTGKPQPGITATDIVLALTEFLRKERVVSAYLEFYGEGASHLTLGDRATISNMTPEYGATAAMFYIDQQTIDYLRLTGREEKQIALVEQYAKHTGLWADDLETAEYERVLTFDLSAVGRNMAGPSNPHARLPTSDLESRGIAAKWEEEDGKMPDGAVIIAAITSCTNTSNPRNVIAAGLLARNANARGLTRKPWVKSSLAPGSKAVKLYLEEANLMSELEDLGFGVVA

SEQ ID NO: 151469 - protein, 284 aa, Unknown
  Bacterial polypetide isolated from the Sargasso Sea
KVVGFRLSGELPAGVTATDMVLTITQQLRQHGVVGKFVEFYGPGLKHLTTADRATIANMAPEYGATCGIFPIDDVALDYLRLTGRDEAQITLVETYAKSSNLWHDDFTKDAQYHETLELNLNEVVPSIAGPKRPQDKIALDNAAEAFNEWHKSQIDVQVIEEEAKFVAEGGVAPEIDEEHDSYVEFGGKKFNLEDGAIVIAAITSCTNTSNASVLIGAGLLAQKAVEKGLARKPWVKTSLAPGSQVVTQYLEDAQLMDPLKALGFKKVGYGCTTCMEIQVLCLT

SEQ ID NO: 151470 - protein, 156 aa, Unknown
  Bacterial polypetide isolated from the Sargasso Sea
EGGFTKIIPSGEITSIYEASLKYFENRTPLIVLAGKEYGTGSSRDWAAKGTSLLGIKAVVASSFERIHRSNLVGMGVLPLQFKENQTHKSLGLSGEEEYAVLGLNDNLQPGQDLILQAGEKKIPVTSRLDTQIEIEYYKNGGILHTVLRKFLRENK

SEQ ID NO: 151471 - protein, 134 aa, Unknown
  Bacterial polypetide isolated from the Sargasso Sea
KKRGTDLVVIGGKEYGTGSSRDWAAKGTKLLGVKAVIAESFERIHRSNLIGMGILPLQFINNINKNNLNLIGSELITVIEIEKGINPLDKVFLEIKYASGDIKKIETLCRIDTKNELEYYKNGGILQYVLRNMI

SEQ ID NO: 151472 - protein, 192 aa, Unknown
  Bacterial polypetide isolated from the Sargasso Sea
MKFNSKNSFKSLDNISSSGKEYKIFNLKIAEKNGLDGISKLPKSLKVLLENLLRYEDDITVDKKQILAIKEWLKNKRSNTEIAYRPARVLMQDYTGIPAVADLAAMRDAVKDKNKDPEKINPLSTVDLVIDHSVMVDEYASGKSFDKNVEREFSRNGERYSFLKWGQKAFDNFRVVPPGTGICHQVNLEYLS

SEQ ID NO: 151473 - protein, 177 aa, Unknown
  Bacterial polypetide isolated from the Sargasso Sea
SYDERTFGNIRIRNEMAPGTEGGFTKIYPEEKIIPIYEAVVEYKKRGTDLVVIGGKEYGTGSSRDWAAKGTKLLGVKAVIAESFERIHRSNLIGMGVLPLQFKDGMDRLNLNFVGSELISVIDLEKGVGPKDIVKIEIKYATGDIKIIETLCRIDTKNEMEYYKNGGILQYVLRKMI

SEQ ID NO: 151474 - protein, 313 aa, Unknown
  Bacterial polypetide isolated from the Sargasso Sea
MDLSVTPASLVSSVYEKLTENINSLRARKDAPLTLAEKLLFGHATDISSVSLNKGEDYGDFAPDRVAMQDATAQMALLQFMQADLPETAVPTTVHCDHLIQAYEGASTDLQVANKTHKEVFDFLRTASEKYEIGFWGPGAGIIHQVVLEQYAFPGGMMIGTDSHTPNAGGLSMIAIGVGGADAVDVMAGMPFNTKIPSLIGVKLTGSLSGWTSPKDIILKVAEILTVKGATNAIVEYFGEGTQTISTTGKATITNMGAEIGATCSIFPYDEKGSDYLKATGREEIAELANSRMDLLTADEEVLKNPENYSIKL

SEQ ID NO: 151475 - protein, 256 aa, Unknown
  Bacterial polypetide isolated from the Sargasso Sea
MKPGTKNSYKSLSEIKINNKNYKIFSLSKAEENGLSGISKLPKSLKVLLENLLRYEDDLSVNKNQIEAIKNWLVEKKSKTEIAYRPARVLLQDYTGIPAVADLAAMRDAVKEKNKDPKTINPLSAVDLVIDHSVQVDQSAKSDSFDKNVEIEFNRNGERYSFLKWGQQAFDNFRIVPPGTGICHQVNLEYLSKVVWSAKYKNDDYLFPDTLVGTDSHTTMVNGLSVLGWGVGGIEAEAGMLGQPISMLIPEVIGLK

SEQ ID NO: 151476 - protein, 380 aa, Unknown
  Bacterial polypetide isolated from the Sargasso Sea
FAPDRVAMQDATAQMALLQFMQAGMEKTAVPSTVHCDHLIQAYEGASSDLAVANQTHKEVFDFLRSASQKFGIGFWGPGAGIIHQVVLEQYAFPGGMMIGTDSHTPNAGGLGMVAIGVGGADAVDVMAGMPFNTKIPKLIGVKLTGSLSGWSSPKDIILKVAEILTVKGGTNAIVEYFGEGTSSISTTGKSTITNMGAEIGATCSIFPYDSKGNDYLVSTGRSDIAELASTRTDLLTADQEVLDEPDKYFDQVIEIDLDTLEPHIVGPHTPDLARPITDLKEDVEENEYPIKISSALIGSCTNSSYEDIGRAAFIAREAAKHGLKAKVPLMVTPGSEQTRATIERDGYLKDLEDIGAVVLANACGPCIGQWKRDDIKEGE

SEQ ID NO: 151477 - protein, 210 aa, Unknown
  Bacterial polypetide isolated from the Sargasso Sea
MTFINSLKTCKNLTIDKVIYKYFDLNTLADLYNFELSKIPNSIKIILENLIRNEDGEAVTREMIDNLCKKISEPKENYEISFTPSRVLMQDFTGVPAVADLAAMRDALQKKGINPNKINPLSRVDLVIDHSVMVDSFGSDNALEQNVKKEFERNKERYEFLKWGQKTFNNFYLAPPGGGICHQVNLESIARTIWSNKIKNDNYLYPDSGV

SEQ ID NO: 151478 - protein, 483 aa, Unknown
  Bacterial polypetide isolated from the Sargasso Sea
MANYLRATGRSEVANIADLNADNLRSDKEVLSNPNNYFDQLIEIDLSKLEPHINGPFTPDKATPISKMRSEAEKEGWPVNIQVGLIGSCTNSSYEDISRAASIAKQAVDNGLKTKARFTITPGSEQVRFTIERDGFIDIFEKLGADVFANACGPCIGQWARSGSEKEEKNTIVHSFNRNFAKRADGNPNTHAFVASPELVTALAISGNLTFNPEVDFITDKDGNKVKLNPPVGFDLPQNGFEVEDLGYQAPAANGSNIEVKVDPGSTRLQLLTPFDPWDNKNYIGMRLLIKAKGKCTTDHISMAGPWLKYRGHLDNISDNMLTGAVNYFNSKTNCVKNHLTGEYLPVPQTQRQYKDAGIPTIVVGDENYGEGSSREHAAMEPRHLGVRVVLVKSFARIHETNLKKQGMLGLTFADKSDYDKINEDDIFDLIDIDSFSEGNTLTMLVHHNDGNKEKVICNHTYNETQIDWFRAGSALNLIRSQN

SEQ ID NO: 151479 - protein, 417 aa, Unknown
  Bacterial polypetide isolated from the Sargasso Sea
CKNQGNWHDNNFDKINYHVLEEINLNSIEHCVSGPSRPQDRIKLNEVKKTYGNSLNSLELKELIIHESNKKLFGHGKVCLAAITSCTNTSNPSVLIMAGLIAQKAVELGIKIPWWVKTSFAPGSRVVEKYLEDANLINPLNSLGFDIVGYGCTTCIGNSGPLSKKVSELIESGDLNVCSVISGNRNFEGRIHPLIKSNFLASPPLVIIYAIAGTVNIDLLKTPLTILDGKKIFFKDLWPSSNEVDSVMNKVLSRKIFKKNYSKIFEGDNNWKNLKINKSDTFNWSISSTYIKKPPFFEMKSKKINKDFKGRPLLILGDSITTDHISPAGVIKEDSVAGEYLSQRQVKTSEFNSYGARRGNHEIMVRGTFANIRIKNKMVNIQGGFTKHYPSKKKGEIFKISEKYKKDNVSLVVFAGK

SEQ ID NO: 151480 - protein, 362 aa, Unknown
  Bacterial polypetide isolated from the Sargasso Sea
MFDFEIIKDLYANLSERIDFAKNILNRPLTYTEKILYSHLFDPKFNNEFLRAKSYVEFSPDRVAMQDATAQMALLQFMMAGKVKVAKPTTVHCDHLIQAKIDAEKDLSVALDTNGEVYNFLESVSNKYGIGFWEPGAGIIHQVILENYAFPGGMMIGTDSHTVNAGGLGMIAIGVGGADAVDVMAGMPWELLFPKLIGIKLTGELNGWTSSKDVILKVAGLLSVKGGTGAIIEYFGSGAKNLSCTGKGTICNMGAEIGATTSVFAYDENMAKYLQATGRSEVVELADNYRDYLQADMEVYAEPESYFDQVIEINLSELEPHLNGPFTPDLATPISQMTKVAKKNNWPTKIEVSLIGSCTNSS

SEQ ID NO: 151481 - protein, 182 aa, Unknown
  Bacterial polypetide isolated from the Sargasso Sea
NHEIMMRGTFANIRIKNEMLDNVEGGYTIHYPSKKQMSIYDAAIKYTKSQTPLVVIAGKDYGMGSSRDWAAKGTNLLGVKAVIAESYERIHRSNLIGMGVLPFVFKDGENRKSLKLEGPEKITISGVNDNLKPQSFYNAMIVYKSGKNISTKIKLLVNTSTEVEYLKSGGILQFVLKELVNS

SEQ ID NO: 151482 - protein, 435 aa, Unknown
  Bacterial polypetide isolated from the Sargasso Sea
MFDFDLIKDLYENLSERVDFAKSILKRPLTYSEKILYSHLFENNFDSEYIRSKSYVEFSPDRVAMQDATAQMALLQFMMAGKSKVAKPTTVHCDHLIQAKVDAKKDLSVALDSNGEVYDFLESVSNKYGIGFWKPGAGIIHQVILENYAFPGGMMIGTDSHTVNAGGLGMVAIGVGGADAVDVMAGMPWELLFPKLIGIKLIGELNGWTSSKDIILKVAGLLSVKGGTGAIVEYFGPGAKRLSCTGKGTICNMGAEIGATTSIFGYDENMAKYLHSTGRSQVAELADKFKNYLQADNEVYADPELFFDQVIEIDLSQLEPHLNGPFTPDKATPISEMANEAKKNDWPTKIEVSLIGSCTNSSYEDISRSASIAKQAIDKNLIVKSDFTITPGSEQVRYTVNRDGLLEVFEKIGGIVLANACGPCIGQWDRHTNDP

SEQ ID NO: 151483 - protein, 446 aa, Unknown
  Bacterial polypetide isolated from the Sargasso Sea
MDLSKTHIELVQEVYKNLESKISDFKTRKDSSLTLAEKVLYGHAKDVKNISLNTGKDFGDFLPDRVAMQDATAQMALLQFMQAELPETAVPTTVHCDHLIQAYEGANSDLKVANKTHKEVFDFLRTASEKFNIGFWGPGAGIIHQVVLEQYAFPGGMMIGTDSHTPNAGGLGMIAIGVGGADAVDVMAGMPFNTKIPKLIGVKLTGKLSGWTAPKDIILKVAEILTVKGGTNAIVEYFGEGTESISTTGKATITNMGAEIGATCSIFPFDVKGEEYLKATGRGDIASLARENMHLLTPDDDVVVNPENYFDQVIEIDLDSLEPHVVGPHTPDLARPVSKLKDDAVENSYPLEISNALIGSCTNSSYEDIGRAAFIAREAAKKGLKSKVPLMVTPGSEITRATIERDGYLKDLEAIGATVLANACGPCIGQWKRDDMKKDKLTQFLF

SEQ ID NO: 151484 - protein, 286 aa, Unknown
  Bacterial polypetide isolated from the Sargasso Sea
EQFQNRYGNVWSSNERWNAVPTTEGELYDWQGDSTYVQEPPFLAELTREATPPVSVSGARVLLALGDSVTTDHISPAGAIAKDSPAGRYLVENGVPPEEFNSYGARRGNDRVMTRGTFANIRIRNLLAPGTEGGVTRLLPEGEQMAVYDAAMQYRERGVPLVVLAGAEYGTGSSRDWAAKGTMLLGVRAVLATSFERIHRSNLVGMGVLPLVLPKGWQELGLTGEETFDIPFDDLTPRSTLEVTATRANGTTVSLPCTVRIDTPVELDQFKVGGILPFVLRKLLAS

SEQ ID NO: 151485 - protein, 490 aa, Unknown
  Bacterial polypetide isolated from the Sargasso Sea
TSDLESRGIAAKWTEEEGKMPDGAVIIAAITSCTNTSNPRNVIAAGLLARNANARGLTRKPWVKSSLAPGSKAVKLYLEEANLMSELEDLGFGVVAFACTTCNGMSGALDPKIQQEIIDRDLYSTAVLSGNRNFDGRIHPYAKQAFLASPPLVVAYAIAGTVRFDIEKDILGTDKEGNPVTLKDIWPSDEEIDAIVAKSVKPEHFRKVYEPMFDLSVDYGKDINPLYDWREMSTYIRRPPYWEGAMDAERTMKGMRPLAILGDNITTDHLSPSNAILASSAAGEYLHKMGLPEEDFNSYATHRGDHLTAQRATLANPKVFNEMVLENGEVKQGSLARVEPEGQVMRMWEAIETYMNRRQPLIIVAGADYGQGSSRDWAAKGVRLAGVEVIVAEGFERIHRTNLIGMGVLPLEFKPGTTRKTLELDGTETYDVSGEPSPGATLTLVVNRQNGEQLEVPVTCRLDTAEEVSIYSAGGVLQRFAKDFLEAEAS

SEQ ID NO: 151486 - protein, 867 aa, Unknown
  Bacterial polypetide isolated from the Sargasso Sea
MTTAMNTLYRKPLPGTALDYFDTREAVEAISPGAYAKLPYTSRVLAENLVRRCEPEALTASLKQIIESKQELDFPWFPARVVCHDILGQTALVDLAGLRDAIAAKGGDPAQVNPVVPTQLIVDHSLAVEYGGFDKDAFAKNRAIEDRRNEDRFHFINWTQKAFKNIDVIPQGNGIMHQINLERMSPVVHARDGVAFPDTLVGTDSHTPHVDALGVIAIGVGGLEAESVMLGRASYMRLPDIIGVELTGKPQPGITATDIVLALTEFLRKEKVVSSYLEFFGEGAEALTLGDRATISNMTPEFGATAAMFYIDQQTLDYLTLTGRSDEQVKLVETYAKTTGLWSDDLKHAEYPRTLRFDLSSVVRTIAGPSNPHARVPTSELAARGISGVVENEPGLMPDGAVIIAAITSCTNTSNPRNVIAAGLLARNANTKGLSRKPWVKTSLAPGSKAVQLYLEEANLLPELESLGFGIVGFACTTCNGMSGALDPVIQQEVIDRDLYATAVLSGNRNFDGRIHPYAKQAFLASPPLVVAYAIAGTIRFDIEKDVLGHDKDGNPVRLIDIWPSDAEIDAVIAKSVKPEQFRKVYEPMFDLSVDYGDKVTPLYDWRPQSTYIRRPPYWEGALAGERTLKGMRPLAVLGDNITTDHLSPSNAIMMDSAAGEYLHKMGLPEEDFNSYATHRGDHLTAQRATFANPKLKNEMAIVDGKVKQGSLARIEPEGQVTRMWEAIETYMDRKQPLIIIAGADYGQGSSRDWAAKGVRLAGVEAIVAEGFERIHRTNLVGMGVLPLEFKAGENRATYGIDGTEVFDVYGDIAPRADLTVIITRKNGERVEVPVTCRLDTAEEVSIYSAGGVLQRFAQDFLESNLK

SEQ ID NO: 151487 - protein, 302 aa, Unknown
  Bacterial polypetide isolated from the Sargasso Sea
MFDLNIIKAFYEEIPNRISDARKLIDRPLTLTEKILYSHLNKNPSSPFDRGKSYVEFHPDRVAMQDATAQMALLQFMMSGKNKVSVPSTVHCDHLIQAKIDAKADLMLAQDINNEVYDFLESVSNKYGIGFWKPGAGIIHQVILENYAFPGGMMIGTDSHTVNAGGLGMVAVGVGGADAVDVMAGMPWELKFPKLIGVKLIGEMKGWTSAKDIILKVAGILTVKGGTGAILEYFGEGADKMSCTGKGTICNMGAEIGATTSIFAYDDHMANYLSATGRSEVADLANEIKDHLKADKDVYSNP

SEQ ID NO: 151488 - protein, 353 aa, Unknown
  Bacterial polypetide isolated from the Sargasso Sea
AYREALQKKGIDSKDIQPDVPVDLVIDHSLQVDYFGNDKAEIENLKKEYERNSERFSFLRWCSKFLDKVNVIPPGVGICHQVNIEYLSKVVWREKKKDLNLIHPDTCIGTDSHTPMVNAIGVLGWGVGGVEAEISMLGKTIPMTVPEIVGVNLKNQLKEGITSTDLVLYITKLLRKNKVVGSFIEFCGEGVESLTVGDRATISNMAPEYGATAVLFPVDNSTLEYLRMTGRTDEEIQVVEEYSKHQKLWRRSDITPDYNRVLNLDLSSIEPCVSGPKNPEDKINLNKFSNEINSHSNILYSQDLREDEFEVPNLSYKVKDADIMIAAITSCTNTANPKNVIAAGLIAKKLVEL

SEQ ID NO: 151489 - protein, 244 aa, Unknown
  Bacterial polypetide isolated from the Sargasso Sea
MKPGNKNSYKSLKTINVNGKNYKYYSLLEAEKNGLSDISKLPKSLKVLLENLLRYEDDTSVTKDQIEAIKNWILEKKSSTEIAYRPARVLLQDYTGIPAVADLAAMREAVKEKNKDPNTINPLSSVDLVIDHSVQVDQSAKPDSFEKNVDIEFKRNSERYSFLKWGQQAFNNFRIVPPGTGICHQVNLEYLSKVVWSEKYQEDEYLFPDTLVGTDSHTTMVNGLSVLGWGVGGIEAEAGMLGQP

SEQ ID NO: 151490 - protein, 432 aa, Unknown
  Bacterial polypetide isolated from the Sargasso Sea
SELLGRNDIADAANNVKEHLTADSEVYNNPEKYFDQVIEINLNELTPHINGPFTPDLATPVSEMKSKAKSNNWPIKIEWGLIGSCTNSSYEDLSRAASIAQQAVEKKLNTKADFGINPGSEQVRYTAERDGLLEIFEKLNAKIFTNACGPCIGQWDRDGAENHEKNSIIHSFNRNFAKRADGNPNTHAFVASPEIVAAIAISGRLDFNPITDKLINEEGNEVFLDPPKGNELPDLGFDVKENGYLEPVSDGSDLTVEVSDKSERLQLLDPFQPWDGSNIKGLKLLIKAHGKCTTDHISMAGPWLRFRGHLDNISNNCLIGAVNSFNNKTNLVKNQITGEYGGVPDTQREYKKNNIPSIVVGDHNYGEGSSREHAAMEPRHLGVKVVLVKSFARIHETNLKKQGMLGITFDNEKDYDLIEEDDTFNFIDLKNF

SEQ ID NO: 151491 - protein, 226 aa, Unknown
  Bacterial polypetide isolated from the Sargasso Sea
MDLSVTPASLVSSVYENLSENIKKLRERKNAPLTLAEKLLFGHATDIDTVSLNKGEDYGDFAPDRVAMQDATAQMALLQFMQADLPETAVPTTVHCDHLIQAYEGAASDLQVANKTHKEVFDFLRTASEKYEIGFWGPGAGIIHQVVLEQYAFPGGMMIGTDSHTPNAGGLSMIAIGVGGADAVDVMAGMPFNTKIPSLIGVKLTGSLSGWTSPKDIILKVAEILT

SEQ ID NO: 151492 - protein, 142 aa, Unknown
  Bacterial polypetide isolated from the Sargasso Sea
SIFEAAEEFRSSDTDLIVLAGKEYGTGSSRDWAAKGVSLLGVKAVIAESYERIHRSNLIGMGVLPLEFNNGESAESIGLNGFESFDIDSITKDSRVLSVKAKSIDGEVNTFEVKIRIDTPKEWEYFEHGGILHYVIRRLVAK

SEQ ID NO: 151493 - protein, 260 aa, Unknown
  Bacterial polypetide isolated from the Sargasso Sea
MKPGNQNSFNSLKELNINGKNYSIYSLKEAEKNGLEGINKLPKSIKVLLENLLRYEDNITVNKQQILSIKDWLNTKKSKTEIAYRPARVLLQDYTGIPAVADLAAMRDTVKEKNKDPNKINPLSSVDLVIDHSVQVDKFATKNSLKENVDIEFDRNFERYSFLKWGQQAFDNFRIVPPGTGICHQVNLEYLSKVVWNERFEEKEYLFPDTLVGTDSHTTMVNGLSVLGWGVGGIEAEAGMLGQPISMLIPEVIGFQMKNK

SEQ ID NO: 151494 - protein, 283 aa, Unknown
  Bacterial polypetide isolated from the Sargasso Sea
MSDHTNSFSIKEKTYKYYDLKSLDSEKVDRLPFTHKILLENALRHAENDHEGPKDVETILNWNPKSDQSTEISFTPSRVILQDFTGVPAVVDLATMRDAVVSMQGDPKDINPLSPAELVIDHSVQVDHFGSLDALEKNNKVEFQRNQERYRFLRWGQDAFSNFEVVPPNTGIVHQVNLEYLGRVVFSKDDSLAYPDTLVGTDSHTTMINGIGCLGWGVGGIEAEAAMLGQPITMLLPEVIGVSVKGSLKEGVTATDLVLTLTEILRNYGVVGKFVEFFGDGLD

SEQ ID NO: 151495 - protein, 238 aa, Unknown
  Bacterial polypetide isolated from the Sargasso Sea
GFIDPEKFSSKEIEIDIDPNSKRIQLLKPFDSWDGKNIKNLKLLIKVKGKCTTDHISMAGPWLFYRGHLDNISNNLLIGAINYFNDESNHIKNQIDGSYGEVPDVQRQYRSKNIPTIVVGDENYGEGSSREHAAMEPRYLGVRVVLVKSFARIHETNLKKQGMLALTFKNKEDYNMILEDDTLDLINLNEFSVGKSIKIKITHSDGSSDIINCNHTYNTSQIEWFRAGSALNLIRSKQ

SEQ ID NO: 151496 - protein, 478 aa, Unknown
  Bacterial polypetide isolated from the Sargasso Sea
MAFDINVIKTVYAKMSSKIDNARKIVGRPLTYSEKILYSHLWDESSKTVFKRGEDYVDFGPDRVTCQDATAQMALLQFMQAGKDKVAVPTTVHCDHLILAQSGAQKDLKNANKVSSEVFNFLESVSRKYGIGFWKPGAGIIHQVILENYAFPGGMMIGTDSHTVNAGGLGMVAIGVGGADAVDVMAGMPWELKFPKLIGIKLTGKLNGWASAKDVILKVAGILTVKGGTGYILEYFGDGAESLSCTGKGTICNMGAEVGATTSIFAYDESMERYLKSTEREDVVKAASNIKDNLKADQEVYDNPEKYFDEVIEIDLDSLIPHINGPFTPDLATPVNEMKDKAKSEGWPTDIKWGLIGSCTNSSYEDLSRAASIAKQALEKNIKIKSKLGINPGSEQVRYTAERDGIIELFEKLESKIFTNACGPCIGQWNREGEDNTEKNSIIHSFNRNFAKRADGNPNTHAFVTSPEMVMAVALSGN

SEQ ID NO: 151497 - protein, 860 aa, Unknown
  Bacterial polypetide isolated from the Sargasso Sea
MLSAYRELAADREAQGIPALPLTAEQTQGLTELLQQPPAGEDEALLHLLIERIPPGVDEAAYVKATWLSAVAQGQATTPLVSPLDATRLLGTMVGGYNVAALIELLQHSDEQLASCAAEGLSRTLLVYDAFNDVMELAASNRFANQVVDSWAAAEWFTRREPLADTITVTVFKVEGETNTDDLSPATHATTRPDIPLHALAMLETRDPEGLTTIAALKEKGHPVAYVGDVVGTGSSRKSAINSVLWHTGNDIPHVPNKRGGGVILGGKIAPIFFNTAEDSGALPIECDVTVLNTGDVITIRPHAGTIERDGEVVSRFELKPSTISDEVRAGGRIPLMIGRALTDKVRAQLGLTPSDAFIRPSAPADTGKGFTLAQKMVGKACGLPGVRPGTSCEPLMTTVGSQDTTGPMTRDEMKELACLGFSSDLVMQSFCHTAAYPKPVDLQTQKDLPDFFAQRGGVALRPGDGIIHSWLNRMLLPDSVGTGGDSHTRFPLGISFPAGSGLVAFAAAIGAMPLDMPESVLVRFSGSLQPGVTLRDVVNAIPWVAIQKGLLTVEKANKKNVFNGRIMEIEGLPDLKLEQAFELTDATAERSCAGCTIKLSEATVSEYLRSNVALLKNMIARGYSDAKTLARRIKAMEAWLANPQLLSADPDAQYAEVLEINLDELTEPVLACPNDPDNVKLLSEVAGDPVQEVFIGSCMTNIGHYRAAAKVLEGSGSNKARLWVCPPTRMDEETLKAEGYYATFEAAGSRMEMPGCSLCMGNQARVEDNTTVFSTSTRNFNNRLGKGAQVYLGSAELAAVCALLGRIPTADEYRSIAAEKIDPLSDELYRYLNFDQISGFEDQGRVMSADEEAAVLAEA

SEQ ID NO: 151498 - protein, 504 aa, Unknown
  Bacterial polypetide isolated from the Sargasso Sea
CWTSAKDVILKVAGILTVKGGTGYIIEYFGDGAESLSCTGKGTICNMGAEVGATTSIFAYDDSMERYLISTDRQDVVEAASIIKHELRSDDEVYKNPEKYYDQIIEIDLDKLSPHINGPFTPDLATPVSEMKAKVESEGWPNEIQWGLIGSCTNSSYEDLSRAASIAQQALENKIKIKSKLGINPGSEQVRFTAERDGIIDIFEKLESKIFTNACGPCIGQWNREGEDKSEKNSIIHSFNRNFAKRADGNPNTHAFVSSPEMVMAVALSGKLDFNPLTDKLMNEDGEEIILSPPIGDELPSKGFACEDNGYIEPPLDGKDIEIIINPESQRLQKLEPFLPWDGKNIMNARLLIKAHGKCTTDHISMAGPWLRFRGHLDNISDNCLIGAVNHFNMKTNSVKNLITGDYGPVPETQRFYKKNNIDTIVVGDHNYGEGSSREHAAMEPRHLGIKVVIVKSFARIHETNLKKQGMLALTFDNESDYDKIQEEDAFNFIDLESFSPGNH

SEQ ID NO: 151499 - protein, 674 aa, Unknown
  Bacterial polypetide isolated from the Sargasso Sea
MNIDYRKPLPNAGIDFFDTREAVDAIEPGAYAKLPYTSRVLAENLVRKCAPEMLTDSLKQLIYRKRDLDFPWFPARVVCHDILGQTALVDLAGLRDAIAEKGGDPAKVNPVVPTQLIVDHSLAVEHAGFEKDAFEKNRAIEDRRNDDRFHFINWTKTAFKNVDVIPPGNGIMHQINLERMSPVIQARDGVAFPDTLVGTDSHTPHVDALGVIAVGVGGLEAESVMLGRASYMRLPDIVGVELTGKPQPGITATDIVLALTEFLRKERVVSAYLEFYGEGASHLTLGDRATISNMTPEYGATAAMFYIDQQTIDYLRLTGREEKQIALVEQYAKHTGLWADDLETAEYERVLTFDLSSVGRNMAGPSNPHARLPTSDLESRGIAAKWTEEEGKMPDGAVIIAAITSCTNTSNPRNVIAAGLLARNANARGLTRKPWVKSSLAPGSKAVKLYLEEASLMSELEDLGFGVVAFACTTCNGMSGALDPKIQQEIIDRDLYATAVLSGNRNFDGRIHPYAKQAFLASPPLVVAYAIAGTIRFDIEKDVLGTDKDGNPVTLKDIWPSDEEIDAIVAKSVKPEHFRKVYEPMFDLSVDYGKDINPLYDWREMSTYIRRPPYWEGAMDAERTMKGMRPLAILGDTSPPITCLLLMLFWQVVQRVNIWRKWVYLKKTLTRMHT

SEQ ID NO: 151500 - protein, 188 aa, Unknown
  Bacterial polypetide isolated from the Sargasso Sea
MFIQRYSNVSDGPTQWQQIKTEKSSIYKWDEGSTYVKKPPFFEGLSDEPEGFKEIKDARPLLILGDMITTDHISPAGSIQKDSPTGEYFMEHQILPKDYNSYGSRRGNHEVMMRGTFANIRIRNEMAPGTEGGFTKLYPEEKVMPVYDAVVEYKKRGTDLVVIGGKEYGTGSSRDWAAKGTKLLGVKS

SEQ ID NO: 151501 - protein, 356 aa, Unknown
  Bacterial polypetide isolated from the Sargasso Sea
MSDHTNSFSIDEKTYKYFDLKTLDTDKVDRLPFTHKILLENALRYSEDDNEGPKDVETILNWDSKSDRSTEISFTPSRVILQDFTGVPAVVDLATMRDAVVSMQGNPNDINPLSPAELVIDHSVQVDHFGSLDALEKNNKVEFQRNQERYRFLRWGQDAFSNFEVVPPNTGIVHQVNLEYLGRVVFSKDDSLAYPDTLVGTDSHTTMINGIGCLGWGVGGIEAEAAMLGQPITMLLPEVIGVSVKGALKEGVTATDLVLTLTEILRNYGVVGKFVEFFGDGLDHLPVSDRATLSNMAPEFGSTCAIFPIDEATIRYLKLSGRSEHQVELVETYSKIQGLWRETDSNIDYTDVIELD

SEQ ID NO: 151502 - protein, 375 aa, Unknown
  Bacterial polypetide isolated from the Sargasso Sea
IAREAAKHGLKAKVPLMVTPGSEQTRATIERDGYLKDLEDIGAVVLANACGPCIGQWKRDDIKEGESNSIVSSFNRNFPARNDGNAETLSFIGSPETVIGLALGGRLDFNFLNDTLTDEEGNEITLNPPVADELPESGFETTLEGFIQPDDGEVEIIIDPESNRLQALVPFSPFESDNYHSMTVLMKASGKCTTDHISPAGKWLQFRGHLENISQNLFIGVNNAFTENAGEGINQLDNSVMSLPDIAKSYHEEGINWIAVGDENYGEGSSREHAAMEPRFRGCKVVLVKSFARIHEANLKKQGILPLTFENKDDYDLIEQEDKITIENLEAIAPDASVNITIEKTDGETKDIKANHSLSDEQIEWFKAGSALNSI

SEQ ID NO: 151503 - protein, 161 aa, Unknown
  Bacterial polypetide isolated from the Sargasso Sea
APGTEGGFTKLYPEGKVMPVYDAVVEYKKRGTDLVVIGGKEYGTGSSRDWAAKGTKLLGVKAVIAESFERIHRSNLIGMGILPLQFKDNITRKSINLNGSELISVIDIEKGIDPSDTVKLEIKYLTGDIKIIKTLCRIDTKNELEYYKNGGILQYVLRNMI

SEQ ID NO: 151504 - protein, 81 aa, Unknown
  Bacterial polypetide isolated from the Sargasso Sea
MSGNRNFEGRINPDVKANYLASPPLVVAYALAGNMHHDLYKNSLGKDQNGKDVFLKDIWPSNKEIEELMLKSINADMFVKR

SEQ ID NO: 151505 - protein, 175 aa, Unknown
  Bacterial polypetide isolated from the Sargasso Sea
MMRGTFANIRLRNKLAPGTEGGWTKLSENEEPISIFEAAEEFRSSDTDLIVLAGKEYGTGSSRDWAAKGVSLLGVKAVIAESYERIHRSNLIGMGVLPLEFNNGESAESIGLNGFESFDIESITRDSRVLSVKAKSIDGEVNSFEVKIRIDTPKEWEYFEHGGILHYVIRRLVAK

SEQ ID NO: 151506 - protein, 158 aa, Unknown
  Bacterial polypetide isolated from the Sargasso Sea
DKTGGYTKHIPTNKIVSVYEASELYKNEDRELIVIAGKNYGCGSSRDWAAKGTKLLGVKAVIAESFERIHRSNLVGMGVLPLEFIKGENYESLGIDNNSTFTIAALKRNDTNVNINSTKNGQPYTFKAKVRIDTDKEWDYFLNDGILNYVLKNISNST

SEQ ID NO: 151507 - protein, 212 aa, Unknown
  Bacterial polypetide isolated from the Sargasso Sea
MQYQSSAKKELTINNRKFEYFDLNSIDNELVRTLPYSLKILLENLLRHEDGINVTREDILAIANWDPNQKPEKEISFTPSRVILQDFTGVPAVVDLAAMRDAIVNLGSDANKINPLSPVELVIDHSVQVDNYAKSNALDLNNIIEFKRNKERYSFLKWGQKEFKNFKVVPPNTGIVHQVNLEYLSRVVFNHNSSDSNTLYPDTVVGTDSHTT

SEQ ID NO: 151508 - protein, 255 aa, Unknown
  Bacterial polypetide isolated from the Sargasso Sea
MSDHTNSFSIKEKTYKYYDLKSLDSEKVDRLPFTHKILLENALRHAENDHEGPKDVETILNWNPKSDQSTEISFTPSRVILQDFTGVPAVVDLATMRDAVVSMQGDPKDINPLSPAELVIDHSVQVDHFGSLDALEKNNKVEFQRNQERYRFLRWGQDAFSNFEVVPPNTGIVHQVNLEYLGRVVFSKDDSLAYPDTLVGTDSHTTMINGIGCLGWGVGGIEAEAAMLGQPITMLLPEVIGVSVKGSLKEGVTAT

SEQ ID NO: 151509 - protein, 225 aa, Unknown
  Bacterial polypetide isolated from the Sargasso Sea
MKPGNKNSYNSLKSLNINGKEYKYYSLLEAEKNGLKDISKLPKSLKVLLENLLRYEDDLTVTKDQIDSIKNWLKEKKSKTEIAYRPARVLLQDYTGIPAVADLAAMREAVKKKNKDPNTINPLSKVDLVIDHSVQVDKSAKSDSFEKNVDIEFERNGERYSFLKWGQQAFNNFRIVPPGTGICHQVNLEYLSKVVWTEKFENNNYIFPDTLVGTDSHTTMVNGLS

SEQ ID NO: 151510 - protein, 269 aa, Unknown
  Bacterial polypetide isolated from the Sargasso Sea
MKPGKKNSYNSLKSLNINGKEYKYYSLLEAEKNGLNNISKLPKSLKVLLENLLRYEDELTVTKHQIVSIKDWLKEKKSKTEIAYRPARVLLQDYTGIPAVADLAAMREAVKNKNKDPNTINPLSTVDLVIDHSVQVDKSAKSDSFEKNVDIEFERNGERYSFLKWGQQAFSNFRIVPPGTGICHQVNLEYLSKVVWTENFEENNYIFPDTLVGTDSHTTMVNALSVLGWGVGGIEAEAGMLGTPISMLIPEVIGFEVKNNYLKELQRQI

SEQ ID NO: 151511 - protein, 277 aa, Unknown
  Bacterial polypetide isolated from the Sargasso Sea
MFDFEIIKDLYANLSKRVDFAKNILNRPLTYTEKILYSHLFDPKFNNEFLRAKSYVEFSPDRVAMQDATAQMALLQFMMAGKIRVAKPTTVHCDHLIQAKIDAVKDLSVALDTNGEVYNFLESVSNKYGIGFWEPGAGIIHQVILENYAFPGGMMIGTDSHTVNAGGLGMIAIGVGGADAVDVMAGMPWELLFPKLIGIKLTGKLNGWTSSKDVILKVAGLLSVKGGTGAIIEYFGSGAKNLSCTGKGTICNMGAEIGATTSVFAYDENMAKYLQAT

SEQ ID NO: 151512 - protein, 867 aa, Unknown
  Bacterial polypetide isolated from the Sargasso Sea
MSTVMNTQYRKPLPGTALDYFDTREAIEAIAPGAYAKLPYTSRVLAENLVRRCEPQALTDSLKQIIESKQELDFPWFPARVVCHDILGQTALVDLAGLRDAIAAKGGDPAQVNPVVPTQLIVDHSLAVEFGGFDKDAFAKNRAIEDRRNEDRFHFINWTQKAFKNIDVIPQGNGIMHQINLERMSPVVHARDGVAFPDTLVGTDSHTPHVDALGVIAIGVGGLEAESVMLGRASYMRLPDIIGVELTGKPQPGITATDIVLALTEFLRKEKVVSSYLEFFGEGAEALTLGDRATISNMTPEFGATAAMFYIDQQTLDYLTLTGRSHEQVKLVETYAKTTGLWSDDLKQAEYPRTLHFDLSSVVRTIAGPSNPHARVPTSELAARGISGVVENEPGLMPDGAVIIAAITSCTNTSNPRNVIAAGLLARNANAKGLSRKPWVKTSLAPGSKAVQLYLEEANLLPELESLGFGIVGFACTTCNGMSGALDPVIQQEVIDRDLYATAVLSGNRNFDGRIHPYAKQAFLASPPLVVAYAIAGTIRFDIEKDVLGHDKDGKPVRLIDIWPTDTEIDAVIAASVKPEQFRKVYEPMFDLSVDYGDKVSPLYNWRPQSTYIRRPPYWEGALAGERTLKGMRPLAVLGDNITTDHLSPSNAIMMDSAAGEYLHKMGLPEEDFNSYATHRGDHLTAQRATFANPKLKNEMAIVDGKVKQGSLARIEPEGQVTRMWEAIETYMDRKQPLIIIAGADYGQGSSRDWAAKGVRLAGVEAIVAEGFERIHRTNLVGMGVLPLEFKSGENRATYGIDGTEVFDVVGDIAPRADLTVIITRKNGERVEVPVTCRLDTAEEVSIYSAGGVLQRFAQDFLESNLK

SEQ ID NO: 151513 - protein, 518 aa, Unknown
  Bacterial polypetide isolated from the Sargasso Sea
NAEVQVKSILEKKIGEAINFAPNRILSHDILGKVMLVDFIAYREALQKKGINSKDIQPDVPVDLVIDHSLQVDYFGDDKAEIENLKKEYERNSERFSFLRWCSKFLDKVNVIPPGVGICHQVNVEYLSKVVWREKKENFNLIHPDTCIGTDSHTPMVNAIGVLGWGVGGVEAEISMLGKTIPMTVPEIVGVNLENQLKEGITSTDLVLHITKLLRANKVVGSFIEFCGEGVESLTVGDRATISNMAPEYGATAVLFPVDNSTLDYLKMTGRTDEEIQVVEEYSKNQKLWRRSDITPDYNRVLNLDLSSIEPCVSGPKNPEDKINLNKFSNEINSHSKMLYNQDLRPDEFEVPDLEYKIKDADIMIAAITSCTNTANPKNVIAAGLVAKKLVELGFKKKNKIKTSFAPGSKVTAEILNRSGLQKYLDQLGFNVVGFGCTTCNGSSGPLDENLANTIEKEKIFSVAVLSGNRNFQGRIHPNIRASYLASPALVVLFSITGNVKINLLKDSLGKSKNDENI

SEQ ID NO: 151514 - protein, 143 aa, Unknown
  Bacterial polypetide isolated from the Sargasso Sea
SVYDAVVEYKKRGTDLVVIGGKEYGTGSSRDWAAKGTKLLGVKVVIAESFERIHRSNLIGMGILPLQFTENMNRKNLNLLGSELISVVDIEKGINPSDKVKVEIKYASGDVKIIDTLCRIDTKNELEYYKNGGILQYVLRNMI

SEQ ID NO: 151515 - protein, 450 aa, Unknown
  Bacterial polypetide isolated from the Sargasso Sea
MSKTEIETTPEFVKNVYEKSEKNITKFRNTLKRPLTLTEKILAGHLEDEFLDKLLDEKKNYVFLRPDRVALQDVTGQMVMLQFMQAGLKSVTLPTTVHCDHLIQARTEGKSDTKLAMYENNEVYKFLETASSKYGAGFWNPGAGIIHQVVLENYAFPGGLMIGTDSHTPNAGGLGMIAVGVGGLDAAETMAGMPWELLYPKRIGVHLKGKMSGWTAPKDVILFVAGKLSVSGGTNSIIEYFGPGVESISCTGKATITNMGAEIGATCSIFPYDKRMETYLNSTNRKEIASLANDHMSLLQADPEVEQNPEKFFDKIIEIDLSTLEPHVVGPHTPDLARPISKLSDEIDSNDYIDKISVALIGSCTNSSYEDMSRSSSVAKQAETHGIKAKIPLLVTPGSEQIRSTIERDGQIDTLKSIGATVLANACGPCIGQWQRPELKDGEKNSIVTS

SEQ ID NO: 151516 - protein, 247 aa, Unknown
  Bacterial polypetide isolated from the Sargasso Sea
ANGFVNTEGIYLPPSENPENVEVLLDPKSERLQKLEPFSSWNGNDFTGLNLILKAKGKCTTDHISPAGPWLRLRGHLDNLSDNLLLGAVNAFNDEVGKAKNILTNNIENCSQIARSYKEKNMRWVIVGDNNYGEGSSREHAAMTPRFLGCAVVIAKSFARIHETNLKKQGILALTFENSDDYEKIKEDDKISISGLSDFAPDKSFECQLEHSDGNTEKIMLKHSYNSSQIEWFKAGSALNVLKNKTS

SEQ ID NO: 151517 - protein, 430 aa, Unknown
  Bacterial polypetide isolated from the Sargasso Sea
HIVGPHTPDLASSISGLKKDANDNEYPVKISSALIGSCTNSSYEDIGRAAFIAREAAKHGLKAKVPLMVTPGSEQTRATIERDGYLKDLESIGATVLANACGPCIGQWKRDDIKEGESNSIVSSFNRNFPARNDGNAETLSFIGSPESVIGLALGGTLDFNFLSDTLTTQDGEEILLNPPVADELPDKGFEETLEGFIQPTPGDDVEVIIDPESNRLQKLIPFLPPNEEDYASMSVLMKAEGKCTTDHISPAGKWLQFRGHLENISQNLFNGVNNAFAEKAGDGVNILTKEVDTLPNIAKNYSEENVSWVAVGDENYGEGSSREHAAMEPRFRGCKVVLVKSFARIHEANLKKQGILPLVFEDKNDYEKIEQFDKMTIGSLKDIAVDTPVEIILEKENGETETIKANHSLSEDQIAWFFAGSALNYIKSK

SEQ ID NO: 151518 - protein, 212 aa, Unknown
  Bacterial polypetide isolated from the Sargasso Sea
MNSSMTQTFVYFDDCFKGHVQSLDYPECSDRVKNIIELINKEEFKNIIIKQPNKIEQSLIYAAHEEKFVRETLARFPSDDQIVFLDQETPVSKGSLDATLKAAGAGIDAVDAIMSNNSLNAFCIVRPPGHHACYDRSMGFCVFNNVAIAAHYLINKYKFKNIAIIDFDVHHGNGTQDIFYNNSKVTYYSTHQYPLYPGTGDVNEIGLGNIVN

SEQ ID NO: 151519 - protein, 103 aa, Unknown
  Bacterial polypetide isolated from the Sargasso Sea
FADIFYNNCFNNGLLPIAVSEHEISTLLDLSNKRKEIEIDLQNQIIFVEDNEIAHFEIDPFRKKCILEGLDEIGLSLTHSSEIKEFERKHYLKSPWIFNREND

SEQ ID NO: 151520 - protein, 39 aa, Unknown
  Bacterial polypetide isolated from the Sargasso Sea
MSTTLYDKIWNDHLVDQTDDGTSLLFVDRHLIHEVTSPQ

SEQ ID NO: 151521 - protein, 63 aa, Unknown
  Bacterial polypetide isolated from the Sargasso Sea
AQPGIEIEVDLEANQVRAGSLCFDFEIDEFRRYCLLNGLDAIGLTLQHEAAISAFEAKQPSWI

SEQ ID NO: 151522 - protein, 44 aa, Unknown
  Bacterial polypetide isolated from the Sargasso Sea
MKKFSKLKSIPAYLPLQNIDTDMIIPKQFLKTIKRTGLGKSLFF

SEQ ID NO: 151523 - protein, 103 aa, Unknown
  Bacterial polypetide isolated from the Sargasso Sea
MNEYTIHQAKMLPLDRANVDTDQIIPKQFLKSIKKSGFGPNLFDSWRYLDTGYPGQNNSIRPLNNEFVMNKKKFLGSEVLIAKDNFGCGYSREHAVWALQDSK

SEQ ID NO: 151524 - protein, 93 aa, Unknown
  Bacterial polypetide isolated from the Sargasso Sea
VLPAAISIYKRAMQDGLLQIFMDAGAMVGPPTCGACCGAHMGVLAKDEICISTTNRNFPGRMGHIDSQTYLASPLVAAASAVTGKITDPRDLN

SEQ ID NO: 151525 - protein, 260 aa, Unknown
  Bacterial polypetide isolated from the Sargasso Sea
CYMFGIGATEMAGVLATGEIWIRVPETIRIEWEGTFQEGVMAKDVMLFLCGRMGMDGGRYQAVEYCGEAVSELSMQERMTLSNMSAELGAQAGLIAPDATTMKWLEGHGSESDPVEPWQTDPDSDFEYHRFDADQLEPQVAAPHSPANAASVLEYNAIRPDVLYLGACTGAKLHDLRAAASILKENRVQSGIEFWVAPSSKRDFHEARKEGVMKILEDAGAKILPTSCGLCAGYGPQRLGQGTVCLSSTARNFKGRMGDE

SEQ ID NO: 151526 - protein, 43 aa, Unknown
  Bacterial polypetide isolated from the Sargasso Sea
ASTSNRNFEGRQGRGGRTHLVSPAMAAAAAISGNLDDVRKYQN

SEQ ID NO: 151527 - protein, 42 aa, Unknown
  Bacterial polypetide isolated from the Sargasso Sea
MNNPNNKTLFDKIWSHHLVHQQEDGTCLIYIDRHLVHEVTSP

SEQ ID NO: 151528 - protein, 39 aa, Unknown
  Bacterial polypetide isolated from the Sargasso Sea
MEAFTQLEDLTAVMDRINVDTDQIIPKQFLKKIERTGFW

SEQ ID NO: 151529 - protein, 37 aa, Unknown
  Bacterial polypetide isolated from the Sargasso Sea
MNADKLKPEERCASTSNRNFEGRQGRGGRTHLVSPAM

SEQ ID NO: 151530 - protein, 92 aa, Unknown
  Bacterial polypetide isolated from the Sargasso Sea
MAYEKFNILESTAVPLPIENIDTDQIIPARFLKATERKGFGENLFRDWRYDSNNNPKEDFVLNNNKYTGKILIGGKNFGSGSSREHAAWANI

SEQ ID NO: 151531 - protein, 262 aa, Unknown
  Bacterial polypetide isolated from the Sargasso Sea
MSKVIFSFDDKKLKTLKNKKNILGGKGTNLAEMGRLGLPVPPGFTISTEVCDIFYNNKKKLPSKIIKDIEKKLKEIEKNTKKQFGDLINPLLVSVRSGARISMPGMMDTILNLGLNDRTVQALANKTSNGRFAKDSYRRFIQMYSSVVLGIGNHLFEEMIDNYKLTKGVLSDTELDESDWDGLIKNFKELVKKEKKIEFPQDVKKQLYGAISAVFLSWNSQRAKTYRKLNQIPDHWGTAVNVQAMVFGNMRENCSTGVAFTR

SEQ ID NO: 151532 - protein, 208 aa, Unknown
  Bacterial polypetide isolated from the Sargasso Sea
TAIDGVQNKVFKNAFCNVRPPGHHSNQNKAAGFCILNNVAIGAKYLLNKYKYNKIAILDFDVHHGNGTQDIFYNNKNVLFVSTHQYPYYPGTGSEKEKGNFNNICNIPLPAGTNSEEYLNAFEFALKRLNEFQPEFILISAGFDGHASDPLAQFKLSTEDYYEITRRLLESSKKFSNGKVVSILEGGYDLLALKDSAKRHVDALLEFN

SEQ ID NO: 151533 - protein, 65 aa, Unknown
  Bacterial polypetide isolated from the Sargasso Sea
MEKFKIIKGIPAHLPMINVDTDMIIPKQFLKTIKRTGLGKSLFFEMRYKENGNKNEEFVLNKEPY

SEQ ID NO: 151534 - protein, 49 aa, Unknown
  Bacterial polypetide isolated from the Sargasso Sea
KPKERCASTSNRNFEGRQGRGGRTHLVSPAMAAAAAIEGRLSDVRKFNN

SEQ ID NO: 151535 - protein, 124 aa, Unknown
  Bacterial polypetide isolated from the Sargasso Sea
SREHAPWLLHDYGFRCILAPSFADIFYNNCRKNGILAVVLRDDEIQALFEEVEANEGCLLTVDLPRQNVTSPEGKKFSFEIDSFSKNCLLEGLDDIGWTMQFEEKIQSYESQARLEKPWLFISN

SEQ ID NO: 151536 - protein, 281 aa, Unknown
  Bacterial polypetide isolated from the Sargasso Sea
MAGVLATGEIWIRVPETIRIEWEGTFQEGVMAKDVMLFLCGQLGMDGGRYQAVEYCGEAVSELSMQERMTLSNMSAELGAQAGLIAPDATTMKWLEDYRSENDQIEPWQTDPDSDFEYHRFDADQLEPQVAAPHSPSNAASVLEYNAIRPDVLYLGACTGAKLHDLRTAASILKENRVQSGIEFWVAPSSKRDFHEARKEGVMKILEDSGAKILPTSCGLCAGYGPQRLGQGTVCLSSTARNFKGRMGDESSEVYLASPMTVASTAVTGYISDPRNFLGAS

SEQ ID NO: 151537 - protein, 128 aa, Unknown
  Bacterial polypetide isolated from the Sargasso Sea
MAKTLFEKLWDAHVVDSVNDTTDIIYIDQHMIHEVTSPVAFSGLEARGRKVYRPGQTVATPDHNVPTINQDQPIQEALSRNQVNTLASNCENHGIDMYGLGHPFHGVVHIIGPELGVTLPGMTVVCGD

SEQ ID NO: 151538 - protein, 51 aa, Unknown
  Bacterial polypetide isolated from the Sargasso Sea
DKIPKGKYAVSTTNRNFEGRQGPGARTLLASPLVAAASAITGKITDPREII

SEQ ID NO: 151539 - protein, 57 aa, Unknown
  Bacterial polypetide isolated from the Sargasso Sea
MDKFHSLKGIAAPLPIVNIDTDMIIPKQFLKTIKRTGLGVSLFYEMRYDNDGNLIKD

SEQ ID NO: 151540 - protein, 237 aa, Unknown
  Bacterial polypetide isolated from the Sargasso Sea
KKGLVFLDGDTIISPGSKDATKDAVGSIIAAIDGVENKEFNNAFCAVRPPGHHAEKDKAMGFCIYNNVAVGANYLIEKFKYNKIAIIDFDVHHGNGTQDIFYNNEKVLYISTHQYPYYPGSGSEKEKGNFDNVLNIPLKAGTTSEEYFNAYEIVLNKLKKFKPEFILFSAGFDAHVDDPLAQLMLSSEDFYKITKRTLECTRSFCKGRVVSILEGGYDLRALQNSSKRHVDALIEFN

SEQ ID NO: 151541 - protein, 64 aa, Unknown
  Bacterial polypetide isolated from the Sargasso Sea
MQKFNKLKSIPAYLPIVNIDTDMIIPKQFLKTIKRTGLGKNLFFEMRYDDQGKEINDFVLTKIH

SEQ ID NO: 151542 - protein, 157 aa, Unknown
  Bacterial polypetide isolated from the Sargasso Sea
KLNKIAIIDFDVHHGNGTQDIFYNNEKVLYISTHQYPFYPGTGADNEKGKHDNIFNIPLPAGTNSEEYMNAYEHVLKKLKEFKPEFLLFSAGFDAHQDDPLAQFKLKSKDFYDITKRTLKVINKSINNKVVSILEGGYDLNALKESSEYHLKALLEN

SEQ ID NO: 151543 - protein, 75 aa, Unknown
  Bacterial polypetide isolated from the Sargasso Sea
MQKFSTLRSIPAYLPIVNIDTDMIIPKQFLKTIKRTGLGKNLFFEMRYDDNGKEINDFILNKNPFNNSKILIAGK

SEQ ID NO: 151544 - protein, 76 aa, Unknown
  Bacterial polypetide isolated from the Sargasso Sea
MQKFSTLKSIPAYLPIVNIDTDMIIPKQFLKTIKRTGLGKNLFFEMRYDDKGKEINEFVLNKTPFNKSKILIAGKN

SEQ ID NO: 151545 - protein, 77 aa, Unknown
  Bacterial polypetide isolated from the Sargasso Sea
MQKFSTLRSIPAYLPIVNIDTDMIIPKQFLKTIKRTGLGKNLFFEMRYDDSGKEINDFILNKIPFNNSKILIAGKKF

SEQ ID NO: 151546 - protein, 40 aa, Unknown
  Bacterial polypetide isolated from the Sargasso Sea
MEKFINLKSIPSYLSLQNIDTDMIIPKQFLKTIKRTGLGK

SEQ ID NO: 151547 - protein, 59 aa, Unknown
  Bacterial polypetide isolated from the Sargasso Sea
MGKTLFEKIWDRHLVASIDESTNLVFIDLHLVHEVTSPQAFDSLRLAGRKVKHPEMTLA

SEQ ID NO: 151548 - protein, 51 aa, Unknown
  Bacterial polypetide isolated from the Sargasso Sea
MPFTTYDKIWNEHLVDEQPDGTSLLFVDRHLIHEVTSPQAFEGLRNSNRKV

SEQ ID NO: 151549 - protein, 26 aa, Unknown
  Bacterial polypetide isolated from the Sargasso Sea
MLAEKEGLDKVFINSGFEWREAGCSM

SEQ ID NO: 151550 - protein, 208 aa, Unknown
  Bacterial polypetide isolated from the Sargasso Sea
AAMDGVQNNELKNAFCAVRPPGHHAEKEKAMGFCIYNNIAVGANYLIEKYKYNKVAIIDFDVHHGNGTQDIFYNNEKVLYISTHQYPYYPGSGSEKERGKFNNIFNIPLEAGTTSEEYLNAYEHVLKKLKEFKPEFLLFSAGFDAHIDDPLAQLRLNSDDFYHLTKRTLEFSKSFCNGKVVSILEGGYDLKALQNSTQRHVDALIEFN

SEQ ID NO: 151551 - protein, 185 aa, Unknown
  Bacterial polypetide isolated from the Sargasso Sea
VPLPIENVDTDQIIPARFLKATERIGFGDNLFRDWRYNKDNSPKKDFVLNNPSFSGKILVGAKNFGSGSSREHAAWAIYDYGFRCVISSFFADIFKNNCLNIGVLPVQVSPEFLEHIFTAIDMDPNTSLTVDLPNQMVTIDIKDSSEAFEINPYKKENMTNGFDDIDYLLNIKKEIKEFAQDTPL

SEQ ID NO: 151552 - protein, 265 aa, Unknown
  Bacterial polypetide isolated from the Sargasso Sea
MLISNALYADCSDLNQSDCEYWSAYCQWNSEQNICEETGGGGGGNIEYGPYEFALLTETDGMPSSPFYNGALLFYPTNATPPFRSVIFIPAFGEAYGLEAWAEFVASHGYIGMTIGNYEGTEEDYWDYESRAVGLMAAREIIKEENERINSPLFSVVDTINFIFSGHSTSGGGAHVAATLDSTINAVMLLNPAVAFVDSLNCPAETEYYCLIPEHLDHNVPTLVYAGETEYEELVNPDDDIYSNMWARPQYDYIPETTDKLWFES

SEQ ID NO: 151553 - protein, 44 aa, Unknown
  Bacterial polypetide isolated from the Sargasso Sea
FSFEVDPFKKHCLLNGLDDIGLTMEKSSSIEAFERKVEIEQPWL

SEQ ID NO: 151554 - protein, 41 aa, Unknown
  Bacterial polypetide isolated from the Sargasso Sea
MKSFSKISSKITPFDKANVDTDQIIPKQFLKLITKSGFGKF

SEQ ID NO: 151555 - protein, 59 aa, Unknown
  Bacterial polypetide isolated from the Sargasso Sea
MEKFIKLKSIPAHIPLMNIDTDMIIPKQFLKTIKRTGLGKSLFYEMRYDESGKLIENLY

SEQ ID NO: 151556 - protein, 76 aa, Unknown
  Bacterial polypetide isolated from the Sargasso Sea
MPQTIYDKIWNDHLVDEQDDGTCLLFVDRHLVHEVTSPQAFEGLRNSNRKVRQPNLTLAVADQNVPTTDRTKGMKM

SEQ ID NO: 151557 - protein, 261 aa, Unknown
  Bacterial polypetide isolated from the Sargasso Sea
TSTHIIVKNVKFYTNNLQEPKELAQIKKLKIFISQKNLFKINNLEIKKILFDEANFSIQQEDLGYFKKFVEKRFSTKKIAITNSNFFYIDKNKNVIAIFPVLKFSLFFDVKNLKNLIASKGEIFAMPYSLNWNKNFKNNLSSTLLKINKLNLKLENQSKIKNSDLLIKNFIFFRSLEIESDILVNKDWIKISSAQNPKTKKSILTYDGKIDLNPFNLIMDIDLEKLNFKRDIFYNNLLQNLFELRHLYNENLSSQITLNVN

SEQ ID NO: 151558 - protein, 71 aa, Unknown
  Bacterial polypetide isolated from the Sargasso Sea
MQKFNTLKSIPAYLPIVNIDTDMIIPKQFLKTIKRTGLGKNLFFEMRYDDKGIEIDNFVLNNEPFNKSKIL

SEQ ID NO: 151559 - protein, 39 aa, Unknown
  Bacterial polypetide isolated from the Sargasso Sea
MKKFSTVESIPAYLPIVNIDTDMIIPKQFLKTIKRTGLG

SEQ ID NO: 151560 - protein, 52 aa, Unknown
  Bacterial polypetide isolated from the Sargasso Sea
ITSSDGSIFPFDVDPFKKHCLLNGLDDIGLTMEKSSSIEAFEKKLENERPWL

SEQ ID NO: 151561 - protein, 237 aa, Unknown
  Bacterial polypetide isolated from the Sargasso Sea
MLQDIKQYKDIFYNNFSENHLIVLGINNAKPSEDFKEEKIYNSLVILNNNLEVLSIYNKIKLVPFGEFLPFEKIFYNFGLKKITRGYNSFSAGNERELINLGKNFNKKSILPLICYEIIYSGNVKKKNQFPDLITNISEDAWFGRSIGPHQHFSKAIYRSIEDGVFIARSANKGVSAFINPNGKVIKSLNTGESGNIELNFPIFSEKTLFSNYGNKIFYLIIFLYMFLILILRKFKI

SEQ ID NO: 151562 - protein, 83 aa, Unknown
  Bacterial polypetide isolated from the Sargasso Sea
MAKTLFDKVWDSHVIERIKDGPDVLFIDRHFIHEVTSPVAFVGLKNRGLKVMFPDRTFATADHNTPTINQHLPIKDKLSAMQV

SEQ ID NO: 151563 - protein, 41 aa, Unknown
  Bacterial polypetide isolated from the Sargasso Sea
TSNRNFEGRQGRGGRTHLVSPAMAAVAAIEGHLSDVRKFNN

SEQ ID NO: 151564 - protein, 41 aa, Unknown
  Bacterial polypetide isolated from the Sargasso Sea
STSNRNFEGRQGRGGRTHLVSPAMAVAAAIKGCLFDVRKIQ

SEQ ID NO: 151565 - protein, 79 aa, Unknown
  Bacterial polypetide isolated from the Sargasso Sea
MQKFNKLKSIPAYLPIVNIDTDMIIPKQFLKTIKRTGLGKNLFYEMRYDDQGKKIDDFILNQNPYNDSKILLAGKNFGC

SEQ ID NO: 151566 - protein, 50 aa, Unknown
  Bacterial polypetide isolated from the Sargasso Sea
IKPEERCASTSNRNFEGRQGRGGRTHLVSPGMAAAAAISGNLDDVRKYQN

SEQ ID NO: 151567 - protein, 57 aa, Unknown
  Bacterial polypetide isolated from the Sargasso Sea
MASTIYDKIWNEHLVHEQEDGTSLLFVDRHLVHEVTSPQAFEGLRSSNKKVRQPGLT

SEQ ID NO: 151568 - protein, 52 aa, Unknown
  Bacterial polypetide isolated from the Sargasso Sea
MPFTTYDKIWNEHLVDEQPDGTSLLFVDRHLIHEVTSPQAFEGLRNSNRKVR

SEQ ID NO: 151569 - protein, 113 aa, Unknown
  Bacterial polypetide isolated from the Sargasso Sea
YGFRCILSPSFADIFYNNCRKNGILAVVLKDDEIQALFEEVEANEGCLLTVDLPGQNVISPEGKKFSFEIDSFEKNCLLEGLDDIGWTMQFEDKIQSYERQAKSEKPWLFISN

SEQ ID NO: 151570 - protein, 83 aa, Unknown
  Bacterial polypetide isolated from the Sargasso Sea
MVKEQAEKEGIHKIFIDAGFQWRAPGCSMCLGMNPDQLSPYERCASTSNRNFEGRQGNLGRTHLMSPKMAALTAINGRIVKEI

SEQ ID NO: 151571 - protein, 128 aa, Unknown
  Bacterial polypetide isolated from the Sargasso Sea
MVSGTNFGSGSSREHAPWALLDYGFRVIIAPSFADIFRNNCFQNGILSIVLEKNEVDYLMGMSFSNKGYQLNVDLENEIIYDEKEFKTNFKIDPFRKESLLKGQDEIARTLTSSNHIDNFENKRIERW

SEQ ID NO: 151572 - protein, 198 aa, Unknown
  Bacterial polypetide isolated from the Sargasso Sea
KNAFCAVRPPGHHAEKNKAMGFCIFNNGLAVGAKYLLKKYKLKKIAIIDFDVHHGNGTQDIFYNNDKVLYISTHQYPFYPGSGSSNEKGKFNNILNIPLMAGTSSEEYLNAYERVLNKLAEFKPDFILFSAGFDAHKDDPLAQFQLKSIDFYTLTKRTLEVSKNLCHGKVVSILEGGYDLNALMESTEMHVKALLEFN

SEQ ID NO: 151573 - protein, 239 aa, Unknown
  Bacterial polypetide isolated from the Sargasso Sea
MVDGTEYQATGSDTQWTVQTDTTTPLTGNQEVSFSLSRYTDLAGNEQITPTTSVSEGTDSKSVYVDDTAPDETTIIVSSSIETSNFLGETNPEDPDQYLSLTGDQLTLEFTTEEHLSEVHVMVDGTEYQATGSDTQWTVQTDTTTPLTGNQEVSFSLSRYRDLAGNEQITPTTSVSEGTDSKSVYVDDTAPDETTIIVSSSIETSNFLGETNPEDPDQYLSLTGNQLTLEFTTEEHLSE

SEQ ID NO: 151574 - protein, 49 aa, Unknown
  Bacterial polypetide isolated from the Sargasso Sea
MPRTLYDKIWNEHLVHQQDDGTSLLFVDRHLIREVTSPQAFEGLRNSKR

SEQ ID NO: 151575 - protein, 253 aa, Unknown
  Bacterial polypetide isolated from the Sargasso Sea
MGAVRPAGFNGFAVGTTLFDKLWQEHEVTTLSARQSLLYVDRIFLHERTGSVALNGLLEKQRPVRRREHAFCTMDHIVDTLPGRSDDTLMPSGRDFIVATRHAAQEAGIQLFDITDTNQGIVHVISPELGIALPGLSLICPDSHTCTLGGLGALAWGVGSTEAEHALATSTLRVSRPQTMRVSFAGLLGEGVSAKDLILFTIRELSASGGAGYAIEFAGPAIDALPVEARLTLCNMTTELSAFTGLIAPDQKV

SEQ ID NO: 151576 - protein, 110 aa, Unknown
  Bacterial polypetide isolated from the Sargasso Sea
LRQAAEIVKGKTVADNITEAIVVPGSGMVKEQAEMEGLDEVFKDAGFVWRDPGCSMCLGMNPDQLKPYERCASTSNRNFEGRQGYLGRTHLMSPIMAAYTAINGTVGEPS

SEQ ID NO: 151577 - protein, 277 aa, Unknown
  Bacterial polypetide isolated from the Sargasso Sea
ARLKAGSLSRDNNKNLNSGKIYNICDQRIYSNWKEMLEKEVGDLDAVVILSPSNLHFEMVEYALKLNYPVICEKPLASNLDELEVIINLQKNLNAFIAVTYNYTGYPMIRLLKKIISDYILGEIFHFQIEMPQETYVRSDSNNNPFFVEDWRKKDHNTPTINFDLAVHMHQIIFYLLGEYPKSVVAHEKNHNKNFDIIDNVNCLTEYSNGLDGHFWWSKSSLGNRNGLKIRIFGSEGSACWVQEKPELLYVSYKDGKKETIDRGDSRYSNFMKPYHR

SEQ ID NO: 151578 - protein, 54 aa, Unknown
  Bacterial polypetide isolated from the Sargasso Sea
MNSDKLNEGDRCASTSNRNFEGRQGKGGRTHLVSPEIAAASAVTGKLTDPRNVS

SEQ ID NO: 151579 - protein, 306 aa, Unknown
  Bacterial polypetide isolated from the Sargasso Sea
ELPWGRRIPEDPDQYLSLTGDQLTLEFTTEEHLSEVHVMVDGTEYQATGSDTQWTVQTDTTTPLTGNQEVSFSLSRYTDLAGNEQITPTTSVSEGTDSKSVYVDDTAPDETTIIVSSSIETSNFLGETNPEDPDQYLSLTGDQLTLEFTTEEHLSEVHVMVDGTEYQATGSDTQWTVQTDTTTPLTGNQEVSFSLSRYTDLAGNEQITPTTSVSEGTDSKSVYVDDTAPDETTIIVSSSIETSNFLGETNPEDPDQYLSLTGDQLTLEFTTEEHLSEVHVMVDGTEYQATGSDTQWTVQTDTTTPL

SEQ ID NO: 151580 - protein, 75 aa, Unknown
  Bacterial polypetide isolated from the Sargasso Sea
MQKFTFIKGIPSYLPIVNIDTDMIIPKQFLKTIKRTGLGKNLFFELRYDDKGNEIKDFILNNKPHNNSKILITGK

SEQ ID NO: 151581 - protein, 240 aa, Unknown
  Bacterial polypetide isolated from the Sargasso Sea
NPKYDERDKIKISEKFNNFKVKYISSNKKNSLKILEKIIIKSSNILLTPTSLGLALLCENIKKDGRRVLLTGIGGDELFCGYYINYLAHINSYSRKSKIFKKKHAFWKQNIFKFIRNPNLKNFKDSKKKNIRNRLHFFTEGNSVPYNYLKKNKKINIKNFSRDIFYNNMLQNIYLQSIPTQLMQTDIVSMCYDIESRSPFLSHKLFENVYKLKKDFFMHDGKPKSLLRDAMKNIFPNVNY

SEQ ID NO: 151582 - protein, 78 aa, Unknown
  Bacterial polypetide isolated from the Sargasso Sea
MQKFNKLKSIPAYLPIVNIDTDMIIPKQFLKTIKRTGLGKNLFFEMRYDDQGKEINDFVLNKYPFNQSKILIAGKNFG

SEQ ID NO: 151583 - protein, 100 aa, Unknown
  Bacterial polypetide isolated from the Sargasso Sea
MNKFISIKSIPAYLPIVNIDTDMIIPKQFLKTIKRTGLGKNLFFEMRYDQSGKEIDDFILNNSPYNNSKILIAGKNFGCGSYREHAPWALMDFGITCVIS

SEQ ID NO: 151584 - protein, 78 aa, Unknown
  Bacterial polypetide isolated from the Sargasso Sea
IGLDKIFESAGAEWRESGCSMCLGMNGDTVGNGQLAVSTSNRNFEGRQGKGARTILASPKTAAASAIAGSVDDPRKYS

SEQ ID NO: 151585 - protein, 48 aa, Unknown
  Bacterial polypetide isolated from the Sargasso Sea
LKPRERCASTSNRNFEGRQGREGRTHLVSPVVAAASAIKGSFAQETDL

SEQ ID NO: 151586 - protein, 35 aa, Unknown
  Bacterial polypetide isolated from the Sargasso Sea
MTIEGGARAGLIAPDEKIFEYLKGKPMSPKSENWD

SEQ ID NO: 151587 - protein, 102 aa, Unknown
  Bacterial polypetide isolated from the Sargasso Sea
SSSYADIFYNNCFRTGILPITISEDQIKEISEYSNRKEEISVNLPEQTISFGNKEIKFEIDQFKKKCLIEGLDDIALSLEKSEKIVSYENKIKEAKPWIFND

SEQ ID NO: 151588 - protein, 84 aa, Unknown
  Bacterial polypetide isolated from the Sargasso Sea
MESFKTITGIPAPLPMINVDTDMIIPKQFLKTIKRSGLGKNLFHELRYDIQGNIKNDFVLNWDPYKTSKILIAGANFGCGSSRE

SEQ ID NO: 151589 - protein, 63 aa, Unknown
  Bacterial polypetide isolated from the Sargasso Sea
MSKTIYDKIWNEHLVHTQEDGTSLLFVDRHLIHEVTSPQAFEGLRNSKRKVRQPKVNTCSSRP

SEQ ID NO: 151590 - protein, 40 aa, Unknown
  Bacterial polypetide isolated from the Sargasso Sea
MQKFNTLKSIPAYLPIVNIDTDMIIPKQFLKTIKRTGLGK

SEQ ID NO: 151591 - protein, 91 aa, Unknown
  Bacterial polypetide isolated from the Sargasso Sea
MGKTLFEKIWDRHLVASIDESTNLVFIDLHLVHEVTSPQAFDSLRLAGRKVKHPEMTLATVDHGVPTSNRLLGIKDPLSKIQIEALENNCE

SEQ ID NO: 151592 - protein, 50 aa, Unknown
  Bacterial polypetide isolated from the Sargasso Sea
IFIKAGFEWREPGCSMCLGMNPDQLKPKERCASTSNRNLKEDKEEEGERI

SEQ ID NO: 151593 - protein, 92 aa, Unknown
  Bacterial polypetide isolated from the Sargasso Sea
MEKFIKLKSIPAHIPLMNIDTDMIIPKQFLKTIKRTGLGKSLFYEMRYDESGKLINKFILNNDPYSKSKILLAGKNFGCGSSRGTRAHGPYL

SEQ ID NO: 151594 - protein, 79 aa, Unknown
  Bacterial polypetide isolated from the Sargasso Sea
MQKFNKLTSIPAYLPIVNIDTDMIIPKQFLKTIKRTGLGKNLFFEMRYDDQGNEIKDFILNQKPFNQSKILIAGKNFGC

SEQ ID NO: 151595 - protein, 37 aa, Unknown
  Bacterial polypetide isolated from the Sargasso Sea
NRNFEGRQGREGRTHLVSPAVAAATALKGKLSLVEDI

SEQ ID NO: 151596 - protein, 58 aa, Unknown
  Bacterial polypetide isolated from the Sargasso Sea
MNKFTTLKSIPAYLPIVNIDTDMIIPKQFLKTIKRTGLGKNLFHEMRYDNNGKEIKDF

SEQ ID NO: 151597 - protein, 298 aa, Unknown
  Bacterial polypetide isolated from the Sargasso Sea
INNLKDNLTILGASDKELDSLTDKFINENVNQVVVVDDIFYNNSNYFPDQTFINNDQIDDLKSHYPKYINDDEKKWSKLNHLFKYVYEEIIRIIGFSDTDFNPDKNSLILVIKKTAIDKIPNINFKKIYIYFGASLHHVSHQMTYTEKDWNAKKIVGALVNNNEEGINKIKDKLFSVATNVSEKFILSNDFKDSNLSKEDFLKPTDFTQIVDNIEIKDEKIKNLTHCWIEGVNPWQEKYIKLDEFDKFIPTENLEYLKLSDCLQSENLDLPHFPKLKILKMNFFQNHHRKSLDKVTLS

SEQ ID NO: 151598 - protein, 230 aa, Unknown
  Bacterial polypetide isolated from the Sargasso Sea
DGDTVVSPGSKGAVVDAVGSIITAIDGVQNKEFKNAFCAVRPPGHHAEKNKAMGFCIYNNVAVGANYLLKKYKLNKVAIIDFDVHHGNGTQDIFYNNEKVLYISTHQYPYYPGTGTENEKGKYNNIFNIPLPAGTTSNEYLNAYEFVLKKINEFKPEFILFSAGFDAHKDDPLAQFQLTSNDFYHLTKRTLELSKLYCSGKIVSILEGGYDLNALQKSTEKHVNALLEFN

SEQ ID NO: 151599 - protein, 572 aa, Unknown
  Bacterial polypetide isolated from the Sargasso Sea
MDLLLIDDDEVDRTAIIRALRQSKLAFNVVEANCAFDGLNLALERHFDGILLDYLLPDANGLEVLIKLNSMTQDQTVVVMLSRYEDEKLAQRCIELGAQDFLLKDEVNSRILSRAIRYAKQRSSMALALRNSHQKLKELAEHDSLTKLVNRYGFELCLNRAIARAKRSNDFLAVILLDLDDFKAINDTLGHQTGDILLVKVASRLSSVLRDGDVIARLGGDEFVVLVTDNDYKYFPMIVANRLLKAFEEVFCLGENDVMIGASIGVAFYNEAASDSSELMKCADIAMYRAKKMGRNQIQFYSEALDKEVRYRNHIESSLRMALKQNEFKVYYQAQVDSQTHQVIGMEALIRWLHPQDGLIAPDQFLSIAEEIGLMEEIGDWVLIEACRQAQEWLTRLTPVGHRFTIAVNLSASQIGHIDLYEKIVHALEVTGLDAKALELEITENSLIEEPHEHAKVLDRIAQLGVRFALDDFGTGFSSLEHIKLFPISVLKIDKSFIASYDKDDKDTRLLAALLNFAYGFNVTSVAEGIETAEQAEFCTARNCNVLQGYLFSRPLEASEFEAKYITPLLTK

SEQ ID NO: 151600 - protein, 423 aa, Unknown
  Bacterial polypetide isolated from the Sargasso Sea
MNITEKILARASGKSSLSPDDVVFAKVDKVMVHDVSGPGVLKVFDKLQKQGIDTSKLHDSTKVWIAEDHFVPSAEKISAENIVKLSNFSKQYDIKKHFKYGMGQYGICHTLSHEEALVNPGEVYVGGDSHTNTTGGLGAFACGLGHTDVAYVLLNGEIWFKVPETYYFKLNGKLPPHVMAKDFILKIIGDIGTDGGAYNTMQFGGTGIDEMSVESRLTLTNMTTEAGAKNGIIEADEKTVQYLNERGSNSASVFHGDSDAEYSKVFEYEASELEPTVAKPFSPENITVARELSSTELDKSYIGSCTGAKYEDLLAAAKILKGRQVKIRTEVLPAAISIYKKAVKDGLIEIFLDAGVTVGPPTCGACCGAHMGVLAKDEICVSTTNRNFPGRMGHVESQTYLASPQVAAASAVTGKLSDPRDLN

SEQ ID NO: 151601 - protein, 43 aa, Unknown
  Bacterial polypetide isolated from the Sargasso Sea
ASTSNRNFEGRQGRGGRTHLVSPEMAAAAAISGNLDDVRKYQN

SEQ ID NO: 151602 - protein, 423 aa, Unknown
  Bacterial polypetide isolated from the Sargasso Sea
MNITEKILARASEKNTVSPDDIVFAKVDKVMVHDVSGPGVLKVFDKLQKQGIDTSKLHDPSKVWIAEDHFVPSAEKISAENIVKLSNFSKKYDIKKHFKYGMGQYGICHTLSHEEALVNPGDVYVGGDSHTNTTGALGAFACGLGHTDVAYVLLNGEIWFKVPETYYFKLNGKLPPHVMAKDFILNVIGDIGNDGGAYNTMQFGGTGIDEMSVESRLTLCNMTTEAGAKNGIIESDQKTVEYLTQRGATNVSEFHGDSDAEYSKTFEYEASELEPTVSKPFSPDNITVARELSSTELDKSYIGSCTGAKYEDLLAAAKILKGRQVKIRTEVLPAAISIYKKAVKDGLIEIFLNAGVTVGPPTCGACCGAHMGVLAKDEICVSTTNRNFPGRMGHVESQTYLASPQVAAASAVTGKLTDPRDLN

SEQ ID NO: 151603 - protein, 308 aa, Unknown
  Bacterial polypetide isolated from the Sargasso Sea
MKTGIITTDTYLNHNTGQGHPERADRVTVVIDHLKKLKSKNLIWKKPAKFDLKYLEYAHDKEYLNNVTESFPKQGLNFLDGDTIVSPGSKDATKDAVGSILTAIDGIIKKDFSNAFCAVRPPGHHAEKQKAMGFCVYNNVAVGAYYLLEKYKLKKVAIIDFDVHHGNGTQDIFYNNEKVLYISSHQYPYYPGSGAADEKGDKDNVLNVPLSAGTQPHEFLNAYDSIFKKLKEFKPEFILLSAGFDAHKDDPLAQINLESKDYYTLTNRILILAKKLCNGKVVSILEGGYDLNALRESVDYHVKSLLEN

SEQ ID NO: 151604 - protein, 118 aa, Unknown
  Bacterial polypetide isolated from the Sargasso Sea
MEPVEIVFGTALPLNRSDVDTDQIIPSDWLKRVERTGFDRGLFSEWRDNPSFVLNDERFAQARILVAGPNFGTGSSREHAVWAIQQYGFQAVISPRFADIFRNNCTKNGLVPVEVSDE

SEQ ID NO: 151605 - protein, 88 aa, Unknown
  Bacterial polypetide isolated from the Sargasso Sea
MAKTLFDKVWDPHVIEKIKDGPDVLFIDRHFIHEVTSPVAFVGLKNRGLKVMFPDKTFATADHNTPTINKHLPIKDKLSAMQVKTLEK

SEQ ID NO: 151606 - protein, 41 aa, Unknown
  Bacterial polypetide isolated from the Sargasso Sea
MQKFNTLKSIPAYLPIVNIDTDMIIPKQFLKTIKRTGLGKN

SEQ ID NO: 151607 - protein, 67 aa, Unknown
  Bacterial polypetide isolated from the Sargasso Sea
MKKFTTLKSIPAYLPIVNIDTDMIIPKQFLKTIKRTGLGKNLFFEMRYDEKENPINDFILNNDPFNK

SEQ ID NO: 151608 - protein, 55 aa, Unknown
  Bacterial polypetide isolated from the Sargasso Sea
MKKFISIKSIPAYLPIVNIDTDMIIPKQFLKTIKRTGLGKNLFFEMRYDQSGKEK

SEQ ID NO: 151609 - protein, 58 aa, Unknown
  Bacterial polypetide isolated from the Sargasso Sea
MSQTIYDKIWNDHLVHEQKDGTSLLFVDRHLIHEVTSPQAFEGLRNSNRKVRQPKLTL

SEQ ID NO: 151610 - protein, 54 aa, Unknown
  Bacterial polypetide isolated from the Sargasso Sea
MSKTIYDKIWNEHLVHEQDDGTSLLFVDRHLIHEVTSPQAFEGLRNSKRKVRQP

SEQ ID NO: 151611 - protein, 79 aa, Unknown
  Bacterial polypetide isolated from the Sargasso Sea
MQKFTNLKSIPAYLPIVNIDTDMIIPKQFLKTIKRTGLGKNLFYEMRYDVEGKIINDFILNQSPFNESKILIAGKNFGC

SEQ ID NO: 151612 - protein, 39 aa, Unknown
  Bacterial polypetide isolated from the Sargasso Sea
TSNRNFEGRQGREGRTHLVSPAIAAASAIKGSFATVEDL

SEQ ID NO: 151613 - protein, 34 aa, Unknown
  Bacterial polypetide isolated from the Sargasso Sea
FEGRQGREGRTHLVSPAVAAASAIKGSFSSVEDL

SEQ ID NO: 151614 - protein, 65 aa, Unknown
  Bacterial polypetide isolated from the Sargasso Sea
MKNQYIFHSGIIMPLPRDNVDTDQIIPKQFLKSIKKSGFGPNLFDAWRYEDEGYPGQDNDYRPKN

SEQ ID NO: 151615 - protein, 39 aa, Unknown
  Bacterial polypetide isolated from the Sargasso Sea
MHKIFIEAGFEWREPGLLNVFRYEPRSIEAKRKVCINFK

SEQ ID NO: 151616 - protein, 77 aa, Unknown
  Bacterial polypetide isolated from the Sargasso Sea
MQKFNKLTSIPAYLPIVNIDTDMIIPKQFLKTIKRTGLGKNLFFEMRYDDQGNEIKDFVLNQKPHLAQSKNFNCGKK

SEQ ID NO: 151617 - protein, 205 aa, Unknown
  Bacterial polypetide isolated from the Sargasso Sea
MEAFRKLTATAAPIQIANIDTDQIIPARFLKTPRSTDHGQFLFHDMRRGRDGNLSEDFILNQKEFKASGILVADNNFGCGSSRESAVYALHDAGIKCVIAPSFGDIFYTNSLKNGLLPIKLDRSIVQAIWKALASANSSEVEVDLESQTIHLPDGSTYGFEIDAFRKQCLLEGLDDIDLTLKHQESIEQHELIEKTNYPWTRSIN

SEQ ID NO: 151618 - protein, 418 aa, Unknown
  Bacterial polypetide isolated from the Sargasso Sea
MAQKIIARAAGKAEVAVGEIEIGSVDLAMIHDSGGPRRVAPILERLGVEVWDPEKLVVVTDHYVPVFDAESRAILDLARDWVKKQGVSRFHDEEGICHVVLPENGYLKPGMFAVGGDSHSPTGGAFGCYMFGIGATEMAGVLATGEIWIRVPETIRIEWEGTFQEGVMAKDVMLFLCGRLGMDGGRYQAVEYCGEAISELSMQERMTLSNMSAELGAQAGLIAPDATTMKWLEDHGSESDPVEPWKTDPDADFEYHRFDADRLEPQVAAPHNPANAASVVEYNDIRPDVLYLGACTGAKLHDLRAAASVLKENRVQSGIEFWVAPSSKRDFHEARKEGVMKILEDAGAKILPTSCGLCAGYGPQRLGQGTVCLSSTARNFKGRMGDESSEVYLASPITVASTAITGYISDPRNFLGAS

SEQ ID NO: 151619 - protein, 198 aa, Unknown
  Bacterial polypetide isolated from the Sargasso Sea
MGYEKFKILKSTVVPLPIENVDTDQIIPARFLKATERVGFGDNLFRDWRYHADNSKKKDFVLNNNNYSGKILVGGKNFGSGSSREHAAWAIYDYGFRCVISSFFADIFKNNCLNIGVLPVQVSPNFLDKIFEIVFKNPQTNLVIDLKKQTVEIEGTSQIESFDINGYKKNNLLNGYDDIDYLLNIKDSIQTFSTKTPL

SEQ ID NO: 151620 - protein, 170 aa, Unknown
  Bacterial polypetide isolated from the Sargasso Sea
MDYPECSDRVQNIIELINKKEEFKNIIIKQPNKIEQSLISAAHEEKFVRETLARFPSDDQIVFLDQETPVSKGSLDATLRAAGAGIDAVDAIMSNNIHNAFCIVRPPGHHACYDRSMGFCVFNNVAIAAHYLINKYKFKNIAIIDFDVHHGNGTQDIFYNNSKVTYYSTH

SEQ ID NO: 151621 - protein, 80 aa, Unknown
  Bacterial polypetide isolated from the Sargasso Sea
MGKTLFEKIWDNHLVASIDKSTNLIFVDLHLVHEVTSPQAFDSLRIAGRKVKYPELTLATVDHGVPTSNRLLGIKDPLSK

SEQ ID NO: 151622 - protein, 55 aa, Unknown
  Bacterial polypetide isolated from the Sargasso Sea
MKKFTSIKSIPAYLPIVNIDTDMIIPKQFLKTIKRTGLGKNLFYEMRYDQKWKLN

SEQ ID NO: 151623 - protein, 372 aa, Unknown
  Bacterial polypetide isolated from the Sargasso Sea
MARRTGGIGGAQPLLHTDKGVSGTGLATLLAGVLAEGELPVAAIWDEIPADSSTAVVERIAARHRELGCDSLVALGGGSVIDTAKAVNILASMGGTRLLDYAGAGCLTRPLQPLAVVPTTAGTGSEVTLVAVIKDEASGRKVPFTSPFLLPQLAVLDPRLTQGLPLNITAATAMDAMTHAIEAFIGNAKNPVSDALALMAVEKIANALPQVLSNPQDKRLRLQLAEGSTLAGMAFSNSMVGLVHALGHSLGARCHLPHGLCMNLFLPTVLDYNRPGIDPELARLLLPLVGAERFAATPATARAQAAIEALQALRDTLWQAVKLPRTLREAGVTDKALLPEIRDLAINDGALLYNRKDADRTQLLGLLELAWE

SEQ ID NO: 151624 - protein, 79 aa, Unknown
  Bacterial polypetide isolated from the Sargasso Sea
MQKFSTLKSIPAYLPIVNIDTDMIIPKQFLKTIKRTGLGKNLFFEMRYDDNGNKIGDFILNQDPFTNSKILIAGKNFGC

SEQ ID NO: 151625 - protein, 681 aa, Unknown
  Bacterial polypetide isolated from the Sargasso Sea
MLSTFYLTSVFAQEDFQFTFEPPELQIQLGESKKVTIRLLDKQQNLVKSSFSMYSAHDPGIGPTPDWPGTSLSISPRVSDETGKATVSIEPNRSGTLKLKVRGANGATGEMIVMVPKPAVKKIDISAIPPKVYVGTFVPLKFKIIDASNNERDDVELSISSSDDKKGRVDVFNTFEAKKTGTVKVSVKAEKISETFKIKIVSNPVRRISMDFQQTEIRTGDVLHINAKALAGNGSLVKDAPLDYAYFGKAGYGEYGLPASAYISEDGRFVAETPGLYTLVVSSGSYSSQKKVNVVSRNVKKEVRLVGHGLISNVKSGDLWVWPGVGKHSGKDFAATGSIFGDGEAYFWDVTDPANMKIIDTVKVDARNVNDVKVSEDGRTGVITREGASNRKNGFVILDVSDPFNVKILSTFNDDMTGGVHNTFIYKNHVYAVNNGRKYDIINIEDPKNPFRVGVFELNTAGHAIHDVWIENGIAYSSNWRDGIVAVDIGGSTSNEKESSDIGFNPLLLKAGNGSPSNPVQLASFPDFKGRNHSAFPFSSQSTGNFYIVMGDEVFPNGLENLINNKPSQPRGGFHFINFSDPDNPVEDAAYIVPEAGSHNQWVYGDVLLAAFYQGGIRILDISGELLGDLYKQEREIGYFLPQHRDGIIPNAPMVWGAQPYKDYIFLSDMNSGLYCIEVVD

SEQ ID NO: 151626 - protein, 56 aa, Unknown
  Bacterial polypetide isolated from the Sargasso Sea
PGSGLVKQQAEQEGLDKIFINSGFEWREPGCSMCLAMNADKLKPEERCASTSNRNL

SEQ ID NO: 151627 - protein, 49 aa, Unknown
  Bacterial polypetide isolated from the Sargasso Sea
MSKTLYDKIWENHLVHQQEDGTSLIYVDRHLVHEVTSPQALKDENTKKK

SEQ ID NO: 151628 - protein, 65 aa, Unknown
  Bacterial polypetide isolated from the Sargasso Sea
WREAGCSMCLGMNPDILAPGERCASTSNRNYEGRQGVGGRTHLVSPQMAAAAAINGFFVDVREGN

SEQ ID NO: 151629 - protein, 305 aa, Unknown
  Bacterial polypetide isolated from the Sargasso Sea
LFEKIWDSHFVTEIDGEHLVYVDRLFIHEGSRHSFSMLRDSNIKPYRVEQIIGFADHYMPTETTVGGVSGVKDPEIRGMLELMEKNTSEFGIRYFGFQDPDQGILHVTPPEQGISQPGMLICGADSHTSTHGAFGSLAFGIGASEAGHIMATQCIWQQRPSTLRINIEGSLPFGVYAKDIILGLIAKFGVGLGVGTAIEFSGSCINNLTMEERMTVCNMTIEAAGRMGMIAPDDTTYEYMEERPYIPKGTLWNNAINYWQTLPTDDGAIFDDEKELNIDELVPMVTWGYKSWNGCSNYRFGSVTG

SEQ ID NO: 151630 - protein, 92 aa, Unknown
  Bacterial polypetide isolated from the Sargasso Sea
NSNFGCGSSREHAPQALMRWGIKAIIGESFADIFYSNCIAIGVPCFTLPKKSIEEIQNYCDNQSLFLEIDLKNSLAESKDLNFYLEIKESSR

SEQ ID NO: 151631 - protein, 155 aa, Unknown
  Bacterial polypetide isolated from the Sargasso Sea
DDRRELKGQHPFDQERFRGASILVVNGNFGCGSSREHAPQALMRWGIRAVVGVSFAEIFYGNCLALGLPCATASSSDVEAIQQRVMQAPDRSWSLDLEAERLTSDEHQWDISVDAGPRQMLLSGRWDATSQLLAHGPEVEQLMQALPYINGFSRR

SEQ ID NO: 151632 - protein, 100 aa, Unknown
  Bacterial polypetide isolated from the Sargasso Sea
MKSNSEGLIIDGVVAYIDRDNIDTDQIIPTEYLKSIKKFGFEDYLFDGWRYKDDGKLGITKDQRVIDENFILNKNPFNESKILLTRDNFGCGSSREHAVW

SEQ ID NO: 151633 - protein, 115 aa, Unknown
  Bacterial polypetide isolated from the Sargasso Sea
LRDFGIKAVIASSFGDIFYNNCFKNGVLPIKLEKENIERLFDLVKKEAVEFSINLQQRIIHLNDKDKIKFKVDAHLIDRIIFGLDDVDISLKEKDKIMLFEKNRKISKPWIYVNE

SEQ ID NO: 151634 - protein, 44 aa, Unknown
  Bacterial polypetide isolated from the Sargasso Sea
MSAKTLYDKLWANHLVKERDDGSALIYIDRHILHEVTSPQAFEG

SEQ ID NO: 151635 - protein, 61 aa, Unknown
  Bacterial polypetide isolated from the Sargasso Sea
MGYTIYDKLWNEHLIRSYDDGDSLIYIDRHFLHEVTSPQAFEGLKKKSLKPWRINANIATP

SEQ ID NO: 151636 - protein, 160 aa, Unknown
  Bacterial polypetide isolated from the Sargasso Sea
MKGNVIKYERDNIDTDVIIPGTYLKIHDYNELAKHAMEGLDPEFHSKVHEGDFLLAGKNFGCGSSREHAPIALSTCGIKAVLAVSFARIFYRNSVDGAFLLPIEIDEKTYQTISNNDELEIDIEKNEIKNISKNETYAIKPFSEIIAKIISAGGLFKYKK

SEQ ID NO: 151637 - protein, 78 aa, Unknown
  Bacterial polypetide isolated from the Sargasso Sea
MSETLFEKIWSSHVVKEKENEPSLIYIDRHLIHEVTSPQAFEGLRTNNRKVRRPDLTIATVDHNIPNTDRSLPILDET

SEQ ID NO: 151638 - protein, 207 aa, Unknown
  Bacterial polypetide isolated from the Sargasso Sea
MKSEFQPPIGKISQISGQCISLIGNDIDTDRIIPARFLKCINFDSLGKSVFEDDRKTLKGRHPFDLEENENASILIVNSNFGCGSSREHAPQALMRWGIKAIIGESFAEIFYSNCIAIGIPCFTLPKKTIQYIQKYNDNKFLSLEIDLKNSLAKSKNLNLNLEIKASTRKMFLSGEWDATSTLLENENLIENKLNDLPYLNFNVDFF

SEQ ID NO: 151639 - protein, 92 aa, Unknown
  Bacterial polypetide isolated from the Sargasso Sea
MKIEFKPPIGKISNINGQCISLIGNDIDTDRIIPARFLKCVNFDSLGESVFEDDRKTLKGKHPFDLEENKNASILVVNSNFGCGSSREHAPQ

SEQ ID NO: 151640 - protein, 104 aa, Unknown
  Bacterial polypetide isolated from the Sargasso Sea
MEKFEILKGIAAPLPMINVDTDMIIPKQFLKTIKRSGLGKNLFHELRYDMQGNIKNDFVLNWDPYKQASILIAGDNFGCGSSREHAPWSLLDFGFKCIIAPKFC

SEQ ID NO: 151641 - protein, 207 aa, Unknown
  Bacterial polypetide isolated from the Sargasso Sea
MKSEFTPPIGKISNMKGKCISLIGNDIDTDRIIPARFLKCINFDSLGESVFEDDRKTLKGKHPFDLEENKNSSILVVNSNFGCGSSREHAPQALMRWGIKAIIGESFADIFYSNCIAIGIPCFTLPKKSIEEIQNYCDNQFLFLEIDMKNSLAKSKDLNFNLEIKESSRKMFLSGEWDATSTLLDNKNLIENKFNQLPYIKFNTNFL

SEQ ID NO: 151642 - protein, 120 aa, Unknown
  Bacterial polypetide isolated from the Sargasso Sea
HAVWALRDFGIKAVIASSFGDIFYNNCFKNGVLPIYLEKNQIEKLFSLVKKEVVELSIDLQKRIIFLKNQDEINFEVDDHLIERIIYGLDDIDITLKEKDKISNFEKNRKITRPWIYANE

SEQ ID NO: 151643 - protein, 49 aa, Unknown
  Bacterial polypetide isolated from the Sargasso Sea
MPRTLYDKLWDLHEVTQRQDGTYLLYIDRHLIHEVTSPQAFEGLRLAGR

SEQ ID NO: 151644 - protein, 59 aa, Unknown
  Bacterial polypetide isolated from the Sargasso Sea
MSENKTLYDKIWDDHLISEEDDGTSLLYVDRHLVHEVTSPQAFEGLRLSNRKVRSPEKT

SEQ ID NO: 151645 - protein, 129 aa, Unknown
  Bacterial polypetide isolated from the Sargasso Sea
AGKNFGCGSSREHAPWALLDFGITCVISSSFADIFHNNCFKNGILPVTLDEEKIRELSEYANRKEEISIDLVEEKVVYGNNEVTFKVDPFKKKCLLEGLDEIALSLNKSNKIESFENNLKSKKPWIFND

SEQ ID NO: 151646 - protein, 98 aa, Unknown
  Bacterial polypetide isolated from the Sargasso Sea
MEKFKTLEGIAAPMPLINIDTDMLIPKQFLKTIKRTGLGENLFFEMRYDKNGNEIKDFILNREHYSKSSIIIGGANFGCGSSREHAPWALKDFGIKCI

SEQ ID NO: 151647 - protein, 202 aa, Unknown
  Bacterial polypetide isolated from the Sargasso Sea
MKTLKSDDDAIFDKEFTFDGSLIEPMITYGTNPGMGISINSGIPSSNQHGGNKETFLKSLEYMDYSEGDKILGKKIDFVFLGSCTNGRIEDFRAFTNIVKGRKKAPNVTAWLVPGSHKVEKAIKDEGLLTILNESGFELREPGCSACLAMNDDKIPPGKYAVSTSNRNFEGRQGPGSRTLLASPIVAAAAAITGMVTDPRYL

SEQ ID NO: 151648 - protein, 50 aa, Unknown
  Bacterial polypetide isolated from the Sargasso Sea
MTETLFEKIWNSHVVVERENEPSLIYIDRHLVHEVTSPQAFDGLRQNNRK

SEQ ID NO: 151649 - protein, 123 aa, Unknown
  Bacterial polypetide isolated from the Sargasso Sea
MWSSREHAPWALLDFGITCVISPSYADIFYNNCFKNGILPIILDDEKIKQISQYSNRKEEIEVDLYNQKIVFGNNEIKFELDAFKKKCLLEGLDDIALSLEKTDKIISFEKNLKNTKPWIFND

SEQ ID NO: 151650 - protein, 149 aa, Unknown
  Bacterial polypetide isolated from the Sargasso Sea
WRYNEDGTDDPNFILNKKENKGSEILIAGNNFGCGSSREHAPWAILDYGIKVVISSKIADIFKGNSLKNGLLPIVVTEDILSMLMDIPCPYLSICIKKSELTLPNNEIFEYEIDEFSKYCLIEGIDQLGYIKRNINLIEKFEEKRSWTP

SEQ ID NO: 151651 - protein, 172 aa, Unknown
  Bacterial polypetide isolated from the Sargasso Sea
FKTIKRTGLGKNLFFEMRYDENGKKIEDFILNKEPFNKSNILIAGKNFGCESSREHAPWALLDFGITCVISSSYADIFYNNCFKNGILPITISEDEIKEISEYSTRKEEISIILEDQKILFGNKEVKFEIDQFKKKCLIEGLDDIALSLEQKTKIEKFENNLKSSKPWIFND

SEQ ID NO: 151652 - protein, 230 aa, Unknown
  Bacterial polypetide isolated from the Sargasso Sea
LENRFTLCNMAVEFSAFTGIIAPDQKVFDYLKDRPYSPNKTWAETIDYWKSLHSDENAIFDKAIEIDASQIYPSVSWGLSPEQSIPIDGSIPNLHEISNPDKKEELESSLKYMGLKSGQSLMHLPIDAAFIGSCTNARLDDLRSAAKILKGNKVSGDVLAICTPASATVKRNAEKEGIDQIFKDAGFEWREPGCSLCFYAGGEGFLPEQRVITSTNRNFRGRQGPGVRSH

SEQ ID NO: 151653 - protein, 151 aa, Unknown
  Bacterial polypetide isolated from the Sargasso Sea
MTDSFQDKIVRVKGTGVWVEGDDLDTDRIIPAEYLKCVTFNGLGEFAFYNARFDADGNETDHPLNDARFEGASVMLSGRNFGCGSSREHAPQSLYRAGFRAIIAESFAEIFFGNCTTLGLICVCAPRGDINQLGALLEEDPTLEISIDLNT

SEQ ID NO: 151654 - protein, 315 aa, Unknown
  Bacterial polypetide isolated from the Sargasso Sea
IGLHLIHEVTTPQAFAMLEELDASVAFPDRTVATVDHIIPTLSLLRPLEDQQAELMMASLEQNVEKFGIRFLNKNSQMQGIVHVIGPELGLSQPGMTIACGDSHTSTHGAMGALGFGIGTTEVGHVLASQTLSLNRLKVRRIEVNGDLQGGVLPKDVILRIIHDLGIKGGIGHAYEYAGTVFDNMDMEGRMTVCNMSIEGGARIGYVNPDKTTFDYLSGREFAPKGDDFKKAQVFWESIASDTDAKYDDTFEILADSIEPMVTWGINPGQSIGLSDSLPDPSVFSGEDIKTAEKGFEFMGLRPGTPIRDTKIDVA

SEQ ID NO: 151655 - protein, 58 aa, Unknown
  Bacterial polypetide isolated from the Sargasso Sea
VIVCGDSHTATHGAFGALAFGIGTSEVEHAFSNTNLNSKKIKKFSHKCHRKIKFRSDF

SEQ ID NO: 151656 - protein, 98 aa, Unknown
  Bacterial polypetide isolated from the Sargasso Sea
LISSLSVENRMTVCNMTIEAGARAGLIQPDQKVFDYLKNKPMSPKNENWDKAVQYWNTLKSDHGAKFDKEVIIEGNELIPMVTWGTSPHDVITIDGKV

SEQ ID NO: 151657 - protein, 49 aa, Unknown
  Bacterial polypetide isolated from the Sargasso Sea
MSTTLYDKIWNDHLVDQQEDGTSLLFVDRHLIHEVTSPQAFEGLRNSKR

SEQ ID NO: 151658 - protein, 73 aa, Unknown
  Bacterial polypetide isolated from the Sargasso Sea
MPYTIYDKIWNEHLVHEQEDGTSLLFVDRHLIHEVTSPQAFEGLRDSKRKVRQPKLTLAVADHNVPTTDRTQG

SEQ ID NO: 151659 - protein, 54 aa, Unknown
  Bacterial polypetide isolated from the Sargasso Sea
MPNTLYDKIWNDHLVHQQDDGTALLFVDRHLVHEVTSPQAFEGLRNSKRKVRHP

SEQ ID NO: 151660 - protein, 83 aa, Unknown
  Bacterial polypetide isolated from the Sargasso Sea
MPFTTYDKIWNEHLVDEQPDGTSLLFVDRHLIHEVTSPQAFEGLRNSNRKVRHPKLTLAVADHNVPYTDRSKGIADEDSRISV

SEQ ID NO: 151661 - protein, 91 aa, Unknown
  Bacterial polypetide isolated from the Sargasso Sea
MEQNQPRTLFEKIWQSHLVREKTGEPTLLYVDLHLVHEVTSPQAFDGLRIAGRNVRRTDLTIAVMDHNTPTWDLSLPVKDPIAKQQLDALA

SEQ ID NO: 151662 - protein, 43 aa, Unknown
  Bacterial polypetide isolated from the Sargasso Sea
MKPQTLFDKIWNTHLVEKQEDGTCLIYIDRHLVHEVTSPQALK

SEQ ID NO: 151663 - protein, 117 aa, Unknown
  Bacterial polypetide isolated from the Sargasso Sea
SREHAPWALLDFGIRVIVSESFADIFYNNCFKNGILPVIANEGIINELKDYSLRKENIEVKLEEQEILYGNKSFKFELDTFKKKCLLEGLDDIALSLKKIENIKKFENKISQSKPWL

SEQ ID NO: 151664 - protein, 95 aa, Unknown
  Bacterial polypetide isolated from the Sargasso Sea
MESFKTIIGIPAPLPMINVDTDMIIPKQFLKTIKRSGLGKNLFHELRYDIQGNIKNDFVLNWDPYKTSKILIAGANFGCGSSREHAPWSLLDFGF

SEQ ID NO: 151665 - protein, 50 aa, Unknown
  Bacterial polypetide isolated from the Sargasso Sea
MSKTLYDKIWDDHLVHKDNDGTALLYVDRHLIHEVTSPQAFEGLRIQAEK

SEQ ID NO: 151666 - protein, 121 aa, Unknown
  Bacterial polypetide isolated from the Sargasso Sea
MEPFIRHKGTAAPLRRSNVDTDQIIPAEYLKRITRDGFEDGLFSAWRKDPDFVLNRHEYRGVSILVAGPDFGTGSSREHAVWALQNYGFCVVLSSRFADIFRGNSGKGGLLTAQVDQRVIE

SEQ ID NO: 151667 - protein, 40 aa, Unknown
  Bacterial polypetide isolated from the Sargasso Sea
MPNTLYDKIWNDHLVHQQDDGTSLLFVDRHLVHEVTSPQA

SEQ ID NO: 151668 - protein, 95 aa, Unknown
  Bacterial polypetide isolated from the Sargasso Sea
MSTGTLYDKVWDLHCVGDLPGGSTQLFVGLHLIHEVTSPQAFAALRDKGLTVRCPERTVATVDHIVPTTSQARPFADPLAEEMLSTLERNCEEYG

SEQ ID NO: 151669 - protein, 85 aa, Unknown
  Bacterial polypetide isolated from the Sargasso Sea
MPFTTYDKIWNEHLVDEQPDGTSLLFVDRHLIHEVTSPQAFEGLRNSNRKVRHPKLTLAVADHNVPTTDRSKGIADEDSKIQVET

SEQ ID NO: 151670 - protein, 115 aa, Unknown
  Bacterial polypetide isolated from the Sargasso Sea
SWALDDFGIRCVIAPDFADIFFNNSFKNGILLIKLPQKEVDDLMEAAERGANSTMTIDLATQEIISSDGKSIKFELDPFKKHCLLNGLDDIGLTMEKEKKIGTFEENQKVTQPWL

SEQ ID NO: 151671 - protein, 62 aa, Unknown
  Bacterial polypetide isolated from the Sargasso Sea
MPQTLYDKIWNEHIVHQQDDGTTLLYVDRHLIHEVTSPQAFEGLRLSKRKVRKPNLALAVAD

SEQ ID NO: 151672 - protein, 43 aa, Unknown
  Bacterial polypetide isolated from the Sargasso Sea
MAETLFEKIWNSHVVVERENEPSLIYIDRHLVHEVTSPQAFDG

SEQ ID NO: 151673 - protein, 152 aa, Unknown
  Bacterial polypetide isolated from the Sargasso Sea
MVDFSNSSPKTLFDKIWDNHVVMENDDGTSLIYIDMHLTHEVTSWTGFEYLRDTNKTVRRTDKTLAVPDHSIPTLNQANGIKDPIAREQVEALVKNTKDFDIPYIPLLDIRQGIVHVIGPEQGVTQPGSTLVCGDSHTATHGAFGCLAFGIG

SEQ ID NO: 151674 - protein, 134 aa, Unknown
  Bacterial polypetide isolated from the Sargasso Sea
SKILIAEKNFGCGSSREHAPWALLDFGITCVISSSYADIFFSNCFKNGILPIILEEEKIKELSEYANRQEEISIDLQEEKIVYGNNELKFEVDPFKKKCLLEGLDDIALSLKKSEKIEKFETNLKNEKPWVFND

SEQ ID NO: 151675 - protein, 308 aa, Unknown
  Bacterial polypetide isolated from the Sargasso Sea
SEGTDSKSVYVDDTAPDETTIIVSSSIETSNFLGETNPEDPDQYLSLTGDQLTLEFTTEEHLSEVHVMVDGTEYQATGSNTQWTVQTDTTTPLTGNQEVSFSLSRYTDLAGNEQITPTTSVSEGTDSKSVYVDDTAPDETTIIVSSSIETSNFLGETNPEDPDQYLSLTGDQLTLEFTTEEHLSEVHVMVDGTEYQATGSDTQWTVQTDTTTPLTGNQEVSFSLSRYTDLAGNEQITPTTSVSEGTDSKSVYVDDTAPDETTIIVSSSIETSNFLGETNPEDPDQYLSLTGDQLTLEFTTEEHLSEVH

SEQ ID NO: 151676 - protein, 237 aa, Unknown
  Bacterial polypetide isolated from the Sargasso Sea
GARGGMIAPDEKTFEYLKDKEYSPKGQDWDNAIKNWNSLKSDSNSVFDKEISFNASDIEPMITYGTNPGMAVPISKEIPHFDDSGSKSSFSKSLEYMNFKEGDVMLGKKIDYVFLGSCTNGRIEDFRSFASLIKGKRKAENIDAWLVPGSHKVLKSIKEEGILEILENSGFKLREPGCSACLAMNDDKIPAGKYAVSTTNRNFEGRQGPGARTLLASPLVAAASAITGKITDPREIT

SEQ ID NO: 151677 - protein, 208 aa, Unknown
  Bacterial polypetide isolated from the Sargasso Sea
MATQTLYNKVWDLHKVATLPTGQDQLFIGLHLIHEVTTPQAFAAINESNGTVAYPNRTFATVDHIIPTLTQSRPYQDAQAEIMSSTLESNVKKHGIQFFDPNSSKQGIVHVIGPELGITQPGMTIACGDSHTSTHGAFGSLAFGIGTTEVRLILETQTLALSPLKVRRISVDGELGTGLSAKDVILAIINKLGVKGGIGYAYEYGGDV

SEQ ID NO: 151678 - protein, 60 aa, Unknown
  Bacterial polypetide isolated from the Sargasso Sea
MPNTLYDKIWKDHLVDQQDDGTALLFVDRHLVHEVTSPQAFEGLRNSNRNVRHPNLTLAV

SEQ ID NO: 151679 - protein, 56 aa, Unknown
  Bacterial polypetide isolated from the Sargasso Sea
MEAFTQLEALTAVMDRINVDTDQIIPKQFLKKIERTGFGKHLFHDWRYLNDEGTQP

SEQ ID NO: 151680 - protein, 47 aa, Unknown
  Bacterial polypetide isolated from the Sargasso Sea
MPQTLYDKIWNEHIVHQQNDGTALLYVDRHLIHEVTSPQAFEGLRIS

SEQ ID NO: 151681 - protein, 44 aa, Unknown
  Bacterial polypetide isolated from the Sargasso Sea
MKKNIDKKNSINRSLDYMGLKPDVKVQDIKIDKVFIGSCTNGRI

SEQ ID NO: 151682 - protein, 254 aa, Unknown
  Bacterial polypetide isolated from the Sargasso Sea
MSMEGRMTVVNLSIEMVQRGGMIAPDQKTFDYVKGREFAPVGADWESVIEFWKNLPSDKGAIFDKEFHFDGKDIEPMITFGTNPGMGMSILKDIPKYNSETGQEETYKKSLDYMAYKEGETMIGKQIDFVFLGSCTNGRIEDFRAFSEIVKGKKKAKNVVAWLVPGSHKVEKAIKDEGILKILNEAGFELREPGCSACLAMNDDKVPPGKYAVSTSNRNFEGRQGPGSRTLLASPIVAAAAAITGKVTDPRTLF

SEQ ID NO: 151683 - protein, 279 aa, Unknown
  Bacterial polypetide isolated from the Sargasso Sea
GIALPGLSFICPDSHTCTLGGLGALAWGVGSTEAEHALATSTLRVTRPQTMRVSFAGLLGAGVSAKDLILFTIRELSASGGAGYAIEFAGPAIDALPVEARLTLCNMTTELSAFTGLIAPDQKVLDYCVGRRYAPQGQLWDQAAQHWQSLRSDEGAAFDQEHRFDIGSLKPQLSWGTSPQHCVDWDDAIPHVRDAPDASASAAWQRAQDYMGVTPGSQLSDYALDAAFIGSCTNSRLPDLQLAAAYLVRTGHKVAKGVKALCVPGSGQVKRAAEAEGLD

SEQ ID NO: 151684 - protein, 90 aa, Unknown
  Bacterial polypetide isolated from the Sargasso Sea
GSGLVKNQAEQEGLDKIFKKSGFEWREPGCSMCLGMNEDQLKPKERCASTSNRNFEGRQGRGGRTHLLSPAMAAAAAIEGHLSDVRKFDN

SEQ ID NO: 151685 - protein, 52 aa, Unknown
  Bacterial polypetide isolated from the Sargasso Sea
MTINNPKTLFDKIWEHHLVDRQEDGTCLIYIDRHLVHEVTSPQAFEGLRNNN

SEQ ID NO: 151686 - protein, 155 aa, Unknown
  Bacterial polypetide isolated from the Sargasso Sea
MSNSGKTLFEKVWNDHLVLQETEETPAILYIDLHLIHEVTTPQAFQSLRDQGLSVRDPNKVLATMDHSTPTLPVRSLRDLDIVAEKGPADQIRDMIRNCEEFGIELHGFDSDKRGIVHVIGPELGATQPGKTIVCGDSHTSTHGAFGALAFGIGT

SEQ ID NO: 151687 - protein, 237 aa, Unknown
  Bacterial polypetide isolated from the Sargasso Sea
MNGGAYQAFQYTGDAVQSLSMTERMTLCNMSAELGAQTGIIAPDETTFEYIKEAGGDIEDENNLISDDDANYLIKHEFSANDLEPQVATPHSPANSTEIKNIEKVQVDKFYIGACTGAKLVDLSMAAKILKNNKVAAGKQLTVAPASSKIYNQASENGVMSILTEAGAKLLPPGCGACAGYGAGVLENNEVCLASTARNFQGRMGASTSHVYLGSPYTVAASAVTGAITDPREFLED

SEQ ID NO: 151688 - protein, 48 aa, Unknown
  Bacterial polypetide isolated from the Sargasso Sea
MSKTLYDKIWENHLVHEQSDGTSLIYVDRHLVHEVTSPQAFEGLRLQK

SEQ ID NO: 151689 - protein, 90 aa, Unknown
  Bacterial polypetide isolated from the Sargasso Sea
MEPFKTIKGIPAPLPMINVDTDMIIPKQFLKTIKRSGLGKNLFHELRYDIQGNIKNDFVLNWDPYKSSKILITGANFGCGSSREHAPWSL

SEQ ID NO: 151690 - protein, 59 aa, Unknown
  Bacterial polypetide isolated from the Sargasso Sea
MTPAPRTLYDKLWDAHVVVPESDSAPAVLYIDLHLIHEVTSPQAFTELRERGLSPRRPD

SEQ ID NO: 151691 - protein, 155 aa, Unknown
  Bacterial polypetide isolated from the Sargasso Sea
MGKCISLVGDDIDTDRIIPARFLKCIDFDSLGKSVFDDDRKTLKGNHPFDLETNKGATILIVNSNFGCGSSREHAPQALMRWGIKAIIGESFADIFYSNCIAIGVPCFTLPKKSIKEIQKYLDIKNLFLEIDLFKSTAKGEKLKFNLEIKETSKK

SEQ ID NO: 151692 - protein, 162 aa, Unknown
  Bacterial polypetide isolated from the Sargasso Sea
KNLFFEMRYDDQGKEINDFVLNKDPFNQSKILIAGKNFGCGSSREHAPWALLDFGITCVISSSYADIFFSNCFKNGILPIILEEEKIKELSEYANRQEEISIDLQEEKIVYGNNELKFEVDPFKKKCLLEGLDDIALSLKKSEKIEKFETNLKNEKPWVFND

SEQ ID NO: 151693 - protein, 180 aa, Unknown
  Bacterial polypetide isolated from the Sargasso Sea
NVDTDQIIPAKYLKRVERTGFGQYLFDAWRKLPDGTPNPEFILNDDRYNGATILVAGPNFGSGSSREHAPWALNDYGFRTIIAPSFADIFRNNCFQNGMLPIVLDQAIIDKIIEKSSKNPDYSLTVDLESGVISDSEELTIEFTIDSFKKHCLLEGLDDIGLTLSEESMIKNFESRHVIS

SEQ ID NO: 151694 - protein, 73 aa, Unknown
  Bacterial polypetide isolated from the Sargasso Sea
MSHTIYDKIWNEHLVHQQEDGTSLLFVDRHLIHEVTSPQAFEGLRSSNRKVRQPTLTLAVADHNVPTTDRTKG

SEQ ID NO: 151695 - protein, 64 aa, Unknown
  Bacterial polypetide isolated from the Sargasso Sea
MSNPSPKTLFDKIWSHHLVHQQEDGTCLIYIDRHLVHEVTSPQAFEGLRNNNRKVRRPESLLQS

SEQ ID NO: 151696 - protein, 86 aa, Unknown
  Bacterial polypetide isolated from the Sargasso Sea
MPKTLYDKIWSDHLVHQQDDGTSLLFVDRHLIHEVTSPQAFEGIRNSKRNVRHPNLTLAVVDHNIPTTDRSKGIDDNDSRIQVETL

SEQ ID NO: 151697 - protein, 198 aa, Unknown
  Bacterial polypetide isolated from the Sargasso Sea
MPYEKFRILESSGVPLDIENVDTDQIIPARFLKATERKDFDKNLFRDWRYNQDNTLKKDFVLNDKNYSGKILVAGKNFGSGSSREHAVWAIYDYGFRCVISSFFADIFKNNCLNIGVLPVQISADFLKLIFNSIKKNPKVNLKVNLIEQEVSISDISQIEKFEINPYKKENMMNGFDDIDYLLNMKSEIKNFAAKRPF

SEQ ID NO: 151698 - protein, 49 aa, Unknown
  Bacterial polypetide isolated from the Sargasso Sea
MKPRTLFDKIWESHVVDKQADGTCLLYIDRHLVHEVTSPQAFEGLRKSK

SEQ ID NO: 151699 - protein, 70 aa, Unknown
  Bacterial polypetide isolated from the Sargasso Sea
TNAGIQWREPGCSMCLAMNSDQLGEGKHCASTSNRNFEGRQGFGGRTHLVSPAMAAAAAIHGHFVDVSKI

SEQ ID NO: 151700 - protein, 64 aa, Unknown
  Bacterial polypetide isolated from the Sargasso Sea
MERPGCSMCLAMNPDQLKPKERCASTSNRNFEGRQGREGRTHLVSPAIAAASAIKGSFSNVEDL

SEQ ID NO: 151701 - protein, 145 aa, Unknown
  Bacterial polypetide isolated from the Sargasso Sea
NREPFRKGNILVSKSNFGCGSSREHAVWAIQNYGIDVVIAESFADIFSRNSFKNGLLLITLESQIINEIIESSLLSNSYILDVNLAEDKILLPNDKTITFSISRSYKDRIINELDDIELTLRNKDQIKNYENQMKLSKPWLFNNE

SEQ ID NO: 151702 - protein, 162 aa, Unknown
  Bacterial polypetide isolated from the Sargasso Sea
KNLFFEMRYDDQGKEINDFVLNKDPFNQSKILIAGKNFGCGSSREHAPWALLDFGITCVISSSYADIFYSNCFKNGILPIILEEEKIKELSEYANRKEEISIDLNEEKIVYGNNELKFEVDPFKKKCLLEGLDDIALSLKKSEKIEKFEKNLKNEKPWVFND

SEQ ID NO: 151703 - protein, 110 aa, Unknown
  Bacterial polypetide isolated from the Sargasso Sea
DFGITCVISSSFADIFYNNCFKNGILPIVLDDEKIKELSEYANRKEEIFIDLKEEKIIYGNSETEFKVDTFKKKCLLEGLDDIALSLKKSDKIETFEKNIKNKKPWIFND

SEQ ID NO: 151704 - protein, 161 aa, Unknown
  Bacterial polypetide isolated from the Sargasso Sea
NLFFEMRYDDQVKEINEFILNQDPFNNSKILIAGKNFGCGSSREHAPWALLDFGITCVISSSFADIFYSNCFKNGILPIILDDEKIKELSEYANRKEEISINLKEEKIIYGNNEIEFKVDSFKKKCLLEGLDDIALSLKKSDKIENFEKDLKDKKPWIFND

SEQ ID NO: 151705 - protein, 194 aa, Unknown
  Bacterial polypetide isolated from the Sargasso Sea
MTGRAVPVKGNEVDTDRIIPARYLKETTFDRMGEYLFFDARFDAEGNQVDHPLNDTRFKGAEFMVVQNNFGCGSSREHAPQAIMRYGIKALIGESFAEIFAGNCKALGIPVVTLEKEKIDQLMDAVEENPDIELMINLENKQVLAGDIVFNIEISEERRQSFIQGSWDELAILKNNQPLIEDTANSLPYFSNFQ

SEQ ID NO: 151706 - protein, 198 aa, Unknown
  Bacterial polypetide isolated from the Sargasso Sea
MSIITCIQGSAIYIPGDDIDTDRIVPARFLKEISFENMGEYLFYDVRFNEDGSPKDHVLNHPDTQHAKILIVDSNFGCGSSREHAPQALKRFGFEAIIGISFSEIFAGNCKAIGIPVLRTTATAIQKMNTQLQHNTRTQFSIDLATRHVRFFEESILFEISSAHQESFLSGTWDSLGILKQNTALIQDKVATLPYLNF

SEQ ID NO: 151707 - protein, 59 aa, Unknown
  Bacterial polypetide isolated from the Sargasso Sea
MCLAMNPDKLIGDQVCASTSNRNFIGRQGSSTGRTLLMGPGMAAAAALEGKVVDVRDYL

SEQ ID NO: 151708 - protein, 69 aa, Unknown
  Bacterial polypetide isolated from the Sargasso Sea
GFEWREPGCSMCLAMNADKLKPEERCASTSNRNFEGRQGRGGRTHLVSPAMAAAVAISGNLDDVRKYQN

SEQ ID NO: 151709 - protein, 122 aa, Unknown
  Bacterial polypetide isolated from the Sargasso Sea
MAVGSSREHAPWALLDFGIRVIVSESFADIFYNNCFKNGILPIVAKDEIINELKDYSARKEAIEVKLEEQEIIYGNKTFKFELDSFKKKCLLEGLDDIALSLKKTKNIESFENKMSQNKPWL

SEQ ID NO: 151710 - protein, 172 aa, Unknown
  Bacterial polypetide isolated from the Sargasso Sea
MRSEFTQPIGKISDINGQCISLIGNDIDTDRIIPARFLKCVNFDSLGESVFEDDRKTLKGSHPFDLEKNKNASILIVNSNFGCGSSREHAPQALMRWGIKAIIGESFADIFYSNCIAIGIPCFTLPKKFIEEMQNYCNNQFLFLEIDLKKSLAKSNDLNFNLEIRESSRKMF

SEQ ID NO: 151711 - protein, 89 aa, Unknown
  Bacterial polypetide isolated from the Sargasso Sea
MDKFVKFSGIAAPMPLINIDTDMLIPKQFLKTIKRTGLGENLFFEMRYDTKGNLIKDFILNKDHYSSASIIVAGDYFGCGSSREHAPGA

SEQ ID NO: 151712 - protein, 101 aa, Unknown
  Bacterial polypetide isolated from the Sargasso Sea
SFADIFYNNCFKNGILPIKISEETVLELSDYSKRHEEIEVNLEKQEIFFGNKVVKFEIDKFKKKCLIDGLDDIGLSMKKVNHIDNYEKKINVNKPWILKND

SEQ ID NO: 151713 - protein, 141 aa, Unknown
  Bacterial polypetide isolated from the Sargasso Sea
MEKIIEFSSKTVVLSVNDIDTDQIIPARFLTVTTKDGLGDGLFADWRFDEDGNKVEQFPLNQDKSDGCSILISGSNFGCGSSREHAPWALVDYGFKAILSTSFADIFRNNALKNGLLPLTVSEEFHAMLTENEGIEVNVSL

SEQ ID NO: 151714 - protein, 55 aa, Unknown
  Bacterial polypetide isolated from the Sargasso Sea
MPKTLYDKIWDDHLVFKQDDGTSLLYVDRHLVHEVTSPQAFEGLRLNKRKVRKPN

SEQ ID NO: 151715 - protein, 68 aa, Unknown
  Bacterial polypetide isolated from the Sargasso Sea
FEWREPGCSMCLAMNADKLKPEERCASTSNRNFEGRQGRGGRTHLVSPGMAAAAAISGNLDDVRKYQN

SEQ ID NO: 151716 - protein, 156 aa, Unknown
  Bacterial polypetide isolated from the Sargasso Sea
RLGMEKALDYMNLIPGQRLKDTKVDVVFIGSCTNGRLSDLRAAAEVIKGQKVHPGVKALVVPGSTSTRRAAEQEGLDVIFKRAGFEWRHSGCSLCVALNGDRLKKGQRCVSTSNRNFEGRQGAGGRTHLASPTTAAASAIIGRISDRLSLADGCTR

SEQ ID NO: 151717 - protein, 58 aa, Unknown
  Bacterial polypetide isolated from the Sargasso Sea
MSEYKTLYDKIWENHLISEEDDGTSLLYVDRHLVHEVTSPQAFEGLRMSNRVVRSPEK

SEQ ID NO: 151718 - protein, 139 aa, Unknown
  Bacterial polypetide isolated from the Sargasso Sea
MKSKFTPPIGKITKIDGQCISLIGNDIDTDRIIPARFLKCVNFDSLGESVFEDDRKTLKGRHPFDLEESKNARILIVNSNFGCGSSREHAPQALMRWGIKAIIGESFADIFYSNCICIGIPCFTLPKKSIEEIQNYCDN

SEQ ID NO: 151719 - protein, 92 aa, Unknown
  Bacterial polypetide isolated from the Sargasso Sea
MPKTLYDKIWSDHLVHQQDDGTSLLFVDRHLIHEVTSPQAFEGLRNSKRNVRHPNLTLAVVDHNIPTTDRSKGIDDNDSRIQVETLEKNCKD

SEQ ID NO: 151720 - protein, 53 aa, Unknown
  Bacterial polypetide isolated from the Sargasso Sea
ILPFIGSCTNGRIEDLRAAASIVSENKVSDHVNAIVVPGSGLVKAQAESEGLD

SEQ ID NO: 151721 - protein, 103 aa, Unknown
  Bacterial polypetide isolated from the Sargasso Sea
MPFSTYDKIWNEHLVDEQPDGTSLLFVDRHLIHEVTSPQAFEGLRNSSRKVRHPKLTLAVADHNVPTTDRSKGIADEDSRIQVETLNKNCKEFGVKIFGMDDK

SEQ ID NO: 151722 - protein, 48 aa, Unknown
  Bacterial polypetide isolated from the Sargasso Sea
MDQNNKKRTLFDKIWNSHLVEKQDDGTCLIYIDRHLVHEVTSPQALKD

SEQ ID NO: 151723 - protein, 100 aa, Unknown
  Bacterial polypetide isolated from the Sargasso Sea
MEKFTKIKSIPAYIPLMNIDTDKIIPKQFLKTIKRSGLGKSLFYEMRFDEKGNSIKGFILDQEPFSSSKILITGKNFGCGSSREHAPWALLDFGIRVIIS

SEQ ID NO: 151724 - protein, 194 aa, Unknown
  Bacterial polypetide isolated from the Sargasso Sea
MEKFNTIISPAVPLTTENIDTDQIIPARFLKATTRDGFGDNLFRDWRFDKNNNPITSFPLEDPKYSGNVLIAGKNFGCGSSREHAAWAIADYGFKVVISSEFADIFNNNALNNGVLTVSVSPEFLASAFAAIEEDNNTHIKVDLENQFVELMATGEKIGFQINGYRKECLLNGYDNIDYLLAQKDKIESYEAKR

SEQ ID NO: 151725 - protein, 77 aa, Unknown
  Bacterial polypetide isolated from the Sargasso Sea
LDVIFKKSGFEWREPGCSMCLAMNADKLKPEERCASTSNRNFEGRQGRGGRTHLVSPAMAAAAALSGNLDDVRKYQN

SEQ ID NO: 151726 - protein, 51 aa, Unknown
  Bacterial polypetide isolated from the Sargasso Sea
FILNKNPFNESKILLTRDNFGCGSSREHAVWALRDFGIKAVIASSFRGYFL

SEQ ID NO: 151727 - protein, 109 aa, Unknown
  Bacterial polypetide isolated from the Sargasso Sea
MEKFKNINSIPAHLPLMNVDTDKIIPKQFLKTIKRSGLGKSLFYEMRFDEKGAPIKGFILDNEIYKNSKILITGKNFGCGSSREHAPWALLDFGIKAIVSESFADIFYK

SEQ ID NO: 151728 - protein, 95 aa, Unknown
  Bacterial polypetide isolated from the Sargasso Sea
EHAPWALLDFGIKVIVSESFADIFYNNCFKNGILPIIADENTVKELAEYSRRKENLEIKLEEPEIIYGNNSYKFKLDSFKKKCLVEGLDDIALSL

SEQ ID NO: 151729 - protein, 92 aa, Unknown
  Bacterial polypetide isolated from the Sargasso Sea
MEKFKILKGIAAPLPMMNVDTDMIIPKQFLKTIKRSGLGKNLFHELRYDMQGNIKNDFVLNWDPYKQASILIAGDNFGCGSSREHAPWSLLD

SEQ ID NO: 151730 - protein, 165 aa, Unknown
  Bacterial polypetide isolated from the Sargasso Sea
VSFSALGEQVFADDREELKGNHPFDLEQNKRANILVVNDNFGCGSSREHAPQALMRWGIRLIIGESFAEIFFGNCLALGIPCMTTSKQEITKLQNLVNENSNQIWDFNLQELSITNQKENFKLDLDEGAYKMLYSGKWDATSQLLDAEEKVNNTVKNLPYLNNFK

SEQ ID NO: 151731 - protein, 103 aa, Unknown
  Bacterial polypetide isolated from the Sargasso Sea
MSQTIYDKIWNEHLVHKQKDGTSLLFVDKHLIHEVTSPQAFEGLRTSNRKVRQPKLTLAVADHNVPTTDRSKGISDEDSRIQVETLEKNCKEFGIQLFGMKTK

SEQ ID NO: 151732 - protein, 143 aa, Unknown
  Bacterial polypetide isolated from the Sargasso Sea
MLAQQNFGCGSSREHAVWGLEDIGVQAILAPSFADIFRNNCSKVGLLTIVLAQEDIDYLMSRSEELPDSQLQIDLKSQTVTVAGSEWQRSFEIDPFIKNRLLNGLDDIGITMEHEQDISDFEEARPRIKPSTADAFEDTLKMA

SEQ ID NO: 151733 - protein, 145 aa, Unknown
  Bacterial polypetide isolated from the Sargasso Sea
DFVLNKDPFNQSKILIAGKNFGCGSSREHAPWALLDFGITCVICSSYADIFFSNCFKNGILPVILEEEKIKELSEYANRQEEISIDLQEEKIVYGNNELKFEVDPFKKKCLLEGLDDIALSLKKSEKIEKFETNLKNEKPWVFND

SEQ ID NO: 151734 - protein, 235 aa, Unknown
  Bacterial polypetide isolated from the Sargasso Sea
GGDYQAIQYTGDAVQSLSMTERMTLCNMSAELGAQTGIIAPDETTYEYIREAGGHIEDENNLISDDDANYLIKHDFSANDLEPQVATPHSPANSTEIKNIEKVQVDKFYIGACTGAKLVDLSMAAKILKNNKVAAGKQLTVAPASSKIYNQASENGIMSILTEAGAKLLPPGCGACAGYGAGVLENNEVCLASTARNFQGRMGSSTSHVYLGSPYTVAASAVTGTITDPREFLED

SEQ ID NO: 151735 - protein, 130 aa, Unknown
  Bacterial polypetide isolated from the Sargasso Sea
RDVDVVFIGSCTNSRLSDLQAAAHILKDRKVANSVKMLVVPGSQKIKADAEKIGLNKIFKEAGAEWRESGCSMCLGMNGDTVDSGKLSVSTSNRNFEGRQGKGSRTILASPLTAAASAVEGKVADPRKYL

SEQ ID NO: 151736 - protein, 67 aa, Unknown
  Bacterial polypetide isolated from the Sargasso Sea
EWREPGCSMCLAMNADKLKPEERCASTSNRNFEGRQGRGGRTHLVSPAMAAAAAISGNLDDVRKYQN

SEQ ID NO: 151737 - protein, 100 aa, Unknown
  Bacterial polypetide isolated from the Sargasso Sea
VSPNLNAMIVPGSQMVKHEAEQMGLDKIFKDANFEWRESGCSMCLGMNPDILKPGERCASTSNRNFEGRQGAGGRTHLVSPVMAAAAAIEGHFIDIREWY

SEQ ID NO: 151738 - protein, 123 aa, Unknown
  Bacterial polypetide isolated from the Sargasso Sea
REHAVWSLMDFGFKVVIAESFADIFYNNCFNNGLLPIAISEHEISTLLDLSNKRKEIEIDLQNQIIFVEDNEIAHFEIDPFRKKCILEGLDEIGLSLTHSSEIKEFEKKHYLKSPWIFNKENN

SEQ ID NO: 151739 - protein, 82 aa, Unknown
  Bacterial polypetide isolated from the Sargasso Sea
AESEGIKEIFLEAVFEWRDRGCSMCLGMNPDQLASGERCASTSNRNFEGRQGRGGRTHLVSPITAAASAIKGFFVDVTEESL

SEQ ID NO: 151740 - protein, 43 aa, Unknown
  Bacterial polypetide isolated from the Sargasso Sea
SLSVEQRMTICNMTIEAGARAGLIAPDDKTIEYFKDRPMSPKR

SEQ ID NO: 151741 - protein, 250 aa, Unknown
  Bacterial polypetide isolated from the Sargasso Sea
EGRMTVCNLGIEMGARGGMIAPDDRPFDYLEGREYVPRGDEWAKAVNYWKTLNTDEGATFDKEYNFQAEEIEPMITYGTNPGMAIPISKSIPKADKSESKLSYQKALDYMEFKEGDRMIGKKIDYVFLGSCTNGRIEDFRTFASIIKGRQKSNTVDAWLVPGSHKVLKSIRDEGILDILTESGFKLREPGCSACLAMNDDKIPKGKYAVSTTNRNFEGRQGPGARTLLASPLVAAATAITGEITDPRDII

SEQ ID NO: 151742 - protein, 199 aa, Unknown
  Bacterial polypetide isolated from the Sargasso Sea
MDKFTEITEVAAPMPLPNIDTDMIFPGRFLKTVERTGLGKIAFYRMRYNDDGTENKDFILNKDEYRKSRIIIAGDNFGCGSSREHAPWALLDFGIRCIISTSFADIFFNNAFKNGILCIPMKEQEVTILMADAVNKNKLKIDLVKKNIVREDNSTVPFEIDQHRRHNLLNGLDEIGITLESEEEISKFETKLSLEKPWV

SEQ ID NO: 151743 - protein, 191 aa, Unknown
  Bacterial polypetide isolated from the Sargasso Sea
MEKIIEFSSKTVVLSVNDIDTDQIIPARFLTVTTKDGLGDGLFADWRFDEDGNKVEQFPLNQDKSDGCSILISGSNFGCGSSREHAPWALVDYGFKAILSTSFADIFRNNALKNGLLPLTVSEEFHAMLTENEGIEVTVSLEKMMIHASNGMKEAFDLEPFSRYCLMNGIDQMGFIMNHEEQINAFENKGQ

SEQ ID NO: 151744 - protein, 186 aa, Unknown
  Bacterial polypetide isolated from the Sargasso Sea
MIGNDIDTDRIIPARFLKCVNFDSLGESVFEDDRKTLKGRHPFDLEENKNASILIVNSNFGCGSSREHAPQALMRWGIKAIIGESFADIFYSNCIAIGIPCFTLPKKSIEEMQNYCDNQFLFLEIDLKKSHAKSKDLNLNLEIRESSRKMFLSGEWDATSTLLDNENLIENKFNQLPYIKFNSHYS

SEQ ID NO: 151745 - protein, 186 aa, Unknown
  Bacterial polypetide isolated from the Sargasso Sea
MLGNDIDTDRIIPARFLKCVNFDSLGESVFEDDRKTLKGKHPFDLEKNKNASILVVNSNFGCGSSREHAPQALIRWGIKAIIGESFADIFYSNCIAIGIPCFTLPKKSIEEIQNYCDNQSLFLEIDLKNSSAESKDFNFNLKIKESSRKMFLSGEWDATSTLLDNENLIENKFNQLPYTQFNTNFL

SEQ ID NO: 151746 - protein, 46 aa, Unknown
  Bacterial polypetide isolated from the Sargasso Sea
MKTLYDKLWDDHVVHDFDDDTSLIYIDRHLIHEVTSAQAFDGLRLA

SEQ ID NO: 151747 - protein, 207 aa, Unknown
  Bacterial polypetide isolated from the Sargasso Sea
MKSEFSQPIGKISNVNGQCIPLIGNDIDTDRIIPARFLKFINFDSLGESVFEDDRKTLKGKHPFDLEENKNASILIVNSNFGCGSSREHAPQALMRWGIKAIIGESFADIFYSNCIAIGIPCFTLPKKSIEEIQNYCDNQFLFLEIDLIKSLAKSKNLNFNLEIKESSRKMFLTGEWDATSTLLENEDFIENKLDDLPYLEFNSPIT

SEQ ID NO: 151748 - protein, 149 aa, Unknown
  Bacterial polypetide isolated from the Sargasso Sea
GHKQSLNYMQIEADKPIIGKEIDVVFIGSCTNSRISDLHDAAEILKGRKVSNGVRALVVPGSQAVKKEAESLGLDKIFESAGAEWRESGCSMCLGMNGDTVGNGQLAVSTSNRNFEGRQGKGARTILASPKTAAASAIAGSVDDPRKYS

SEQ ID NO: 151749 - protein, 204 aa, Unknown
  Bacterial polypetide isolated from the Sargasso Sea
MSSFPSGPLSQVVGRALVVSGEDIDTDRIIPARFLKCVSFDALGDQVFADDRRERKGEHPFDQARFQGASILVVNGNFGCGSSREHAPQALMRWGIRAVVGVSFAEIFYGNCLALGIPCATASAAEVEAIQRQVNDRPDQNWSLDLEAEQLSSADQQWSVAVDEGPRQMLLSGRWDATSQLLAHGPEVQQLMDALPYINGFSNV

SEQ ID NO: 151750 - protein, 194 aa, Unknown
  Bacterial polypetide isolated from the Sargasso Sea
MEKFIEHTGLVAPLDRVNVDTDQIIPKQFLKRIERTGFGQFAFYDWRYLEDGVPNPEFILNNPKFDGASILVAGPNFGSGSSREHAPWALSEYGFKVIISTSFADIFRNNCMQNGLITIVLSQEKVDKIMTNAIRVPEYKLTVNLETQNVSDNNDFSSDFDFDQFRKDSILKGLDDIGITLQFEKEISNFESKI

SEQ ID NO: 151751 - protein, 174 aa, Unknown
  Bacterial polypetide isolated from the Sargasso Sea
MKSKSYNGQVIPINRDNVDTDLIIPKQYLKSIKKSGFGPFLFDSLRYNDTATLDSNGEREENSEFILNREPFRRGKILISKSNFGCGSSREHAVWAIQNYGIDVVIAESFADIFSRNSFKNGLLLITLDLQTINQIIDLSLSSSSYILDVNLTEDKILLPDDKTITFSISRSYK

SEQ ID NO: 151752 - protein, 210 aa, Unknown
  Bacterial polypetide isolated from the Sargasso Sea
MKEYIKGQVIPINKANIDTDIIIPKQYLKSIKKTGFGPFLFDSERYSNPGTLDNLDQRKINPDFILNKSPYNRGSILIVNDNFGCGSSREHAVWAIKDFGIDAVISSSFADIFYRNSFRNGLLLITITKLDLEKLFQNVEKNKEYELTIDLINSKITSQDGLKISYTLDTSDRDRIIKGQDDIAITLENKEKIINFENEIKKRKPWLYEE

SEQ ID NO: 151753 - protein, 214 aa, Unknown
  Bacterial polypetide isolated from the Sargasso Sea
MTKQSFRKINKIDGIPIAFDRINVDTDQIIPSDFCKKTGKTGYGVHLFHYWRYLDGNMDCPDPGFILNDSTFKAANILLTRENFGCGSSREAAPWALSEYGFRCLIGVSYSEIFYNNCINNGILIFTLESEKINDLFESVEANAGLSMNINLIQQEIITPEGKSMHFEIGEFHKFCLVNGIDQIDWTLQFENLIFQHEKKVENGFPWLSLKSDA

SEQ ID NO: 151754 - protein, 196 aa, Unknown
  Bacterial polypetide isolated from the Sargasso Sea
MEKFVKHEGIVAPLDRVNVDTDQIIPKQFLKRIERTGFGKFAFYDWRYLEDGVPNPDFILNHPKYSKASVLVAGPNFGSGSSREHAPWALSEYGFKVIISTSFADIFRNNCMQNGLITVQLSSENVDRIMTNSIKMDDYKITVDLENQKVFDNFGFEETFDFDQFRKDSILEGLDDIGITLQFDQEIEKFERNTLK

SEQ ID NO: 151755 - protein, 91 aa, Unknown
  Bacterial polypetide isolated from the Sargasso Sea
MKTLFEKIWDTHLVHEQDGNSILYIDRHLVHEVTSPQAFEGLRMAGRKVRVPEATFAVPDHNIPTRNQLQPIKDPVSAKQVETLRKNCKDF

SEQ ID NO: 151756 - protein, 113 aa, Unknown
  Bacterial polypetide isolated from the Sargasso Sea
MKPEFTPPIGKISNINGQCISLVGNDIDTDRIIPARFLKCVNFDSLGESVFEDDRKTLKGKHPFDLEENKNASILIVNSNFGCGSSREHAPQALMRWGINAIIGESFADIFYS

SEQ ID NO: 151757 - protein, 51 aa, Unknown
  Bacterial polypetide isolated from the Sargasso Sea
MSTTLYDKIWNDHLVDQQEDGTALLFVDRHLIHEVTSPQAFEGLRNSNRKV

SEQ ID NO: 151758 - protein, 166 aa, Unknown
  Bacterial polypetide isolated from the Sargasso Sea
MESEFTPPIGKFSQITGKSISLIGNDIDTDRIIPARFLKCVNFDSLGQYVFEDDRKTLKGVHPFDLKENQDSSILIVNSNFGCGSSREHAPQALLRWGIRAIIGESFAEIFYSNCIAIGIPCFTLPKKSIQNIQKYNISKSLFLEIDLKKSSAKSKDLNFNLEIKE

SEQ ID NO: 151759 - protein, 82 aa, Unknown
  Bacterial polypetide isolated from the Sargasso Sea
AEQEGLDKVFKESGFEWREPGCSMCLGMNEDQLKPRERCASTSNRNFEGRQGRGGRTHLVSPAMAAVAAIKGHLSDVRKFNN

SEQ ID NO: 151760 - protein, 63 aa, Unknown
  Bacterial polypetide isolated from the Sargasso Sea
MNDRPTLYDKIWNDHLVSEEQDGTSLLYIDRHLVHEVTSPQAFEGLRMAGRKVRCPEKTIAVP

SEQ ID NO: 151761 - protein, 190 aa, Unknown
  Bacterial polypetide isolated from the Sargasso Sea
MEKIIQFSSKTVVLAVNDIDTDQIIPARYLTVTTKDGLGEGLFADWRFDESGEKVEEFPLNQDKSSGCSILVAGSNFGCGSSREHAPWALVDYGFKAILSTSFADIFKNNALKNGLLPLSVSEEFHRMLNENEGTEITISLEKMTIESSNGMTETFDLEPFSRYCLMNGVDQLGFIMKHEDQINAFENKG

SEQ ID NO: 151762 - protein, 43 aa, Unknown
  Bacterial polypetide isolated from the Sargasso Sea
MSFTLYDKLWNLHEVSQREDGTYLLYIDRHLIHEVTSPQAFEG

SEQ ID NO: 151763 - protein, 191 aa, Unknown
  Bacterial polypetide isolated from the Sargasso Sea
MEKIIEFSSKTVVLSVNDIDTDQIIPARYLTVTKKDGLGDGLFADWRFDEDGNKVEQFPLNQDKSDGCSILISGSNFGCGSSREHAPWALLEYGFKAIVSTSFADIFRNNALKNGLLPLTVSEDFHAMLTENEGIEVTVSLEKMMIHASNGMNEAFDLEPFSRYCLINGIDQLGFIMNHEEQINAFENKGQ

SEQ ID NO: 151764 - protein, 88 aa, Unknown
  Bacterial polypetide isolated from the Sargasso Sea
MPKTLYDKIWSDHLVHQQDDGTSLLFVDRHLIHEVTSPQAFEGLRNSKRNVRHPNLTLAVVDHNIPYTDRSKGIDDNDSRIQVETLEK

SEQ ID NO: 151765 - protein, 204 aa, Unknown
  Bacterial polypetide isolated from the Sargasso Sea
MTRLTTIEGSAVPLPIDNLDTDQIMPKQFLRIIDKAGLADGLLYDLRFDEHGAPRADCVLNQPRYANARVLIGGSNFGCGSSREHAVWGLQQYGVQAVIAPSFAEIFYSNAMNNRLLLVQLERGVVDALLRDASDAPGTSLAIDLERQTVTSASGHVYPYPIGTRHKRMVIEGMDTVDLTLACVAEIEAFEREHFVRHPWAQVM

SEQ ID NO: 151766 - protein, 206 aa, Unknown
  Bacterial polypetide isolated from the Sargasso Sea
MKSEFIPPAGKILQISGKCISLIGNDIDTDRIIPARFLKCINFDALGNSVFEDDRKTLKGRHPLDLQENKNASILIVNSNFGCGSSREHAPQALMRWGIKAIIGESFAEIFYSNCVAIGIPCFTLPKKSIQDIQKYTENKSLFLEIDLKNCLAKSKDLNFILEIKESSRKMFLSGEWDATATLLENETLVESKSKELPYIKFDYDF

SEQ ID NO: 151767 - protein, 78 aa, Unknown
  Bacterial polypetide isolated from the Sargasso Sea
GLDVIFKNSGFEWREPGCSMCLAMNADKLKPEERCASTSNRNFEGRQGRGGRTHLVSPAMAAAAAISGNLDDVRKYNS

SEQ ID NO: 151768 - protein, 129 aa, Unknown
  Bacterial polypetide isolated from the Sargasso Sea
DKSDGCSILISGSNFGCGSSREHAPWALVDYGFKAILSTSFADIFRNNALKNGLLPLTVSEEFHAMLTENEGIEVTVSLEKMMIHASNGMKEAFDLEPFSRYCLMNGLDQLGFIMNHEEQINAFENKGQ

SEQ ID NO: 151769 - protein, 203 aa, Unknown
  Bacterial polypetide isolated from the Sargasso Sea
MRPFPSGQIQMIEGTAMVLAGEDIDTDRIIPARFLKCVSFDALADQVFADDRSELNGQHPFDQPQFQGASILVVNGNFGCGSSREHAPQALMRWGIRAVVGVSFAEIFYGNCLALGIPCATASADEIASLQQAVLNEPGGVWSLNLTTMRLASGSADCAVSIDPGPRDMLCSGRWDATSQLLDHGEQLEALMGRLPYLNRFAT

SEQ ID NO: 151770 - protein, 224 aa, Unknown
  Bacterial polypetide isolated from the Sargasso Sea
FDYIEGREYAPKGDVWTKAVNYWKTLKTDKDAIFDKEYNFKAEEIEPMITYGTNPGMAIPISKSIPKANKSESKSSYQKALDYMEFNEGDRMIGKKIDYVFLGSCTNGRIEDFRTFASIIKGRKKSSNVDAWLVPGSHKVLKSIRDEGILDILTESGFKLREPGCSACLAMNDDKIPKGKYAVSTTNRNFEGRQGPGARTLLASPLVAAATAITGEITDPRDII

SEQ ID NO: 151771 - protein, 212 aa, Unknown
  Bacterial polypetide isolated from the Sargasso Sea
MKNNNFEGQVIPINRDNVDTDLIIPKQYLKSIKKSGFGPFLFDSLRYTTTATLDSNSERTEVSSFILNQTPYKNGTILIAKSNFGCGSSREHAVWAIQNYGINIVIAESFADIFTRNSYANGLLLICLDKNIIIKIINDALSSDSYEIKVHLESNTITLPNEEDISFTIDDSYKERILNNLDDIELTLKHKNKITEYENKIKQTKPWLFNNE

SEQ ID NO: 151772 - protein, 78 aa, Unknown
  Bacterial polypetide isolated from the Sargasso Sea
GLDKIFKDSGFDWREPGCSMCLAMNADKLKPEERCASTSNRNFEGRQGRGGRTHLVSPAMAAAAAISGTLDDVRKYRN

SEQ ID NO: 151773 - protein, 55 aa, Unknown
  Bacterial polypetide isolated from the Sargasso Sea
MPKTLYDKIWTEHLVHQQKDGTSLLFVDRHLIHEVTSPQAFEGLRNTGRKVRQPS

SEQ ID NO: 151774 - protein, 66 aa, Unknown
  Bacterial polypetide isolated from the Sargasso Sea
MEAFETLSGKAVPLDIINVDTDQIIPKQFLKKIDRAGFGIHLFHDWRYLDDSGTKMNPEFVLNFKR

SEQ ID NO: 151775 - protein, 67 aa, Unknown
  Bacterial polypetide isolated from the Sargasso Sea
MSLTTYDKIWNDHLVDEQPDGTSLLFVDRHLIHEVTSPQAFEGLRNSNRKVRHPKLTLAVADHNVPT

SEQ ID NO: 151776 - protein, 40 aa, Unknown
  Bacterial polypetide isolated from the Sargasso Sea
MPDTLYDKIWNEHLVHQQEDGTALLFVDRHLVHEVTSPQA

SEQ ID NO: 151777 - protein, 269 aa, Unknown
  Bacterial polypetide isolated from the Sargasso Sea
MKKIIVTGGSGFIGSNLVNYLVKKNYFVINIDKLTYSSNTYPKHNLSKKNFKFFKIDINKKSKLKKIIKKYKPECIFNLAAETHVDRSIDSPFQFIHSNILGVYNLLEAIRENNKKNKKIKLVHISTDEVYGDIISSRSNEKFPYNPSSPYSASKASADHLIKSYIRTYKLPAMISNCCNNYGPYQFPEKLIPKMISNILNNKPLPIYAKGQNSREWIHVEDHCEALYKIFKKGKIGESYNVGSNINLKNIKLVKTILKIFKKKKFIMK

SEQ ID NO: 151778 - protein, 219 aa, Unknown
  Bacterial polypetide isolated from the Sargasso Sea
MTEQNRQPLTILITGGCGFIGSALIRHIMAHTPHKVINLDNLTYAVNPLSLSAIKDNQRYRFIKGDICDGKLVETVFAQHQPDVVMHLAAESHVDRSIASPDSFIQTNIVGTFNLLEASRMFLSDLPAHKATRFRFHHISTDEVFGDLPKTGYFNEKSAYSPSSPYSASKASSDHLVKAWHRTYGLPTIITYCSNNYGPYQHPEKLIPLTITRAILGET

SEQ ID NO: 151779 - protein, 268 aa, Unknown
  Bacterial polypetide isolated from the Sargasso Sea
MQRIIVTGGLGFIGSNLVHLLVKKKYHPIIIDKFSYASNLYNLKGLKKNNYTVHKFSIENKKKILNLLNKYKPKAIFNLAAETHVDRSIESPDMFIKSNILGVFNILECIKEYVKKNKIKMVHVSTDEVYGDIKKNKKSLENDRYFPSSPYSASKASADHLITSYVRTFNLPIVISNCCNNFGPRQFPEKLIPKTIFNLVNNKDIPIYGKGINEREWIYVDDHCEGLIKILKKGKIGQSYNIGSGNVVKNLDLIKKIIKVYKNNFSKK

SEQ ID NO: 151780 - protein, 141 aa, Unknown
  Bacterial polypetide isolated from the Sargasso Sea
KLIPLTIIKVMNGEKIPVYGNGLQIRDWLHVEDHVEALFEVISNGDLGQTYNIGGNNEKTNIDVVHMICDLLDEKKSYPINGQSSRELIEFIKDRPGHDVRYAIDASKIKKDLNWQPKRKFDEGLKETVDWYFNYYKDKII

SEQ ID NO: 151781 - protein, 257 aa, Unknown
  Bacterial polypetide isolated from the Sargasso Sea
MKRFIVTGGYGFIGSNLIHLLIKKNCKVLNIDSLSYAAQKYNLKDVKNYTFVKADINNKKKILQILKKFKPIGIFNLAADTHVDRSIDNSFNFIKNNILGVYNLLEAIKDYKKKVRLVHISTDEVYGDISNPKRSSERDAYFPSSPYAASKASSDHLVSSYVRTHNLDALISNCSNNYGPRQFPEKLIPRMIYNIINNKPLPIYAKGKNSREWIYVNDHCEALIKLFYKGKVGEKYNIGSGINCSNIFIVKKILQIF

SEQ ID NO: 151782 - protein, 165 aa, Unknown
  Bacterial polypetide isolated from the Sargasso Sea
IVTNCSNNYGPKQHPEKLIPKLIYNILNNKPLPIYGKGTNSREWIYVRDHCEALIKVFLKGKIGEFYNIGSNKNMNNLEVTKELLKNAKKLIKFGRRVKINFVKDRPGHDIRYALNSNKIKKELNWKPKTNFTEGIRLTLDWYLRNKTYYKSLSKKDIVNRLGRG

SEQ ID NO: 151783 - protein, 166 aa, Unknown
  Bacterial polypetide isolated from the Sargasso Sea
MKKIVVTGGSGFIGSNLIQLLLKRKFFVINLDKSSYSANPYNVKDFKKNNNYLFYKLDINNKEALLKILKKYKPLGIFNLAAETHVDRSIDDAQNFIRSNILGVYNLLECIRKLDKKLKNKIRFFQVSTDEVYGDIPNNKKASEKYNYNPSSPYSASKAGADQIIR

SEQ ID NO: 151784 - protein, 234 aa, Unknown
  Bacterial polypetide isolated from the Sargasso Sea
MNKIIVTGGLGFIGSNLIKLLLKKKYKILNIDKASYASNFYNIKEFRNHKNYKFIKNNLSNSKKIYKIIYNFKPKCIFHLAAETHVDRSIDGPKNFIDSNIIATFNLLESFRKYSKKNKKTRLVHVSTDEVYGDVLKGRSLENSTYLPSSPYAASKASSDHLVFSYVKTFKIPAIITNCSNNYGPNQHPEKLIPKLIYNITNNISLPIYGEGINAREWIYVEDHCEALLRVYKA

SEQ ID NO: 151785 - protein, 257 aa, Unknown
  Bacterial polypetide isolated from the Sargasso Sea
HVDRSITDPIYFIKNNIITSTNLFYAYSRMINKNKIKFFHISTDEVYGSIKKGSFKEDNSYNPSSPYSASKGSADLIAESFNKTYNTNIKILNLTNNYGPYQFPEKFIPTLIFHFLKNKAAPLYGSGKNFREWMHVSDSCEAIWRIMNLNKKFDRINIGTGKRVSNIEISKIVFNLMKSKDLTKLSNTKYLKKVKDRPGHDQRYALNSELFKSFTKYKMKVNLRSGLNETINWYIKNKNWLKKTKTKYKYKRLGLND

SEQ ID NO: 151786 - protein, 272 aa, Unknown
  Bacterial polypetide isolated from the Sargasso Sea
SHMVRLLVNKYPEYLIVNFDKLTYAGNLENLVDIENKPNYIFLNGDVCSEKDINGLFETHQISDIIHLAAESHVDRSIDSPNEFVNTNVIGTVNLLQCANKYWANKNEHIFYHVSTDEVYGSLGETGLFTEKTSYDPRSPYSAAKAASDHFVRAFSHTYGLSIKISNCSNNYGSHHFPEKLIPLMIHNIMNNKELPIYGKGDNIRDWLWVEDHVAAIDLIFHKGVVNETYNIGGLNEWTNLDLVKYLCDKMDEKLNRNKGESQKLIRFVKDR

SEQ ID NO: 151787 - protein, 170 aa, Unknown
  Bacterial polypetide isolated from the Sargasso Sea
YKIPAIITNCSNNYGPRQHGEKLIPKIIYNILNNKPLPIYGKGKNSREWIYVDDHCDALIKIFRKGKIGNFYNIGSNINLNNISIVKKLLKIAKKHIKLGNKVKIKFIPDRPGHDFRYAINSNKIKKEIGWKSKTNLNVGLKKTLIWYKDNKSYFSKLNKKDIVKRLGKL

SEQ ID NO: 151788 - protein, 174 aa, Unknown
  Bacterial polypetide isolated from the Sargasso Sea
YVRTFNLPAIITNCSNNYGPRQHPEKLIPKMIYNIINNKPLPLYGNGKNSREWIYVNDHCEALIKIFKSGKVGETYNIGSNKNLNNIEICKNLLNIAKRNIKIGKKVKIKFIKDRPGHDKRYALNSLKLIKKLNWKPKTSFLTGINNTFLWYLNNKKYFRSIKKKDINERLGKI

SEQ ID NO: 151789 - protein, 279 aa, Unknown
  Bacterial polypetide isolated from the Sargasso Sea
MPNIIVTGGLGFIGSNLIALLIRKKYKVINIDKITYSSNFYNTKDFKKSKKYKFIKCDLNQKSRLKNIIKKYNPLAIFNLAAETHVDRSIDGPENFIKSNILGVFNLLEVFKTYSKKNKKAKLIHISTDEVYGDVLKGRSTENYPYKPSSPYAASKASSDHLVSSYVRTYKIPAIVTNCSNNYGPKQHPEKLIPKLIYNILNNKSLPIYGDGQNSREWIFVDDHCEALFKVFQKGKVGEFYNIGSGKNLNNIQICKNLLRVVKKKIKFGSNVKIKFIKD

SEQ ID NO: 151790 - protein, 177 aa, Unknown
  Bacterial polypetide isolated from the Sargasso Sea
MVILITGGAGFIGSNLIHYWLAKNSGDTIVNFDALTYAGNLANLAGVESNPNYHFFQGDLRKQEQLHEVFEQFSIDSVIHLAAESHVDRSINDPSPFIDSNIRGTFQLLETARNHWQEDLNDHRFLHVSTDEVYGTLGTEGLFTEQTPFAPNSPYSSTKASSDHLVRAWHHTFGMDT

SEQ ID NO: 151791 - protein, 139 aa, Unknown
  Bacterial polypetide isolated from the Sargasso Sea
MKNILITGGCGFIGSNFIHHLIDKEESYYIVNLDKLTYAGNISNLGKIPDSSYLLVQGDICDPILVDSLFKEYQFESVVHFAAESHVDRSIDGPSSFIQTNILGTFNLLEHARAHFSKTKNKHFRFLHVSTDEVYGSLG

SEQ ID NO: 151792 - protein, 174 aa, Unknown
  Bacterial polypetide isolated from the Sargasso Sea
YKKIFNILKKEKPDFIINFAAESHVDRSISDPLYFIKNNIDSSINLFLAYARYQKLKKTKFFQISTDEVYGSISKGLSKETNRYEPSSPYSASKACVDMVATSFNKTYDTQIKVINLSNNYGPYQYPEKFIPTLIFYFLKNQPAPIYGKGENIREWIHVNDSCEAIYKTIISNK

SEQ ID NO: 151793 - protein, 187 aa, Unknown
  Bacterial polypetide isolated from the Sargasso Sea
MKKVIVTGGLGFIGSNLIKILIKKKYFVINLDKVTYSSNFYNLKTISKNKNYKFIKVDINNEKKVLQILKKYNPSAIFNLAAETHVDRSIDEPENFIKSNILGVFKLLQAFKKFTKKNKKSILIHISTDEVYGDVLTGRSKEDDQYKPSSPYAASKASSDHLVYSYIRTFKIPAIITNCSNNYGPRQ

SEQ ID NO: 151794 - protein, 210 aa, Unknown
  Bacterial polypetide isolated from the Sargasso Sea
MKKIIVTGGNGFIGSNLVKLLIKKKFFVINIDKNIYSKSSFLLKNLRSKNYKFHKLDIVSKNFFKLLKRYKPDGIFNLAAETHVDRSIDSPKDFIWSNILGTFNILEQIRKYEKTYKKKLRLVHISTDEVYGDLKKNTRTNEQSAYKPSSPYSASKASADHLIKSFARTYKINAVISNCCNNYGPGQFPEKLIPTLIYNIINNRSLPIYG

SEQ ID NO: 151795 - protein, 245 aa, Unknown
  Bacterial polypetide isolated from the Sargasso Sea
NGSFLLKNIKNRNYRFHKLDINSKKILNIFRKYKPNAIFNLAAETHVDRSIESPKDFIHSNILGVFNILEQIRNYKKKNKKNLRLIHISTDEVYGDLKKKERSDELYRYKPSSPYSASKASADHLIKSYVRTYKLNAVISNCCNNFGPGQFPEKLIPTLIFNILNNQPLPIYGRGKNSREWIYVKDHCNGLLTIYKKGITGESYNIGTNININNLNLTKLLLKIITSNKIKIGKKVKISLLKIDQ

SEQ ID NO: 151796 - protein, 297 aa, Unknown
  Bacterial polypetide isolated from the Sargasso Sea
ILDNFPDSKIVAVDKLTYAGNKIFLKNIIRNKNFKFIKSDILDTKKYIKYLKKIDCAINIAAESHVDNSFGNSVQFTKTNTLGAHVFLENCIKKKVKKIIHISTDEVYGDKLKGKSNEIDTLNPTNPYSASKAAAEMITNSYKYVFKKDIIIIRANNIYGTRQFPEKLIPSCIVALLNKKKIKIHGNGKNRRHFLFVKDFCFALEKIIKKVNEGIYNIGSDESYQNIQIAKKICNLMNKSYKNIKYTRDRPFNDRRYSISSKKINNLGWKPKSNLFNELNKIISWYQNNFKIFLRKL

SEQ ID NO: 151797 - protein, 196 aa, Unknown
  Bacterial polypetide isolated from the Sargasso Sea
MKKIIVTGGLGFIGSNLIELLIKKNYFVINIDKSTYSSNFYNVKEFKSLTNYKFFKCNIGNKKFYKILKKYKPSCIFNLAAETHVDRSIDNPANFINSNIVDVYKLLESFKKFVKNHKCKLIHISTDEVYGDILNGRSTEKFPYNPSSPYAASKAASDHLVNSYIRTYKIPAIVTNCSNNYGPKQHPEKLIPKLIF

SEQ ID NO: 151798 - protein, 199 aa, Unknown
  Bacterial polypetide isolated from the Sargasso Sea
MKKIIVTGGLGFIGSNLIELLLKKNFKVINVDKVTYSSNFYNIKEFKNSKNYKFIKCNIKERKFRKILFKFKPSCLFNLAAETHVDRSIDNPENFIQSNIVGVYNLLEGFKDLIKTNKSKLIHISTDEVYGDVLSGRSSENYPYQPSSPYAASKAASDHLVSSYIRTYKIPAIVTNCSNNYGPKQHPEKLIPKLIYNIL

SEQ ID NO: 151799 - protein, 211 aa, Unknown
  Bacterial polypetide isolated from the Sargasso Sea
MKKRFIVTGGLGFIGSNLIELLLKKNHYVINIDIGSYSSNSYNTKDFDKNKNYKLIKCNIGEKNKIKKIFNKYRPNGIFNLAAETHVDRSIENPKIFFLSNVISLIDFLEVFKDYCKTKKNIKLIHISTDEVYGDIIKGRTTEKSKYYPSSPYAASKASSDHLVSSYIKTFNLPCIITNCSNNYGPKQHPEKLIPKLIYNIINNKNLPIYG

SEQ ID NO: 151800 - protein, 160 aa, Unknown
  Bacterial polypetide isolated from the Sargasso Sea
MTVFITGGAGFIGSNFAHYMSQYDVVILDKLTYAANMDNLYPLDFPVKGVDLAYKNRLEELFNQYKPKFIFNFAAESHVDNSINNVHPFIDSNIIGTVNLLNLSVKYGIERFHHISTDEVYGSLDYEDPPFTETTPYNPLNPYSASKAASDHFCMAYHNT

SEQ ID NO: 151801 - protein, 212 aa, Unknown
  Bacterial polypetide isolated from the Sargasso Sea
MSKKFLVTGGAGFIGSAFIRYIINNTDNYIFNIDKLSYASNFLNLKEIQKNKRYSFAKIDVSNALKIRAILKKVKPDIILHLAAETHVDKSIDNPVEFLNSNVIGTFVLLDETRKYFSNLQKNKKKNFRFHHVSTDEVFGDLIDKKSLFNEKTSYAPSSPYSASKASSDHFVRAWHRTYKLPILITNCSNNYGPLSYPEKLIPLIILNALKW

SEQ ID NO: 151802 - protein, 199 aa, Unknown
  Bacterial polypetide isolated from the Sargasso Sea
KENYPYSPSSPYAASKASSDHIVLSYIKTFGIKAVITNCSNNYGPKQHPEKLIPKMIYNIINNKPLTVYGDGKNSREWIYVKDHCEALIKVFKYGKIGETYNIGSNKNLNNVEICKNLLKTAKKNIKIGKKVKIKFIKDRPGHDKRYALDSSKLIKKLKWKPKTKFSDGINNTFIWYLNNRKYYKSLNKKDINMRLGKI

SEQ ID NO: 151803 - protein, 127 aa, Unknown
  Bacterial polypetide isolated from the Sargasso Sea
ITNCSNNYGPRQHPEKLIPKLIYNILNNKSLPIYGKGKNSREWIYVTDHCEALFKIFKKGKIGEFYNIGSNKNLNNIEIAKKLLNITKKYIKIGRKVKIKFIKDRPGHDLRYALNSNKIINNLKRKP

SEQ ID NO: 151804 - protein, 192 aa, Unknown
  Bacterial polypetide isolated from the Sargasso Sea
MKKILVTGGLGFIGSNLIKILLKKKYYVVNLDKISYASNFYNTKEFHNSKKYKFIKCDINDQKKIFSTLKKYKPSCIFNLAAETHVDRSIDGPRAFIKNNINGTFSILEAVRKYSKINKSLKLIHISTDEVYGDVLKGRSKETDSYKPSSPYAASKASSDHLVLSYVRTYGLNAIVTNCSNNYGPRAHPEKL

SEQ ID NO: 151805 - protein, 216 aa, Unknown
  Bacterial polypetide isolated from the Sargasso Sea
AENAKRTSRLHHISTDEVFGSLGEEGRFCETTPYDPRSPYSSSKAASDHLVSAWHHTYGLPVVLTNCSNNYGPWQFPEKLIPVVTLKAAAGEPIPLYGDGLNVRDWLYVEDHVDALLLAACRGTSGRSYCVGGYGERTNREVVECICNHLDQLRPARNPHKHLIQMVTDRPGHDRRYAIDPARIQAELVWKPRHDFNEAIAKTVQWYITHYTNKKT

SEQ ID NO: 151806 - protein, 294 aa, Unknown
  Bacterial polypetide isolated from the Sargasso Sea
KISYSSNKYNVKEYDNNKNYKFIKLDINSKKLTKIFKRYKPIGVFNLAAETHVDRSIDNPSNFIKSNIVGTFNLLESFRRFHKSYSNTKLIHISTDEVFGDVLTGRSNENFKYKPSSPYAASKASSDHLVSAYVRTFRIPAIITNCSNNYGPCQHPEKLIPKLIYNIINNRELPIYGNGKNSREWIYVMDHCEGLLKVFLKGEIGEFYNIGSNKNLNNLQITKYLIDIAKKYIVIGKKVKIKFVKDRPGHDLRYALNSYKIKSKLKWYPKTKIFDGLNKTFLWYYNNQKYFKNL

SEQ ID NO: 151807 - protein, 218 aa, Unknown
  Bacterial polypetide isolated from the Sargasso Sea
MAQPMPSASELLGQRRRVLVTGGAGFIGGAVVRRLLRESTAIVFNLDKMGYASDLTSIEEVLAELGEAGANRHHLLKIDLSDADAVNAAVREADPDLVMHLAAESHVDRSISGPGVFIESNVNGTYNLLQAVRGHYEGLSGERREAFRLHHISTDEVFGSLGAEGRFSETTPYDPRSPYSASKAASDHLVQAWHHTFGLPVVLTNCSNNYGPWQFPEK

SEQ ID NO: 151808 - protein, 94 aa, Unknown
  Bacterial polypetide isolated from the Sargasso Sea
MKILVTGGAGFIGSAVVRHIINSTTDTVVNVDKLTYAGNLASISSIADSDRYTFEQVDICNAVAIQALFKEHQPDMVMHLAAESHVTDQSRPSS

SEQ ID NO: 151809 - protein, 139 aa, Unknown
  Bacterial polypetide isolated from the Sargasso Sea
MRILVTGGAGFIGSALIRHLILDTEHSVLNLDKLTYAGNLESLAAVEDNPRYQFLQADIADRERVSEALLDFQPDAIMHLAAESHVDRSIDGPAEFIQTNIVGTYQLLEATRAYWQSLPAERREAFRFHHISTDEVYGD

SEQ ID NO: 151810 - protein, 232 aa, Unknown
  Bacterial polypetide isolated from the Sargasso Sea
MKKIIVTGGSGFIGSNLIRLLLRKKYFVINIDKLSYSANSYNVKDFKKNRNYLFYNLDINKTSRILKILQKHKPVGIFNLAAETHVDRSIDKAHHFIRSNIVGVYSLLEAIRKYENKKQKKLKLLQVSTDEVYGDIPNKRSASENHNYNPSSPYSASKAAADQFIKSYSRTYGIKILIAHPCNNYGPNQHPEKFIPKMIFNILNNRPLPLYGNGKNIREWIYVKDNCEALLK

SEQ ID NO: 151811 - protein, 202 aa, Unknown
  Bacterial polypetide isolated from the Sargasso Sea
MRKVIVTGGLGFIGSNLIELLLKRKYKVICIDKVTYSSNFYNVKEYEKNKNYSFIKCDISNRRLSKIVNKINPVGIFNLAAETHVDRSIDNPENFIKSNIFGVYNILEIFKKFCKKNKNSKLIHISTDEVYGDILTGRTKENYPYNPSSPYAASKASSDHLVSSYVRTYKIPAIITNCSNNYGPKQHPEKLIPKLIYNIITK

SEQ ID NO: 151812 - protein, 141 aa, Unknown
  Bacterial polypetide isolated from the Sargasso Sea
MKSFFITGAAGFIGSHICEHISLNFPNAKIYALDKLTYAGNKMFLNKLFKKRRFKFIKSDIIDSKKYLKYLNKIDCAINVAAESHVDNSFLNSINFTKTNAYGAHIFLQNCINKKVKKIIHISTDEVYGDKIKGSSKEEDK

SEQ ID NO: 151813 - protein, 215 aa, Unknown
  Bacterial polypetide isolated from the Sargasso Sea
ILGTYNILRSINTKIFLIHISTDEVFGHVINNKSFNEKTKYNPRSPYSASKASADHLVSAWNSTYGYKSTIVNCCNNFGPNQDKEKFIPVIINNILNNKKIPIYGNGRQKREWIFVDDFVSSIDFIISKNLTKENFLIGSGIRFENKKFAKKIIEIFTKNLNFDETKIKLVRVADRPGHDIEYKVDSSKIRRLGWKSKTNIISDLIKTINYYKNK

SEQ ID NO: 151814 - protein, 294 aa, Unknown
  Bacterial polypetide isolated from the Sargasso Sea
KYKVLNIDKVSYASNFYNTVKFKNNKNYKFVKCDLNNIKNLEKIIDKFKPQAIFNVAAETHVDRSIDGPKNFIFSNIIGTFNILEILRKSKKKIKLVHISTDEVYGDVIKGRSKEDDAYKPSSPYAASKASSDHLIYSYIRTYKIDANITNCSNNFGPNQHPEKLIPKLIYNIINNKKLPIYGKGVNSREWIYVEDHCEAILKVYKSGKPGEFYNIGSNYNINNLTVVKKLISVAKKKIKLGNNVKIIFVQDRPGHDMRYAINSNKIKKNLKWKPKTNFMSGLEKTFDWYLNNR

SEQ ID NO: 151815 - protein, 185 aa, Unknown
  Bacterial polypetide isolated from the Sargasso Sea
MKKILVTGGLGFIGSNLVNYLISKNYFIINIDKSGYSSNKKYFLNLKNKNYIFFKIDIKNKLKLYKIVKKFRPDGIFNLAAETHVDRSIDNSKNFINSNILGVHNILEVLRKIKREKKVNIRFIQVSTDEVYGDMPFQKSAYENYNYNPSSPYSASKASADQIIKAYKRTYDLDTIIANACNNYG

SEQ ID NO: 151816 - protein, 282 aa, Unknown
  Bacterial polypetide isolated from the Sargasso Sea
MKKVIVTGGLGFIGSNLVNILLKKNYFVINIDKVTYSSNFYNLRNISKNKNYRFIRLDINNHKKIFNVLKKYEPNAIFNLAAETHVDRSIDGPEKFIKSNILGVFNLLQAFRKFVEKNKRSRLIHISTDEVYGDILIGRSKENDAYKPSSPYAASKASSDHLVYSYIRTFNIPAIITNCSNNYGPRQHPEKLIPKLIYNILKNKSLPLYGKGLNSREWIYVDDHCEALIKIFERGKIGNFYNIGSNLNLKNIKISKLLIKIAKSKLNIGKNVKIKFVKDRPG

SEQ ID NO: 151817 - protein, 150 aa, Unknown
  Bacterial polypetide isolated from the Sargasso Sea
YPEKLIPLVINNAIREKPLPIYGDGKQIRDWLYVEDHCNAIIEVLNNGVPFEVYNIGGNNEIKNIDIVTLICNKLDILKKRKNEKSYKELICFVEDRPGHDKRYAINNTKIKKKLNWSPKEDFESGISRTINWYLENQSWVENLYNKHQS

SEQ ID NO: 151818 - protein, 120 aa, Unknown
  Bacterial polypetide isolated from the Sargasso Sea
LYVDDHGFGIGYWVATNSIVGETYNIGGRNEKKNIEVVDAVCELLEELQPVKPAGLRAYKDLITFIDDRPGHDFRYAIDAGKIERDLGWKPKETFESGIRKTVLWYLENTDWWKGIVGKE

SEQ ID NO: 151819 - protein, 284 aa, Unknown
  Bacterial polypetide isolated from the Sargasso Sea
IVKKIYKILRKNKPKIIFNLAAETHVDRSIDSPSSFIKNNVLSSLSLIENIKKCYLKNEVKKLKLIHISTDEVYGNVLAGASNETKAYEPNSPYAASKASVDHILRSYGVTYNFPLIIVNCCNNYGPYQFPEKFIPTVIINMLQRKSVPIYGSGKNIREWIHVNDYCSALSKIMKKGKPGQSYNVGTGFRITNINLSIKIYKEVKKIFPNFKFNKKINKKIIDRPGHDFRYAINSNKIRKELKWRPKISFNKGIQETINWYISNIRWLKYCSKKYKGQRLGLND

SEQ ID NO: 151820 - protein, 231 aa, Unknown
  Bacterial polypetide isolated from the Sargasso Sea
MVTGGCGFIGSNFVRYMLKTYKNIQIINLDTLTYAGNLDNLKEIEQDKRYSFINGDITERNDVVPALKDADSIVHFAAESHVDRSIDKAEIFIKTNVIGTHSLLECAKEHDIAKFIHVSTDEVYGSLGKDGYFTEETPIAANSPYSASKAASDLLARAYYMTYGFPVIITRCSNNFGPYQFPEKLIPLMICQARQNKPLPVYGDGMNVRDWLYVEDHCAAVDRVLQSENRR

SEQ ID NO: 151821 - protein, 256 aa, Unknown
  Bacterial polypetide isolated from the Sargasso Sea
PGHFIESNILGTFNLLESCRKFFDSLSIEKKSKFIFHHISTDEVFGSLGEKGRFSESTPYDPRSPYSASKASSDHLVRSWYHTYGLPVIITNCSNNFGPWQFPEKLIPLVTLKAIQKEPIPLYGDGSNIRDWLFVEDHVDALLLAALKGKVGETYCIGGYGEKSNKEIVLKICEILDNEIPNQSPHNQLIKYVLDRPGHDKRYAIDPSKIENELGWEPKYGLEKGLRKTVLWYLKNYDWCQNIFKKGNYRLERLGK

SEQ ID NO: 151822 - protein, 202 aa, Unknown
  Bacterial polypetide isolated from the Sargasso Sea
VDKSKRTDEKFSYNPSSPYSASKASADHLVKSFVRTFKIPAIISNCCNNYGPNQFPEKLIPKLIFNIINNKPLPIYGKGKNSREWIHVNDHCEALLKIFNRGKIGESYNVGTNQNVMNIEIARKLLKIYKSKSKIKYVKDRPGHDFRYALNSKKIRKKLKWEPKINLNKGLKNTFMWYLSNINFFKSVSKKLYDKRLGLKND

SEQ ID NO: 151823 - protein, 285 aa, Unknown
  Bacterial polypetide isolated from the Sargasso Sea
NSLKCDIKNKKFKKILLKYKPIAVFNLAAETHVDRSIDKPEKFIESNIVGVFNLLECFKEYSKKSKSRLIHISTDEVYGDILSGRSNEKFPYKPSSPYAASKAASDHLVSSYVRTYKIPAIVTNCSNNFGPKQHPEKLIPKLIYNILNNKPLPIYGKGLNSREWIYVSDHCEALFKIYKNGKVGEFYNIGSNKNLSNLQVAKELLKRSKKIIKMGKKVKINFVKDRPGHDIRYALNSNKLRNKLKWYPKTNFSDGIKLTLKWYCENKLYYKSLLKKDITNRLGKG

SEQ ID NO: 151824 - protein, 162 aa, Unknown
  Bacterial polypetide isolated from the Sargasso Sea
CSNNYGPNQFPEKLIPLMVTNAINGRSLPIYGDGMQIRDWIHVHDHAQGIIASMKGLVAGRLSPGEVINFGADQELSNIEIVRTIIELTGSDSLIEHVEDRPGHDRRYAMGFDKAKRLLDWNPEISWEEGIKSTVEWYQENDGWIESVIDGSYHDWIDEHYG

SEQ ID NO: 151825 - protein, 201 aa, Unknown
  Bacterial polypetide isolated from the Sargasso Sea
KTQYFEESDKFNPSSPYSASKASAEHLCNAFKKTYGQKVTILRPCNNYGIYQQPEKMIPFSILNLVNDKNIEVYGDGKNVRNWIHVNDTSNAILHMINNKYENEVFNVSTDFFISNYELSTKIANSMGFDENRISFIDDRPGHDFRYAASNNNLIRTGWKPQYNFDESLKEIIHWYMKNTKWWDKEFINTNKNRKKRFNLN

SEQ ID NO: 151826 - protein, 236 aa, Unknown
  Bacterial polypetide isolated from the Sargasso Sea
MKKYLSTKFKRILVTGGAGFIGSNFIFKNLHDKKLKIFNLDKISYSSNNFFTEETLIKNQNNLSFLRVDLKDQMGTRNALEFSKPDLIINFAAESHVDKSIINPRLFLESNTIGTFNLLEEVRSYWNKLSLNKKDDFRFLHISTDEVFGTLTKEGKFSENSPYLPSSPYSASKAASDHFVNSWHITYKIPTIIVNCSNNYGPRQYPEKLIPLTIKNIINNIEIPIYGDGTNRRDWI

SEQ ID NO: 151827 - protein, 313 aa, Unknown
  Bacterial polypetide isolated from the Sargasso Sea
IITGRRWDLFGGALIRRILNTTNSKIYNIDKLSYSSDLSYLKNSKFDEGRHIHLCFDLNDFRKTNDAIQKIDPDIIIHLAAESHVDRSLDNPSNFIESNILGTFNLLEASRKHWNNLDEIRKLNFRFLHISTDEVFGSLSLKGETKFNEDSPYFPSSPYSASKASSDHLVNAWHKSYGLPTIITNCSNNFGPFQFPEKLIPLSILKAINNEPIPLYGDGKNIRDWLFIEDHIDAIMLVVTKGKTGENYCIGGNNERSNISIINQVCSYIDKFKPGRKPYSKLITFVEDRPGHDMRYAISATKINLELKWSPKT

SEQ ID NO: 151828 - protein, 196 aa, Unknown
  Bacterial polypetide isolated from the Sargasso Sea
PYQPSSPYAATKAASDHLVSSYIRTYKVPAIITNCSNNYGPKQHPEKLIPKLIYNILNNKPLPIYGNGKNSREWIYVKDHCEALLKVFNKGKIGEFYNIGSNKNLTNLQVSKELINVTQKIFNIGKKVKIMFIKDRPGHDIRYALNSKKIRNKLGWYPKTNFKKGIKLTFNWYNNNKKYFKSLKKKDIVKRLGKHD

SEQ ID NO: 151829 - protein, 232 aa, Unknown
  Bacterial polypetide isolated from the Sargasso Sea
MRLFITGGCGFIGSNFILNQGIKKADALLNYDKLSYSGNINNLSSIENNNIYSFIQGDICDINTLNKAIIDFEPDIIIHFAAESHVDRSIDSPFDFVDTNIVGTANLLYAASSYMKKTAKLMKFIHISTDEVYGSLKKTGFFNENSLIKPNSPYAASKASSDLLVRSWNKTYNFPSIVTHCSNNYGPFQFPEKLIPLMIANCIDNKPLPLYGNGKNIRDWLHVYDHCEAIPK

SEQ ID NO: 151830 - protein, 267 aa, Unknown
  Bacterial polypetide isolated from the Sargasso Sea
SQNYRFVKGDIVDKAFVNELFEENNFDGVIHLAAESHVDRSIANPLEFIETNILGTMNLLSAAKNVWSSFEGKLFYHVSTDEVYGSLSETGFFTETTAYDPRSPYSASKASSDHLVRAYWHTYGLPIVISNCSNNYGSYQFPEKLIPLCINNIKLNNPIPVYGKGENIRDWLFVEDHVDAIDLIFHKCKIGETYNIGGNNEWTNIDLIKLLCSIMDRRLGREEGESAKLITFVKDRAGHDMRYAIDSEKLQKELNWHPSLQFQVGTY

SEQ ID NO: 151831 - protein, 225 aa, Unknown
  Bacterial polypetide isolated from the Sargasso Sea
NGKCKFFHISTDEVYGSNNYNPSKENSPYKPTSPYSSSKASSDLVALSFNHTFKTCISIINLCNNYGPYQHLEKFIPTCIFNLLQNKSIPIYGSGKNIREWIYVEDACEAIMKILNLKQNYYRFNIGSKIRINNFSLAKKIFVIMKKMKKTNMTKQNYYKFVTDRPGHDLRYALNSSLFYKKTKYKLKNNIDKGLNKTIRWYLKNHEWVKSIKKNYSGKRVGLND

SEQ ID NO: 151832 - protein, 197 aa, Unknown
  Bacterial polypetide isolated from the Sargasso Sea
DFTDIPLNESSPYEPNSPYSASKASSDLLVRAWNETYKVNTVITNCSNNYGPWQNPEKLIPKIIYSALSNKVIPIYGNGLNIRDWLHVDDHVQALLLAGESKRSFERYTIGANQECSNIDLTKMICLYLDKKIPKERPYFDQVKFVDDRLGHDLRYAIDSSYISKEIGFKPKYTLEKGIEKTIDWYLENLKWLKTKI

SEQ ID NO: 151833 - protein, 274 aa, Unknown
  Bacterial polypetide isolated from the Sargasso Sea
KKIDIRDYKELKKEIDSYQPDAIINLAAESHVDRSIDSASKVLQTNIMGTFNLLDIFTKYWIQKNASKTYKFIHISTDEVFGEALDSEMFTESTRYDPKNPYSASKAASDHLVRSWHNSHGTPTIITNCSNNYGPFQFPEKLIPLTINAIRNSNPIPIYGNGKQIRDWIYVDDHINGVLNVLEKGTIGDSYNIGSNNELKNIDLVEMICSNLDKKLNNTIPSKNLIEFVKDRPGHDRRYAIDSSKIRTELGWTPSFDIETGLDKTIDWYLSNET

SEQ ID NO: 151834 - protein, 263 aa, Unknown
  Bacterial polypetide isolated from the Sargasso Sea
MKKIIVTGGSGFIGSNLVNYLIKKKYFVINIDKLTYSSNTYQKASLSKKNYKFLKIDINNKFKIKKIIKKYKPECIFNLAAETHVDRSIDSPFQFINSNILGVFNILEAIRENNKKNKKIKLVHISTDEVYGDVLNNRSNENFPYNPSSPYSASKASADHLIKSYVRTYKLPAVISNCCNNYGPYQFPEKLIPKMISNIFRNKPLPIYAKGQNSREWIHVEDHCDALYKIFKKGKIGESYNVGSNVNLKNIKLVKNILKIFKE

SEQ ID NO: 151835 - protein, 283 aa, Unknown
  Bacterial polypetide isolated from the Sargasso Sea
MKFLVTGCFGFIGFNFINYIKDKYGDDVFIYGIDSVESSCSEKNKEISKELEGFEHKKININDIDQESFDKVDIIINFAAESHVDNSIYNPQLFIDTNVKGTAKVANYAIKNNIDKFIHISTDEVYGSNENDYSKENDRLNPSSPYSSSKAAAEMILNGYTKTYGYEFITVRPANNYGIFQQPEKLIPFSVANILSGNCIEIYGKGNNIRHWLHVDDTCSAIDHLIEKGKINEVYNIGSGFYLSNIELAKKLLMILDKQEDMIEFVEDRPGHDFRYAVNLDKI

SEQ ID NO: 151836 - protein, 330 aa, Unknown
  Bacterial polypetide isolated from the Sargasso Sea
MKLVVTGGYGFIGSNFILKLLESNEDYKITNIDAELNGSNPKNLDSIKNHENYKFVKGNITNRKLMEEVINDCDAVVNFAAESFVDRSINDANPFLVSNIRGTYTILDIVTKFNKRMIQISTDEVFGSLQDGSAFETSRFNPSNPYAATKASAELLVMSYFQTYNSDVVTTRCTNNYGPRQFVEKLIPKTIILANKDKKIPVYGKGNNIRDWIFVDDHCDAVLMSLLNGKKGSSYNISANNEVDNMTVVRKILDVMDKSEDLIEFVEDRPGHDFRYSLNSKKISDELGWKRNTNFDEGIRKTVQWYLDNPEILNDISSTVLDSTPWKSSN

SEQ ID NO: 151837 - protein, 215 aa, Unknown
  Bacterial polypetide isolated from the Sargasso Sea
MIKKRIIVTGGLGFIGSNLIELLIKKKYQVINIDKISYSSNFYNTKEYKNNKNYKFIKCDLNNKNKLRKILNKFKPLGIFNLAAETHVDRSIDGPGNFIKSNILGVYNLLEVFKKYSKKNYKTKLIHISTDEVYGDIIKGRSDEEYPYKPSSPYAASKASSDHLVYSYVRTYKIPAIITNCSNNYGPKQHPEKLLPKLIYNIIKNKNLPIYGKGL

SEQ ID NO: 151838 - protein, 338 aa, Unknown
  Bacterial polypetide isolated from the Sargasso Sea
MKRIVVTGGCGFIGSNLVKFLLKKKYKVLNIDNLSYSANPYNLKNVKSSKNYKFVKQNINDKEKIYKIFKKFKPEGIFNLAAETHVDRSIDDPKNFINTNIIGVYSLLLALDRYKKKIKKKIKLVHVSTDEVYGDINFGKKSKEKYPYTPSSPYAASKASADHLIKSFFRTYGIPAVISNCCNNYGPNQFPEKLIPKLIYNILQNKPLTLYGRGKNIREWIYVEDHCEALLKILEKGKVGESYNVGTSDSFKNIDIAKKLLKIFNNKKIKIRFVKDRPGHDIRYSLDYTKIKKKLGWRKKTKFEEGILKTVYWYLNNQEFFSSVSKKLYSKRLGLKKL

SEQ ID NO: 151839 - protein, 223 aa, Unknown
  Bacterial polypetide isolated from the Sargasso Sea
GTYNLLEGIRSLTRKEKILFHHVSTDEVFGDLGKNDPPFTESHQYQPSSPYSASKAASDMLVHAWGRTYKIPYLITNCSNNFGPRQHHEKFIPKVICNAINGIEVPIYGDGKNIRDWIFVEDHIKIIFELHKKNVRNQSVNIGNKCEKTNLEILQTISMILNDQFSIKLKYSFVKDRPGHDKRYAIDMTKAEALLGRKIESDFHLNMKKTIQWYIKNYDWWKN

SEQ ID NO: 151840 - protein, 277 aa, Unknown
  Bacterial polypetide isolated from the Sargasso Sea
KVRKIFKYYNPVGIFNLAAETHVDRSIDNPGNFIKSNILGVFNLLEEFKHFFKKNKKTKLIHISTDEVYGDILKGRSNENYPYKPSSPYAASKASSDHLVMSYIKTFNIPAIVTNCSNNFGPKQHPEKLIPKLIYNIIKNKKLPIYGKGKNSREWIYVSDHCEALLKVFSRGKLGEFYNIGSNINLNNIQISKMLLKVSKKIMNKNSNAKIKFVKDRPGHDFRYALDSKKIRKQLRWKPKTKILDGIHKTFSWYFENKMYYKSISKKDIEKRLGVRK

SEQ ID NO: 151841 - protein, 187 aa, Unknown
  Bacterial polypetide isolated from the Sargasso Sea
MSFTENSIIKPSSPYSASKASGDHLVYSYFRTFKLPTIITRCTNNYGPYQSTEKLIPKVINNAINNRSIPVYNKGNEIRDWIHVEDHVDAILKVIKNGKPGNVYNIGSQNSMTNIKLIKKILFIISQKKNNFKSLLKLIKFVKDRPGHDFKYAINNSKTRKEIKWSPQIKFDYGIKKTIEWYLRKNN

SEQ ID NO: 151842 - protein, 192 aa, Unknown
  Bacterial polypetide isolated from the Sargasso Sea
MVILITGGAGFIGSNLIHYWLAQNSGDTIVNFDALTYAGNLANLVGVESNPNYYFFQGDLRKQEQLDEVFEQFSIDSVIHLAAESHVDRSINDPSPFIDSNIKGTFQLLETARNHWQEDLKYHRFLHISTDEVYGTLGKEGLFTEQTPFAPNSPYSSSKASSDHLVRAWHHTFGMDTLITHCSNNYGSLPIS

SEQ ID NO: 151843 - protein, 213 aa, Unknown
  Bacterial polypetide isolated from the Sargasso Sea
VYGDMGKNYKRCDENHPYKPSSPYSASKASADHLINSYIRTYKIPAVISNCCNNYGPFQFPEKLIPKIISNILNNKELPIYGKGKNSREWIYVKDHCEALFRLYLKGKVGENYNVGTNKNLSNIDLVKKILKIFIKNKIKIGKKVKIKFVKDRPGHDYRYALNSKKIVKNLKWKPKTSFDKGLVDTINWYLKNQNFLSSISKKLYEKRLGLKI

SEQ ID NO: 151844 - protein, 318 aa, Unknown
  Bacterial polypetide isolated from the Sargasso Sea
MTKSIYNSILVTGGCGFIGSHFIEYFSEYYQDTKIINIDKLGYAVSNKTVELLNQINNYSFYKVDITDIKNVKKIFSENNFDAIFHFAAESHVDNSITSPSDFVNSNIMGTYNLLECTRHSKDLGKNIFFHHISTDEVYGSLSKSENPFEEDNKYLPSSPYSASKASSDLLVEAWSRTYNLDYLITNCSNNYGSRQNIEKLIPKIIKNAVIGKEIPIYGTGDNIRDWLFVKDHVDGILKLHTAKKKNTTYNIGGGFEISNIDLANMILSILEEDYNFLDLKKLIRFVEDRKGHDFRYAINSSKIFDEAGWQPSNSFQH

SEQ ID NO: 151845 - protein, 185 aa, Unknown
  Bacterial polypetide isolated from the Sargasso Sea
KAASDHLVYSYVRTFKIPAIITNCSNNYGPRQHPEKLIPKLIYNILNNKSLPIYGKGRNSREWIFVDDHCDALIKIYKKGKLGEFYNIGSNYNIDNLKVVKKLLTVAKKKISLGQKVKIKFVKDRPGHDMRYAINSSKLKNKLKWKPKVNFAKGLEKTFLWYLENQNYYSKLNKKDITKRIGIKK

SEQ ID NO: 151846 - protein, 341 aa, Unknown
  Bacterial polypetide isolated from the Sargasso Sea
MKKIIVTGGSGFIGTNLVNFLIKKNFFVINIDKLTYSSNKLKVNFRNKRNYKFYKLDINNKKRLIQIIKQYKPKAIFNLAAETHVDRSIDNPKTFIDTNIYGTYNLLESLRLLKKQKINIKLIHVSTDEVYGDIEKSLRSDEEFKYKPSSPYAASKASADHFVNSYIRTYGIKAVISNCCNNYGPYQYPEKLIPKMISNIIFNRELPIYAKGLNSREWIYVDDHCQALFTLYLKGKPGESYNVGSGKNIKNIELVKKILKICKSMNIKKGNKVKVKFVEDRPGHDLRYALNNNKISKKLKWKTKLSFEIGLRKTIYWYLENKFFLKKLSTKNYSKRLGLKV

SEQ ID NO: 151847 - protein, 187 aa, Unknown
  Bacterial polypetide isolated from the Sargasso Sea
CTKASSDHLVYSYVRTYIINAIITNCSNNYGPRQHPEKLIPKIIYNCINNNNIPIYGNGKNSREWIYVIDHCNALIKVFKNGKVGEFYNIGSNLNLNNLNIAKTLIKTAKQKIKTGKNVKIKFVKDRPGHDFRYALNSNKIKKKLGWKSSIGLKKGLEKTFEWYLNNQNYYSKLKKIDITKRLGQKY

SEQ ID NO: 151848 - protein, 240 aa, Unknown
  Bacterial polypetide isolated from the Sargasso Sea
MKKIVVTGGLGFIGSNLIDLLLKKNFFVINIDKGTYSSNLYNTKDFKRSRNYKLFKLDIASKKIDKILTKYKPSGVFNLAAETHVDRSIDNPGSFIQSNIVGVFNLLECFKNFSKKNKSKLIHISTDEVYGDVLSGRTDENHSYKPSSPYAASKAASDHLVSSYIRTYNLPAIVTNCSNNYGPKQHPEKLIPKLIYNIMNNRPLPIYGKGTNSREWIYVKDHCEALIKVFHKGKLGEFYN

SEQ ID NO: 151849 - protein, 340 aa, Unknown
  Bacterial polypetide isolated from the Sargasso Sea
MQKIIVTGGLGFIGSNLIKILLKKKYKVINIDRISYASNFYNVKNSKKNKNYSFIKCDINNKNQFLKILKKNKPIGIFNLAAETHVDRSIDSPKPFIKSNILGVYNLLEAFRNYSKFNKKIKLIHISTDEVFGDLKKGRSNEKFPYNPTSPYAASKASSDHLVSSYIKTYNLRAIVTNCSNNYGPRQHPEKLIPKLIYNIINNRNLPIYGKGNNSREWIHVYDHCEALVKVFKKGKFGEFYNIGSNKNLNNLNITKLLLKVAKKIVKINSKVKIKFVKDRPGHDFRYALNSNKIKKKLNWSSKIRFEKGLYETFLWYYRNQTYYKSFNKKDIVNRLGLFK

SEQ ID NO: 151850 - protein, 234 aa, Unknown
  Bacterial polypetide isolated from the Sargasso Sea
NPLLFAQTNILGTINLLNSVKELWNDKKDNRFYHVSTDEVYGTLGDSGSFHEKTNYDPRSPYSASKASSDHFVSAYYHTYNLPVLISNCSNNFGPNQNKEKLIPVVINSILNKQKIPIYGNGKNIRDWLFVDDHIEAIDTILHNAEIGQTYNIGGNNELTNLELVRKIIEITSRLINEDKESILKLISFVEDRKGHDYRYSIDNSKLKNNLGWSPSHNFEKSLEKTIKWYIKKT

SEQ ID NO: 151851 - protein, 277 aa, Unknown
  Bacterial polypetide isolated from the Sargasso Sea
MKKIIVTGGLGFIGSNLIDLLIQKKFFVINIDKITYSSNFYNVKEHQKSKKYIFIKCDIEDKKIEKILYKHKPVAIFNLAAETHVDRSIDNPKKFIESNILGTFNLLECFKRYSKKFKSRLIHISTDEVYGDVLVGRSSENYPYNPSSPYAASKASSDHLVSSYIRTFKIPAIVTNCSNNYGPKQHPEKLIPKMIYNILNNKPLPIYGKGKNSREWIFVKDHCEALIKIFKKGKVGEFYNIGSNKNLDNLQVSKKLIEISNNFLKIGKKVKILFVKD

SEQ ID NO: 151852 - protein, 165 aa, Unknown
  Bacterial polypetide isolated from the Sargasso Sea
ITNCSNNYGPRQHPEKLIPKLIYNIICNKPLPLYGKGKNSREWIFVDDHCEALFKVFKKGTKGEFYNIGSNINSNNIDIARLLINIAKNKMQLGKKVKIKFVKDRPGHDFRYALDSKKIFKKLKWKSKINLKKGLENTFNWYFENMKYYTTLKKKDITRRLGIIK

SEQ ID NO: 151853 - protein, 344 aa, Unknown
  Bacterial polypetide isolated from the Sargasso Sea
MGSRQRVLVTGGAGFIGGAVVRRLLRESDAMVFNLDKMGYASDLTSIEEVLTELGDGAAQRHVLQQVDLADAKAVRDAVQAADPDLVMHLAAESHVDRSIAGPGVFIESNVTGTYNLLQAVREHVEGLSGEREENFRLHHISTDEVFGSLGEEGRFCETTPYDPRSPYSSSKAASDHLVSAWHHTYGLPVVLTNCSNNYGPWQFPEKLIPVVTLKAAAGEPIPLYGDGLNVRDWLYVEDHVDALLLAACKGASGRSYCVGGYGERTNREVVECICSQLDQLLPTRNPHKQLIQLVTDRPGHDRRYAIDPARIETELGWKPRHDFNEAIAKTVQWYITHYAEKKT

SEQ ID NO: 151854 - protein, 182 aa, Unknown
  Bacterial polypetide isolated from the Sargasso Sea
MSKTILVTGGAGFIGSAVVRHLINDTGHTVVNLDKLTYSGNLESLTSVSNSDRYSFEQVDICDAEEVKRVFNTHKPDIIMHLAAESHVDRSIDGPGEFIQTNVVGTYTLLEQARAYWSALEGDKKARFKFHHISTDEVYGDLPHPDEVESGTELPLFTETTPYAPSSPYSASKASSDQLVRS

SEQ ID NO: 151855 - protein, 240 aa, Unknown
  Bacterial polypetide isolated from the Sargasso Sea
SNIVAVYNLLENFKNFSKKNKCKLIHISTDEVYGDILTGRSHEKYPYQPSSPYAASKAASDHLVSSYVRTYNLPAIVTNCSNNFGPKQHPEKLIPKLIYNILNNKPLPIYGKGTNSREWIYVKDHCEALIEVFLKGKIGEFYNIGSNKNLNNLEVTKKLLKTSKKLINLGNKVKIKFIKDRPGHDIRYALNSNKIKKELGWYPKTNFSKGIKLTLDWYFENKSYYKSLSKKDILNRLGKR

SEQ ID NO: 151856 - protein, 268 aa, Unknown
  Bacterial polypetide isolated from the Sargasso Sea
IDPDLVIHLAAESHVDKSLIDPSNFIQSNIIGTFNLLEASRNHFKKLTKKRKETFRFHHVSTDEVFGSLDDFGQFNENSNYAPRSPYSASKAASDHLVNSWFYSYSLPIVISNCSNNYGPYQYPEKIIPLAILNGIKGKDIPLYGDGMNIRDWLYVDDHVEALLLVAKRGVIGQRYCIGGNCEKTNKALLNHICNLLDIYCPKSYKHNRLIKYVDDRPGHDKRYSINSKKISIELGWKRKYSFEEGIEKTVQWYLNNTKWWGDIFDEI

SEQ ID NO: 151857 - protein, 320 aa, Unknown
  Bacterial polypetide isolated from the Sargasso Sea
MKKVVVTGGLGFIGSNLIKILLKKKYFVINIDKVTYSSNFYNVKNFLNHKNYKFFRLDINNKKKILEILKRYKPKAIFNLAAETHVDRSIDGPESFIKSNILGVFNLLQVFRKYHKNNKNSLLIHISTDEVYGDVLSGRSKEEDAYKPSSPYAASKASSDHLVYSYIRTFKIPAIITNCSNNYGPRQHPEKLIPKLIYNILNNKKLPIYGKGINSREWIFVDDHCEALIKILEKGKAGNFYNIGSNLNLNNIKICKRLIKIGKNKIKTGKNVKIKFVKDRPGHDLRYALNSNKLIYNIKWKPKTNIVNGLKKTFDWYLKN

SEQ ID NO: 151858 - protein, 246 aa, Unknown
  Bacterial polypetide isolated from the Sargasso Sea
NFIKSNILGVFNLLEAFKDYSVKNPRSKLIHISTDEVYGDILKGRTSESYAYKPSSPYAASKASSDHLVYSYVRTYKLPAIVTNCSNNYGPKQHPEKLIPKLIYNILKNRNLPIYGKGLNSREWIYVSDHCEALIKIFQKGKIGSFYNIGSNINKTNIEVTKSLLKIARQNIKIGKNVKIKFIKDRPGHDVRYALNSRKIIKEIKWKPKINIKKGMNLTFNWYLNNMKYFTSVRNKDATKRIGLRK

SEQ ID NO: 151859 - protein, 225 aa, Unknown
  Bacterial polypetide isolated from the Sargasso Sea
MKRFIVTGGYGFIGSNLIKLLLKKKFKVFNIDNLSYSAQKYNLRDIKSKNYLFKKIDINNKKEITKILNKYKPHGIFNLAADTHVDRSIDDSYNFIKNNILGVYNLLEVIKDYKQKIRLVHVSTDEVYGDILASKRSNENFPYIPSSPYSASKASSDHLVNAYVRTHKIDAVISNCSNNYGPRQFPEKLIPKMIYNILHNKPLPIYAKGKNSREWIYVDDHCDAL

SEQ ID NO: 151860 - protein, 233 aa, Unknown
  Bacterial polypetide isolated from the Sargasso Sea
FIKTNVIGTHLLLECARKYDITKFVHVSTDEVYGSLGSEGYFTEETPIAANSPYSASKASSDLIARAYYKTYGYPVTITRCSNNYGPFQFPEKLIPFMIYRAKEDKTLPVYGDGMNVRDWLYVEDHCSALDIVLQRGKPGEVYNIGGNNEWHNIDIVKLILKELKKPETLIEFVEDRLGHDRRYAIDSGKIKEKLGWEPLVPFKSGVNQTIKWYCNNLKWIEQINNGQYRVSE

SEQ ID NO: 151861 - protein, 248 aa, Unknown
  Bacterial polypetide isolated from the Sargasso Sea
FKKLNIQNQDEITTLILESKPRAILNFAAESHVDRSIEGPENFIHSNIVGTYSLLEASLQYWNSLGEKEKDNFRFFHISTDEVFGSLNMSDEKSTEESPYRPNSPYSASKAASDHLVRAWHHTFELPTLISNCTNNYGPHQHQEKLIPLIITNALENKNLPIYGDGKNIRDWLYVEDHCEAIIKILENGNPGETYNIGGSCEKNNLEVVSEICKILDSIKPKQDGSSYKEQIEFVKDRPGHDFRYSLD

SEQ ID NO: 151862 - protein, 268 aa, Unknown
  Bacterial polypetide isolated from the Sargasso Sea
MLVTGGAGFIGANFVHYWRNKYPDDQVIILDALTYAGNKDNLKFYLDQENVVFINGSICDQMLVKKTFISHKIDKVVHFAAESHVDRSIEGPDDFINTNIMGTYVLLKTAQANWSHRGVNDHLFHHVSTDEVYGSLELAEPPFSETSAYAPNSPYSASKAASDHLVRSYHHTYGLNTTTSNCSNNYGAFQYPEKLIPLCLINILQGRPLPIYGDGKQIRDWLHVDDHCRGIDLVLGNGTYGETYNIGGDNERKNIDVVKLICKTVNEI

SEQ ID NO: 151863 - protein, 248 aa, Unknown
  Bacterial polypetide isolated from the Sargasso Sea
MNFKKTILITGGAGFIGSHVVRKLVNKYSQYHIVNLDKLTYAGNLNNLHDIVDKPNYSFIQLDICNEHGIKELFNQFSFDGVIHLAAESHVDRSISNPKEFILTNVVGTLNLLNECKLKWVNSENKCFYHISTDEVYGSLGEQGFFEETTSYDPRSPYSASKASSDHLVRAYGHTYNLPIKISNCSNNYGSFQFPEKLIPLIINNIKNKKPLPIYGKGENVRDWLWVEDHANAIDLIFHEGRFGETYN

SEQ ID NO: 151864 - protein, 299 aa, Unknown
  Bacterial polypetide isolated from the Sargasso Sea
MKNILITGGCGFIGSNFVKNIIKNDSNYFPIIIDCLSYAGNLDNLKNIDNKSYVFVKGDICDKLLVNQLFDKYNFKAVFHFAAESHVDRSIDGPDKFINTNIFGTYNLLEASRKNNKADSSNFRFIHVSTDEVYGDLDNNGFFTEETPYNPSSPYSATKASSDHLARAWSRTYGLPVIVTNCSNNYGPLQFPEKLIPLMIINCLDWRDLPVYGDGQNVRDWLYVDDHCNAIKTIFEKGIIGETYNIGGNNEIKNIDIVNTICSILDDLKPKENGESYSNQIKFVKDRPGHDFRYAINAE

SEQ ID NO: 151865 - protein, 318 aa, Unknown
  Bacterial polypetide isolated from the Sargasso Sea
MGSNFIIRILGKLNCKVINVDKLTYSGNLDNLSGVKENYDFLELDIADKDKIKEAIMKFEPDVIINFAAESHVDRSIDNCSDFINTNILGTINLLEASLTYYRESQKDNFKFIHISTDEVYGSLEKTGSFSEDSTYAPSSPYSASKASSDHFVNAWNKTFGLPTIITNCSNNYGPFQFPEKLIPLMIINSINENKLPVYGNGDNVRDWIHVDDHCDAIIRIIENGKVGEKYNIGGNCEKRNIDIVEEICDIVDVLCPRNSNKSHRELIEFVDDRPGHDYRYAVDSSKISNTLNWIPKVNFNDGMTSTVKWYLDNSVWW

SEQ ID NO: 151866 - protein, 235 aa, Unknown
  Bacterial polypetide isolated from the Sargasso Sea
LECLRILNRNKIKPKLIHISTDEVYGDIKNKLRSDENYKYEPSSPYSASKASADHLIKSYIRTYNLNAVISNCCNNYGPYQFPEKLIPKMISNIFNNKELPVYAKGNNSREWIHVQDHCEALLKLYLKGKSGESYNIGSGKNMKNIDLVKKILKMCRLIGIPVKNKTKIKFVKDRPGHDFRYALNSKKIFKKLKWQTKIDFEVGLKETIRWYFNNRNFLKQISKKKYDNRLGLKI

SEQ ID NO: 151867 - protein, 234 aa, Unknown
  Bacterial polypetide isolated from the Sargasso Sea
MKIIVTGGCGFIGTNYILNKISQNRSTILNIDKLNYAGNKNNLSSISDDDNYSFVNEDICNIESITGLLDNFKPDALIHFAAETHVDRSIDGPMSFIHSNIVGTVSLLEACRKYFKNNINFRFLHISTDEVYGSLNKKGLFNENSPYNPSSPYSSSKASSDHLVRAWHKTYDLPILISNCSNNYGPYQFTEKLIPLIIANCIDEKPLPIYGEGLNIRDWLFVNDHCDAINKILD

SEQ ID NO: 151868 - protein, 280 aa, Unknown
  Bacterial polypetide isolated from the Sargasso Sea
KLLRNKNNTVLNIDKISYASNEDFIEKNDQYAISKIDLSDVNSVEKTILDFNPDNIFHLAAESHVDNSITSPSPFIFSNIIGTFNLLEASRKLLKKKSKENSFKFHHISTDEVFGDLEINDPSFNEDSPYKPSSPYSASKASSDHLVRSWIRTYDFPAVITNCSNNYGPNQHQEKLIPMVINNIINRKPIPVYGDGLQIRDWLYVEDHIDALIKVSMEAPVGETFNIGGEEELSNIDLIKLICQLMDDKLSKNNSENLISFVNDRAGHDRRYSIDFTKIK

SEQ ID NO: 151869 - protein, 229 aa, Unknown
  Bacterial polypetide isolated from the Sargasso Sea
IFRFHHISTDEVFGSLGKNGKFNENSPYSPRSPYSASKAASDHLVRAWFHTYNLPTLISNCSNNFGPLQYPEKLIPKVILNALNQNPIEIYGDGLNIRDWIYVEDHIEALKRVLFSSKPGKTYCIGGSCEKSNLEVVTTICNQLDILRPIGDSYNTLIKFVKDRPGHDYRYAIDSKNILNDLNWSPKFNFEKGIIKTINWYLENTTWFNEGNKKEINIITKRQGIIDDH

SEQ ID NO: 151870 - protein, 286 aa, Unknown
  Bacterial polypetide isolated from the Sargasso Sea
MVTGGLGFIGSNFIRMLLQEDVFEKVINLDKQTYAGNPENLSGFQNHPRYVFQRGDICDQTSLESILMENEVDAVVNFAAESHVDRSIDGPEPFVQTNIVGALRLLEATKTFLSKCTADRQKAFRFLHVSTDEVYGSLTAEDPAFCESTPYAPNSPYSASKAAADHLVRAYHHTFGLPVLTTNCSNNYGPYQFPEKLIPLMILNACEGKSLPIYGDGSNVRDWLHVEDHCSGILAVLQKGRLGETYCIGGESEKTNMEVIDTLCSLLDERFPDHAPHAKLKSFVRT

SEQ ID NO: 151871 - protein, 246 aa, Unknown
  Bacterial polypetide isolated from the Sargasso Sea
PENFIQSNIVGVYNLLENFKYFSKKYKSKLIHISTDEVYGDILTGRSSEKYPYQPSSPYAASKAASDHLVSSYVRTYKIPAIITNCSNNYGPKQHPEKLIPKLIYNIINNKPLPIYGKGKNSREWIYVKDHCEALIKIFLKGKNGEFYNIGSNKNLNNLQVTNELLKKSKKLIKLRSKVKINFVKDRPGHDIRYALNSNKIKNEIGWYPKTNFSKGIRLTLEWYLKNKSYYKSLSKKDIIKRLGKR

SEQ ID NO: 151872 - protein, 211 aa, Unknown
  Bacterial polypetide isolated from the Sargasso Sea
SLDETGRFQENTPYDPSSPYSASKASSDHLVRAWHRTYGLPTLLTNCSNNYGPFQFPEKLIPLMIINCFDQKTLPVYGEGENIRDWLFVSDHCKAILEVYRNGEIGNTYNIGGNNELKNIDIVNRVCSLMDEFYPQKYVEKYADLITFVKDRPGHDFRYAIDSSKIYNDLGWEPVESFETGIKKTVNWYLNNVKWWRRIQNKTYKQERLGI

SEQ ID NO: 151873 - protein, 260 aa, Unknown
  Bacterial polypetide isolated from the Sargasso Sea
GIFNLAADTHVDRSIEGSFNFIKNNILGVYNLLEAIKDYNKKTRLIHISTDEVYGDIKDPLKSNENFPYTPSSPYSASKASSDHLVNAYVRTYKIDAVISNCSNNYGPRQYPEKLIPKIIYNILNNKPLPIYSKGKNLREWIFVDDHCEALIKLFNKGRSGEKYNIGSGIICSNIFLVKKILKIFKNKKIKIGKKVKIIFVKDRPGHDFRYALNSNKIKKNLKWKAKINFSQGISKTIDWYIKNQGYFKKLNEKNFSYRW

SEQ ID NO: 151874 - protein, 223 aa, Unknown
  Bacterial polypetide isolated from the Sargasso Sea
IHISTDEVYGSLGNKGKFTESTPYDPSSPYSASKASSDHLARSWYKTYDFPVIITNCSNNYGPYQFTEKLIPLMIINALAGKELPVYGKGLNVRDWLYVRDHCEAIQTIADVGQLGETYNIGGNNEITNIQIVNTICEILTNERPLENGKSYQEQIVFVPDRPGHDFRYAIDASKIEAELNWKPQESFETGIKKTILWYLKNQDWWENINRNKYQQQRLGLKE

SEQ ID NO: 151875 - protein, 231 aa, Unknown
  Bacterial polypetide isolated from the Sargasso Sea
MKIFVTGGCGFIGSNFILRQIKSNNCEIMNYDKLTYAGNAANLKSLSNNNNYSFFKGDICDFNSLKKAIYLFQPNWVVHFAAESHVDNSINEPNIFIKTNVEGTANLLGVSLSYFKGLTDSEKNYFKFLHVSTDEVFGSLGQKGYFNNDSNYSPNSPYSASKASSDHLVRAWHATYQLPTLITNCSNNYGPFQYPEKLIPLLVTNCLKNKSLPIYGDGKNIRDWIYVNDHC

SEQ ID NO: 151876 - protein, 163 aa, Unknown
  Bacterial polypetide isolated from the Sargasso Sea
NCSNNYGPYQLYEKLIPLMIVKALNGEKLPIYGSGMQIRDWLYVEDHVEALIKVIQIGKIGDSYNIGGNSEKTNLEVVEQICGILDDLIEYKPKGIRSFTELISFVEDRPGHDKRYAINSDKITNELNWMPNQDFESGLKITVQWYAENIDSSPYDIERIGKG

SEQ ID NO: 151877 - protein, 216 aa, Unknown
  Bacterial polypetide isolated from the Sargasso Sea
TFVKGDICNKSILNELFEKYSFDGVFHFAAESHVDRSIDGPDEFISTNIIGTYNLLEISRKYLKEVNSHFKFIHVSTDEVYGDLDDDGYFTETTPYDPSSPYSASKASSDHLARAWHRTFELPVIVTNCSNNYGPMQFPEKLIPLMIINCLDSKDLPIYGDGQNVRDWLYVDDHCSAIKTIYEKGVIGETYNIGGNNEIKNIEIVNTICSILDELK

SEQ ID NO: 151878 - protein, 233 aa, Unknown
  Bacterial polypetide isolated from the Sargasso Sea
LRKLKKTTKNKIKFLQISTDEVYGDIPGSKVASEKDNYNPSSPYSASKASADQLVKAYGRTYGIRTVIANPCNNYGPNQFPEKFIPKMIFNILNNKSLPVYGRGNNTREWIYVKDNCEAILKIFLKGKNGENYNVGTGIKLKNIDIVKKIFKIAKKNKIKLGRKAKIVFVKDRPGHDLRYALNSNKIRKKIKWKHKVSHTKGLEDTFKWYKDNLGYFKKISKKSIAVRLGLKL

SEQ ID NO: 151879 - protein, 296 aa, Unknown
  Bacterial polypetide isolated from the Sargasso Sea
MKKVIVTGGLGFIGSNLIKILLKKKYYVINLDKITYSSNFYNVKEFSKSINYKFIKVDINNKKKILQILKKFKPNAIFNLAAETHVDRSIDKPESFIKSNILGVFNLLEAFKMYLKKNKKIKLIHISTDEVYGDILSGRSKEDDSYKPSSPYAASKASSDHLVYSYIRTFKIPAIITNCSNNYGPKQHPEKLIPKLIYNIINNKNLPIYGKGLNSREWIYVDDHCEALIKIFEKGIIGNFYNIGSNLNVNNLKISKLLIKVAKAKFNIGKNVKIKFVKDRPGHDMRYALNSSKLIK

SEQ ID NO: 151880 - protein, 225 aa, Unknown
  Bacterial polypetide isolated from the Sargasso Sea
RFHHISTDEVFVNLTDSRDLFKEDSPYKPSSPYSASKASSDHLVRAWNRTFDLPTLVSNCSNNYGPFHYPEKLIPLTILNLLNCKDIPVYGNGEQVRDWLYVEDHAEALYQVATKGIISETYNIGGNNEYKNIDVVRLICKIMQELHPIEKNNNSNDSINHYEDLIKHVEDRPGHDLRYAIDSSKINNNLNWYPKHDFETGILNTIRWYLKNLNWVKNVNKNLKN

SEQ ID NO: 151881 - protein, 226 aa, Unknown
  Bacterial polypetide isolated from the Sargasso Sea
SYKNKKCRLIHISTDEVYGDKLYGRSKEFDSYKPSSPYAATKASSDHLVSSYIRTYNIAAIVTNCSNNYGPKQHPEKLIPKLIYYILKNKNLPIYAKGLNSREWIYVTDHCEALIKIFKKGKIGNFYNIGSNINMKNIDVVNKLISVAKSKITLKKNVKIKFVKDRPGHDFRYALNSNKIKKELKWKPRTTFKDGIEKTFMWYFKNQKYYSNLSKKDITERLGFEK

SEQ ID NO: 151882 - protein, 193 aa, Unknown
  Bacterial polypetide isolated from the Sargasso Sea
MHKILITGGLGFIGSNLIKFLIEKKYKILNIDKENYASNTYNIKKFIKNKNYKFIKNDLSDSKKILKIINNYKPKCIFHLAAETHVDRSIDSPKNFIDSNIIATFNLLEAFRKHSIKNKKTKLIHVSTDEVYGDVLKGRSLENSAYKPSSPYSASKASSDHLVFSYIKTFKIPAIITNCSNNYGPHQHPEKLI

SEQ ID NO: 151883 - protein, 243 aa, Unknown
  Bacterial polypetide isolated from the Sargasso Sea
FIQSNIVGVYNLLECFKNFTKKNKSKLIHISTDEVYGDVLKGRTSENYPYQPSSPYAASKASSDHLVNSYIRTYKLPAIVTNCSNNYGPKQHPEKLIPKLIYNIMHHKPLPIYGKGTNSREWIYVKDHCDALIKVFMKGKIGEFYNIGSNKNLTNLDVCKYLLNLAKNKKKINKKVKILFVKDRPGHDTRYALNSNKIIKELKWKPKVTFKKGIKYTFEWYKNNQLYYKSLSKKDITKRLGKK

SEQ ID NO: 151884 - protein, 192 aa, Unknown
  Bacterial polypetide isolated from the Sargasso Sea
KASSDHLVRAWHHTFGMDTLITHCSNNYGPYQFPEKLIPLMIRNCLLGKELPVYGDGLQVRDWLYVEDHCEALDVVFHRGQSGESYNVGGLNEWENLRMVRHICKFMDAELGNSPERSCLNLIRHIQDRPGHDRRYAIDASKIQNQLGWQPRHQIGEGLEKTMRWYLDHQEWVEQVTSGAYRDYYKHHYGTG

SEQ ID NO: 151885 - protein, 240 aa, Unknown
  Bacterial polypetide isolated from the Sargasso Sea
ESLNEVSSNHRYQFENIDICNQEAINSIFKKYKPNAVMHLAAESHVDKSIDGPVDFMKTNIMGTFTMLEASNMYFQKLEGLDKENFRFHHISTDEVYGDLGNPNDYFTELTPYAPSSPYSASKASSDHLVRSWWRTYGLPVIVTNCSNNYGPYHFPEKLIPHIILNAIQGKSLPIYGDGSQIRDWLFVEDHARALLKVLSEAKVGETYNIGGNNEKTNLEVVEDICELLEEMAPKKPTKC

SEQ ID NO: 151886 - protein, 220 aa, Unknown
  Bacterial polypetide isolated from the Sargasso Sea
MNKKILVTGGAGFIGSALIRNIISNTNHSVVNIDKLTYAGNLESLSLVESSDRYFFELADICDANKIKNIFEKYQPDLVIHLAAESHVDKSINAPSEFIQTNIIGTYVLLEHSRMYWGSLKNDKKEKFRFLHVSTDEVYGDLEGTNDLFTETTRYAPSSPYSATKAGSDHLVRAWNRTYKLPTLITNCSNNYGPYQFPEKLIPNTILKALNGSSIPIYGD

SEQ ID NO: 151887 - protein, 271 aa, Unknown
  Bacterial polypetide isolated from the Sargasso Sea
ILDIANLNKLQKIIKKYKPIYVINCAAETHVDRSINRSMPFIKSNILGTYNLLECIREVFFNKNKKENNNFKLFHQISTDEVFGDSVNFKKAPTENSSYYPSSPYSASKASSDHLVSSWGRTYKIPYSISICTNNYGPRQFPEKLIPKTIINAIEGKKIPIYGNGKQIRDWLYVEDHAEAVEKIIFNRKSRGNKFNIGGNNQINNLKLVNIICEYMDKKLKKKPKKISKFKDLIEFIEDRPGHDKRYFLNTIKIKRKLNWRPKYNIKKWPR

SEQ ID NO: 151888 - protein, 232 aa, Unknown
  Bacterial polypetide isolated from the Sargasso Sea
MKNIIVTGGLGFIGSNLIELLISKNYRVINIDKVTYSSNFYNVKKFKKNKLYKFIKSDLNNKKKISSILKKYSPVCIFNIAAETHVDRSIDSPKNFVLSNILGVFNLLESFREHYKKNKRTKLIHISTDEVYGDVIKGRSKENDAYKPSSPYSASKASSDHLVYSYIRTYGIPGIITNCSNNYGPKQHPEKLIPKLIYNIINNKYLPIYGKGKNSREWIYVGDHCEALLKVF

SEQ ID NO: 151889 - protein, 275 aa, Unknown
  Bacterial polypetide isolated from the Sargasso Sea
MRLLVTGGCGFIGSNFISIALKKKIRIINIDNLTYASKNYKNHPNDKNYKFFKLNILDEKKILKILNKFKPDGIIHFAAETHVDRSIKNPEIFFKSNTIGTLRLLNACRIFLNRNKNKKFRFINVSTDEVYGSLTIKEKSFSEKNKFFPNSPYSASKASSDHIARAFFRTYKMPIITTNCSNNYGPNQYREKLIPLIIHNALKKKKLPIYGNGKQIRDWLYVGDHCNAILKIFYKGKVGEVYNIGGQNEIRNLDLVKKICIILDKKMNLNKKEDS

SEQ ID NO: 151890 - protein, 300 aa, Unknown
  Bacterial polypetide isolated from the Sargasso Sea
KNHSKYKFIHGDICDKKSVSDAINAFNPDAIVNFAAESHVDRSIDAPNDFINTNIVGTVNLVAEAFLYWQQKKGNKFFRFLHISTDEVFGSLNNGFFNESTPYNPSSPYSASKASADHIVRAWHRTYGLPILITNCSNNYGPYQFPEKLIPLMIINCIKERKLPLYGDGQNIRDWLFVKDHCKAIMSVLKNGIIGESYNIGGNNEIKNIDIVKRICSVLDDLRPRKSKKSHEELIQYVDDRPGHDFRYAIDTSKIKNKLSWIANETFESGILKTINWYLDNEVWWHKIQKIVTIKKDLVL

SEQ ID NO: 151891 - protein, 316 aa, Unknown
  Bacterial polypetide isolated from the Sargasso Sea
LLIQQINIEEKLRNKNNYKLFKLDINNKNKIIKIIEKFKPNAIFNLAAETHVDRSIDGPKNFINTNINGTFNLLESLRFLKRKKIKLKLIHISTDEVYGDIKGNFRSNENYKYEPSSPYSASKASADHLVKSYIRTYKLDAVISNCCNNYGPYQFPEKLIPKMISNILNNKELPIYAKGRNSREWIHVEDHCEALFTLYLRGKSGESYNVGTNQNMKNIDLVKKIIKVFKSMQFNIGSKTKIKFVKDRPGHDFRYALDNKKIFKKIKWKPKIKFDQGIKDTIQWYIKNKNFLNRISKKSYDQRLGLKYDKKRYNFS

SEQ ID NO: 151892 - protein, 233 aa, Unknown
  Bacterial polypetide isolated from the Sargasso Sea
VRKLEKKTKNKLKFLQISTDEVYGDIPKNKKASESYNYNPSSPYSASKAGADQLVRSYGRTYGIKTLIANPCNNYGPNQFPEKFIPKMIFNMLNNKPFPVYGKGKNVREWIYVKDNCEALLKIFLKGRIGKSYNIGTGIRLRNIDIIKKLIDISKKNKIRITNKNKIVFVMDRPGHDERYALNSNKIKREIKWRHKTSVSSGLSKTIDWYSKNLNFFKKISKRNITKRLGVKV

SEQ ID NO: 151893 - protein, 202 aa, Unknown
  Bacterial polypetide isolated from the Sargasso Sea
RSKEIDAYKPSSPYSASKASSDHLVYSYIRTYGIPAIVTNCSNNYGPKQHPEKLIPKLIYNIINNKNLPIYGKGKNSREWIYVGDHCDALLKIFNKGKIGEFYNIGSNYNLDNLSVVKKLINVSKKKIKIGSKVKIKFVKDRPGHDKRYAINSSKIKNKIGWKPKISFEEGLKKTFSWYLNNQQYYSKLNKKDITKRIGVKK

SEQ ID NO: 151894 - protein, 253 aa, Unknown
  Bacterial polypetide isolated from the Sargasso Sea
MYPEKFIKTNIHGVYNLLEVLRKLKKITKNKIKFLQISTDEVYGDISVGKIASEKDNYNPSSPYSASKASADQLVKSYGRTYGLKTLIANPCNNYGPNQFPEKFIPKMIFNVLNNRPLTIYGKGKNTREWIYVKDNCEAILKIFLRGKYGENYNIGTGIKLKNIDIVKKILEIAKKNKIRVGKKAKIRFVKDRPGHDLRYALNSSKIRKKMKWKHKVSTAKGLEDTFSWYKNNLGYFKKISQKNISTRLGLKL

SEQ ID NO: 151895 - protein, 294 aa, Unknown
  Bacterial polypetide isolated from the Sargasso Sea
IIVTGGSGFIGSNLINLLLKKKFFVINIDKFSYSANPYNVQDFKKNKNYVFFKLDINKTSKILSILNKYKPVGIFNLAAETHVDRSIDKAHHFIRSNITGVYSLLEAIRKYEKKTRRGLKLLQVSTDEVYGDIPRGKLANENHNYNPSSPYSASKAGADQFIKSYGRTYGLKILIAHPCNNYGPNQHPEKFIPKMIFNLLNNKSLTLYGSGNNIREWIYVKDNCEALLKIFLKGRSGRSYNIGTGIKLKNLDIAKKLLAVAKKNKIIISKKNKIQFVQDRPGHDERYALNSSRI

SEQ ID NO: 151896 - protein, 233 aa, Unknown
  Bacterial polypetide isolated from the Sargasso Sea
LKGSDLPFKFIHVSTDEVYGALDSEGHFTEMTPYNPSSPYSASKASSDHLARAWHRTYELPVIVTNCSNNYGPMQFPEKLIPLMIINCLDSKDLPVYGDGQNIRDWLYVDDHCSAIKTIYEYGVVGETYNIGGNNEIKNIEIVNTVCSILDELKPQENGKSYSDQIKFVKDRPGHDFRYAINAEKIQKELNWFPRETFETGIKKTIEWYLENEKWWRMIQNKTYKQERLGENI

SEQ ID NO: 151897 - protein, 193 aa, Unknown
  Bacterial polypetide isolated from the Sargasso Sea
ASKAGSDHLVRAWNRTYGLPTLITNCSNNYGPYQFPEKLIPLIIINCLNDKPLPVYGEGNNVRDWLYVKDHCEAISYVLNNGKIGQTYNIGGDNEIKNIDVVKTICSILDDILPKQDGNSYSELISFVKDRPGHDFRYAIDAEKIKTNLGWGPKESFDSGLRETIHWYLNNKTWWQSIQKNTYEQERLGVIKS

SEQ ID NO: 151898 - protein, 225 aa, Unknown
  Bacterial polypetide isolated from the Sargasso Sea
NLAAETHVDRSIDGPAEFIKSNIVGVFNLLEEFREFTKKNKKAKLIHISTDEVYGDVLKGRSKENDSYKPSSPYAASKASSDHLVYSYVRTFKINAMITNCSNNYGPHQHPEKLIPKLIYNIINNKPLPLYGKGKNSREWIFVDDHCDALFKVFKSGKRGDFYNIGSNINSSNLDIAKLLISIARTKIRLSKNVKIKFVKDRPGHDFRYALDSKKKGKNLNGNLK

SEQ ID NO: 151899 - protein, 309 aa, Unknown
  Bacterial polypetide isolated from the Sargasso Sea
DQNFIHNFINRNPKSFVINIDSLSYAGNEGNNENLSKKNYQFVHGDICSKSDISKIFQENDLDAVLNFAAESHVDRSIKKPDSFIKSNIFGTYNLLECLREFNEKLDHNIHFHHISTDEVYGSLDKNDSPFTEKNKYFPNSPYSASKASSDHLVRSWHKTFNLPVTISNCSNNYGPFQFPEKLVPLTIFNILNGKEIKLYGDGMNIRDWLYVIDHCDAIEKILVYGENGHTYNIGGNNEISNVDIVNTVCNEIEIILPAGKNKKSKYNSYQDSVKFVEDRPGHDFRYSIDSSKIHNDLNWLPKESLNQE

SEQ ID NO: 151900 - protein, 213 aa, Unknown
  Bacterial polypetide isolated from the Sargasso Sea
MKAIVTGGAGFIGSALVKKLIKSLKCEVMVIDSLTYASQMPSLQEVLENKLFSFSETDICDTKSLMEIYAIFQPDFVFNLAAETHVDRSIDSPELFLKTNVMGTYSLLDVSLKFWRDLDATSKKKFRFLHISTDEVFGDLKENEPPFKETNNYHPSSPYSASKASSDHLVRAWYKTYNLPVLLSNCSNNYGPFQFYEKLIPLMIIKALRGEKL

SEQ ID NO: 151901 - protein, 302 aa, Unknown
  Bacterial polypetide isolated from the Sargasso Sea
MQKILVTGGLGFIGSNLVKLLLDKKYNVINIDKISYSSNFYNTKDFSRNNKYQFIKCDLKNSKKIEKILNKFKPNCIFNLAAETHVDRSIDSPRNFIDSNIIGTFSLLESFKKFFYKYKKGKLIHISTDEVYGDILKGRSKENDQYKPSSPYAASKASSDHLVTSYIRTFNLPAIITNCSNNYGPRQHPEKLIPKMIYNILNNKPLSLYGNGKNSREWIYVNDHCEALIKIFKSGIVGETYNIGSNKNLNNIEICKNLLNIAKKNIRIGKKVRIKFIKDRPGHDKRYALNSSKLNKKLKWKQ

SEQ ID NO: 151902 - protein, 237 aa, Unknown
  Bacterial polypetide isolated from the Sargasso Sea
MKTIVTGGAGFIGSALVKKLINSLEYEVLALDSLTYASQIDSLEAVQDSSLFSFSETDIRDENALEDIFNEFKPDFIFNLAAETHVDRSIDSPELFLETNIFGTYRLLKVSLKYLKTLEKEKKDKFRFLHISTDEVFGDLEANDPPFRETNNYDPSSPYSASKASSDHLVRAWYRTYKLPVLLSNCSNNYGPFQFYEKLIPLMIIKALRGEKLPIYGTGLQVRDWLYVEDHADALIK

SEQ ID NO: 151903 - protein, 233 aa, Unknown
  Bacterial polypetide isolated from the Sargasso Sea
NNKNKLQKIFYTFKPYAIFNLAAETHVDRSIDGPENFIKSNILGVYNLLEVFKKYSKKYSKAKLIHVSTDEVYGDILRGRSDENFPYKPSSPYAASKASSDHLVYSYVRTYKIPAIITNCSNNYGPKQHPEKLIPKLIYNIIKNKKLPIYGRGLNSREWIYVEDHCLALIKILGKGKVGNFYNIGSNINKTNIQITKSLINIAKKNIKIGKNVKIKFVKDRPGHDVRYALNSK

SEQ ID NO: 151904 - protein, 270 aa, Unknown
  Bacterial polypetide isolated from the Sargasso Sea
MKLLVTGGAGFIGSAVIREAIGRDIQIVNIDSLTYAACLDNLKSIQKDQNYFFEKADIRDRDLIDVIFEKHQPDAVMHLAAESHVDRSIDSPNDFIETNVLGTFNLLEASRNYWHQKGKPANFRFHHISTDEVYGSLKLKSPEKFTEETSYDPRSPYSATKAASDHLVRAWHETYGIPVVLTNCSNNYGPYHFPEKLIPVVIIKALAGDTIPVYGNGDNVRDWLYVEDHANALLLVLEKGEIGRSYNIGGENESSNIELVKMICEILDSK

SEQ ID NO: 151905 - protein, 245 aa, Unknown
  Bacterial polypetide isolated from the Sargasso Sea
FINSNILGTFNLLEIFKKFSKKFKKCKLIHVSTDEVYGDILKGRTKENYPYNPSSPYAASKASSDHIVFSYIKTFGIKAIITNCSNNYGPKQHPEKLIPKMIYNILNNKPLTIYGNGKNSREWIYVKDHCEALIKIFKSGKIGETYNIGSNKNLNNLEICKNLLKVAKKNIKIGKKVKIKFIKDRPGHDKRYALDSSKLIKKLRWKPKTNFLDGINQTFIWYLNNKKYYRSLNIRDIIKRLGSIK

SEQ ID NO: 151906 - protein, 277 aa, Unknown
  Bacterial polypetide isolated from the Sargasso Sea
MDFDPDYVVHFAAETHVDRSIDGPSEFINTNIIGTFNLLQSCLKLLNKKKIDQKGRFRFIHISTDEVFGSSSGDAFEENDAYLPSSPYSASKASADHLVRAWHTTYDFPAIIVNTCNNYGPFQNREKLIPKTIFCLMNGLEIPLYGKGQNIRDWIHVDDHVEAILLVIQKGIIGSSYNIGVNNQVKNIDIVNSLCELATEMNLELPINLKHHKELIKFVDDRPGHDFCYSLSSKKIEKELGWKPRYQILEGLKLSIQWYVANQDKLDNEGYNPEWMK

SEQ ID NO: 151907 - protein, 223 aa, Unknown
  Bacterial polypetide isolated from the Sargasso Sea
MKKVIVTGGLGFIGSNLIKILLKKKYYVINLDKITYSSNFYNVKEFSKSKNYKFIKIDINNKKKISQILKKFKPNAIFNLAAETHVDRSIDQPENFIKSNILGVFNLLEAFKIYLKKNKNIKLIHISTDEVYGDILNGRSREDDAYKPSSPYAASKASSDHLVYSYIRTFKIPAIVTNCSNNYGPRQHPEKLIPKLIYNILNNKNLPIYGKGLNSREWIYVDD

SEQ ID NO: 151908 - protein, 278 aa, Unknown
  Bacterial polypetide isolated from the Sargasso Sea
FKPNKIIHLAAESHVDRSIDGPEVFMQSNILGTFNLIDSSYKFYSSLSHKLKNNFKFLLVSTDEVYGSLGIDENKFDENSNYKPNSPYSASKAASDHIARAWIKTFQMPILISNTTNNYGPWQFPEKLIPLTIYKCLNEKDIPIYGNGEQIRDWIYVDDHVNGLFYILENGTIGEKYNIGSNNEIKNIDVVSNICEILDQIRPREKGSYSDLITFVDDRPGHDTRYALNNKKICDLGWKPSYSWNTGLRQTIDWYLGNIDYLESKNIKKYSGERLGKI

SEQ ID NO: 151909 - protein, 278 aa, Unknown
  Bacterial polypetide isolated from the Sargasso Sea
FSIDSVIHLGAESHVDRSINDPSPFIDSNIKGTFQLLETARNHWQEDLNDHRFLHVSTDEVYGTLGKEALFTEQTPFAPNSPYSSSKASSDHLVRAWHHTFGMDTLITHCSNNYGPYQFPEKLIPLMIRNCLLGKELPVYGDGLQVRDWLYVEDHCEALDVVFHRGQSGESFNIGGLNEWENLSMVRHICKFMDAELGNPPEQSCLNLIHHIQDRPGHDRRYAIDASKIQNQLGWQPRHQIGEGLEKTMRWYLDHHEWVEQVTSGAYRDYYKHQYGIG

SEQ ID NO: 151910 - protein, 273 aa, Unknown
  Bacterial polypetide isolated from the Sargasso Sea
MNFQKKILVTGGAGFIGSHVVRRLVNKYPNYLILNADKLTYAGNLENLIDVDQKENYEFVQLDITNEKLVNELFEAHDFDGVIHLAAESHVDRSISNPGEFVMTNVVGTLNLLNSCRSQWNGNYNDKVFYHISTDEVYGSLGYEGLFYETTAYDPRSPYSASKASSDHLVRAYFHTYGMPIKISNCSNNYGANQFPEKLLPLMINNINENKPLPVYGKGENIRDWLWVEDHAIAIDLIFHKGKSGETYNIGGHNEWKNIDLIHLLCDTMDRKL

SEQ ID NO: 151911 - protein, 178 aa, Unknown
  Bacterial polypetide isolated from the Sargasso Sea
ASKASSDHLVRSWTRTYGLPSVITNCSNNYGPYQNDEKLIPTIIRSALNHEPIPIYGDGSQIRDWLFVEDHVAALHKVLIEGKNNETYNIGGINEVKNIDVAMKICAILDDIYPISSQEFKSYNKLIKFVDDRPGHDKRYAIDCSKIKQDLNWHPNENFNSGMIKTVKWYIDKYKEGN

SEQ ID NO: 151912 - protein, 311 aa, Unknown
  Bacterial polypetide isolated from the Sargasso Sea
ALSKGHKILAIDCLKYSGIKNNVNRFNDNKNFEFKKIDILNKKTLERCIKNFRPNFIINFAAESHVDRSIESPMSFIETNCLGVINFLQCIKELKLTNITKLVQISTDEVYGEVSFPATENNRYMPNSPYSASKASADLFIRAWDKTFKLKNIILHPSNNYGPRQFPEKLMPLIITNALYKKKLPIYGDGMQTREWLFVDDTVDAILQCLQKKDLKGHLNIGSGQRYTNLQIVKKICLILDSLLNEKKFKHSSLIHFTKDRPGHDKKYAINSKIAFNKLGWKPKTTIEDGLLKTVKWYIDNEKWWKEILKK

SEQ ID NO: 151913 - protein, 168 aa, Unknown
  Bacterial polypetide isolated from the Sargasso Sea
MKNILVTGGCGFIGSNFIHHLINKNDLSHIVNLDKLTYAGNISNISQISNSRHTLIEGDICDSDLVKSLFDKYEFESVIHFAAESHVDRSIDDPSNFIYTNIVGTLNLLEHSRSYFSKTKNEDFRFLHVSTDEVYGSLDDGGKFLESTPYDPSSPYSASKAGSDHLSG

SEQ ID NO: 151914 - protein, 279 aa, Unknown
  Bacterial polypetide isolated from the Sargasso Sea
KNKKYKFIKCDLKNQKKLTRILKKYNPSGIFNLAAETHVDRSIDSPENFIKSNIVGVFHLLEAIRKYNFKKKKIKLIHISTDEVYGDVLKGRSREKDPYEPSSPYAASKASSDHLVSSYIRTFNLPAIVTNCSNNYGPGQHPEKLIPKIIYNILNNKPLPVYGSGKNTREWIFVKDHCEALIKIFLNGKIGNFYNIGSNFNLTNIEIIKRLLFIAKKSMSIGKRVKIKFVKDRPGHDLRYALDSSKIRKELKWIPKTNIKDGLIRTLIWYVNNKKILFE

SEQ ID NO: 151915 - protein, 226 aa, Unknown
  Bacterial polypetide isolated from the Sargasso Sea
YCKKNLNTKLIHISTDEVYGDVLKGRSKESDPYIPSSPYAASKASSDHLVYSYIRTYKIPAIITNCSNNYGPRQHPEKLIPKLIYNILKNKNLTIYGKGRNSREWIYVKDHCRALIKIFKKGKIGNFYNIGSNVNQKNIEICKKLIQVAKRKIKIGKNVKIKFVKDRPGHDLRYALNSNKIFNKLKWKSEIKIDKGLEMTFLWYLKNQKYYSNINKLDITSRFGNV

SEQ ID NO: 151916 - protein, 309 aa, Unknown
  Bacterial polypetide isolated from the Sargasso Sea
MRILVTGGCGFIGSNFIKHMLNTYEDYKIYNVDKLTYAGSEDNLGEFKNHSNYYFHQADINEYATLHYMVGQNKIDTIVNFAAESHVDRSIENSDEFIQSNINGTHTLLKLFHEFPIKRYVQISTDEVYGSLEENDSPFTEDSPLKPNSPYAASKTSADLLCRSFYETYDYPIVITRCSNNYGPNQYPEKLIPLMIQKAKNGENLPVYGNGLNIRDWINVQDHCEAIDVVLHRGENGEVYNIGGLDERRNIDIVKTILYKLNKGYQHIEYVQDRLGHDFRYGMDISKIRDELGWSPRINFEEGIGELVK

SEQ ID NO: 151917 - protein, 338 aa, Unknown
  Bacterial polypetide isolated from the Sargasso Sea
MHKVIVTGGLGFIGSNLINLLLKRNFFVINLDKVTYSSNFYNVANFQKNRKYKFIKCNLENQKKITRILKKYKPSGIFNLAAETHVDRSIDSPENFVKSNILGVFHLLEAIRKYNFKKKKIKLIHISTDEVYGDVLKGRSREEDPYEPSSPYAASKASSDHLVSSYIRTFKLPAIVTNCSNNYGPRQHPEKLIPKIIYNILNNKPLPVYGNGKNTREWIFVNDHCEALIKIFLNGKIGNFYNIGSNLNLTNIEIIKKLLFIAKKNMNIGKRVKIKFVKDRPGHDLRYALDSSKIKKELKWIPKTNIKDGLIRTLMWYINNKKFYSNINKKDIVKRLGN

SEQ ID NO: 151918 - protein, 343 aa, Unknown
  Bacterial polypetide isolated from the Sargasso Sea
MKKIIVTGGCGFIGSNLIRLLLQKNYFVINIDKLSYSANSYNVKDFKQNRNYLFYNLDINKTSHILKILEKHKPIGIFNLAAETHVDRSIDKAYHFIRSNIAGVYSLLEAIRKFENKKHKKLKLLQVSTDEVYGDIPKKQSADENHNYNPSSPYSASKAAADQFLKSYSRTYGIKILIAHPCNNYGPNQHPEKFIPKMIFNILNNRPLPLYGNGKNIREWIYVKDNCEALLKIFLKGKNGRNYNIGTNIKLKNTDIASRLLDVAKRNKIKISKNTKIIFVKDRPGHDERYALNSNRIKREIKWKYKTPISKGLFKTIEWYSKNYNYFKQISKKNITKRLGLKV

SEQ ID NO: 151919 - protein, 198 aa, Unknown
  Bacterial polypetide isolated from the Sargasso Sea
MKRFIVTGGYGFIGSNLIKLLLKKKFKVLNIDKLSYSAQKYNLKDIKSKNYFFKKTDINNKKEILKILKRYKPHGIFNLAADTHVDRSIDDSSNFIKNNILGVYNLLEAIINYKKKVRLVHISTDEVYGDISGSKRSDESFPYIPSSPYSASKASSDHLVNAYIRTHKIDAVISNCSNNYGPRQFPEKLIPKMIYNIL

SEQ ID NO: 151920 - protein, 205 aa, Unknown
  Bacterial polypetide isolated from the Sargasso Sea
MKFLVTGGAGFIGSALVRYLIHDTDHQVLNIDKLTYASNLDSLESVKDHPNYKFNKVDICNHETIDNIFHTFQPDMVMHLAAETHVDQSIEHSRKFLDSNVFGTYVLLEASRKYYDSLPSNMKQKFRFQHISTDEVFGDLEDSTGYFTENTPYAPSSPYSATKASSDHLVRAWYRTYGLPIVITNCSNNYGPFQFPEKLIPLMIS

SEQ ID NO: 151921 - protein, 249 aa, Unknown
  Bacterial polypetide isolated from the Sargasso Sea
TYNLLEASRSYWSKLYDKHKEEFRFHHISTDEVFGSLGMQGAFTENTRYDPRSPYSASKASADHLVRAWHETFGLPVVLSNCSNNYGPYHFPEKLIPLMIIKALKGEPMPVYGSGNNVRDWLYVDDHARALYTIASRGRAGESYNVGGNSEVSNIQVVERICAILNELSPRKDGKRYEEQITFVSDRPGHDFRYAIDATKIKSELDWVPLETFETGLRKTVEWYLDNQKWWQPLLNKHYQGQRLGKSAD

SEQ ID NO: 151922 - protein, 286 aa, Unknown
  Bacterial polypetide isolated from the Sargasso Sea
MKTLLVTGGLGFIGSNLIELLLKKRFRVINIDKVSYSSNFYNTKDYKNNKNYKFIKCDINNQIKINKILNKYHPDCIFNLAAETHVDRSIDNAKHFIKSNITGVFSLLQVCKFYAKKNKKFKFIHISTDEVYGDKLRGRSLENDPYKPSSPYAASKASSDHLVYSYIRTFDFPGIVTNCSNNYGPKQHPEKLIPKIIYNILNNRPLPIYGKGINEREWIYVEDHCDALFKIYQKGLIGNFYNIGSDVVLKNNALIKNILSIAKREIKVGKNVKMVYVKDRPGHDLR

SEQ ID NO: 151923 - protein, 353 aa, Unknown
  Bacterial polypetide isolated from the Sargasso Sea
MILVTGGCGFNRAHFVLDWLDTSDEAVLNVDKLTYAGNLGTLKSQQGNPRHVFVRADICDRAALDALFAEHKPRAVLHFAAESHVDRSIHGPADFVQTNVVGTFTLLEAARQYWNTLGEADKAAFRFLHVSTDEVFGSLSATDPQFSETTPYAPNSPYSATKAGSDHLVRAYHHTYGLPVLTTNCSNNYGPYQFPEKLIPLMIANALSGKALPVYGDGQNVRDWLYVGDHCSAIREVLERGTPGETYNVGGWNEKKNLDVVHTLCDLLDQLRPKAGSSYRDQITYVKDRPGHDRRYAIDARKLERELGWKPAETFETGLAKTVQWYLDNQAWSDEVASGEYRKWVETNYAQRA

SEQ ID NO: 151924 - protein, 353 aa, Unknown
  Bacterial polypetide isolated from the Sargasso Sea
MILVTGGAGFIGANFVIDWLRQSDEAVLNVDKLTYAGNLRTLQSLNGSPKHVFARVDICDRAALDTLLAAHRPRAILHFAAESHVDRSIHGPAEFVQTNVVGTFTLLEAARQYWGALPEVEQAGFRFLHVSTDEVFGSLSPTDPQFSETTPYAPNSPYSATKAGSDHLVRAYHHTYGLPTLTTNCSNNYGPYQFPEKLIPLMIANALAGKPLPVYGDGKNVRDWLYVGDHCSAIREVLARGVPGETYNVGGWNEMTNLDVVHTLCDLLDSARPRAQGSYRDQIAYVKDRPGHDRRYAIDARKLERELGWKPAETFATGLAKTVFWYLDNQAWSDEVASGEYRKWVETNYAERV

SEQ ID NO: 151925 - protein, 348 aa, Unknown
  Bacterial polypetide isolated from the Sargasso Sea
MKIFITGGCGFIGSNFIIKQIDDEKNNILNYDKLTYAGNLDNLSSINNNKRYEFINGDITDFSTLKSAIFDYKPDAIINFAAESHVDRSINNPMDFVNTNIVGTATLLNISNLYFNSKPNSDFKFYQISTDEVYGSLGETGLFTEKSLYKPNSPYSSTKAGSDHLTRAWGKTYGLPVITTNCSNNYGPYQFPEKLIPLIITNCFDEKPLPIYGDGSNIRDWLYVNDHCDAIYSVLNKSEPQKTYNIGGNFEKTNIEIVTEICRILDKKLPRNQGESYENLITYVEDRPAHDFRYAIDSTKIKNEIGWSPKESFKSGINKTVNWYLDNKEWWRKIQKNKYSQERLGKIN

SEQ ID NO: 151926 - protein, 339 aa, Unknown
  Bacterial polypetide isolated from the Sargasso Sea
IVTGGSGFIGSNLISPLLKKKYFVINVDKLSYSANSYNVKNFKKNRNYIFYKTDINKTSKILQILNKHKPIGIFNLAAETHVDRSIDKAHHFIRSNIVGVYSLLEAIRKFENNKVKKIKLLQISTDEVYGDIPNNKKADENHNYNPSSPYSASKAAADQFIKSYSRTYGLKIMIAHPCNNYGPNQHPEKFIPKMIFNILNNKPLPVYGDGKNVREWIYVKDNCEALLKIFLKGKNNQNYNIGTGVRLKNTEIAKKLLDIAKKSVTDKPNKTKIVFVKDRPGHDERYALNSKLIKKEIKWKHKISISNGLLKTLAWYSKNYNYFKQISKKNITKRLGLKL

SEQ ID NO: 151927 - protein, 340 aa, Unknown
  Bacterial polypetide isolated from the Sargasso Sea
MKKIIVTGGLGFIGSNLIKLLIERNYFVINVDKISYASNFYNIKNFSYKKNYKFFKLDINNRSGFKDILNKYKPVAIYNLAAETHVDRSIDSPAEFIKSNIVGVFNLLETFREFTKKNKKTKLIHISTDEVYGDVLKGRSKETDTYKPSSPYAASKASSDHLVYSYVRTYKLNAIITNCSNNYGPNQHPEKLIPKLIYNIINNKPLPLYGKGKNSREWIFVDDHCEALLKVFRNGSKGEFYNIGSNININNLDIAKLLIKIAKKKIKVGKKVKIKFIKDRPGHDIRYALDSKKIKKKLKWKSITSLKRGLNNTFDWYFKNMKYYTYLKKKDITNRLGVIK

SEQ ID NO: 151928 - protein, 314 aa, Unknown
  Bacterial polypetide isolated from the Sargasso Sea
KNFFVINVDKVSYSSNFYNHKEYKNSKKYKFIKCDIKDKKFKNIIFKYKPTCIFNLAAETHVDRSIDNPKNFIQSNIVGVYNLLEYFKEYSDKFKSKLIHISTDEVYGDILKGRTTEKYPYYPSSPYAASKAASDHLVSAYVRTYKIPAIITNCSNNYGPKQHPEKLIPKLIYNIINNKPLPIYGKGINSREWIYVKDHCEALFKVFKKGKIGQFYNIGSNKNLNNIQVCKSLLNISKKLINLGNKVKINFVIDRPGHDIRYALNSNKIRKELNWKPKISFAKGIKLTFNWYNDNKKYYKTLSKKDILKRLGKK

SEQ ID NO: 151929 - protein, 326 aa, Unknown
  Bacterial polypetide isolated from the Sargasso Sea
MKKTIIITGGHGFIGKNLIEYLKGYYNIVNIDNSILKSPFKTKNHKIININSSIGNKKVISQVLKKYRPKLIFNLAAETHVDNSIMKPEKIVKNNIFETFKFLITIKENLNLLSKNFKFIQISTDEVYGSIRKYSKKKFTENSKLETNSPYSASKASFDLILLSFIKTYKFPGIITRGCNNFGFYQHYEKLIPKIIKCCFYGKKIPIYDRGHQVREWIFAKDHCKIIKHISEKGEIGEIYNIGSGFRISNIKLTKKIIQYMSKKNLSQKKIGFELIQYVQDRPGHDFKYALNTDKIFKKFKIKFNQKFDYNLNKTIDWNIKFLNGK

SEQ ID NO: 151930 - protein, 333 aa, Unknown
  Bacterial polypetide isolated from the Sargasso Sea
MKILVTGCYGFIGFNFLKKLIKEYKDEFEVTGIDLLNNSYSKLNYQQLNTGENFEFLSENIIDINKINFKKNDFDLVINFAAESHVDTSIYNPDVFIQTNVLGVNNLLKFCLENSVKKYIQISTDEVYGSTRNHYFEETDILNPSSPYSASKASADMVCNAYMKTYDMDIKTIRPANNYGPFQQPEKLIPFSISNIIENNEVEIYGDGSNIRHWLYVKDTVEGIFKVIEKGESGEIYNIGSGIYHNNNEIAEKLLSKFNLSKNSIKYVKDRPGHDFKYAVNFDKLSNLGWSPKYDFENALEETTEWYLENKNWWSEGIAQIRKNRDLRFNKKQ

SEQ ID NO: 151931 - protein, 357 aa, Unknown
  Bacterial polypetide isolated from the Sargasso Sea
MNKYLVTGGAGFIGSSLIRNLMGKEQCDVLNIDKLTYAGNLDNLKSVESKSGYQFHQMDIVDKESLDKIIIDFEPDYIMHLAAESHVDRSIDDPSTFISTNIIGTYNLLESVRNYLGTIPIRKAEKFRFHHISTDEVFGSLGSEGFFTEETKYDPSSPYSSSKASSDHLVRAWNRTYDLPIVITNCSNNYGPYQFPEKLIPLMIINALDGKPLPIYGNGLQVRDWLYVDDHTDALIEVVLNGKIGETYNIGGRCEKTNIELVQLICEILSQELIKKGSNKKDLKDQITFVDDRPGHDQRYAIDSSKISNELGWKPKESIESGLEKTINWYLENESWYQKIINQSYDGHRLGLKGAEK

SEQ ID NO: 151932 - protein, 188 aa, Unknown
  Bacterial polypetide isolated from the Sargasso Sea
SSDHLVRAWHRTFGLPVTISNCSNNYGPYQFPEKLIPLMIINCLSNKSLPVYGKGENIRDWLYVEDHCKAINLILQEGAIGDTYNIGGNNEISNLNIVESICTILDKLKPSNSGKSYNQMISFVKDRPGHDFRYAINTTKIKKDLNWEPKETFDSGLIKTIKWYLENENWWKKTQKNIYKQERLGVSP

SEQ ID NO: 151933 - protein, 352 aa, Unknown
  Bacterial polypetide isolated from the Sargasso Sea
MNILVTGGAGFIGSNLVRFLINETNSNVINIDSLTYAGNLESLDSISSSDRYSFENIDISDSSSLKKIISQYSPDVIFHLAAESHVDRSIDDPEVFLKTNILGTFNLLKLSSDHINQYSEKRKSKFRFIHVSTDEVFGDLKLNDPPFGETTAYNPSSPYAASKASSDHLVRAWHKTYDFPSIITNCSNNYGPNQFPEKLIPLIIMNAINQKPLPIYGDGSQIRDWLYVEDHVKALHMLAEKGLIGETYNIGSQNEIKNIDLVKKICNVLDQIRPQKSMQYEDLIKYVDDRPGHDKRYAINPKKIFSQIGWQPEEKFDGGLKKTIKWYLENESWCKNIEDGSYLTRQGLLTKK

SEQ ID NO: 151934 - protein, 238 aa, Unknown
  Bacterial polypetide isolated from the Sargasso Sea
LSFRIIRKNNKLNKKKIKLVHVSTDEVFGDIPNKKRSNEKYPYSPSSPYSASKASADHLIKSYIRTYKIPAIISNCSNNYGPNQFPEKLIPKIIFNIVNNKPLPIYGKGKNSREWIYVNDHCEALFMLYLKGRNGESYNIGSNKNLRNIDLVKKILFLMKKKKIKIGKKVKIQFVKDRPGHDFRYALNSKKIRKDIKWKPRTNINIGLNLTINWYLNNLSFFKNISKKFHIKRIGLKI

SEQ ID NO: 151935 - protein, 241 aa, Unknown
  Bacterial polypetide isolated from the Sargasso Sea
MGVFNILEVFRNFSKKNKKSKLIHISTDEVYGDILNGRTKETYPYNPSSPYAASKASSDHLVSSYVRTYKIRAIVTNCSNNYGPKQHPEKLIPKLIYNILSNKKLPIYGKGQNSREWIYVKDHCEALIKIFEKGKIGNFYNIGSNKNLINLEISKKLLKIAKKKIKVGKNVKIEFVKDRPGHDIRYALNSNKLIKQLKWKPQTNFETGLKQTFEWYLNNLNYYKSLNKKDILNRLGLKSNS

SEQ ID NO: 151936 - protein, 298 aa, Unknown
  Bacterial polypetide isolated from the Sargasso Sea
LCDICDEDQLKIIFKKYEPNVIFHLAAESHVDRSILSPKQFIETNIMGTFNLLNLSLDLWNSRKSESNYFFRFHHISTDEVFGDLGDSDLKFQESSLYRPSSPYAASKASSDHLVRSWGRTYGLPYILTNCSNNYGPYQFPEKLIPQTILNAINGLDIPVYGDGNQIRDWLYVDDHVQALLCAVFQAEQNQNYNIGGNNEIKNIDVVNQICKILDNEVKEKPQSISSFADLISYVTDRPGHDLKYAIDASKIHKELGWTPNENFETGIKKTVLWYLDNQVWWKQILQGTYQEEKKIKK

SEQ ID NO: 151937 - protein, 191 aa, Unknown
  Bacterial polypetide isolated from the Sargasso Sea
MKNIIVTGGLGFIGSNLIELLISKNYRVINIDKVTYSSNFYNVKNIQKSKLYKFVRSDLNNKKKLSNIIKKYSPVCIFNVAAETHVDRSIDSPKNFILSNILGVFNLLESFREHCKKNKGTKLIHISTDEVYGDVLKGRSKESDAYKPSSPYSASKASSDHLVYSYIRTYGIPAIITNCSNNYGPKQHPEK

SEQ ID NO: 151938 - protein, 268 aa, Unknown
  Bacterial polypetide isolated from the Sargasso Sea
TNSYDFVKGDICDKSLVNELFEKYSFGGVFHFAAKSHVHRSIDGPGAFINTNIFGTYNLLETSRKYFKDGNSHFKFIHVSTDEVYGDLDDDGYFTETTPYNPSSPYSASKASSDHLARAWYRTFQLPVIVTNCSNNYGPMQFPEKLIPLMIINCLDSKDLPVYGDGQNVRDWLYVDDHCSAIKTIYENGSIGETYNIGGNNEIKNIDIVNTVCSILDELKPAKNGKSYRHQIKFVKDRPGHDYRYAINAEKIQKELNWFPGESFETRY

SEQ ID NO: 151939 - protein, 228 aa, Unknown
  Bacterial polypetide isolated from the Sargasso Sea
SKKNNFRFIMVSTDEVYGSIEKGERAKEINPYKPSSPYSASKASADNLAEAWFKTYNLPVITTNTTNNYGPLQFPEKLIPLTISKILNEQEIPIYGKGNQIRDWIHVSDHVKGLIYVRNNGKIGEKYNIGNECEKTNLEVVSDICSKIDIKLKSKKDSYNLITFVEDRPGHDFRYSLDNEKIKNLGWKPEIDWNSGIENTIDWYINNNEWIKKILENNYKGERLGLDK

SEQ ID NO: 151940 - protein, 188 aa, Unknown
  Bacterial polypetide isolated from the Sargasso Sea
MSLQDFHPRSPYEISKVTGFDLTRNYREAYNLFAVSGILFNHESPRRGFEFVTRKISLAVARIKNNLQNDLILGNLKAKRDWGYAKDYVEAMWLMLQNQNPVDYVVGTGLTNSIEDFVKLAFDQVKLNYLDYVKFNEKFLRPTEVDLLIADNAKVKKELGWKPSINFEDLVNLMVESDLKYIRDNKSK

SEQ ID NO: 151941 - protein, 245 aa, Unknown
  Bacterial polypetide isolated from the Sargasso Sea
IGTLRLLEAIRFLKIKNIKFYQASTSELFGETYGKNVFSEKSKFHPKSPYGVAKLYSYWITSVYRESYGIFASNGILFNHESPRRGETFVTRKITRFLAKKKLGSKDVLYLGNLNAKRDWGHAKDYTEMQWRILQQKKPNDFVVATGQAFSVRQFVEIASKYLNLKIYWQGKGLNEVGYLKKGSKKEIIIRVDKNYFRPNEVEYLKGDARKAFKLLKFKPKYTFKDLVKDMIESDLKKAKKELQK

SEQ ID NO: 151942 - protein, 322 aa, Unknown
  Bacterial polypetide isolated from the Sargasso Sea
KKTAIITGITGQDGSYLAELLIKKNFKVYGIIRRTSTDPLYRLKYLGVEDKISFLNVDLSEHQRVNRYINSIRPNYFFNLAAQSFVAYSYDNPIYTDNVNNLSVLNILESIKNNSIKTKFYQASSSEMYGGLNFSKKKLNENSNFDPISPYAIAKLSSYHYTRMYRKSYNIFASNGILFNHESPIRGEQFVTKKIVKGLVEILNGKKKDPIYLGNIYSRRDWGHAKDYVDAIYKIMNYKIADDFVVASDKNYSVKEFINLTAKILGIKMIWSGKGLKEKALNANGKIIIKISKKFFRPLDINNLVGDTYKARKKLKWKPKND

SEQ ID NO: 151943 - protein, 239 aa, Unknown
  Bacterial polypetide isolated from the Sargasso Sea
MKKAFISGVTGQDGSYLAEFLLKKDYEVHAIFRRSSVFTSQRVDHILDNPNFKTYHGDLTDSSNLKGLISSISPDEIYNLGAQSHVAVSFDVPEYTAQVDAIGTIRLLDAVKDLENKPRFYQASTSELFGGLPETAPQSEKTPFYPKSPYGTAKIYAYWATVNYREAYDLYACNGILFNHESPRRGETFVTKKITKAVARIKKGLQEDLKLGNLDAKRDWGFAKDYVEMMWLMLQQEKP

SEQ ID NO: 151944 - protein, 226 aa, Unknown
  Bacterial polypetide isolated from the Sargasso Sea
MKAFITGINGQDGSYLADFLIEKKYEVHGTIRRSSSINTEKIDHLISEHQGTNLHLYYSDLLDSSSLTNLISKINPDEVYNLAAQSHVAVSFQNPMFTTQASTIGPLSLLESIRNVNKDIKFYQASSSEMYGGAAREALNEDSRFDPKSPYAAAKLFAYEISKVYRESYDMFAANGILFNHESPRRGETFVTRKISKAVGRISVGIQNKLTLGNLDAFRDWGYAGD

SEQ ID NO: 151945 - protein, 282 aa, Unknown
  Bacterial polypetide isolated from the Sargasso Sea
MKKTALVTGISGQDGGYLAALLLKQGYRVIGTSRDANANRFEGLRTLNIQDKVILDSMSLIDFQSILRVIHQYEPDEIYNLAGQTSVVLSFDQPVETYESIVIATVNLLEAIRMSNKTIRLYNAGSSEMFGNTKGEPASEVTRLHPRSPYGIAKATSFWQIAQHREAYGVHACTGILFNHESPLRPERFVTQKIVKGACAIANGSEKTLPLGDLSVQRDWGWAPEYVVAMHAMLQRDHPEDFVIATGQTSSLEAFVSEVFSTLGLNWKEHVVRDPRFMRPSD

SEQ ID NO: 151946 - protein, 180 aa, Unknown
  Bacterial polypetide isolated from the Sargasso Sea
MANSNKVALITGITGQDGSYLAEFLLEKNYIVHGIKRRSSSFNTERVDHLYEDLNENESHNFILHYGDLSDSTNLIRIIQELQPDEIYNLAAQSHVAVSFESPEYTADIDAIGTLRILEAIRILGLEKKTKFYQASTSELFGLVQEVPQTEKTPFYPRSPYGVAKLYAYWTVVNYREAYN

SEQ ID NO: 151947 - protein, 262 aa, Unknown
  Bacterial polypetide isolated from the Sargasso Sea
MKRRTSSFNTSRIDHLFKDLHDPSRKLILHHGDLTDSSSIIGVISKTLPDEIYNLAAQSHVAVSFEQPEYTANSDAFGVLRILEAIRILGLEKKTKFYQSSTSELYGLVKEKPQNEKTPFHPRSPYGVAKLYAHWITKNYREAYGLFASNGILFNHESPRRGETFATRKITRAFAKMLFGNKLPLYLGNLSAKRDWGHAKDYVEAQWLILQHKKADDFVIASGKHILLRFCYSVASYLGMKLMDWKRTNEVGILLKFYRAQV

SEQ ID NO: 151948 - protein, 273 aa, Unknown
  Bacterial polypetide isolated from the Sargasso Sea
MGFKKTALITGITGQDGSILADFLLQKNYKIIGIKRRSSSFNTERINHLYNSKILNKSYFPFYGDLTDTTNLIRIIQQTKPHEIYNLAAQSHVRTSFETPEYTANADALGTLRLLEAIRILKLEKKIKFYQASTSEIFGNTKIPQNEKTPFAPTSPYAISKLFSYWTVINYRKAYNIFAVNGILFNHEGERRGATFVTRKITRAVANYFYGNKEILYLGNLNARRDWGYANDYVKTMWLMLQQKKPSDYVISTGVSKSVKDFVNEAYNCIGVK

SEQ ID NO: 151949 - protein, 159 aa, Unknown
  Bacterial polypetide isolated from the Sargasso Sea
MKAQSEEKLFVTRKIVIALCKIKLGLQKKLYLGNLNSKRDWGHAKDYVIAMWKILQKNKPTDYVISTGKQYTVQQFVNFVLKELNIKFFWKGKGVNCKCYNENNEVIVECDKEYFRPLEVDTLLGDSRKALKDLKWKPKFKIKDLVKDMVRSELTNLTK

SEQ ID NO: 151950 - protein, 167 aa, Unknown
  Bacterial polypetide isolated from the Sargasso Sea
SGILFNHESPLRGEEFVTRKIIIGLIRILKKDQSYFELGNLYAKRDWGYAKEYVEVMWKMLQKNKPDDYVIATGKTYSIKDFIDIATSYLKMNVEWIGKGLNEKLINKVSKKVLIKINPKYFRPSEVNVLIGDYSKAKKHLKWKPKTNLKKLISIMIDDEIKYYNKL

SEQ ID NO: 151951 - protein, 172 aa, Unknown
  Bacterial polypetide isolated from the Sargasso Sea
NGILFNHEGPTRGETFVTRKISMAIAKIYYGMQEKLYLGNLSSKRDWGHAKDYVKGMWLILQHDVPDDFVLSTGKMYSVRNFVELAFKIIDIDIEWVGEGENEKGFNKKTGKCLVEVDPRYFRPTEVDQLLGDSTKAKTVLGWKAEISFKALVYEMVKNDLKIVKNQNRKSI

SEQ ID NO: 151952 - protein, 161 aa, Unknown
  Bacterial polypetide isolated from the Sargasso Sea
MFISNGILFNHESPRRGENFVTRKITLGATSIKLGIQNKLVLGNLNAKRDWGYAKDYVEAMWLMLQQKKADDFVIATGKSHTVKYFCELVFDILDLDYKKYVVSDKKYFRPSEVDSLKGDYKKAKKILGWKPKTSVEELAKIMVDQEMKTLTKYKKNNLFK

SEQ ID NO: 151953 - protein, 256 aa, Unknown
  Bacterial polypetide isolated from the Sargasso Sea
MGFKKTALITGITGQDGSILADFLLKKNYKIIGIKRRSSSFNTERIDHLYDRKILNKSYFPFYGDLTDSTNLIRIIQQTKPQEIYNLAAQSHVRTSFETPEYTANADALGTLRLLEAIRILKLEKKIKFYQASTSEIFGNTKIPQNEKTPFAPTSPYAISKLFSYWTVINYRKAYNIFAVNGILFNHEGERRGATFVTRKITRAVANYFYGNREILYLGNLNAKRDWGSANDYVKTMWLMLQQKKPSDYVISTRCK

SEQ ID NO: 151954 - protein, 252 aa, Unknown
  Bacterial polypetide isolated from the Sargasso Sea
EVPEYTAEVDALGTIRLLNLVKQSKKNIKFYQASTSELFGGIPETAPQNEKTPFYPKSPYGAAKLYAFWITKNYREAYDIHASNGILFNHESPRRGETFVSKKITKAVANISKGKQENLQLGNLDAKRDWGYAKEYVESMWLMLQQDKPDDYVIATGVTKTVREFVELAFKYVDIDIKWAGSGINEKGLCSKSGKEIVIINPRYYRPSEVDLLHGDSTYAQKKLGWRPKTSLEELVEIMVEYDLNYDGYGFD

SEQ ID NO: 151955 - protein, 307 aa, Unknown
  Bacterial polypetide isolated from the Sargasso Sea
GMKRKSSSFNTQRIDHIYENKKYKKKFFLHYGDMSDSLRVLNLINSIRPHEIYNLAAQSHVATSFEIPEYTSDVNALGALRILEAIRRLNLIKKTRFYQASSSELFGKIQEKSQSENTPFYPLSPYAISKLYAFWITKNYRESFKIYACNGILFNHESPRRGETFVTRKITLGLNRIALGLERCLYLGNLYSLRDWGHARDYAIMQWKILQQKKPEDYVVATGKQYSVKFFVERCCKYLGIKIKWVGKGLNEKGVVAHVDKNSKIKLKKNAVIIRVNKQYFRPLDVKNLIGNSKKAQKKLGWNPDRK

SEQ ID NO: 151956 - protein, 186 aa, Unknown
  Bacterial polypetide isolated from the Sargasso Sea
LTPLHPRSPYGSAKVFGHHTTVNYRESYGLYACSGILFNHESPRRGIEFVTRKVTNAVARIKLGLQDHVALGNLDAKRDWGFAGDYVRAMHLMLQQEEPDDFVVATGETHAVSEFVALAFAAADIDDWEPYVRIDPKFFRPAEVDLLVGDATKAKTQLGWEPKVSFPDLVRIMVEHDLRVEREKLT

SEQ ID NO: 151957 - protein, 279 aa, Unknown
  Bacterial polypetide isolated from the Sargasso Sea
MKKKALIFGITGQDGSYLAEFLMSKKYQVHGIKRRTSTPNTSRIDHIFDSVNFNNKNLIMHHGDLSDSGSLYRIINDVNPDEIYNLAAQSHVKISFQIPEYTSEVNALGPLRLLEIIRHYKKKRIRFYQASSSEMFGKSKPPQNEKTLFLPRSVYSISKVFAYHSVVHYREAYNIHACNGILFNHESPRRGVNFVTKKIVQGLVRIKKGKQKNLTLGNLYAKRDWGHAKDYVESMWRILQNKIPDDFVISTNTSHSVKDFINICAKKLRIKLYWKNKGL

SEQ ID NO: 151958 - protein, 243 aa, Unknown
  Bacterial polypetide isolated from the Sargasso Sea
SNADALGALRILESIVTINPKIKYYQAGSSEMYGKIQSFPQNEKTPFYPRSPYAVSKVYAHWITVNYRESYKIFACNGILFNHESPLRGETFVTKKIVKALCKIKNKKQKKLYLGNIYAKRDWGHAQDYVEAMWKILQYKKPEDWVICTGKQYSVKQFINLVSKKLNLKIFWRGKGLHEKAYNEKKQKIIEIKKEYFRPAEVDNLKGNSNKAKKYLKWKPKKDINYLIQDMINYELNELKNGK

SEQ ID NO: 151959 - protein, 238 aa, Unknown
  Bacterial polypetide isolated from the Sargasso Sea
MGKIAIITGISGQDGSYLAELLLKKNYKIYGICKKSKKINFKNIEKIKKKIFIKKIDINNFSHIKRLIKKVRPNEFYHLAAQSFINYKFEDEFFRLNPNINGTHYILSAIKKFSPKTKFYYAASSELFGNAKSLPQDENTHFNPRSAYGVSKVAGYYLTKNYREAYKLFACSGILFNHESPRRNVNFVSRKITKNLSLIIKGKIKKIILGNINSKRDWGHAKDYVYAMWKILQLKRPQ

SEQ ID NO: 151960 - protein, 216 aa, Unknown
  Bacterial polypetide isolated from the Sargasso Sea
MKKKIALIFGITGQDGSYLAEFLIKKGYLVHGVKRRSSSLNTSRVDHIYQDPHENKRNFFLHYGDITDAISVSTLIKKIKPNEIYNLAAQSHVSVSFEVPEYTANADAIGALRILEAIKFHGFEKKTKFYQAGTSEMFGKVREIPQNEKTSFYPRSPYGVAKVYAHWITINYREAYNIYACNGILFNHESPVRGETFVTRKIVVALCQIKKGLKKK

SEQ ID NO: 151961 - protein, 305 aa, Unknown
  Bacterial polypetide isolated from the Sargasso Sea
SSSINTSRIDPLISEYSNIKEKKLHLHYSDLLDSSSLTALINSIKPDEVYNLAAQSHVAVSFKNPIYTTHTGTNGTLSLLEAIKHSDKDIKFYQASSSEMYGGTTTEKLNENSKFEPKSPYAAAKVFSHEINKIYRDSYGMFCTNGILFNHESPHRGETFVTRKITKAVGRISMGLQKKLTLGNLNASRDWGFAGDYTYGMWQMLQHDSPGDWVLATGQSYTVEKFAETAFSEVGLDWSEYVVTSERYMRPNEVESLLGDPTKAKTELNWENKTSFNSLVKLMVESDLNSAKKEKILIEEKLIKP

SEQ ID NO: 151962 - protein, 296 aa, Unknown
  Bacterial polypetide isolated from the Sargasso Sea
MNKKALITGITGQDGSYLAEYLLSLGYEVHGIVRRIANEHSSWRYSRINHILPNIVMHSGSLENYQSLFDIVQEVKPDECYHLAAQSFVANSFEDQHSTLSINTFGTHYLISIIKKITPNCKFYFAGSSEMFGKVEESPQNESTKFNPRSIYGISKLTAYEITKNYRESYNMFACSGILFNHESPRRGSEFVTRKISIAAAKIKLGLEKNISLGNINAERDWGYAKDYIEAMHKMLQIDTPQDFVIGTGKCYSVKDFLKMAFECFDLDYEKYLNIDKSLLRPADVELLISDSSKAR

SEQ ID NO: 151963 - protein, 217 aa, Unknown
  Bacterial polypetide isolated from the Sargasso Sea
HRLSEMYGKVSESPQNEKTKLNPVSPYAISKTYAHFMTSLYGVSYGLEVYSGILFNHESPLRGLEFVTRKITHSAAMIKTNKLEYMELGNLNALRDWGHARDYVRGMWMMMQSKSPGTYVLSTGEMHSVREFVEITFRNIDIDIEWRGEGLDEVGINKSNGNVIVKINEEYFRPHDVQQLLGDSSKAHDIIKWKPEISFNELCKEMIEFDMQELQIK

SEQ ID NO: 151964 - protein, 112 aa, Unknown
  Bacterial polypetide isolated from the Sargasso Sea
MSKVALITGVTGQDGSYLAELLLEKGYEVHGIKRRASSFNTERVDHIYQDPHSSNPKFHLHYGDLTDSSNLTRILQEVQPDEVYNLGAMSHVAVSFESPEYTADVDAMGTLR

SEQ ID NO: 151965 - protein, 246 aa, Unknown
  Bacterial polypetide isolated from the Sargasso Sea
VFTTQTGTLGSVSILEALRFADYEAKFYQASSSEMYGGGVQEKLNEESPFDPKSPYAASKVFAHNMTKIYRDSYDLFCVNGILFNHESPFRGETFVTRKITRAVGRIALNLQSKLTLGNLDASRDWGFAGDYVEAMWTMLQHKTPDDWVVATGETHTVKEFAKLAFEEVNLNWEDYIVSSEKYLRPNEVDYLLGDPTKAKKELKWEPKTSFNELVKMMVDYDLNLAKREQVLIKENLIKPTWENPT

SEQ ID NO: 151966 - protein, 163 aa, Unknown
  Bacterial polypetide isolated from the Sargasso Sea
TRKISRALTRIKLGLQEMLYIGNLNAKRDWGHAKDYVEMQWMMLQQKKPEDFVIATGTQYSVREFINLAAKKLDIEISWRGEGINEVGTINGKEAIKVDPKYFRPTEVETLLGNAEKAKIKLGWEPKITFEELVSEMVSEDLKLAKRDELIKKHGYSFFNKFE

SEQ ID NO: 151967 - protein, 191 aa, Unknown
  Bacterial polypetide isolated from the Sargasso Sea
EYTANCDALGSLRILEAIRFHKLNKKTKFYQAGTSEMYGRVFETPQNEKTPFYPRSPYGVAKVYAHWITVNYREAYKIFACNGILFNHESPRRGGTFVTKKIVNGLCRIKKGLQKTLYLGNLEAKRDWGHAKDYAVAMWKILQKKEPDDFVIATGVQLTVKEFVNLVLKELKIDYLWKGKGLSSRCFIKGT

SEQ ID NO: 151968 - protein, 200 aa, Unknown
  Bacterial polypetide isolated from the Sargasso Sea
MNEKKSIALITGVTGQDGSYLAELLLSKNYIVHGIVRRSSSFNTSRIDHLIEEEKYKDKFFFHHGDVTDSSNVERLIEDCQPTEIYNLAAQSHVAVSFQIPEYTAQVDALGTLRFLEAIRSKRYPVRFYQASTSELYGKVVETPQNEETPFYPRSPYGVAKLYSYWIVVNYREAYDLYASNGILFNHEKPRRGETFVTGK

SEQ ID NO: 151969 - protein, 265 aa, Unknown
  Bacterial polypetide isolated from the Sargasso Sea
YIIHGVKRRSSSANTERIDHIFDSINFKSKNFFIHYGDVTDSSSTLNIINKIKPDEIYNLAAQSHVRVSFDIPEYTANSTALGSLRILEAIKNLNLYKTKYYQASSSEMYGKQKRNLSQNEQTPFHPMSIYGVSKVFAYHASVYYREAYGIFACNGILFNHESPRRGPTFVTKKIVQALVRIKKNKQQTLSLGNLYAIRDWGHAKDYVESMWKIMQYKKPDDWVIATNEEMTVKKFINKCAKKLKMNLTWKKKGINEVAIDNKTK

SEQ ID NO: 151970 - protein, 238 aa, Unknown
  Bacterial polypetide isolated from the Sargasso Sea
MERIDNTISKYINSDELNLHYADLLDSASLSNLIIQIQPDEIYNLGAQSHVAVSFSNPLYTTQTSTIGPLALLETIKNSDKEIKFYQASSSEMYGGRSQDSLNEESTLLPRSPYASAKVFAHEINKIYRDSYGIFGVNGILFNHESPRRGETFVTRKITKAIGRIHHGLQEKLTLGNLKASRDWGFAGDYVKAMWMMMQHENPDDWVVATGKTHTVEEFLIEAFNIVDLDWNEYVITS

SEQ ID NO: 151971 - protein, 285 aa, Unknown
  Bacterial polypetide isolated from the Sargasso Sea
DIEFIELDVIDQANIRRAIEKTKPDVVYNLAAQSFVGLSFEQPELATLIDAMGVLRMLESCKQVNPEIKFYQASTSELYGKVFETPQKETTKFWPRSPYGVAKLYGHHITINYREAYNMFASTGILFNHESPMRGEDFVTRKISKGLALWKKEDRPIILGNLNAKRDWGHAEDFVEGMQLIMNHTKADDFVLATGVIHTVKQFLEMSLDYLGINFYWNSSGECFERETNKKISTVDKKHFRPAEVDILQGDATKAKTELGWKHKHNVESLMREMVDADMRRYYKK

SEQ ID NO: 151972 - protein, 56 aa, Unknown
  Bacterial polypetide isolated from the Sargasso Sea
MGKSKVALITGITGQDGSYLAELLLKKGYEVHGIRRRSSSFNTGRIDHIFDKLHIH

SEQ ID NO: 151973 - protein, 219 aa, Unknown
  Bacterial polypetide isolated from the Sargasso Sea
MKKAFITGITGQDGYYLSKLLLEKDYEIHGIVRRSSSINTARIDEFIADHKNDNKFKLYYSDLLDSSSLNSLINNIQPDEIYNLAAQSHVAVSFKNPIYTSQVGTLGSLSLLEAVRNSDKDIKFYQASSSEMYGGGSKKSLNEVSIFDPKSPYAASKVFAHNVTKLYRESYDIFGVNGILFNHESPFRGETFVTRKITKAVGRIHLGIQEKLTLGNLDA

SEQ ID NO: 151974 - protein, 165 aa, Unknown
  Bacterial polypetide isolated from the Sargasso Sea
MSKKVALITGVTGQDGSYLAELLLEKGYEVHGIKRRASSFNTERVDHIYQDRHETNPQFFLHYGDLTDTSNLTRILKEVQPDEVYNLGAQSHVAVSFEAPEYTADVDAIGTLRLLEAIRFLGLEKKTKFYQASTSELYGEVQEIPQKETTPFHPRSPYAVAKMYA

SEQ ID NO: 151975 - protein, 255 aa, Unknown
  Bacterial polypetide isolated from the Sargasso Sea
MKKIALITGITGQDGSYLAEFLLKKNYVVHGLIRKSSTFNTKRIDHIYIDPHNKTNFFLHYGDLTDTNSIYNLIHRIRPNEIYNLGAQSHVGVSFENPEYTSEVSGIGTLRLLEAIRFLKIKNIKFYQASTSELFGETYGKNIFNEKSKFHPKSPYGVAKLYSYWITSVYRESYGIFACNGILFNHESPRRGETFVTRKITRFLAKKKLGSKDILYLGNLNAKRDWGHAKDYTEMQWRILQQKKPDDFVVATGQA

SEQ ID NO: 151976 - protein, 193 aa, Unknown
  Bacterial polypetide isolated from the Sargasso Sea
SPYAASKVFAHNMTKIYRDSYDMFCVNGILFNHESPHRGETFVTRKITRAATRISLGIQSKLTLGNLEASRDWGFAGDFIEGMWMMMQHNKADDWVLATGQTHTVKEFLKITFDKLDLNWEDYVETSERYFRPNEVDYLLGDPSKAKSELGWEPKTSIEELVDLMIESDLNLAKREQVLLNEGLIEPTWESLN

SEQ ID NO: 151977 - protein, 175 aa, Unknown
  Bacterial polypetide isolated from the Sargasso Sea
TRKITRAISNIAYGLEPCLFLGNMDALRDWGHAKDYVRMQWMMLQQDQPEDFVIATGKQISVREFVRMSAKEAGIELAFSGEGVEEIATVTAVDNSKAPAVKVGDIIVKVDPRYFRPAEVETLLGDPAKAKNKLGWEPEIQVEQLCAEMVAHDLDKAKQHALLKKHGYDVSVSLE

SEQ ID NO: 151978 - protein, 194 aa, Unknown
  Bacterial polypetide isolated from the Sargasso Sea
MFGRMVENPARETTPFYPRSPYGVSKLYAHWITKNYRESYGMFNCSGILFNHESERRGVEFVTRKISDGVARIHLGLSDCITLGNLEAKRDWGYAPDYVEAMWLMLQQDSPDDYVVATGTCYSIRDFLNEAFLAIGVQDWSPYVKQDPKFMRPAEVDVLVGDNSKAREQLNWKPRTSFKDLVKIMVENDINSLK

SEQ ID NO: 151979 - protein, 235 aa, Unknown
  Bacterial polypetide isolated from the Sargasso Sea
TLRILEAIKLLGLINKTKFYQASTSEMFGNAKKLPITEKTNFEPVNPYGVAKLYAYWMTKIYRQAYGMHASNGILFNHESPRRGENFVTKKIVSSIVKIKHNKQKFLYLGNLDSKRDWGHAKDYVFGMWLMLQQKKSDDYILSTGKSYSVRDFVEKCFDYIGIKIKWNGKGLKEIGINKSNNKTIVKVDKRYLRPNELHHLLGNSNKAFKTLKWNHKYNINSLIKEMMNDELKKY

SEQ ID NO: 151980 - protein, 167 aa, Unknown
  Bacterial polypetide isolated from the Sargasso Sea
MKKKIALIFGVTGQDGSYLSEFLLKKGYFVHGVKRRSSSFNTGRIDHIYQDPFESKRNFFLHYGDVTDAISVSSLIKSIKPSEIYNLAAQSHVSVSFEVPEYTANADAIGALRILEAIKFHGYEKLTKFYQAGTSEMFGKVKQIPQNEKTPFYPRSPYGVAKVYAHW

SEQ ID NO: 151981 - protein, 252 aa, Unknown
  Bacterial polypetide isolated from the Sargasso Sea
SFKNPVYTTQVGTLGSISILESIRHSKKEIKFYQASSSEMYGGSEKVKLNEESKFDPKSPYAASKVFAHDITKIYRDSYDLFAVNGILFNHESPMRGETFVTRKISRAVGRISLGLQEKLTLGNLDASRDWGFAGDYVEAMWMMLQHDKPGDWVVATGETHTVKDFAKSAFEKVGLNWEDYVETSEKYHRPNEVGYLLGDPTKVKNELNWSPKTSFDDLVKMMVDYDIELATKESVLIKEKLIKPTWEHPKE

SEQ ID NO: 151982 - protein, 214 aa, Unknown
  Bacterial polypetide isolated from the Sargasso Sea
KKIFDENSKFYPRSPYGVAKLYSYWITSVYRESYGIFACNGILFNHESPRRGETFVTRKITRFLAKKYLGSKEILYLGNLNAKRDWGHAKDFVEMQWRILQASKPDDYVIATGKTYTVKQFVEIACKFINIKIYWSGKGINEVGYFYNKNKKKQILVKVDQKYFRPNEVDYLRGDSKKAYKRFNFKPKYNFRSLVKEMMMNDILLEKKNSGLKV

SEQ ID NO: 151983 - protein, 207 aa, Unknown
  Bacterial polypetide isolated from the Sargasso Sea
NYREAYGMFACNGILFNHESPRRGETFVTRKITRGLSRINEGIEDCIYLGNLNSLRDWGHARDYVEMQWRMLQQAKPADYVISTGRQESVRKFIELSAKAIGWNKGENTPGIIWKGEGLEEVGIRADNGKVVVKIDPRYFRPCEVDTLLGDPSKASEELGWKATTSLEELVNEMIKEDLLQAKKDVLILSQGFNINSTKENPPNLKV

SEQ ID NO: 151984 - protein, 225 aa, Unknown
  Bacterial polypetide isolated from the Sargasso Sea
MKFKKALITGITGQDGSYLAEFLLKKKYIVHGIKRKSSSFNTSRIDYIYDNKKYKNKFFLHYGDLLDSNSLIKIIRSVQPNEIYNLAAQSHVGVSFQLPNYTTQVNSIGTLNLLQAIKDSGLSSKTRFYQASTSELFGEIQEKKQSEKTKFYPKSPYATSKLFAYWITKNYRESYKMFASNGILFNHESPRRGETFVTRKITIGLSKIIYGLEKCLYLGNIYSLR

SEQ ID NO: 151985 - protein, 209 aa, Unknown
  Bacterial polypetide isolated from the Sargasso Sea
MRKVALITGITGQDGSYLTEFLLKKKYKVHGTIRRVALEDKTHRLWRLQKLLKQITLHAASLESYASMVKIIQKIKPTEIYHLAAQSYVDYSFRDEFSTLNININGTHYILSAIKDFSPKSKFYFAGSSEMFGKAKKKPQNENTSFYPRSAYGISKVTGYELTRNYREAYNLHCSTGILFNHESPRRGFEFVTRKISHAVAMIKCGLQK

SEQ ID NO: 151986 - protein, 199 aa, Unknown
  Bacterial polypetide isolated from the Sargasso Sea
QNEKTNFVPRSPYAVSKLFAHWITINYREAYNIFACNGILFNHESPIRGETFVTKKIVSALCKIKKNKQKKLFLGNLYAKRDWGHAKDYVIAMWRMLQQKKPDDYVIATGHQYSVKRFVNLCAIQLNMKLLWKGKGLKEKCYWENKVIIEIDKKYFRPTEVESLKGDYRKAKKLLKWKPKIGIQDLVREMINHELSNDK

SEQ ID NO: 151987 - protein, 213 aa, Unknown
  Bacterial polypetide isolated from the Sargasso Sea
MKKKIALIFGVTGQDGSYLSELLIKKGYLVHGVKRRSSSLNTSRVDHIYQDPFEKNRNFFLHYGDVTDAISVSALIKILKPDEIYNLAAQSHVAVSFEVPEYTANADAIGVVRILEAIKFHNLIKKTKFYQAGTSEMYGKVRETPQNEKTPFYPRSPYGVAKVYAHWITVNYREAYNIFACNGILFNHESPRRGETFVTKKIVSALVNIKFGK

SEQ ID NO: 151988 - protein, 226 aa, Unknown
  Bacterial polypetide isolated from the Sargasso Sea
MTLPKYKRDKLYFYQAGTSEMYGNFPQVPQNENTPFAPISPYACAKVYAYHITKVYREAYGIFACNGILFNHESPRRGDNFVTQKIVKNVKDIMDGKKQYLTLGNLDSQRDWGHAKDYVYGMWLMLQNDTPDDFVLSTGITTSVKKFVELCFEKGGRPITWSGEGLNELGKDRITGDVLVKIDKKYVRPTEVNLLLGDSSKARDVLKWVPKYDLNALVDSMFEFNE

SEQ ID NO: 151989 - protein, 224 aa, Unknown
  Bacterial polypetide isolated from the Sargasso Sea
KVKQNFIRHQLQRIYGDNNLKKLNENSNFNPSSPYGVSKLFSYWITRNYRESYNIFASNGILFNHESPRRGETFVTQKIVKGLVKIKYNLQGCLFLGNLNAKRDWGHAKDYVFAMWKILQHKKPDDFCIATGKSFTIKNFIDEVAKNLQMKLKWEGKGVNEVAINTRNNKKIIAVNQMYLRPSDINSLTGDYSKAKKLLNWKPKINFSQLVKEMVDSELDKYSK

SEQ ID NO: 151990 - protein, 235 aa, Unknown
  Bacterial polypetide isolated from the Sargasso Sea
MKVALIFGITGQDGSYLARLLLKKRYIVHGVKRRSSSLNTKRIDDIYVEPFSKNQNFILHYGDITDALSTTNLINKIKPDEIYNLAAQSHVAVSFDVPEYTANTDGLGPLRILETIRNSKKKIKFYQAGTSEMFGKVDKIPQNEKTNFHPRSPYATAKLYAHWITKNYRDAYGLFACNGILFNHESPMRGETFVTKKIVKALVRIKNKKQKKLFLGNIYSKRDWGHAKDYVEAMW

SEQ ID NO: 151991 - protein, 281 aa, Unknown
  Bacterial polypetide isolated from the Sargasso Sea
VSSLIKKILPDEIYNLAAQSHVAVSFEVPEYTANADAIGALRILEAIRFHNLQNKTKFYQAGTSEMYGKVAQIPQNENTPFYPRSPYGVAKVYAHWITVNYREAYKIFACNGILFNHESSRRGGTFVTKKIVNGLCRIKFGLQKTLYLGNLNSKRDWGHAKDYVEAMWKMLQLKSPNDFVISTGKQYTVKYFVNLVLNELKIKYYWKGKNLNTACFVKGSNQKIVSIDKNYFRPLEVDTLLGNSSKARKILKWKPKYNVKQLVKEMVSEELYILSNDKKIR

SEQ ID NO: 151992 - protein, 199 aa, Unknown
  Bacterial polypetide isolated from the Sargasso Sea
MKKKIALIFGITGQDGAYLSRFLLKKKYTVHGVIRRSSSFNTSRLDDIYEDPSLKNRKFILHYGDLIDSSSVSSLITKIMPDEIYNLAAQSHVAVSYTIPEYTSNVDGIGTLRILDVIKSINKKKIKFYQAGTSEMFGGTQKKSQNESTPFDPQSPYAAGKVFAHTITKIYRKAYGIYACNGILFNHESPLRGETFVTK

SEQ ID NO: 151993 - protein, 312 aa, Unknown
  Bacterial polypetide isolated from the Sargasso Sea
MSKVIFITGITGQDGYYLSKSMLEKGNIVHGTIRRSSLINTKRIDDLISEYSTKEQLYLHYSDLLDSASISRLINKIMPDEIYNLAAQSHVAVSFKNPLYSTQTGTLGALSILEAIKSTDKDIKFYQASSSEMYGGEEQILLNENSLFDPKSPYAASKVFAHNITKIYRESYGMFAVNGILFNHESPMRGETFVTRKITRALGRIVNEVQSKLTLGNLDASRDWGFAGDYVEGMIAMMSHGQADDWVLATGETHTVKEFLNLAFEYVNLDWDKYVLTSEKYFRPNEVNHLLGDPSKANKKIKFGSLKFHLMI

SEQ ID NO: 151994 - protein, 233 aa, Unknown
  Bacterial polypetide isolated from the Sargasso Sea
KTCRIYQASTSELYGRVREVPQNELTPFYPRSPYGVAKLYAYWITKNYREAYGIFAVNGILFNHESERRGETFVSRKITLATARINKGIQKKLYLGNLDSKRDWGYAKDYVKSMWLMLQNNKPEDFVIASGEQHSVREFVELAFSFVSIKIKWIGKGVQEKGIDEKTGNTLIEIDPKYYRPTEVDSLLGDPTKAIKQLGWNPKETSFEKLVKIMVKHDIKLVENEIRIKQSYE

SEQ ID NO: 151995 - protein, 201 aa, Unknown
  Bacterial polypetide isolated from the Sargasso Sea
MFDPKSPYAASKVFAHDITKIYRDSYNLFCTNGILFNHESPHRGETFVTRKITKAVGRIYMGIQDKLTLGNLEASRDWGFAGDYVEGIWLMMQHEKPDDWVLASGESHKVSEFAELAFKTAGLDWSQYVQTSEKYLRPNEVDFLLGDSSKAQKELGWKPKTSFTALVEMMVKEDIEMAKQEDILLKNNLIKPTWENPVKKY

SEQ ID NO: 151996 - protein, 176 aa, Unknown
  Bacterial polypetide isolated from the Sargasso Sea
VTRKITRGLARIYAGLDSCLYMGNLNAKRDWGHAKDYVEMQWLMLQQENPEDFVIATGRMETVKRFIELSAAKLNWNKNSKKDAIIWEGEGVNEIGRRSDTNEIVIKVDPRYFRPTDVDELLGAPNKAYKKLGWSPKISLESLIEEMILNDKEEARKELVLRNEEKDSIKKFQNYR

SEQ ID NO: 151997 - protein, 308 aa, Unknown
  Bacterial polypetide isolated from the Sargasso Sea
RWILSCGIFNKKKYQVHGIIRRVALEDETHRMWRIRGITNKVKLHPASLESYASIVKIIQKIKPNEIYHLGAQSFVDYSFKDEFSTLNTNINGTHYLLSALKDFSPKTKFYFAGSSEMFGKVKKIPQNEKTPFHPRSAYGISKVTGYDLTRNYREAYGLFCCTGILFNHESPRRGFEFVTRKISHGVARIKLGLQRNLKLGNINALRDWGHAQDYVEAMWLMLQQKKPEDYVIGTGKQFSVKEFARIAFSIVGLNYKKHIIIDKRLFRPSEVVSLLADPSKAKKVLKWKQKISFKKLVKEMVESDLEL

SEQ ID NO: 151998 - protein, 134 aa, Unknown
  Bacterial polypetide isolated from the Sargasso Sea
MGKKALITGITGQDGSYLADFLLEKGYEVHGIIRRSSSFNTGRINHLINNQKLKEKFYFYHGDLTDASSLNRILEKVQPNEIYNLAAQSHVKVSFEIPDYTARVDALGTLRFLDAIRETQIDSKGYQASTSELF

SEQ ID NO: 151999 - protein, 185 aa, Unknown
  Bacterial polypetide isolated from the Sargasso Sea
MTVNYREAWDLHACSGILFNHESPLRGIEFVTRKITLGVAEITKKKKKSISLGNLNAKRDWGYAGDYVNAMWLMLQKKTPSDYVIATGEMYSVREFVEKAFNAVDTEIEWVLDDGVESGRCKKTGNILVDINKDFNRPAETDYLLGDATKAKEELNWKPQVNFNTLIEMMVKKDLDRVENDVYGF

SEQ ID NO: 152000 - protein, 214 aa, Unknown
  Bacterial polypetide isolated from the Sargasso Sea
DIFINVKPDELYHLAAQSFVAQSFDDEHSTLSVNTFGTHLLISILKKVNPECKFYFAATSEMFGKVQETPQNENTKFNPRSIYGISKLASYEIVKNYRESYNIFGCSGILFNHESPRRGFEFVTRKISLIAAKIKLGLENKIVLGNIEAKRDWGYAKDYVVAMHSMLQNEDPIDYVIGSDETHSVKDFLNYAFKCLDLHYEDYFITDKKFFRPA

SEQ ID NO: 152001 - protein, 168 aa, Unknown
  Bacterial polypetide isolated from the Sargasso Sea
LFNHESPRRGESFVTRKITRFLTRKKLGSKDILYLGNLNAKRDWGHAKDYVEMQWRILQQKKAEDFVIATGNAYSVKQFINLSAKILNLNIKWKGKGLNEKCYLINGRKKELIIKVDKKYFRPNEVHYLRGNASKALRSLNFKPKYSFLELVEDMIKHDLELAEEELI

SEQ ID NO: 152002 - protein, 175 aa, Unknown
  Bacterial polypetide isolated from the Sargasso Sea
YELHASNGILFNHESPRRGETFVTKKITKAVARISKGHQESLQLGNLDAKRDWGYAKDYVESMWLMLQQEKPDDYVIATGITKTVREFVELAFKNVSIDITWEGSGVNEKGLCSKTRKELVTINPRYYRPAEVELLHGDSTYAQKKLGWKPKTTFEELVKIMVEYDLKHDNYGFD

SEQ ID NO: 152003 - protein, 273 aa, Unknown
  Bacterial polypetide isolated from the Sargasso Sea
IYNLAAQSHVHVSFETPEYTADSDALGTLRLLEAIRILKMENQVRFYQASTSELFGNTKEVPQNERTQFNPRSPYAVAKLYSYWIVKNYREAYGLHASNGILFNHEGPTRGETFVTRKITREVAKIHLGIKSRLFLGNLEAKRDWGHAKDYVRGMWLMLQQEKADDYILATGKSHSVREFVEKAFSHINRKISWTGSGTLEKGIDAHTGEILVEVLAEFYRPTEVNLLQGDSSKAEDAFKWQPTISFDQLVEEMVKKDIALLRNLNTYDNNKI

SEQ ID NO: 152004 - protein, 209 aa, Unknown
  Bacterial polypetide isolated from the Sargasso Sea
INNEKLNEESLFIPKSPYAAGKLFAHNLTKVYRESYDLFCSNGILFNHESPYRGETFVTRKISRAVGRIKNNLQTKLTLGNLEAVRDWGFAGDYVEGMWLMLQHDEPDDWVLATGEAHSVKEFAKVAFEAVDLNWEEYIVSDDKYLRPNEVNHLLGDSSKARKKLNWEPKVNFEDLVKMMVNHDLELAAKEKVLHENGMLAPTWEYPTN

SEQ ID NO: 152005 - protein, 208 aa, Unknown
  Bacterial polypetide isolated from the Sargasso Sea
NSVLNPKSPYGVAKLFAHHITKIYRDSYGIFACSGILFNHESPRRGETFVTRKITMFLAKRLMGNKKVLKLGNIYAKRDWGHAKDYIEMQWKIMQQKKPEDYVIATGQTHSVKDFINYACRIAKIKIKWAGKGLNEKAYEIKGNKKKLMIEIDKKYFRPLDINYLRGDPSKAKKKLKYKIKFKFKDLVKDMITNDLLKYKENKFIDRS

SEQ ID NO: 152006 - protein, 295 aa, Unknown
  Bacterial polypetide isolated from the Sargasso Sea
MKKKIALIFGVTGQDGSYLAEFLIKKKYVVHGVKRRSSSINTNRVDHIYQDPHESKRNFILHYGDITDSTSVSKIIKTVKPNEIYNLAAQSHVAVSFEVPEYTANADALGALRILEAIKFHKMEKKTKFYQAGTSEMFGKVQSVPQNEKTNFYPLSPYGVAKLYGHWITKNYREAYNIFAANGILFNHESPRRGETFVTKKIVKAMMKIKEGTQSKLFIGNLNAKRDWGHAKDYVEAMWKILQQKTSDDYVIATGKQYSVKQFINLVAQELDMKIVWKGKGIKERAYDKISKKVI

SEQ ID NO: 152007 - protein, 164 aa, Unknown
  Bacterial polypetide isolated from the Sargasso Sea
MVKKMKKVALITGITGQDGAYLADLLLKKDYLVHGIKRRSSSFNTARIDHLYQDPHIDNRNFVLHHGDLTDSTNMIRIIQEVQPDEIYNLAAQSHVMVSFETPEYTANADALGTLRILEAIRLLRLSDKTRFYQASTSELYGMAQEVPQNEKTPFYPRSPYGVA

SEQ ID NO: 152008 - protein, 172 aa, Unknown
  Bacterial polypetide isolated from the Sargasso Sea
DMFCCSGILFNHESPLRGEEFVTRKITSQLSKIKLGLIDTLELGNLEARRDWGFAGDYVKAMNMMLLQEKPDDYVVATGETHSVAEFVERAASYLGIDLVWEGEGKNQQGLDKNNNNVIVKVNEDFYRPAEVDTLIGDSSKANKVLNWKPECSFDNLVEMMVKEDLDGLENK

SEQ ID NO: 152009 - protein, 125 aa, Unknown
  Bacterial polypetide isolated from the Sargasso Sea
MKRAFITGATGQDGSYLIEFLLDKGYEVHGIIRRSSSFNTSRIDHIINNNRFKDRFIFHHGDITDVSNLTRLLEKIQPHEIYNLAAQSHVKVSFEIPDYTAQVDALGTLRILDAIRENKLETKFY

SEQ ID NO: 152010 - protein, 299 aa, Unknown
  Bacterial polypetide isolated from the Sargasso Sea
ALITGITGQDGQYLAEVLHQEGYKVYGLIKGQRNPKAEMITTGFPFVELVEGDLQDLSSLIAALEYTQPHEVYNLGAISFVALSFKQAELTANITGLGVLRLLEAIRLVGGENNPIRFYQASSSEMFGKVRETPQTELTPLHPRSPYGSAKVFGHHTTVNYRESYGLYACSGILFNHESPRRGIEFVTRKVTNAVARIKLGLQDHVALGNLDAKRDWGFAGDYVRAMYLMLQQDEPDDFVVATGETHAVSEFVSLAFAAVGIDDWESYVRIDQRFFRPAEVDLLVGDASKARSQWDGSQ

SEQ ID NO: 152011 - protein, 175 aa, Unknown
  Bacterial polypetide isolated from the Sargasso Sea
SYDMFCVNGILFNHESPYRGETFVTRKITRAVGRIKLGLQSQLTLGNLEASRDWGFAGDYVEGMWSMMQHDSAEEWVLATGKSITVKEFVELAFKYVDLEPDQFIKTSDRYFRPNEVEFLLGDSSKAKEKLNWEAKTDIDTLVKLMVDSDINLAKREQILLKENLIKPTWENPTS

SEQ ID NO: 152012 - protein, 257 aa, Unknown
  Bacterial polypetide isolated from the Sargasso Sea
MKRALITGINGMDGSHLADLLLNKGYEVFGMERRCSSPNRVNTKHLVNRINFINGDLTDQNSLLRCIKESSPNEIYNLGAQSFVGESWNTPEQTSDVTGLGVLRMLEAIREYGEDVKFYQASSSEMFGRMVENPAKESTPFYPRSPYGVSKLYGHWITKNYRESYDMFACSGILFNHESERRGLEFVTRKITNGVAQIYNGMMDKITLGNLDSYRDWGYAPDYVEAMWMMLQQEKPDDYVIATGETHSIREFLDVAF

SEQ ID NO: 152013 - protein, 293 aa, Unknown
  Bacterial polypetide isolated from the Sargasso Sea
GQDGSYLAEFLIKKGYEVHGIVRRIALENQNHRLWRLKKILKKINLHSGSMESYASIFKIFNKVKPHEFYHLAAQSYVDYSFEDEFSTLSSNIASTHYCLSAIKESGYNCKFYFAGSSEMFGKVRDIPQNENTPFHPRSPYGISKVAGFDLTRNYRESYGLHTSTGILFNHESERRGFEFVTRKISQAVAMIKLRKQKFLELGNLDAQRDWGYAPEYVEAMWLMLQQKNPDDYVVGTGETYSIKYFAERAFDIVGLNYQKFVKINKIYYRPAEVELLIADFSKINKKFGWRQK

SEQ ID NO: 152014 - protein, 231 aa, Unknown
  Bacterial polypetide isolated from the Sargasso Sea
ARLDSVFSQLNLEYADMTDMSSLIRVLNQVKPDEIYNLAAQSHVRISFDQPIYTAQVVAVGVMNLLEAVRLICPKAKIYQASSSEMFGNNIDEDGFQRESTPMSPVSPYGCAKVFGYNLVRNYRNSYNLFASNGILFNHESPRRGTNFVTNKVAKEAVRIKMGLSKELKLGNLNAARDWGHAKDYVKCMWLMLQHKKPDDFVVSTGKSHTVQDLVNYVFNSLEIPNWEQLI

SEQ ID NO: 152015 - protein, 160 aa, Unknown
  Bacterial polypetide isolated from the Sargasso Sea
PRRGETFVSSKIVIGLTKIKLGLQDYMTIGNLDASRDWGHAKDYVVMMWKMLQLKKPEDFVIATGNTYTVREFINCACKYLSIKIQWKGKGVNEYAIDLSNGKKIIYVSSNHFRPNDVNYLRGDAKKASKKLNWKPKYNLNKIVKEMIDCELIKNKKINE

SEQ ID NO: 152016 - protein, 210 aa, Unknown
  Bacterial polypetide isolated from the Sargasso Sea
FGKVFETPQNEKTPFYPRSPYGVAKVYSHWITINYRESYKLFACNGILFNHESPLRGETFVTKKVVTALCKIKLKKQKKLFVGNLNAKRDWGHAEDYVQAMWKILQHKQPDDFVICTGKQHSIKQFINMVSKDLEIKIIWRGKGINEKGYDQNNNCIIECSKKYFRPAEVDTLVGDSSKARRILKWKPKHDIHSLIKDMISYELKIHKND

SEQ ID NO: 152017 - protein, 291 aa, Unknown
  Bacterial polypetide isolated from the Sargasso Sea
RLHLYYSDLTDSSSLNNLISSVMPNEVYNLAAQSHVAVSFENPIYTTEANNLGTISLLEAIKNIDNNIRFYQASSSEMFGGEHQEMLNEDSPLVPKSPYAVSKVFSYHMTKIYRESYGIFATNGILFNHESPHRGETFVTRKITRAVGRIAVGIQSKITLGNIDASRDWGFAGDYVEAMWKILNHDNPDDWVIATGETHTIKEFLELAFQHVNLNFEDYIEISEKYYRPNEVGYLLGDPKKAIKELGWEPKTNFKELVIMMLENDIEVAKSEKILIEKGLLEPSWENYLIP

SEQ ID NO: 152018 - protein, 296 aa, Unknown
  Bacterial polypetide isolated from the Sargasso Sea
KYIVHGVKRRSSSYNTSRIDDIYDNPLFKNKKLYLHFGDVTDTLSVREIIKRTKPNEIYNLAAQSHVHVSFELPEYTANADALGALRILEGIKSLKLEKRVKYYQAGTSELYGRVQTTPQNEKTQFYPRSPYGVAKLYAHWITLNYREAYNIFACNGILFNHESPLRGENFVTRKITIGLCKIKLKLEKKLYVGNLNARRDWGHAKDYAKAIWLIMQQKKPEDYVIATGHCYTVRKFIEIAGKELGMKIRWKGKGINEKGYDQNGKCIVECKKHYIRPLEVDLLIGDAKKARKKLK

SEQ ID NO: 152019 - protein, 76 aa, Unknown
  Bacterial polypetide isolated from the Sargasso Sea
MKKIKKKALITGITGQDGSYLAEFLLEKGYEVHGIKRRSSSFNTERIDHLYQDPHEKKPKFILHYGDLTDSTNLIR

SEQ ID NO: 152020 - protein, 197 aa, Unknown
  Bacterial polypetide isolated from the Sargasso Sea
MFGNNIDSDGFQRESTPMKPVSPYGAAKLCAYHNVQVYRKSYNIFACNGILFNHESPFRGVNFVTNKIVRGAMMIKKGISNELVLGNLDASRDWGHAKDYVKAMLLIMELDRPDDYVCSTGETHTVQELCDYVFKKLELSKDHIKTGKQFMRPNELNILKGDSSKLRKATNWSPEYTFHSMIDEMIEYWDSKLDYKK

SEQ ID NO: 152021 - protein, 211 aa, Unknown
  Bacterial polypetide isolated from the Sargasso Sea
VRILDCCNYRESYGMYACNGILFNHESPRRGETFVTRKVTRGLSNIFCGLEKCLYMGNLDSLRDWGHAKDYVKMQWLMLQQKMPDDFVIATGEQFSVRQFITLSAKELGLEISFEGKGEEEKGIVKKISPDTETELKEGDVIVRVDPKYYRPAEVDTLLGDPSKAMKKLGWKPEISTEQMCAEMISEDLKIAKRNAFLRSQGFDAPISVED

SEQ ID NO: 152022 - protein, 294 aa, Unknown
  Bacterial polypetide isolated from the Sargasso Sea
MKALITGITGQDGAYLANLLINKNYEVHGLVRRSSSINTSRIDDLISEYSPENRFQLHYSDLLDSSSITNLINSINPDEIYNLAAQSHVSVSFENPIYTSQVGTLGSITILEALKHSEKKIKFYQASSSEMFGGGSKEILNESSAFNPKSPYGASKVFAHDITKIYRDSYDIFGVNGILFNHESPLRGETFVTRKISKAVGRITAGIQEKLTLGNLDASRDWGYAKDYVQGMWLMMQHKNPEDWVLATGVTKTVREFAIEAFNHVNLNWEDFVLTSEKYLRPNEVDYLLGDLKS

SEQ ID NO: 152023 - protein, 233 aa, Unknown
  Bacterial polypetide isolated from the Sargasso Sea
MKKALITGITGQDGYYLTKFLLKKNYQVHGIKRRTSLINTKRIDEFFNDKSLNFKKFILHHGDMSDASSLTSILNKIKPDEIYNLAAQSHVKVSFEIPEYTANSDAIGVLRLLEAVRSANLINKTKIYQASTSELYGKAQEFPQSELTPFYPRSPYAVAKLYAHWIIINYREAYNFHACNGIMFNHESPLRGETFVTRKITIGLSKIKLGLQKEILLGKFKREKRLGSCTRLC

SEQ ID NO: 152024 - protein, 267 aa, Unknown
  Bacterial polypetide isolated from the Sargasso Sea
MKKKIALIFGVTGQDGAYLSKFLLKKNYKVHGVKRRHSTLNTFRIDDIYKDPFAKGKNFFLHHGDITDSLSVHNIIKKVKPDEIYNLAAQSHVAVSFEIPEYTTNVDALGTLRVLESIVRINKKIKFYQAGSSEMFGKVVESPQNEKTPFHPRSPYGVAKLYSHWITVNYREAYKIFASNGILFNHESPLRGETFVTKKVVRALCRIKQKKQKKLFVGNLYAKRDWGHAKDYVKAMWKILQNNKPEDFVICTGKQYTIKQFINLVAK

SEQ ID NO: 152025 - protein, 304 aa, Unknown
  Bacterial polypetide isolated from the Sargasso Sea
IYEDPHIEDARFFMHYGDVTDSTNMIRLIQSIRPNEIYNLAAQSHVQVSFDSPEYTANADALGPLRILEAIRTLKYQDDVKFYQASTSELYGDAMESPQTEKTPFRPRSPYAASKLMAFWTTVNYREAYDIFASNGILFNHESPRRGETFVTRKITRGVAAIESKIEKKLYLGNLDSRRDWGDARDFVKGMWLILQNHKSDDFVLATGKQHSVREFVELAFRYTGRDIAWSGKGINEKGKDKNTGEVLVEIDKRYFRPIDVESLVGDASKASSELGWRPENQFESLVEEMVNYDRELLREKYGR

SEQ ID NO: 152026 - protein, 163 aa, Unknown
  Bacterial polypetide isolated from the Sargasso Sea
PRRGETFVTRKITLAVANIKAGKQECLYLGNMDAKRDWGHARDYVECMWKMLQQDHPEDFVVATGETNTVRHFVDRAFDIAGMKLRFEGEGVNEVGIEIATGRTLVRVHERYFRPAEVDLLIGDPAKALEKLKWNPRTTSLEELIKEMVDADIARVENPTLRF

SEQ ID NO: 152027 - protein, 264 aa, Unknown
  Bacterial polypetide isolated from the Sargasso Sea
MKKAFLTGITGQDGYYLAKLLIDKGYQVHGTVRRSSSINTDRIDPLISEYSENERLKLHYSDLIDSSSLNNLINSINPDEIYNLAAQSHVMVSFKNPVYTSQTGTLGTLSLLEAVKNSDKDIKFYQASSSEMYGGGVQEKLNEDSLFDPKSPYAASKVFSHNATKIYRDSYNLFCVNGILFNHESPHRGETFVTRKITKAVGRISVGIQKNVTLGNLDASRDWGFAGDYVEGMWRMMQSDKPSDWVLATGETHTVKEFAKLAFE

SEQ ID NO: 152028 - protein, 329 aa, Unknown
  Bacterial polypetide isolated from the Sargasso Sea
LAEFLLKKKYIVHGVKRRSSSINTFRIDHIYQDPHEKTRNFFLHYGDITDSTSVSKIIELIRPNEIYNLAAQSHVAVSFEVPEYTANADALGALRILEAIKFHKLQKKTKFYQAGTSEMYGKVQEIPQSEKTNFYPLSPYGVAKLYAHWITKNYREAYDIFGSNGILFNHESPRRGETFVTKKIVSALVKIKMGKQKKLFLGNLDSKRDWGHAKDYVEAMWKILQHNKPDDFVIATGKQLSIRQFVNLVSKKLNMNIYWRGKGINEVGYDKINKKKIIFVDKNYIRPLDVNTLLGNAKKARKILSWKPKIQINQLIDEMISEEIKIINA

SEQ ID NO: 152029 - protein, 267 aa, Unknown
  Bacterial polypetide isolated from the Sargasso Sea
MNSTSNNDSKIALITGITGQDGSYLAELLLEKGYQVHATLRRSSVFTTDRIDHIMDHERLHTYHGDLTDSSNLHRLIMQIQPNEIYNLGAQSHVAVSFEVPEYTANVDGLGVIRLLDAVRDLGPHCKYYQASTSELFGGIPGTEPQSESTPFYPKSPYGAAKLYAYWITVNYRESYNLFACNGVLFNHESPRRGETFVTKKITKAVANIHNGKQEILKLGNLDAKRDWGHAKDFVYAQWLMLQQDKPQDYVIATGETHTVREFVECA

SEQ ID NO: 152030 - protein, 188 aa, Unknown
  Bacterial polypetide isolated from the Sargasso Sea
KVFAHNITKIYRDSYNLFCVNGILFNHESPHRGETFVTRKISRAVGRISVGIQSKLTLGNLEASRDWGFAGDYVKGMWMMMQHDKPDDWVLATGNSYTVEEFAKEAFEAVNLNWSDYVESSEKYFRPNEVDFLLGDSSKAKKYLGWEPETSFKDLVKLMVENDVQLAKREAVLINEGLLDPTWEHSKN

SEQ ID NO: 152031 - protein, 340 aa, Unknown
  Bacterial polypetide isolated from the Sargasso Sea
MKNALITGITGQDGAYLAKLLIEKGYKVYGTVRRSTSEKFVNLKYLNIYDKIKFYDFDLLELSNIQNVIKETKPHEIYHLAAQSFVPTSFQVPIVTTDINSLGTLRILDSINSINKKIKFYQASTSEMFGKVQQIPQTEKTPFYPRSPYGVSKVFSHWITVNYRESYNIHASSGILFNHESPLRGGEFVTKKITSTLTRIKHGSKEILKVGNINAKRDWGYAGDYVYAMWLMLQQKNPDDYVIATGKTHSVKEFINLTLKYLNFEYKWVGQGMNERAINKKNGKTIIKIDKEFFRPAEVDLLIGNPGKAKRKLKWKPNTSLKKLVQLMVDYDVSQIKKTH

SEQ ID NO: 152032 - protein, 188 aa, Unknown
  Bacterial polypetide isolated from the Sargasso Sea
MGKRALITGITGQDGSYLSEFLINKGYEVYGAVRRTSSVNTGRLSELDILNKINLVAMDLAEITNIQRVIEEIKPDEVYNLAAQSFVQTSFDQPIYTSEIDAIGVTRILETIRMLGGNIKFYQASTSEMFGKVQTSPQNEETPFYPRSPYGVSKLYGHWMTVNYREAWDLHACSGILFNHESPLRGIE

SEQ ID NO: 152033 - protein, 234 aa, Unknown
  Bacterial polypetide isolated from the Sargasso Sea
TALGSVRILEAVREAGLVDKVRYYQASSSEMYGKVQEVPQLETTPFWPRSPYACAKVYSHWLTVNYRESYSLHASSGILFNHESPRRGETFVTRKITRAATRIKLGLQKKLILGNLDSKRDWGYAKEYVEAMWLMLQQDEADDFVIATNETHTVREFLEETFSCLDLDWEQFVGFDKKYERPAEVDLLIGDPSKAKKKLGWEPKTTFKELVSIMVEADMKLAEQEKALADARLG

SEQ ID NO: 152034 - protein, 189 aa, Unknown
  Bacterial polypetide isolated from the Sargasso Sea
YGHWITVNYREAWDIHACSGILFNHESPLRGTEFVTRKISLGVAEIIKNKKASISLGNLNAERDWGFAGDYVNAMWLMLQNKEANDYVIATGKTHSVRKFVEKAFSVVDIQIEWTIDNKIETGRCKKTGKILVDINTDYNRPSETDHLLGDASKAKRDLNWKPKTNFEELVEMMVKKDLSRVENNSYSF

SEQ ID NO: 152035 - protein, 309 aa, Unknown
  Bacterial polypetide isolated from the Sargasso Sea
IERRSARNTNLRLEKLSILDKIIIEDSDIKEINNLIRIFQKYKIHEVYNLAAQSFVKSSFDNPIETSQVNAFGTLNLLEIIRNQNKNIKFYQASTSEMFGKHGKKKQNELTNFHPRSPYATSKTFSHYTVQNYREAYNMFAVNGILFNHESPLRGEEFITRKISLGLAKIVTGKQKVLKVGNIYAKRDWGYAKDYIEAMWKMLQVKKPEDFVIATGKTHSVKEFINKCIKILKINTKWVGKGLNEKLIDLNRNKPIIVIDKRYFRPAEVNVLKGDYTRAKKILKWSPKTNLDDLAKIMIMSDLLYVNKK

SEQ ID NO: 152036 - protein, 304 aa, Unknown
  Bacterial polypetide isolated from the Sargasso Sea
MKKAFITGITGQDGSYLTELLLDKGYEVHGIVRRSSLFNTDRIDHLENNPNLHTHWGDLTDSSNLHTLLSDICPDEIYNLGAQSHVAVSFQVPEYTGEVDAIGTIRLLNSVKDLKNNPKFYQASTSELYGGIPETAPQNEQTAFYPKSPYGAAKLYGYWVTINYRESYNLFASNGILFNHESPRRGGTFVTKKIAKAVADIEYNKLDCLTLGNLNALRDWGHAKDYVEAMWLMMQHNEPLDLVIASGRTYSVREFVELAFKHIEIEIEWVGEGINEVGLDKKSRKTLVKVDPRYFRPAEVEHLH

SEQ ID NO: 152037 - protein, 225 aa, Unknown
  Bacterial polypetide isolated from the Sargasso Sea
MPKVALITGITGQDGSYLAELLLKKGYEVHGIVRRASLINTHRIDHIYEKIKLHYGDLTDSTNLVRVIQKVKPNEIYNLGAQSHVKVSFEMPEYTGMVDGLGTLRILEAVRLLEREKETRIYQASTSEMFGKVVEIPQTEKTPFHPRSPYGFAKVYAYWATKNYREAYDMYACSGILFNHESPRRGETFVTRKIVQALDKIAKGEQNVLTLGNLYAKRDWGHAKD

SEQ ID NO: 152038 - protein, 213 aa, Unknown
  Bacterial polypetide isolated from the Sargasso Sea
MSSHKRALITGITGQDGSYLAEFLLSKGYEVHGIIRRASTFNTTRIDHLYTDPHHPDTRLFLHYGDLSDASGLRHILAKVRPHEIYNLAAQSHVRVSFDQPEYTADIVATGTLRLLEATREYIAMAEDPVRFYQAGSSEMYGSAPAPQSETTPFAPRSPYAVGKVAGYWYAANYREAYGMYVVNGILFNHESPRRGETFVTRKITRALGRIRH

SEQ ID NO: 152039 - protein, 241 aa, Unknown
  Bacterial polypetide isolated from the Sargasso Sea
MKKVALITGITGQDGSYLAELLLGKGYEVHGIIRRVALEDETHRLWRIRKILKDINIHAGSLESYASIFNIIVKIKPDEVYHLAAQSYVGYSFEDEFSTLNININGTHYLLSAVKEYADSKIRFYFAGSSEMFGKVKSTPQNEDTVFNPRSSYGISKVTGFYLTKNYREAYKLHASNGILFNHESPRRGFEFVTRKISSAVARIKNGSKEKLKLGNMKAKRDWGHAKDFVEAMWLMLQMDK

SEQ ID NO: 152040 - protein, 247 aa, Unknown
  Bacterial polypetide isolated from the Sargasso Sea
HLASQSFVSISFEDEFSTMQTNINGTHYLLAAIKDTSPECRFYFAGSSEMFGKVEETPQRETTRFHPRSVYGITKVAGFELTRNYREAYDLFTCTGILFNHESPRRGYEFVTRKISSTAARIKLGLEKELRLGNIDAKRDWGFSGEYVRMMHTMLQQVNPDDYVIGTGETHSVREFMQIIFEELKLNYEDYLVIDPRFYRPAEVEILVADPSKAIEKLGWEPKVTFEELALSMVRSDYENLSNKMHI

SEQ ID NO: 152041 - protein, 285 aa, Unknown
  Bacterial polypetide isolated from the Sargasso Sea
QPDEIYNLGAQSHVAVSFESPEYTANSDALGTLRILEAVRILGLTNKTRIYQASTSELYGLVQEIPQKESTPFYPRSPYGVAKLYAYWITVNYRESYGMYACNGVLFNHESPRRGETFVTRKITRGLARIDAGLDDCLYMGNLDSLRDWGHARDYVEMQWRMLQQEKPEDFVIATGRQESVRRFIELTALELGWGAMQWEGIGIDEVGRRADTGDVVVNIDPRYFRPAEVETLLGDPTKAKEKLGWTPTTTLEELVAEMVATDKEEAQKEAYLKRKGFHVVGARE

SEQ ID NO: 152042 - protein, 227 aa, Unknown
  Bacterial polypetide isolated from the Sargasso Sea
FYQASSSEIFGKVQENPQSETTPFYPRSPYGVAKLYAYWITVNYREAYNIYACNGILFNHESPFRGENFVTRKITRALTRIKLDLQDRLYIGNLYAKRDWGHAKDFIEMQWLMLQQDKPDDYVISTGKQYTVKEFIMAVAKQLDIEIKWSGSGSHEKGLNINNKVIVEVDPRYFRPTEVDELLGDSTKAHKKLGWKQKISFEELVKNMVEHDLRIAKEEKILQGANF

SEQ ID NO: 152043 - protein, 235 aa, Unknown
  Bacterial polypetide isolated from the Sargasso Sea
STSELYGLIRESPQTEKTPFYPRSPYAVAKLYAYWITVNYREAYDIFACNGILFNHESPRRGETFVTRKITRGLSRIDEGLEDCLYMGNLDSLRDWGHARDYVEMQWLMLQQKFPDDYVIATGRMESVRRFIEISAQKLGWNKINKKEPAIKWEGKGVNEVGIRADTNKIVVKVDPRYFRPTEVEQLKGDPTKAYSQLGWKPKTTLEELIDEMIKNDKKLAKKEKILEEADLNDS

SEQ ID NO: 152044 - protein, 202 aa, Unknown
  Bacterial polypetide isolated from the Sargasso Sea
MVPKSPYGVSKLYSYWITKIYRQAYGFYACNGILFNHESPRRGETFVTRKITMFFAKKICGSNELLYIGNLDAKRDWGHAKDYVEIQWKILQQKKPDDYVIATGKAISVRDFINECCKYLKLKIKWEGKGLNEKAYLINKGKKNLIIKVDKKYYRPLEIDYLKGNPKKALKKLKYKLKYNIKHLVKEMLDADIGLARKNKLK

SEQ ID NO: 152045 - protein, 260 aa, Unknown
  Bacterial polypetide isolated from the Sargasso Sea
RILEAIRILDLQHKTRFYQASTSELYGLVQQVPQSETTPFYPRSPYAVAKLFAYWTTVNYREAYGLYACNGILFNHESPVRGETFVTRKITRAVARIAVGMQKTLYLGNLSALRDWGHARDYVEMQWRMLQQEQPEDYVIATGVQYSVREFVQHAAAELGVTVRFEGTGVDEVGIVEKVEGREIKMSPGDVIVRVDPRYFRPAEVETLLGDPSKAHAKLGWQPTTPFSALVKEMVRSDYQIARRDALVTLAGFTALEHHE

SEQ ID NO: 152046 - protein, 182 aa, Unknown
  Bacterial polypetide isolated from the Sargasso Sea
MTPASPYACAKVYAHNFCRNYRESYGMHISSGILFNHESPRRGETFVTRKITMAAAKIKLGLQKKLYLGNLDAKRDWGFAGDYVEAMWLMTQQEKPDDYVIATGETHTVKEFLYEVFNHAGLNVEDHVEIDERLFRPHEVPLLLGDPTKAKKNLGWEPSVKFEELAKMMYYSDLKRIREYSK

SEQ ID NO: 152047 - protein, 234 aa, Unknown
  Bacterial polypetide isolated from the Sargasso Sea
MSRAKVALITGVTGQDGSYLAELLLSKDYIVHGIKRRSSSFNTSRINHLFKDPHDQDKRFTLHYGDLTDSTNIIRIIQQVKPDEIYNLGAQSHVAVSFDSPEYTANCDALGTLRILEAVRVLGLTKSTKIYQASTSELYGMVQETPQKESTPFYPRSPYGVAKLYAYWITVNYRESYGIFACNGILFNHESPRRGETFVTKKITRGLTRIHLGIDKGLYMGNLDSLRDWGHARD

SEQ ID NO: 152048 - protein, 280 aa, Unknown
  Bacterial polypetide isolated from the Sargasso Sea
QTVVSNLIRPFKPNEIYNLAAQSHVAVSFEVPEYTANADALGALRILEAIRSNNLTNYTKFYQAGTSEMYGKVERTPQNEKTNFRPISPYGVAKVYAHWITINYREAYNIFACNGILFNHESPRRGETFVTKKIVNALCKIKYGLQDKLFLGNLDAKRDWGHAKDYVEGMWKILQQKNPDDYVLATGKQYSIRQFVNMVCKKLDMKISWKGKGINEKCYDNTKKKTIIELDKTYIRPLDVQTLLGDAKKASKILKWKPKINIHNLIDEMINFELKKLNHD

SEQ ID NO: 152049 - protein, 188 aa, Unknown
  Bacterial polypetide isolated from the Sargasso Sea
RRFLITQRVDHIYQDPHVENSHFKLHYGDLSDTLNLTRLLRDIEPDEVYNLGAQSHVAVSFESPEYTADVDAVGTLRLLEAIRFLGLEQKTKFYQASTSELYGLVQETPQKETTPFHPRSPYAIAKLYSYWICINYREAYGMYACNGILFNHESPRRGETFVTRKITRGLANIALGLEQCLHMGNIDA

SEQ ID NO: 152050 - protein, 206 aa, Unknown
  Bacterial polypetide isolated from the Sargasso Sea
LDIPQNEKTPFYPRSPYGVAKLYAYWITINYREAYNIFACNGILFNHESPRRGETFVSRKIVRGLLKIKNNLQDCLYLGNLNAKRDWGHAKDYVEAMWLMLQQDKPDDYVISSGIQFSVKDFINLVAKNLDIELVWKGEGLNEQAFFNDKVIIKIDKRYFRPTEIDSLLGDSSKAKEKLNWLPKISFESLVKEMITEEEKLIQSSR

SEQ ID NO: 152051 - protein, 273 aa, Unknown
  Bacterial polypetide isolated from the Sargasso Sea
ITLHPASLESYASMVKIIQKIKPTEVYHLAAQSYVDYSFRDEFSTLNTNINGTHYILSALKDFSPKSKFYFAGSSEMFGKAKNKPQNEKTSFYPRSAYGISKVTGYELTRNYREAYNLHCSTGILFNHESPRRGFEFVTRKISHGVAMIKCGLQKDLVLGNLDAKRDWGHAKDYVEAMWLMLQKRKPDDFVIATNEQHSVKDFAKLAFSIVGLDYKKFIKIDKNLYRPAEVQTLLGDYSKARRILKWKPKVSFKNLVKDMVLSDLEFVKKSGY

SEQ ID NO: 152052 - protein, 208 aa, Unknown
  Bacterial polypetide isolated from the Sargasso Sea
RDSSNENTPFYPRSPYGVAKLYGYWIIVNYREAYNLFACNGILFNHESERRGETFVTRKITRAASRIKEGLQEKLFIGNLDAKRDWGYAPEYVEGMWLMLQHDQPEDFVLSTGETHSVREFIELAFQELNIKLAWNGKDENEIGIDEITGKTLVEVDKKYFRPTEVDVLIGDSSKAKKKLGWKAKTPFKELVRKMTNSDWEKVKRRGY

SEQ ID NO: 152053 - protein, 282 aa, Unknown
  Bacterial polypetide isolated from the Sargasso Sea
GDVTDTISVPSIIKKISPNEIYNLAAQSHVAVSFEVPEYTANADAIGALRILEAIRFHKLEKKTKFYQAGTSEMFGKVLETPQNEKTPFYPRSPYGVAKLYAHWITVNYREAYKIFACNGILFNHESPVRGGTFVTKKIVNALVKIKLGKQKKLYLGNLDAKRDWGHARDYVEAMWKMLQKKTPSDYVISTGKQYTVKEFLNLVLKNLNMKYKWKGKGFNSRCYFKNKLIVECDKEYYRPLEVDTLLGDSRRAKKELNWRPKTNIKELINEMVKSELKSIKN

SEQ ID NO: 152054 - protein, 266 aa, Unknown
  Bacterial polypetide isolated from the Sargasso Sea
MGKKALITGITGQDGSYLSDFLLKKKYKVHGLIRRVAAEDKTHRLWRLKHILHRITLHSASLESYASIVKIIQMLKPDEVYHLGAQSYIDYAFKDEFSTLNTNINGTHYLLSAIKEFSPKTKLYFAASSEMFGKVLEIPQNEKTPFYPRSTYGISKVAGFDLTRNYREAYNLFCCSGILFNHESPRRGFEFVTRKITHAVARIKYGLQKDLKLGNIDAKRDWGHAEDYVVAMWLMLNKRKPEDYVISTGKQYSVRDFAKLAFKEVG

SEQ ID NO: 152055 - protein, 195 aa, Unknown
  Bacterial polypetide isolated from the Sargasso Sea
TVNYRESYDFFASNGILFNHESPIRGETFVTRKITRAVARISLGLQSSLYLGNLDAKRDWGHAKDYVEGMWKILQHDKAEDFVLATGETTTVRDFVSKSFKHAGIQINWEDSGVNEIGKNADNGETLVKVDERYFRPAEVDLLIGNPEKAKSILNWEPKYDLDSLIKDMVDNDIQEAKKDTYLKQGGFKTMNYFE

SEQ ID NO: 152056 - protein, 183 aa, Unknown
  Bacterial polypetide isolated from the Sargasso Sea
NGILFNHESPRRGETFVTRKITRGLSQIDLGLSEYLYMGNIDAIRDWGHAKDYVEIQWKILQQEKPDDYVVATGRQESVRRFIDLSAKQLGWGGIYWEGSGVNEIGRRKDNQKVVIKIDKKYFRPCEVNKLVGDSTKANKKLGWHPKIKLEELVADMIKNDKELAKKEALLIQKGYELNIPKE

SEQ ID NO: 152057 - protein, 308 aa, Unknown
  Bacterial polypetide isolated from the Sargasso Sea
LIELLLEKGYSIHAIVRRVSAGIQSKSRIKHLLGHESLSIHDGDLSDSASLVACLNDIGADEFYNLGAQSFVPHSWKSPVHTLDITGAGTLRCLEAIRLTNPETKFYQAGSSEQFGMVQEIPQTETTPFYPRSPYGCSKVYSYHITKNYRESYGMFCTNGILFNHESPRRGLEFVTRKVTNCVAQIALGKSSKFTIGNMDAKRDWGYARDYMEGIWSLMQLDTPEDVILATNKTWSVRSLIEIAFSNIEMDITWEGEGVEEKGYCADGVLRVEVDEKLFRPAEVDLLIGDFSKANRLTGWEPKTSLKN

SEQ ID NO: 152058 - protein, 173 aa, Unknown
  Bacterial polypetide isolated from the Sargasso Sea
MKALITGITGQDGSYLAELLLEKGYEVHGIVRRSSLINTHRIDHIYDKIQLHYGDLTDSGSIISLVQKIKPTEVYNLAAMSHVKVSFEIPEYTGEVDALGTLRLLEAIRLLDHECKFYQASTSELYGLVQEVPQKETTPFYPRSPYGCAKLYAYWITKNYREAYGIHASNGIL

SEQ ID NO: 152059 - protein, 275 aa, Unknown
  Bacterial polypetide isolated from the Sargasso Sea
IRIIQKVKPDEIYNLGAQSHVKVSFETPEYTANSDALGTIRMLEAIRTLNMEKSVRFYQASTSEMFGKSPPPQNEDTLFQPRSPYAAAKLYSYWVTKNYREAYNIFACNGILFNHESPLRGETFVTRKITRAIADIYHGKKNKFWIGNLDAKRDWGHAKDYVEGMWKIINYKKPEDFVLATGKSFSVRDFCEIAFKEIGITIKWKGKGLKEKGYDAKNNKVLVAVDKRYFRPTEVDYLQGDANKAKRLLKWKPKIKFGDLVSEMIKSDIDNTVAR

SEQ ID NO: 152060 - protein, 207 aa, Unknown
  Bacterial polypetide isolated from the Sargasso Sea
TTPFNPQSPYSIAKMYSFHMTKLYREAFGMFASNGILFNHESPLRGENFVTRKITLGLAKIKLGHEKKLSLGNLNAKRDWGHAKDYVNAMWKILQTNEPRDYVIATGEQYGVREFVEKAALHIDLKISWKGDGINEIGVDQDGRTIIDIREEYYRPAEVETLLGDPSLARKDLNWKPKRTFDSLVEEMMTSDLALLRDGQMPNPFSE

SEQ ID NO: 152061 - protein, 277 aa, Unknown
  Bacterial polypetide isolated from the Sargasso Sea
MGVTLKKKALITGITGQDGAYLAQFLLDRGYEVHGVRRRTSVSNTERITHLIEQQKKFPNSLNLHYGEMTDGTVLTKIIKAVEPDEVYNLAAQSHVATSFDEPEYTANSDALGPLRLLEAIRFLGLGEKTRFYQASTSELYGLVQESPQTEKTPFYPRSPYAVAKLYAYWITVNYREAYGLFACNGILFNHESPVRGENFITRKVTKALTRIRVGLQDCLFLGNLDSLRDWGHAKDYVEMQWLMLQQEQPKDYVIATGTQHSVRDLVNLVAHCLNIQ

SEQ ID NO: 152062 - protein, 231 aa, Unknown
  Bacterial polypetide isolated from the Sargasso Sea
ELYGDVRETPQNEQTPFYPRSPYAVAKLYAHWLVVNYREAYGMYCCNGILFNHESPRRGETFVTRKITRGLSNIFMGLEPCLYMGNLDSLRDWGHAKDYVEMQWLMLQQNTPEDFVIASGQQYSVRQFILWAANELGIELGFEGEGLSEIGVVKSIKNSSETQLKKGDTIIQVDPRYFRPSEVDALLGDSSKACEKLNWKPKISAQEMCAEMVREDLLNAKKDILLRKEGY

SEQ ID NO: 152063 - protein, 200 aa, Unknown
  Bacterial polypetide isolated from the Sargasso Sea
TNFYPLSPYGVAKLYAYWITINYREAYKIFAVNGILFNHESPRRGETFVTKKIVKGLCKIKYGYQKKLYLGNLDAKRDWGHALDYVEAMWKMLQQKHPEDFVIATGKQFKIRDFVLMVSKKLGMKIVWRGKGLNEVGYDIVSKKTIIEIDKNYIRPLDVNTLLGDSRKARKKLNWKPKINIENLINEMIADEINLIENLR

SEQ ID NO: 152064 - protein, 270 aa, Unknown
  Bacterial polypetide isolated from the Sargasso Sea
MKKKSALIFGITGQDGSYLAEFLLKKKYIVHGVKRRSSSFNTGRIDHLYQDPHEKKRNFILHYGDVTDAISVSSIIENIKPDEIYNLAAQSHVAVSFEVPEYTANADALGALRILEAIKFHNLQKKTKFYQAGTSEMFGKVLEVPQNEKTPFYPRSPYGVAKVYAHWITVNYREAYNIFACNGILFNHESPVRGETFVTKKIVSALCKIKYGKQKKLFLGNLDARRDWGHAKDYVIAMWKMLQQKKPDDFIISTGKQYSVKEFVNLVLKE

SEQ ID NO: 152065 - protein, 257 aa, Unknown
  Bacterial polypetide isolated from the Sargasso Sea
RVSFDQPEYTADIVATGTLRLLEATREYIAMAEDPVRVYQAGSSEMYGSAPAPQSEATPFAPRSPYAVGKVAGYWYAANYREAYGMYVANGILFNHESPRRGETFVTRKITRALGRIRHGLQERLYLGNLDAKRDWGFAGDYVEAMWLMLQQDTADDFVIATGETYSVKEFLTAAFDKAAMDWQEFVSIDERYFRPTEVDILLGDPRKAREGLDWSPKVDFDALVSMMVEHDLELAQREKTLVDAGHEISLEGIAVG

SEQ ID NO: 152066 - protein, 156 aa, Unknown
  Bacterial polypetide isolated from the Sargasso Sea
MCKRALITGVTGQDGSYLTELLLEKGYEVHGIIRRSSSFNTGRIDHIINDEKYKNQFLFHYGDITDASNLNRILEKIEPDEIYNLAAQSHVQVSFEIPDYTAQVDALGTLRFLDAIRETHLKTKFYQASTSELYGKVQESPQKETTPFYPRSPYGV

SEQ ID NO: 152067 - protein, 243 aa, Unknown
  Bacterial polypetide isolated from the Sargasso Sea
MPDYTAQVDALGTLRFLDAIREVGQKKVRFYQASTSELYGKVLETPQSEKTQFYPRSPYAVAKLYSYWIIRNYREAYNLFASNGILFNHESPRRGETFVTRKIVRAAVMIKLGLQENLVLGNIDAKRDWGYAPEYVEGMWKILQHTEADDFVLATGKSHSVREFIELTFSELGIKIDWIGEKENEVGKDKDSGRTLIFIDSKYYRPTEVETLLGNPEKAKKKLGWQSSTSLNELVKIMVNAEM

SEQ ID NO: 152068 - protein, 200 aa, Unknown
  Bacterial polypetide isolated from the Sargasso Sea
GYWITTNYREAYNIYACNGILFNHESPVRGETFVTRKITRAAVRISMGTQEQVYLGNLDAKRDWGHAGDFVDGMWRMLQQENPEDFVLATGVTTTIREFAERAFAKVGITLGWSGRGVDEVGRDTKTGNTVVSVDPTYFRPTEVDLLIGDATKARKKLGWKPTLDLQQMIEEMITSDLEEARKDQYMQSAGFKSNGVNED

SEQ ID NO: 152069 - protein, 226 aa, Unknown
  Bacterial polypetide isolated from the Sargasso Sea
MITGITGQDGSYLAELLLEKGYVVHGIKRRASSFNTTRIDHLYQDPHENDPRLVLHYGDLIDSTNLIRIIQQVQPDEIYNLGAQSHVAVSFEAPEYTANSDALGTLRILEAVRMLGLTKKTRIYQASTSELYGLVQEVPQKESTPFYPRSPYGVAKLYAYWITVNYREAYGMYACNGILFNHESPRRGETFVTRKITRGLARIEAGLEDCVFMGNLDSLRDWGHAR

SEQ ID NO: 152070 - protein, 202 aa, Unknown
  Bacterial polypetide isolated from the Sargasso Sea
TTPFYPRSPYGVAKLYAYWIIINYREAYDLFACNGILFNHESPRRGETFVTRKITRAAARIKMGIQEKISLGNLNAKRDWGYAPDYVEGMWRMLQLDKPEDFVLATGETHSVREFVELSFNELGIKIDWEGENENEIGRDSLTGKIIVEVDKNYFRPTEVDLLIGDASKAKEKLGWSASTSFNDLVKIMIEHDFKKVKKRGY

SEQ ID NO: 152071 - protein, 237 aa, Unknown
  Bacterial polypetide isolated from the Sargasso Sea
REVQPDEIYNLGAQSHVAVSFESPEYTANTDALGALRLLEAIHFLGLEKKCKYYQASTSELYGKVLETPQTEDTPFYPRSPYAVAKLYAYWISVNYREAYGIFACNGILFNHESPRRGETFVTRKITRGLTRIFCGLEDCLYLGNLDSLRDWGHARDYVEMQWLMLQQDEPEDYVIATGRQESVRRFVELSIESLGTTIRWEGSGLEEVGIREDNGEIIVRIDPRYFRPTEVETLLG

SEQ ID NO: 152072 - protein, 298 aa, Unknown
  Bacterial polypetide isolated from the Sargasso Sea
SSWNVRRSSTPNTSRINHILKNQNFILHYGDLTDGNNLVRIIKDVSPDEIYNLGAQSHVAVSFESPEYTANCDALGTLRILEAVKILGLIEKTKIYQASSSELFGLIQETPQKETTPFYPRSPYGVAKLYAYWIVVNYRESYGIFACNGILFNHESPRRGVNFVTKKITRGLARINIGLDDCLYMGNIDAKRDWGHARDYVEMQWLMLQQEKPEDYVIASGQMESVRRFIEIAAEKLNWNNGSGPGIIWEGEGVNEIGRRADTNKIVIRIDPKYFRPAEVEQLLGDPSKASSKLDGSQ

SEQ ID NO: 152073 - protein, 194 aa, Unknown
  Bacterial polypetide isolated from the Sargasso Sea
MVIIFKNIKKALITGITGQDGSYLAEFLLNKGYEVHGIKRRASSFNTSRINYLYEDPHEKDTKFILHYGDLTDSSNLIRIIQKIQPDEIYNLGAQSHVAVSFESPEYTANCDALGILRILEAVRILNLGEKTKIYQASTSELYGLIQESPQKETTPFYPRSPYGVAKLYAYWITINYREAYGIYACNGILFNHE

SEQ ID NO: 152074 - protein, 199 aa, Unknown
  Bacterial polypetide isolated from the Sargasso Sea
ETTPFYPRSPYGVAKLYGYWITVNYREAYGLHASNGILFNHESPLRGETFVTRKITMAVARISRGLQECLYLGNLDAIRDWGHARDYVEGMWRMLQQPKPDDYVLATGVSVSVRKFTEKAFNVVGIYLKWVGADESEIGMDASNGNVIVRIDPNYYRPTEVDLLLGDASKAKEKLSWTPVCNLDELVKEMVQEDLNLFK

SEQ ID NO: 152075 - protein, 200 aa, Unknown
  Bacterial polypetide isolated from the Sargasso Sea
ETTSFYPRSPYGVAKLYAYWIVVNYRESYGIFACNGILFNHESPRRGEHFVTRKITKGLSKIANGLLDCLYLGNIDSLRDWGHAKDYVEMQWRMLQQERPEDYVIATGQQTSVRDFVELCAKSLHWGGIVWEGEGVNEVGRRKDNGKIIIRIDPNLFRPAEVHSLLGNPEKAYKKLGWKPTYNIEQLVDEMIREDKFNMN

SEQ ID NO: 152076 - protein, 114 aa, Unknown
  Bacterial polypetide isolated from the Sargasso Sea
MPEYTADVSGVGTLRILDAIRSAGLASTVRFYQASTSELYGKVQEIPQTETTPFYPRSPYAAAKLYAFWITKNYREAYNMHASNGILFNHESPRRGLTFVTRKITRCVALIKAG

SEQ ID NO: 152077 - protein, 197 aa, Unknown
  Bacterial polypetide isolated from the Sargasso Sea
MKKVALITGITGQDGSYLAELLLSKGYEVHGIVRRIALEDETHRLWRIRKILKNLNLHAGSLESYASLFNIILKIKPTEVYHLAAQSYVDYSFQDEFSTLNININGTHYLLSAVKEFGPNKVRFYFAGSSEMFGKVKEIPQKESTPFNPRSSYGISKVTGFHMVKNYREAYKVHASSGILFNHESPRRGFEFVTRKI

SEQ ID NO: 152078 - protein, 234 aa, Unknown
  Bacterial polypetide isolated from the Sargasso Sea
RFLKIKKIKFYQASTSELFGETYKKNIFNEKSKFHPKSPYGVAKLYSYWITSVYREAYGIFACNGILFNHESPRRGETFVTRKITRFLTRKKLGSKDILYLGNLNAKRDWGHAKDYVEMQWRILQQKKPDDFVVATGQTQSVRQFIDTAVKLLDMKIKWQGKGLKEKCYLINKEKKELLIKIDKKYFRPNEVNYLKGDASKAFKKLKFKPKFSFKDLVKDMIINDLKLAQKEQK

SEQ ID NO: 152079 - protein, 149 aa, Unknown
  Bacterial polypetide isolated from the Sargasso Sea
MKKALITGITGQDGSYLAELLLEKGYEVHGIKRRSSSFNTQRVDHIYQDPHTDNRNFILHYGDLTDSSNLIRLVQQIQPDEIYNLGAQSHVAVSFESPEYTADVDAMGTLRLLEAIRLLGLQNKTRFYQASTSELYGLVQETPQKESTP

SEQ ID NO: 152080 - protein, 166 aa, Unknown
  Bacterial polypetide isolated from the Sargasso Sea
MSINKKALITGITGQDGSYLAEFLLKKGYEVHGIKRRSSSFNTERIDHIYQDPHVNNKKFILHYGDLTDSTNIIRIIQVVQPDEIYNLGAQSHVAVSFESPEYTANSDALGTLRILETIRILGMIKKTKIYQASTSEMYGLVQEVPQNEKTPFYPRSPYGVQNYTP

SEQ ID NO: 152081 - protein, 236 aa, Unknown
  Bacterial polypetide isolated from the Sargasso Sea
AIGALRILEAIKFHKLEKKTKFYQAGTSEMFGKVQETPQNEKTPFYPRSPYGVAKVYAHWITVNYREAYNIFACNGILFNHESPVRGETFVTKKIVSALCKIKLKKQKKLFLGNINAKRDWGHAKDYVQAMWKMLQKKRPDDYVIATGKQYSVKQFVNLVLNELKIKFYWKGKGINSKCYDKKGNCIIECDKSYYRPLEVDTLLGNAKKARSLLNWKPKVSIKMLVKEMVNFELKN

SEQ ID NO: 152082 - protein, 237 aa, Unknown
  Bacterial polypetide isolated from the Sargasso Sea
MKKVALITGITGQDGSYLAELLLKKRYKVHGIVRRVALEDRTHRLWRLQKILKQINLHSASLESYASIVKIVQKTKPTEIYHLGAQSYVDYSFKDEFSTLNTNINGTHYLLSAIKDFSPKSKFYFAGSSEMFGKVRNVPQNEKTAFHPRSAYGISKVTGHDLTRNYREAYNLHCCTGILFNHESPRRGFEFVTRKISHGVARIKYGFQRELKLGNLDAKRDWGHAHDYVEAMWLMLQ

SEQ ID NO: 152083 - protein, 181 aa, Unknown
  Bacterial polypetide isolated from the Sargasso Sea
SPLRGETFVTRKITRGIAQVALGMDKQLFMGNIDAKRDWGHAKDYVEAMWLILQQNNAEDYVIATGETTSVRDFIAMAFLEIGVTIKFNGTDINEVAIVESIDESKYLEYMGSEFGEHGRLELGDQVLSIDERYFRPTEVELLIGDPTKSKTKLNWQPKYDLKGLIEEMVKSDVQLFRSKL

SEQ ID NO: 152084 - protein, 240 aa, Unknown
  Bacterial polypetide isolated from the Sargasso Sea
MKKKIALITGITGQDGSYLAELLLKKNYIVHGLIRKSSTFNTKRIDHLYIDPHNKTNFFLHYGDLTDSNSIYNIIHKIKPNEVYNLGAQSHVGVSFDNPEFTAEVSGIGTLRILEAIRFLKMKDIKFYQASTSELFGETYGKSIFNEKSKFHPKSPYGVAKLYAYWITSVYRESYGIFACNGILFNHESPRRGETFVTRKITRFLTKKKLGSKDTLYLGNLNAKRDWGQTKDYTEMQWRI

SEQ ID NO: 152085 - protein, 167 aa, Unknown
  Bacterial polypetide isolated from the Sargasso Sea
GILFNHESPLRGETFVTRKITRAVGRIKLGLQDKLYLGNLDAKRDWGFAGDYVEVMWKMLQHDKPDDFVVATGEAHSVREFLESSFEHAGLDWKGHVEIDQRYFRPTEVDHLLGDASKASQDLNWRPKVDFKQLVAMMVDHDMVHAEREKLLVDAGHSVGPLGLPNG

SEQ ID NO: 152086 - protein, 194 aa, Unknown
  Bacterial polypetide isolated from the Sargasso Sea
YGVSKVFSHWMTINYRESYNLFACNGILFNHESPRRGETFVTRKITMGLVKIKLGLQKKLILGNIYAKRDWGHAKDYVEAQWLILQQKKADDYVIASGKQFSVKHFINIVARELKMKIKWKGKGINEKAYDDKNNVIIECNKKYFRPSEVETLLGNPLKAKKILKWKPKISLKLLAKEMIQNDLKLFSQNDKKK

SEQ ID NO: 152087 - protein, 264 aa, Unknown
  Bacterial polypetide isolated from the Sargasso Sea
MRSKKKVALITGITGQDGSYLTELLLKKDYEVHGIKRRSSNFNTQRIDHLYQDPHNPEPALILHYGDLTDSTNIIKIIQEVKPDEIYNLGAQSHVSVSFESPEYTANSDALGTLRILEAVRLLGLGNKTKIYQASTSELYGLVQEVPQRETTPFYPRSPYAVSKLYAYWIIVNYRESYGIFACNGILFNHESPRRGETFVTRKITRGLSRINEGIEDCVYLGNLNSLRDWGHARDYVEMQWRMLQQANPADYVISTGRQESVRK

SEQ ID NO: 152088 - protein, 197 aa, Unknown
  Bacterial polypetide isolated from the Sargasso Sea
MGNNKKALITGVTGQDGSYLAELLIQKNYIVHGIKRRSSSFNTSRIDHIYQDPHIENSNFILHYGDLTDSTNLIKIIQEIQPDEIYNLGAQSHVAVSFESPEYTANSDAVGTLRILEAIRILGLEKKTKFYQASTSELYGLIQESPQKEDTPFHPRSPYAVAKLYAYWITINYREAYGLFACKGILFNHESPRRGET

SEQ ID NO: 152089 - protein, 218 aa, Unknown
  Bacterial polypetide isolated from the Sargasso Sea
MKTAIVTGVTGQDGSYLCELLLEKGYKVVGLKRRTSLITTDRIDHIYNHENFQLEYFDLNDTGSIYRLLIKYAPDEFYNLAAQSHVRVSFDIPEHTADGIAMGTLRILNAIKEVCPRTRFYQASSSEMFGDNPEYPQDENTLLCPASPYACAKVFAHHLVKNYRKSYGLHLSSGILFNHESPRRGETFVTRKITLAAARIKLGLQDFLYLGNLDAKRD

SEQ ID NO: 152090 - protein, 201 aa, Unknown
  Bacterial polypetide isolated from the Sargasso Sea
YAYWITINYRESYGMYACNGILFNHESPRRGETFVTRKITRGLSRINAGLEQCIYMGNLESKRDWGHARDYVEMQWRMLQQDAPEDFVIATGRQETVRRFIELAANQIGWGGIQWEGNGLQEVGRRPDNNEIVVRIDPRYFRPAEVETLLGDPTRAKDKLGWIPATSLEQLVAEMVLNDCDEARKEAYLRRKGFDVVGAYE

SEQ ID NO: 152091 - protein, 181 aa, Unknown
  Bacterial polypetide isolated from the Sargasso Sea
HPRSAYGISKVTGYDLTRNYREAYGLFCSTGILFNHESPRRGFEFVTRKISHSVAKIKLGLQRELKLGNLNSLRDWGHAKDYVEAMWLMLQQRKPDDFVIGTGKQYSVREFAKTAFSIVGLDYKKYIKIDKALFRPAEVTTLLANPSKAKKTLKWRQKISFKQLVKEMVESDLKSVKRSGY

SEQ ID NO: 152092 - protein, 182 aa, Unknown
  Bacterial polypetide isolated from the Sargasso Sea
NGILFNHESPVRGETFVTRKITRALARISLGLQEKLYLGNLDAKRDWGHAKDYVEMQWLMLQQEKPDDFCIATGIQYSVREFVNFAWSHLGKTILWKGEGQDEKGYDSETGNLIVEVDPRYFRPTEVETLLGDPSKAKEKLGWEPKITIQEMVDEMMEHDLNIAKRDSLVKEHGFKVPDFNE

SEQ ID NO: 152093 - protein, 170 aa, Unknown
  Bacterial polypetide isolated from the Sargasso Sea
MNKKKVALITGITGQDGSYLAEFLISKGYQVHGIKRRSSSLNTQRVDHIYEDPHVKNRSFNLHYGDLTDSSNLIRIIQEIKPTEIYNLAAQSHVAVSFESPEYTADVDALGTLRILEAIRILGLEKTTKFYQASTSELYGLVQEIPQTETTPFYPRSPYAVAKLYAYWIA

SEQ ID NO: 152094 - protein, 248 aa, Unknown
  Bacterial polypetide isolated from the Sargasso Sea
MKALITGITGQDGSYLAEFLLKKGYEVHGIVRRVALENQEHRLWRINKLRSRIRLHAGSMESYASIFKIFNKVKPNEFYHLAAQSYVDYSFQDEFSTLSSNISSTHYCLSAIKESGLNTKFYFAGSSEMFGKVKKVPQNENTPFYPRSPYGISKVAGFELTRNYRESYGLHASSGILFNHESERRGFEFVTRKISHAVALIKLKKLKLLELGNLQAKRDWGYAPEYVKAMWLMLQQKKPDDYVVGTGE

SEQ ID NO: 152095 - protein, 178 aa, Unknown
  Bacterial polypetide isolated from the Sargasso Sea
MKKKALIFGVTGQDGSYLSSLLIKKGYEVHGIIRRSSSFNTGRIEHLYQDPHEKNRKLILHYGDVTDAISVSSLIKKIIPNEIYNLAAQSHVAVSFEVPEYTANADAVGALRILEAIRFHKLERKTKFYQAGTSEMFGKVLETPQNEKTPFYPRSPYGVAKVYAHWITVNYREAYNIF

SEQ ID NO: 152096 - protein, 273 aa, Unknown
  Bacterial polypetide isolated from the Sargasso Sea
MAKVALITGITGQDGSYLAELLLSKGYKVHGIVRRVALEDETHRLWRIRHILKDVTLHAGSLESYASLFNIILKIKPDEVYHLGAQSYVGYSFEDEYSTFNINLNGTHYVLSAVKEFAASKVRFYFAASSEMFGKIKESPQNEETSFHPRSSYGISKVTGFYLTRNYREAYKLHASNGILFNHESPRRGFEFVTRKISSAVARIKKGLQKKLKLGNIQAKRDWGHAKDYVEAMWLMLQQDVPGDYVIGTGKEHTVEDFAKKAFGHVGLNYKDY

SEQ ID NO: 152097 - protein, 175 aa, Unknown
  Bacterial polypetide isolated from the Sargasso Sea
MIKSNKVALITGVTGQDGSYLAELLLEKGYLVHGLKRRSSSFNTSRIDHLYQDPHEKDARFILHYGDLIDSTNIMKLIEKIKPDEIYNLGAQSHVAVSFETPEYTANCDALGILRILEAVRNLNLTKKTKIYQASTSELYGLVQEVPQKESTPFYPRSPYAVAKLYAYWIVVNYR

SEQ ID NO: 152098 - protein, 213 aa, Unknown
  Bacterial polypetide isolated from the Sargasso Sea
MSENGGKRQKTDPSTTITTTHKVALITGITGQDGSYLAELLLGKGYEVHGMIRRSSSFNTGRIEELYQDPHVDTRKLILHYGDLTDSTNCFEIISKIRPDEVYNLGAQSHVKVSFEMSEYTADTDGMGVLRLLNAIRSAGLTTTTRFYQASTSELYGLVQEVPQKETTPFYPRSPYAVAKQYAYWIVVNYREAYGMHASNGILFNTSRPAAGR

SEQ ID NO: 152099 - protein, 245 aa, Unknown
  Bacterial polypetide isolated from the Sargasso Sea
MQVLSKKAIVTGITGQDGAYLAQLLLNKGYSVYGTYRRTSSVNFWRIEELAIQSHPNLHLVEYDLTDLGASIALVQKIQPDEIYNLAAQSFVGVSFEQPSATAQITGIGALNLLEAIRLVNPRIRFYQASTSEMFGKVQAIPQVEDTPFYPRSPYGVAKLYAHWMTVNYRESYGMFASSGILFNHESPLRGREFVTRKITDSVAKIKLGKLDVLELGNIDAKRDWGYAQEYVEGMWRMLQADQPD

SEQ ID NO: 152100 - protein, 347 aa, Unknown
  Bacterial polypetide isolated from the Sargasso Sea
MSQPRKAIITGVSGQDGAYLTKLLLDKGYHVTGTYRRTSSVNFWRIRELGVLDHPNLRLVEHDLTDLGSTLRLLEGAQADELYNLAAQSFVGVSFDQPVTTAEVTGIGALNLLEGIRILNPKTRFYQASTSEMFGLVQAVPQREDTPFYPRSPYGVAKLFAHWSTINYRESYNLFASSGILFNHESPLRGREFVTRKITDTVAKIKLGKQDTLELGNLSAKRDWGFALEYVEGMWRMLQADEPDTFVLATGRTETVRDFVRMAFAAAGYQLEWSGKEERETGIDVATGKTLVRVNPKFYRPAEVDLLIGCADKAREKLGWKPETTLEQLCHMMVHADLGRNEHHETF

SEQ ID NO: 152101 - protein, 204 aa, Unknown
  Bacterial polypetide isolated from the Sargasso Sea
MKKAIIFGITGQDGSYLAELLLKKKYTVHGVIRRSSSFNTSRLNHLYQDPHIKNRKLILHYGDVTDSISVSSLIKKTLPHEIYNLAAQSHVAVSFEVPEYTANADAIGALRILEAIRFHGLEKKTKFYQAGTSEMYGKVMQVPQTEKTPFYPRSPYGVAKVYAHWITVNYREAYNIFACNGILFNHESPRRGGTFVTKKIVNGL

SEQ ID NO: 152102 - protein, 357 aa, Unknown
  Bacterial polypetide isolated from the Sargasso Sea
MSKKKALITGITGQDGAYLAEFLLNKDYEVHGLRRRSSSFNTGRIDHLYSDPYYADTSLFLHHGDMTDSSSLIRILQTVKPDEIYNLAAQSHVHVSFEEPEYTANSDAIGALRLLEGMRLLNLKSTKFYQASTSELYGEVKEIPQNEETPFNPQSPYAISKLYSYWITINYRKSYGLFASNGILFNHESPVRGETFVTRKITRALARINLDLQEKLILGNLDAKRDWGHAKDFVKAQWMILQHDKPDDFVISTGKEHTVREFVEKAAKLLGFEIVWKGNGINEVGIDIKTNKEIIAIDEKYYRPSEVQTLLGDSSKAQKELGWSPETSFDELVEEMIDYDLKLAKQEMSTDKSFSYF

SEQ ID NO: 152103 - protein, 326 aa, Unknown
  Bacterial polypetide isolated from the Sargasso Sea
MKKKKALITGITGQDGSYLAEHLLSLGYEVHGIVRRVALEDPTHHLWRLLSIADRLNFHSGTLESFPALYKILRDVQPDECYHLAAQSFVSISFEDEFSTMQTNINGTHYLLAAIKDTSPECRFYFAGSSEMFGMVEETPQRETTRFHPRSVYGITKVAGFELTRNYREAYNLFTCTGILFNHESPRRGFEFVTRKISSTAARIKLGLEKELRLGNIDAKRDWGFSGEYVQMMHSMLQQENPDDFVIGTGETHSVREFLQIVFEDLKLNYEDFLVIDQRFYRPAEVEILVADPSKAREKLGWDPKVTFTEIALKMVRYDYDNLKKG

SEQ ID NO: 152104 - protein, 343 aa, Unknown
  Bacterial polypetide isolated from the Sargasso Sea
MKALITGITGQDGYYLAKLLIEKGYEVHGTIRRSSTINTDRIDPLISEFEEVGKLNLHYSDLLDSASLNSLINQIQPDEIYNLAAQSHVAVSFKNPIYTTQTGTLGSVALLEAVRHSNKEIKFYQASSSEMYGGINKEMLNETSPFIPKSPYAASKVFAHNMTKLYRESYDLFCVNGILFNHESPHRGQTFVTRKITRAVGRIVNNLQSKLTLGNLDASRDWGFAGDYVEGMWLMLQHDTPDDWVLATGETHTVKEFLQKAFEYVDLDWEKFVQTSEKYFRPNEVEHLLGDSTKARKELSWSPKTSFDELVKLMIDHDLVLAEQEKVLIQNNLMTPTWENPTI

SEQ ID NO: 152105 - protein, 344 aa, Unknown
  Bacterial polypetide isolated from the Sargasso Sea
MKSAIVTGISGQDGAYLAELLLDKGYQVYGTYRRTSSVNFWRIEELGIAKHPNLHLVEYDLTDLSASIRLLQTTGATEVYNLAAQSFVGVSFEQPVTTAEITGIGPLNLLEAIRIVNPKIRFYQASTSEMFGKVQAVPQIESTPFYPRSPYGVAKLYAHWITVNYRESYDIFGCSGILFNHESPLRGREFVTRKITDSVAKIKLGQLDVLELGNMDAKRDWGFAKEYVEGMWRMLQADEPDTFVLATNRTETVRDFVRMAFKATGVDLQFKGQDENEIGVDVASGKTVVKVNPKFHRPAEVDLLIGNPEKAKQKLGWEPKTTLEQLCAMMVEADLRRNERGFSF

SEQ ID NO: 152106 - protein, 212 aa, Unknown
  Bacterial polypetide isolated from the Sargasso Sea
MKALITGITGQDGAYLTQLLLDKGYEVHGLLRRSSSINTSRIDDLISEYTPKNRLQLHYSDLLDSSSITNLINSINPDEIYNLAAQSHVSVSFENPIYTTQVGTLGSITILEALKHSDKKIKFYQASSSEMFGGSSKEILDESSAFNPKSPYGASKVFAHDITKIYRDSYDVFGVNGILFNHESPLRGETFVTRKISKAVGRIAAGIQEKLT

SEQ ID NO: 152107 - protein, 305 aa, Unknown
  Bacterial polypetide isolated from the Sargasso Sea
CLTHGDLTDSTNLIRIIQETQPDEIYNLAAQSHVMVSFETPEYTANADALGTLRILEAIRLLELTHKTKFYQASTSELYGLVQEVPQNEKTPFYPRSPYGVAKLYAYWITVNYREAYNIFASNGILFNHESPIRGETFVTRKITRAAARISLGVQERLYLGNLDSKRDWGHACDYVEGMWRILQHDIPEDFVLATGTTTSIRDFTTQAFSEAGISLEWSGSGLHEVGKNSQTGKLIVSVDPAYFRPTEVDLLIGDAKKAKDILGWSPKCDLNKLVREMISSDLKEARKDQYLLSGGFQTKNTNGD

SEQ ID NO: 152108 - protein, 157 aa, Unknown
  Bacterial polypetide isolated from the Sargasso Sea
MVKKALITGVTGQDGSYLLEILLEKGYEVHGLIRRSSSFNTGRIDHIINDEKYNDRFFFHHGDLTDASGLNRVLEKIGPNEIYNLAAQSHVKVSFDIPDYTAQVDALGTLRFLDAIRETQIDTRFYQASTSELFGKVNETPQNENTPFYPRSPYGVA

SEQ ID NO: 152109 - protein, 344 aa, Unknown
  Bacterial polypetide isolated from the Sargasso Sea
MRKALITGITGQDGYYLTKLLLKKGYQVHGIKRRTSLINTQRIDEFFNDKNLHDKNFSLYHGDMTDSSSLIRILNKVKPNEIYNLAAQSHVRVSFEIPEYTANSDAIGVLRLLEAVKSANLVNKVKIYQASTSELYGKARETPQNENTPFYPRSPYGVAKLYAHWIIVNYREAYNFFACNGILFNHESPLRGETFVTRKITIGLSKIKLGLQKNLILGNLNAKRDWGHAADYAEAMWKMMQLNKPEDFVIATGKQFSVREFVNIAAKNLEINLKWVGKGVNEKGIDKKTGKIIIKIEKKYFRPTEVDALLGDSSKARKILKWKPKFSFNQMVKEMVESDFNEQK

SEQ ID NO: 152110 - protein, 230 aa, Unknown
  Bacterial polypetide isolated from the Sargasso Sea
MRKKALITGITGQDGSYLAEFLLKKKYQVHGLIRRVAAEDKTHRLWRLKNIINKITLHAASLESYASIVKIIQKIKPEEVYHLGAQSYIDYAFKDEFSTINTNINGTHFILSAIRDFSPKTKFYFAASSEMFGKVQQIPQTEKTPFYPRSTYGISKVAGFDLTRNYREAYNLFCCSGILFNHESPRRGFEFVTRKITHAVARIKYGLQKDLKLGNMDAKRDWGHAEDYVR

SEQ ID NO: 152111 - protein, 348 aa, Unknown
  Bacterial polypetide isolated from the Sargasso Sea
MSQTRKKAIITGISGQDGAYLTKLLLDKGYEVTGTYRRTSSVNFWRIAELGVDTHPNLTLVEHDLTDAGSSLRLLERTQPDELYNLAAQSFVGVSFDQPATTAEVTGLGPLNLLEAIRVVSPKTRFYQASTSEMFGKVQSIPQTEATSFYPRSPYGVAKLYAHWMTVNYRESYGLFGSSGILFNHESPLRGREFVTRKITDTIAKIKLGKATRLELGNLDAKRDWGFALEYVEGMWRMLQADEPDTYVLATNRTETVRDFVRMAFAAAGYQIEWSGKGEQERGLDASTGNVLVEVNPKFYRPAEVDLLIGCADKAKAKLGWEPKTTLEQLCQMMVEADLTRNQHHDTF

SEQ ID NO: 152112 - protein, 282 aa, Unknown
  Bacterial polypetide isolated from the Sargasso Sea
DEIYNLAAMSHVRVSFDTPEYTANIDGLGTLRILEAVRLLGLEKNIKIYQASTSELYGKVQETPQNEETPFYPRSPYGVAKMYAYWITKNYREAYKIFASNGILFNHESPRRGETFVSRKITRAATRISLGLQDSLLIGNLSAKRDWGHAKDYVKSMWLILQQDKPDDFVIATGQNYSVRDFIKKSFEVLGIDIDFKGKGEKEVGYISKLNQPMKHLKVNDIIIKVDPIYYRPTEVDTLLGDASKARQVLNWKPEYNFKTLVEEMIEQDLLLAKQEKLIKEI

SEQ ID NO: 152113 - protein, 313 aa, Unknown
  Bacterial polypetide isolated from the Sargasso Sea
LINTDRINHLYEEPYGKNRKFILHHGDLTDSTSLIRIIQEVQPDEIYNLAAQSHVAVSFEEPEYTANSDAIGALRILEAIRILKLEKKTKFYQASTSELYGQVTQTPQNEKTPFYPRSPYGVAKLYAYWITINYREAYGIYACNGILFNHESPVRGETFVTRKITRALARIKLGLQKNLYIGNLNALRDWGHAKDFVEAQWLMMQQEEPEDYVISTGKQYSVRDFINLASKNLNMKIEWKGKDLDEVGVFNGTDIVKVDKRYFRPTEVETLLGDSSKAKKKLNWEPKISFEELVKEMSNEDLRLAKKDKSSKL

SEQ ID NO: 152114 - protein, 271 aa, Unknown
  Bacterial polypetide isolated from the Sargasso Sea
MVKRALITGVTGQDGALLSELLINKGYLVYGVKRRSSSFNTGRVDHLYSDPHENSTKFQMMYGDMTDATNLIRIVQEVQPDEIYNLAAQSHVRVSFETAEYTANADALGTLRLLEAIRILGLTKKTKFYQASTSEMYGNVKETPQNENTSFYPRSPYAVAKLYAYWVTVNYREAYGIYAANGILFNHESPIRGETFVTRKITMAVAAMHTGKEKILYLGNLDAKRDWGHAKDFVEGMRLILQQNLPSDYVLATGENHSVREFVELAFKEIG

SEQ ID NO: 152115 - protein, 289 aa, Unknown
  Bacterial polypetide isolated from the Sargasso Sea
LVEHDLQDLGSSIRLLQESEATEVYNLAAQSFVGVSFDQPVLTAQITALGALNLLEAIRAVNPKIRFYQASTSEMFGLVQQVPQTEQTQFYPRSPYGVAKLYAHWMTVNYRESYDMFASSGILFNHESPLRGREFVTRKITDSVAKIKLGKLDVLELGNLDAKRDWGFAKEYVEGMWRMLQADKPDTYVLATNRTETVRDFVTMAFKAIGVDLAWNGTGLDEVGTCSASGKTLVKINPKFHRPAESGLLIGNPEKAKRELGWGPSTTLEELCEMMVAADLRRNEAGASF

SEQ ID NO: 152116 - protein, 280 aa, Unknown
  Bacterial polypetide isolated from the Sargasso Sea
MKKKIALIFGITGQDGSYLAELLIKKGYLVHGVKRRSSSFNTGRLDHLYQDPHEKRKVFFLHYGDVTDAISVSTIIKNVKPDEIYNLAAQSHVAVSFEVPEYTANADAIGALRILESIKFHGFQKKTKYYQAGTSEMFGKVRETPQNENTPFYPRSPYGVAKLYAHWITINYREAHNLFACNGILFNHESPVRGETFVTKKIVNGLCKIKRGYQKKLYLGNLEAKRDWGHAEDFVEAMWKMLQKKTPSDYVIATGIQYSVRDFVNKVLEELNIQFRWKGK

SEQ ID NO: 152117 - protein, 343 aa, Unknown
  Bacterial polypetide isolated from the Sargasso Sea
MKALITGITGQDGSYLAELLIEKGYEVHGTIRRSSSINTSRIDDLISKNINTNKLHLHYADLLDPASMSNLVTQIEPDEVYNLGAQSHVAVSFKNPLYTSQTSVLGPISLLESIRNSKKEIKFYQASSSEMYGGEGEISLNEESPLIPKSPYASSKLFAHETNKIYRESYGIFGVNGILFNHESPRRGETFVTRKITKAIGRIHFGLQEKLTLGNLEASRDWGFAGDYVKAMWMMMQNDTPDDWVVATGETYTVKDFLLAAFKIVDLDWKDFVVTSEKYFRPNEVDYLLGNPKKIKEKLGWEPELDFNGLVKMMVENDLNEAEKELTLVKNNLLKPTWEYPAL

SEQ ID NO: 152118 - protein, 327 aa, Unknown
  Bacterial polypetide isolated from the Sargasso Sea
MRKVALITGITGQDGSYLAEYLIKKKYKVHGIVRRVALEDRSHRLWRIKHILKKIHIHAASLESYASIVKIIQKIKPTEIYHLAAQSYVDYSFRDEFSTLNININGTHYLLSAVKDFSPRTKLYFAGSSEMFGKVQQIPQSEKTPFYPRSAYGISKVTGHDLTRNYREAYNLFCCTGILFNHESPRRGFEFVTRKISHGVAKIKLGMEKKLMLGNLDAKRDWGHAKDYVEAMWMMLQKKRPDDFVVATGKQHSVREFAKQAFAVAGLDYKKHIAIDKNLFRPAEVNTLLGNYSKARRILKWKPKISFKNLVKDMVESDIQSIIKSGY

SEQ ID NO: 152119 - protein, 248 aa, Unknown
  Bacterial polypetide isolated from the Sargasso Sea
GIDLNIPLTYRYSRPDVFDYGFGPFRWVVLSGKPEDLDKTDAIAAEVLQRLMAEAPEEIQQQMQDNITWIKDAKQNKLVVGSQARILYADAEGRMEIAAAFNVAIARGEIGPVVLGRDHHDVSGTDSPFRETSNIYDGSRFTADMAIHNVIGDSFRGATWVSIHNGGGVGWGEVINGGFGMLLDGTVEADRRLKSMLLFDVNNGIARRSWARNAEADFAIKREMARTPKLRVTLANRVDDDILDKLAF

SEQ ID NO: 152120 - protein, 265 aa, Unknown
  Bacterial polypetide isolated from the Sargasso Sea
AVNSLSEMGTRFWDYGNAFLLESGRADAEVFSEDGSFRYPSYVEDIMGPMCFDYGFGPFRWVCTSGNKQDLSTTDEIAQEVLEDLASRCPEEIRTQYLDNIKWISEAEKHDLVVGSMARILYADEEGRRQIALRFNEAISEGLITAPIVLGRDHHDVAGTDSPFRETANIYDGSMFTADMAVHNFVGDSFRGATWVSLHNGGGVGWGEVVNGGFGMVIDGSEVSERNIDSMISWDVNNGIARRSWARNDGATFAITKAMEKDPKL

SEQ ID NO: 152121 - protein, 300 aa, Unknown
  Bacterial polypetide isolated from the Sargasso Sea
MPAGISFEDGISLLSSDPKKFRGLVQSSLNRHVNAVNTLSEMGTRFWDYGNAFLLESGRADAEVFSEDGSFRYPSYVEDIMGPMCFDYGFGPFRWVCTSGNKQDLATTDKIAQEVLEDLASRCPEEIRTQYLDNIKWISEAEKHDLVVGSMARILYADEEGRRQIALRFNEAISEGLITAPIVLGRDHHDVAGTDSPYRETANIYDGSMFTADMAVHNFVGDSFRGATWVSLHNGGGVGWGEVVNGGFGMVIDGSEVSERNIDSMISWDVNNGIARRSWARNAGATFRITKPWKKTPNWT

SEQ ID NO: 152122 - protein, 80 aa, Unknown
  Bacterial polypetide isolated from the Sargasso Sea
MAKRIIKAPTGSKLNCKNWQIEAPYRMIQNNLDPEVAENPDELVVYGGKGKAARNWDCYNSIISTLKSMNEDETLIIQSG

SEQ ID NO: 152123 - protein, 79 aa, Unknown
  Bacterial polypetide isolated from the Sargasso Sea
PPLELPWVSFHHGGGVGIGFSQHAGLVILADGSESADQKLARVLWNDPATGVMRHADAGYEEAIDCARTHGLNLPSIGK

SEQ ID NO: 152124 - protein, 311 aa, Unknown
  Bacterial polypetide isolated from the Sargasso Sea
RGSSKDVANNLDPNVAESPKDLIVYGGYGKAARDWDSYDKIVSALKELENDETLLIQSGKPIAVFKTHEYSPRVLISNSMIVPKWSDWENFRELDKKGLMMYGQMTAGSWIYIGTQGILQGTYETLAEVARRHFNGSLKNTITVTAGLGGMGGAQPLAVTMNEGVNISIEICKDRILKRLNTRYLDCWTDSYTEAIDKAIKYKKEGKAISIGLLANAADILPKLLNDNVIPDILTDQTSSHDELNGYVPNNMSLSEANKLRDENPDKYIRESYRTMGEHCKSMLEIASRGAITFDYGNNLRGQAKENAGVR

SEQ ID NO: 152125 - protein, 53 aa, Unknown
  Bacterial polypetide isolated from the Sargasso Sea
MVIVCDGTDEAAARIARVLTNDPGTGVMRHADAGYQIAIDCAKEQGLNLPMIG

SEQ ID NO: 152126 - protein, 183 aa, Unknown
  Bacterial polypetide isolated from the Sargasso Sea
MESNQIPLPPTGTKLNCKGWHQEAALRCLLNNLHPDVAEDRDNLIVYGGNGKAARNPKALRNIIEALKKLENNQTLLIQSGKPVAIIPSHEHGPRVLIANSNLVPNWSNWDHFKLLRDQDKFMYGQMTAGSWIYIGSQGILQGTYETFMAAAEKHYGVGSDLSKKLVLTAGIGGMGGAQPLAV

SEQ ID NO: 152127 - protein, 272 aa, Unknown
  Bacterial polypetide isolated from the Sargasso Sea
MAVRVVAGSRLHFGFRNLCLEESHVYGGIGVCLEDPKVVLTAEPEKGIICDDESAKEYAQKAVDILGVEGAKVEIKEKIPAHMGLGSGTQLALAVYTAIAETYGIEPKSRECAPKLGRGERSGVGVAAFEQGGFNIDRGQEASSLSVFGEGREAEWEVPSIKTNLRIPEEWIFVVVKLEIGEGYSGNEEKKLINFAIREARLDVTREIDQVIDRILIPAIQNENCAEFGFAVGEINRLNGIWYEKYQGGVYRPPIGDVVGKLKNSSNISEWG

SEQ ID NO: 152128 - protein, 134 aa, Unknown
  Bacterial polypetide isolated from the Sargasso Sea
MKRKIYPPTGNSLSCENWQIEAAYRMIQNNLHPDVAEMPEDLIVYGGKGKAARDWKSFDSILETLKRLQPDETLLIQSGKPVGVAKTHIYSPRVLIANSNIVPKWANWEYFDKLEKDGLMMYGQMTAGSWIYIG

SEQ ID NO: 152129 - protein, 295 aa, Unknown
  Bacterial polypetide isolated from the Sargasso Sea
MNKIKAPIGTQMKCKGWHQEAAYRMLQNNLDCDVAEDPSNLIVYGGYGKAARNWESYDKILEALTKLENDETLLIQSGKPVAVFRTHEYSPRVIISNSMLVPNWANWDHFRQLDEKGLMMYGQMTAGSWIYIGTQGILQGTYETLAEIARREFNGSLKGTLTLTAGLGGMGGAQPLAVTMNEGVNITVEVDESRIDKRLETQYLDMKTDLFSNAIEYALKAKEEKKPLSIGLIGNAADIFPKFIENNIIPEIVTDQTSAHDELYGYVPNDLSFKEAVALRDSDPNQYIDLSYKSM

SEQ ID NO: 152130 - protein, 73 aa, Unknown
  Bacterial polypetide isolated from the Sargasso Sea
GATWVSLHHGGGVGIGYSIHSGQVIVADGSEEMAERIKKVLTNDPGLGIIRHADAGYNDAIRNAKSWSIDIPK

SEQ ID NO: 152131 - protein, 142 aa, Unknown
  Bacterial polypetide isolated from the Sargasso Sea
MKSIHPPKGNRLTCKNWQIEAAYRMIQHNLDPDVAEIPEELIVYGGKGKAARNWDSFHAILETLKRLEPDETLLVQSGKPVGVAKTHTYAPRVLIANSNLVPEWATWDHFNKLEKDGLMMFGQMTAGSWIYIGTPRNIAGYL

SEQ ID NO: 152132 - protein, 104 aa, Unknown
  Bacterial polypetide isolated from the Sargasso Sea
MTNTRHNLRDIYPPTGTEITTKSWLTEAPMRMLMNNLHPDVAENPHELVVYGGIGRAARTWEDFDRIVAGLKDLEADETLVVQSGKPVAIVRTHVDAPRVLIAN

SEQ ID NO: 152133 - protein, 81 aa, Unknown
  Bacterial polypetide isolated from the Sargasso Sea
MTNTRHNLRDIYPPTGTEITTKSWLTEAPMRMLMNNLHPDVAENPHELVVYGGIGRAARTWEDFDRIIAGLKDLEADETLV

SEQ ID NO: 152134 - protein, 68 aa, Unknown
  Bacterial polypetide isolated from the Sargasso Sea
HHGGGVGMGYSQHSGMVICCDGTKKASERIKRVLWNDPATGVMRHADAGYDIAIESAKYHKLNLPSIK

SEQ ID NO: 152135 - protein, 108 aa, Unknown
  Bacterial polypetide isolated from the Sargasso Sea
MTNTRHNLRDIYPPTGTEITTKSWLTEAPMRMLMNNLHPDVAENPHELVVYGGIGRAARTWEDFDRIVAGLKDLEADETLVVQSGKPVAIVRTHVDAPRVLIANSNIV

SEQ ID NO: 152136 - protein, 81 aa, Unknown
  Bacterial polypetide isolated from the Sargasso Sea
FVNTASGATWVSLHHGGGVGMGYSQHSGMVICCDGTKKASERIKRVLWNDPATGVMRHADAGYDIAIESAKNHKLNLPSIK

SEQ ID NO: 152137 - protein, 83 aa, Unknown
  Bacterial polypetide isolated from the Sargasso Sea
MINTASGATWVSLHHGGGVGIGFSQHAGLVIVADGTPEAAKRLERVLWNDPASGVWRHADAGYEDAVRCAKDHGLRLPGILGN

SEQ ID NO: 152138 - protein, 52 aa, Unknown
  Bacterial polypetide isolated from the Sargasso Sea
MSKIKGCITALITPFDSDGKIDESAFESLILRQIKNGVHGLVPCGTTGESQH

SEQ ID NO: 152139 - protein, 94 aa, Unknown
  Bacterial polypetide isolated from the Sargasso Sea
MKDLGRLITAMVTPFKDNGDVDYERAKEFAKALVDTGSDGLLIGGTTGESPSMNEDEKLQLFKSVKEAVGDTASVIAGTTDNNTIASVDLSQKA

SEQ ID NO: 152140 - protein, 164 aa, Unknown
  Bacterial polypetide isolated from the Sargasso Sea
TNLPIMAYNIPGRTGTLIELDTLEKLVNDISIHSIKDAVGDLKFSKDQIDLIGDKVKIYSGDDALTYDFVKNGAVGVVSVASHVVGNEISQMISLIKSGDIDQAEEINTSLQEFFSLIFEEPSPGPIKDILSQTWEDVGMPLLPITSISGDLSLKLMDNYKKIQ

SEQ ID NO: 152141 - protein, 60 aa, Unknown
  Bacterial polypetide isolated from the Sargasso Sea
MFKGSIVALITPFRQGKLDEEALARLVEWHIEQGTHGIVPVGTKGESPILTHDEHCRVGS

SEQ ID NO: 152142 - protein, 248 aa, Unknown
  Bacterial polypetide isolated from the Sargasso Sea
TGESPTLSHYEHEKIVEECIKVADNRVPVIAGAGSNSTQEACKLAKHAAKAGAQAILVVTPYYNKPTQDGLYSHFMTVADAAKIPLIVYDIPGRSIIPVHDETLVKLCENNELIDGIKDATADISRPPRLLRLIGSGFSQLSGEDATALPYLAAGGHGCISVSSNIIPNLLSEMHNSWKNGDFKNAFYIHLKLINLHDAMFCESSPGPVKFAAEKIGLCNSEARLPIVKISETSENQVLSALEECKLI

SEQ ID NO: 152143 - protein, 209 aa, Unknown
  Bacterial polypetide isolated from the Sargasso Sea
MSDFGKLLTAVITPFDNNGVLNTDTLWRICKKLVHEKSDGLVLSGTTGESPNLTKEDRKIIYSTAKDSVGGKAKIIAGTGTYSTKESIEYTKMANDIGVDGIMIVTPYYSKPSQFGILQHFEQISKNTDLPIMAYNIPGRTASLIEIETLEKLVDDIGIHSIKDAVGDLEFSKNEIEILNDKVDIYSGNDGETIENVKMGGKRCCLQLL

SEQ ID NO: 152144 - protein, 259 aa, Unknown
  Bacterial polypetide isolated from the Sargasso Sea
IVCGTTGEGYLMDWEEHLMLIAHSVNRFGDELVIVGNTGSNNTREALKATHYGFAFGMDASLQINPYYGKTSEKGLREHFNRVLDLGPAIIYNVSSRTGQDLQPELIESLAEHSNLVGVKECSGNERMGYYESKGIACWSGNDDQCFEGRHRNQSHGVISVIANLLPGLMRKLMDDDNSELNQRLQPLMAWLFHVPSPNALNTAMAMTGAAPPVFRLPYAPLDSNARQEGFQLLNAFSDEERVGNTLKLMDDSEFELSC

SEQ ID NO: 152145 - protein, 237 aa, Unknown
  Bacterial polypetide isolated from the Sargasso Sea
DRKIIYSTAKDSVGDKAKIIAGTGTYSTRETIEYTKMANDIGVDGIMIVTPYYSKPSQFGILQHFEQISKNTDLPIMAYNIPGRTATLIEIETLEKLVDDIGIHSIKDAVGDLDFSKIELDALKEKVDIYSGNDAETIEFMKLGGKGVVSVASHIVGNQIYELINHVLNDEIESAEHLQNQLLPLFDLLFEEPSPGPVKYLLTQTWEDVGAPLMPITNISDDLANKLLDNFQKIKNN

SEQ ID NO: 152146 - protein, 78 aa, Unknown
  Bacterial polypetide isolated from the Sargasso Sea
ISQICKFNLNKEFDKAIDLNKRFFNLYDLLFVESNPIPVKWALEKMKKIDSGIRLPLVSLKKVFHEEISNELSKLELI

SEQ ID NO: 152147 - protein, 230 aa, Unknown
  Bacterial polypetide isolated from the Sargasso Sea
DIAVQECNGKIPVISGTGSNSTSEAIELSKYAEKAGSDALLVVTPYYNKPTQEGLYQHYKKINDNVGIPIIIYNIPSRSVIDMSVETMTKLYELKNIIGVKDATGNLNRVDQQLKAMGKEFVQLTGNDDNALEFNKRGGTGAISVTANIAAKLCSDFQNSCANNFKESEKLDKILQPVHAAMFIESNPSPVKYAASLLGMCDPDVRLPLVQVKEETKKKVSEALKVANIL

SEQ ID NO: 152148 - protein, 181 aa, Unknown
  Bacterial polypetide isolated from the Sargasso Sea
MTVLFKGIIPALITPMTASEEVDEAGLRALIERLIEAGVHALFVLGTNGEFIALNEAEKLRIATIAVDQARSRVPVIAGTGAYATRDVIDLNSKMLDVGVDAVSVITPYFNGATQPELFTHYERIARATTLPVMLYTIPAKAGITLTVDTVRRLAEIPNIRGIKDSGGDFDRLLQLINLRR

SEQ ID NO: 152149 - protein, 114 aa, Unknown
  Bacterial polypetide isolated from the Sargasso Sea
MFTGSNVALVTPFKNDKLDDETYIKLIHFHIENGTNGLVPAGTTGESPTLSHDEHERVIDLCVKESNGKLPVFAGTGSNSTEEAISLTTHAEKMGADGALIVTPYYNKPTQEGL

SEQ ID NO: 152150 - protein, 213 aa, Unknown
  Bacterial polypetide isolated from the Sargasso Sea
IGSSSTLEACELADVALKNNINECLAVTPYYNKPSQKGLSLHYQELCKTGANIMLYNVPGRTGVDLLPRTVLELAEIENITGIKEAVNTEDRFRDLLEVKAIRPEFLLLSGDDPTFVSFMREGADGIISVAANVIPKQIKELSDLCFSKKFEEAKTINEKYLNFYELLFTEASPSPCKFLLEKMSLLENNLRLPLHPLSEEFREKIYEAFNKI

SEQ ID NO: 152151 - protein, 63 aa, Unknown
  Bacterial polypetide isolated from the Sargasso Sea
MFKGSNVALITPFKNNGLDEEAYIKLIHFHIDNGTNGLVPAGTTGESPTLSHDEHQRVIDLCI

SEQ ID NO: 152152 - protein, 215 aa, Unknown
  Bacterial polypetide isolated from the Sargasso Sea
IEGVVEVAERRFDNAFCAVRPPGHHAENDYAMGFCFFNNIALAAEFLCSEMGFKRILIFDFDVHHGNGTQHLFEERDEVYFVSMHQDPRTCYPGTGYADERGMGGGAGYTLNVPVIAGTGDDEYLQIFYDRVQPKMEEYKPDFILVSAGFDAHRDDPLASLNLTEHAYMVLTSELKKMAEKFAEGRIISMLEGGYDLNALSSSVREHLNILQSED

SEQ ID NO: 152153 - protein, 53 aa, Unknown
  Bacterial polypetide isolated from the Sargasso Sea
NEILFVESNPIPIKWMLNRIGRITDGIRLPLTKFDSQFHAQAEDILKELNLLN

SEQ ID NO: 152154 - protein, 60 aa, Unknown
  Bacterial polypetide isolated from the Sargasso Sea
MNGSLRQGSPKFNGSMTALITPFENGELDLKSFKKIVNFQIDNGTNGLIPVGTTGESPTL

SEQ ID NO: 152155 - protein, 196 aa, Unknown
  Bacterial polypetide isolated from the Sargasso Sea
GVDGIMIVTPYYSKPSQFGILKHFEEVSNNTDLPIMAYNIPGRTATLIEIDTLEKLVDDIGIHSIKDAVGDLEFSKNELEALKDKVDIYSGNDGETIEFMKMGGKGVVSVASHVVGNNIYDLINHVLNDEVESAEHLQNQLLPLFDLLFEEPSPGPVKYLLTQTWEDVGSPLMPITDISSELANKLLDNFQKIKNN

SEQ ID NO: 152156 - protein, 235 aa, Unknown
  Bacterial polypetide isolated from the Sargasso Sea
KVVELCVEEANGRVSVIAGAGSNSTAEAIEFTKHAKAAGADAALHVTPYYNKPTQEGMYRHFMTIADAVDLPIIIYNIPPRSVIDMSLGTMKRLSEHSNIVGVKDATQDLVRPLATRLEIGPDFCQLSGEDATIVPYLSQGGHGCISVTCNVAPGPLSKMHKAWQKGDLDTVREINDRLLPLHDALFCETSPGPVKYAAHLLGLCSPDARLPICEIAEDSKTKVAAAMRHAGLIN

SEQ ID NO: 152157 - protein, 68 aa, Unknown
  Bacterial polypetide isolated from the Sargasso Sea
MFKGSNVALITPFKNNGLDEEAYIKLIHFHIDNGTNGLVPAGTTGESPTLSHDEHQRVIDLCIKESNG

SEQ ID NO: 152158 - protein, 92 aa, Unknown
  Bacterial polypetide isolated from the Sargasso Sea
MLQGSIVALVTPMHADGSIDWEAHERLVQWHVESGTAGIVPMGTTGESATLNTQEHLEVISRTIQLANGRISVVAGTGSNSTEETLHQTKEA

SEQ ID NO: 152159 - protein, 213 aa, Unknown
  Bacterial polypetide isolated from the Sargasso Sea
HIQLKSLFEYTKMANDLCVDGIMIVTPYYSKPSQYGILKHFELISENTELPIMAYNIPGRTATLIELATIEKLVDDVGIHSIKDAVGDLEFSKLELEALKDKVDIYSGNDSETIEFMKMGAKGVVSVASHIVGKEIYELIESVSSDELESAEQMQKTLLPMFDMLFEEPSPGPVKFLLTETWEDVGSPLMPITDITPDLANKLLQNYKKIKKD

SEQ ID NO: 152160 - protein, 70 aa, Unknown
  Bacterial polypetide isolated from the Sargasso Sea
MFKGSNVALITPFKDNNLDEENYIKLINFHLENNTNGLVPAGTTGESPTLSHREHEKVIEICINEVKGKI

SEQ ID NO: 152161 - protein, 148 aa, Unknown
  Bacterial polypetide isolated from the Sargasso Sea
MDDCSASIVALVTPLNYDHEVDLLALKRILDLHVEAGTEGIVLFGSTGEGVLLSTNDRRTILSYIFEEYHLNIPVWVTCTHPCVSTVLSLISESKDFPIEGVMVACPMYIKPSQSGLIQYFSTIADQAHVPVMLYNVPSRTGCSLLPE

SEQ ID NO: 152162 - protein, 95 aa, Unknown
  Bacterial polypetide isolated from the Sargasso Sea
GGKGNISVTAFVAPRAMSDLCAAAMRGEAAIARAINDRLMPLHKALFLESNPIPVKWALHEMGLMGDGIRLPLTWLSPRCHEPLRQAMRQCGVLA

SEQ ID NO: 152163 - protein, 143 aa, Unknown
  Bacterial polypetide isolated from the Sargasso Sea
MHKNIIGIKDATGELKNLEEIQRLCEKQISEENFFLYSGDDASSCEFMKRGGHGTISVSSNIVPKLVSEMTKLAMSKNKEAEKINKKIDTLNKVLFVESNPIPVKYALYLMGLAPLGIRLPLTVLDQKYRENLKQELIKLQLI

SEQ ID NO: 152164 - protein, 186 aa, Unknown
  Bacterial polypetide isolated from the Sargasso Sea
YYNKPTQEGLYQHYKSINDSVGIPIIIYNIPSRSVIDMSVDTMARLYELKNIKGVKDATGDLNRVTMQLNKMGKEFIQLTGEDDNALEFNKRGGVGCISVTANVATKLCADFHKASLSRDNETAQSINKLLSPLHKALFIESNPSPVKYAASLLKLSLADVRLPLVQVTENTKKEIEKALKFAKLL

SEQ ID NO: 152165 - protein, 93 aa, Unknown
  Bacterial polypetide isolated from the Sargasso Sea
SVGAVGVVSVASHLVGLQLKEMISSFQSGEVSNALDIHEKLQPLFKALFMTTNPIPIKAALEQSGWNVGNPRSPLSPLSNDMKKQLSFILKSL

SEQ ID NO: 152166 - protein, 119 aa, Unknown
  Bacterial polypetide isolated from the Sargasso Sea
EAKEIGEFYLYSGDDPTATSFILNGGKGTISVTANIVPEIISEICKLSLDGDSQGALDLDSKLEELNEMLFVESNPIPIKWLLNRIGRISDGIRLPLSPFSHKYHNDAEEILKKLNLLN

SEQ ID NO: 152167 - protein, 48 aa, Unknown
  Bacterial polypetide isolated from the Sargasso Sea
MFKGSNVALITPFKNNLLDEEAYVKLIHFHIENGTSGLVPAGTTGESP

SEQ ID NO: 152168 - protein, 72 aa, Unknown
  Bacterial polypetide isolated from the Sargasso Sea
MFKGSIPALITPFANGEVDYLSYEKLIEWSISEGSHGFVPCGTTGESPTLSHNEHKKIIESCIKCVDKRVPV

SEQ ID NO: 152169 - protein, 118 aa, Unknown
  Bacterial polypetide isolated from the Sargasso Sea
SERKDDFLLYSGDDPTSTQFILNGGAGTISVTANIVPKIISDICSLALDGQKDSALQLDKQLVKLNEILFVESNPIPIKWMLNRIGRITDGIRLPLTKFDSQFHTQAEDILKELNLLN

SEQ ID NO: 152170 - protein, 60 aa, Unknown
  Bacterial polypetide isolated from the Sargasso Sea
MFKGSNVALITPFKNNKLDEENYIKLIDFHLKNGTNGLVPAGTTGESPTLNHKEHEKVIE

SEQ ID NO: 152171 - protein, 71 aa, Unknown
  Bacterial polypetide isolated from the Sargasso Sea
MFKGSNVALITPFKNNGLDEEAYIKLIHFHIDNGTNGLVPAGTTGESPTLSHDEHQRVIDLCIKESNGKIP

SEQ ID NO: 152172 - protein, 211 aa, Unknown
  Bacterial polypetide isolated from the Sargasso Sea
ATRYGFAFGMDASLQINPYYGKTSEKGLREHFNRVLDLGPAIIYNVASRTGQDLQPELIESLAEHSNLVGVKECSGNERMGYYESKGIACWSGNDDQCFEGRHRNQSHGVISVIANLLPGLMRKLMDEDNTELNQRLQPLMAWLFHVPSPNTLNTAMAMTGAAPPVFRLPYAPLDSNARQEGIQLLNAFSDDERVGNTLKLMDDSDFELSC

SEQ ID NO: 152173 - protein, 176 aa, Unknown
  Bacterial polypetide isolated from the Sargasso Sea
MQHFEQISKNTDLPIMAYNIPGRTATLIEIDTLEKLVDDIGIHSIKDAVGDLNFSKTELEVLKDKVDIYSGNDGETIEFMKMGGKGVVSVASHVVGNEIFNLINHVLNDEIESAEQLQNQLLPFFDLLFEEPSPGPVKYLLTETWEDVGSPLMPITNVSDDLASKLLENFRKIKNN

SEQ ID NO: 152174 - protein, 186 aa, Unknown
  Bacterial polypetide isolated from the Sargasso Sea
TQEGLYQHYKAINDNTNLPIIIYNIPSRCVIDMSVDTMARLFELKNIAGVKDATGDLSRLDETIKKLGHEFIQLTGEDGLAFEFNKRGGVGIISVTANIAPKLCSDFQKYSKSKSDNEIKEAERIDQILQPLHKSLFIESNPAPVKYAAKLLGLCDDKVRLPLVEVADKTKEEVKKSLLSAKLIND

SEQ ID NO: 152175 - protein, 61 aa, Unknown
  Bacterial polypetide isolated from the Sargasso Sea
MFKGSNVALITPFKDNNLDEENYIKLINFHLENNTNGLVPAGTTGESPTLSHKEHQRVIEL

SEQ ID NO: 152176 - protein, 71 aa, Unknown
  Bacterial polypetide isolated from the Sargasso Sea
MKYQGSYCALITPFKDDKFDEKGFIKIIEWHIKQGTQGIVPCGTTGESPTLSHDEHKKVVELAVETSGGSL

SEQ ID NO: 152177 - protein, 99 aa, Unknown
  Bacterial polypetide isolated from the Sargasso Sea
MLFSGSYTALLTPFSNGKVDYNSYKKLIEHQITNGTHGLVPVGTTGESPTLTHEEHKKVIEVCIEQVNGRVPIIAGAGSNSTVEAIDFVKHACSAGADG

SEQ ID NO: 152178 - protein, 112 aa, Unknown
  Bacterial polypetide isolated from the Sargasso Sea
FMIYSGDDPTATQFMLNGGSGTISVTANVVPSIIAEICTQALSGESKKAIELNLEIEQLNEILFVESNPIPVKWILNRLGRIPGGLRLPLVELDDKFHNQAELILKELSLLN

SEQ ID NO: 152179 - protein, 175 aa, Unknown
  Bacterial polypetide isolated from the Sargasso Sea
SITNLLADNSNIPIIIYNIPGRSIVDMSIDTMIKLSKLKNIVGVKDATNDLFRPVLTSKRMNSNFCYLSGEDGTALAYLAQGGHGCISVTANIAPKLCSEMHQQWRDGNITKAQEINLKLASLHNALFLESSPGPVKYAAHLKGLCEPDTRLPLVEINDKTKAEVKNCLKDNDLI

SEQ ID NO: 152180 - protein, 166 aa, Unknown
  Bacterial polypetide isolated from the Sargasso Sea
IIIYNIPPRSVVDMSVDTMSRLFELKNIVGVKDATGNLDRVDEQRKKMGPDFIQLSGEDGTALEFNMRGGCGCISVTANVAPKLCSEFQEASIAKNNSNLLSKAKTINEKLMPLHKSLFIESSPSPVKYATSLLNLSSDEVRLPLVKITDESKKAVKSAMLYANLL

SEQ ID NO: 152181 - protein, 226 aa, Unknown
  Bacterial polypetide isolated from the Sargasso Sea
KDSVGDKAKLIAGTGTYSTKESIEYTKLAEDLGMDGIMIVTPYYSKPSQYGILKHFEAISNTTNLPIMAYNIPGRTGTLIELETLEKLVNDISIHSIKDAVGDIKFSKDQIDLIGDKVIIYSGDDALTFDFVKNGAVGVVSVASHVVGNEISQMISYIQSGDIDEAEAINTSLQEFFSLIFEEPSPGPIKDILSQTWEDVGMPLLPITSISDDLSLKLLDYYKKIQ

SEQ ID NO: 152182 - protein, 91 aa, Unknown
  Bacterial polypetide isolated from the Sargasso Sea
MFNLQGSIVALVTPMETDGKIDWQALKDLIEWQINSGSAGLVIVGTTGESATLDVSEHVQVIENSVKIADGRIKIVAGTGANSTKEAVYLT

SEQ ID NO: 152183 - protein, 104 aa, Unknown
  Bacterial polypetide isolated from the Sargasso Sea
MPINLKGSMVAIVTPMHSDGQLDMSAFNRLVEWHYSEGTSAIVVVGTTGESATLSTQEHCDLVSSCVEAAKKRIPIIAGTGSNSTEEALYFTSSAKECGADACL

SEQ ID NO: 152184 - protein, 180 aa, Unknown
  Bacterial polypetide isolated from the Sargasso Sea
MVAHFNAIADASDLPVILYNVPGRTVADMLPETVAELATHKNIVGLKDATGDIARLKATQPLVPEDFVILSGDDGTSCEFMCEGGHGVISVTANIVPKAIAQMCETALDKEFDKCRDIDASIKLLHDELFIEPNPVMPKWALYKMGMMESAVMRLPMVLPELSSQKRIEELLKKYALISG

SEQ ID NO: 152185 - protein, 210 aa, Unknown
  Bacterial polypetide isolated from the Sargasso Sea
MQNGAVQPSPITIEVVGADLEYVVREMRSTVLRMAYSPILTETHDFFCGITNAIGEIVAINVDVPFHMFACKDAVNAVTEAYGDDIHPGDQFWMNDPWQVGSHLNDTALITPFFVDGEIRMWVSAGAHYGDIGGTVPGSASGECTEIFHEGIRVPAVRCRRGDEINEEFLRILLANVRQPFESRGVFLAQSNTTLLAQKRMTKLYERYGA

SEQ ID NO: 152186 - protein, 186 aa, Unknown
  Bacterial polypetide isolated from the Sargasso Sea
PTQEGLYQHYKKINDNVGLPIIIYNIPSRSVIDMSVNTMSRLYELKNIIGVKDATGDLKRVDQQLKSMGKDFLQLTGEDGNALEFNKRGGKGCISVTANVAAKLCSDFQSASLSHNDDEKQAKAKEIDLALAPLHKALFIESNPSPVKYAASLLKLSSEDVRLPLVKVKEETKILIKEALKVAKLL

SEQ ID NO: 152187 - protein, 92 aa, Unknown
  Bacterial polypetide isolated from the Sargasso Sea
MFFGSIPAVITPFKDYEVDYNSLNNIVNHLIDNGSNGLVPCGTTGESPTLSHEEHKKIIEETIRISDKRVPIIAGTGSNNTAEAIDYTKHAE

SEQ ID NO: 152188 - protein, 72 aa, Unknown
  Bacterial polypetide isolated from the Sargasso Sea
SGADGALVVVPYYNKPPQEGLYKHFSSIANSAKDLPLMLYNIPGRTGCNLLPDTVKKLMDFSNILSIKAASR

SEQ ID NO: 152189 - protein, 52 aa, Unknown
  Bacterial polypetide isolated from the Sargasso Sea
MFKGSNVALITPFKDNKLDVEAYIKIIHFHLKSGTNGLVPAGTTGESPTIKS

SEQ ID NO: 152190 - protein, 222 aa, Unknown
  Bacterial polypetide isolated from the Sargasso Sea
MVEFGKLITAAITPFDKNGVINTDTLWRLCRKLIHDKSESLVLTGTTAESPNLTKEDREIIYSTAKDSVGDKAKLIAGTGTYSTKESIEYTKLAEDLGMDGIMIVTPYYSKPSQYGILKHFEAISNTTNLPIMAYNIPGRTGTLIELETLEKLVNDISIHSIKDAVGDIKFSKDQIDLIGDKVIIYSGDDALTFDFVKNGAVGVVSVASHVVGNEISQMISY

SEQ ID NO: 152191 - protein, 298 aa, Unknown
  Bacterial polypetide isolated from the Sargasso Sea
MQLNKIRGSIPPIITPFVNGEVDYKTYASLIEHQIKNGSHGILVNGTTAEPSTLTLDERNKLINIAVEVANGKIPVIAGTGSQSIIETKILTNHAVKAGVDSLLIVTPYYIKPPQRGLIEYYLELTEKIDIPWMIYHIPGRTAVNVTLETMKILSDKSANFVGMKHAVNDLGFVTECLSAFGSDFKIFVGLEELSFPMLSIGACGLMNAVGNLRPNILSEMCEAVWNKNNERGLELHHQLLEINQAVFYDTNPIPIKYMMKKLGIMKNNEHRLPMMSATVELEKRLDIVLRNSGLLED

SEQ ID NO: 152192 - protein, 249 aa, Unknown
  Bacterial polypetide isolated from the Sargasso Sea
MVEFGKLITAAITPFDKNGVINTDTLWRLCRKLIHDKSESLVLTGTTAESPNLTKEDREIIYSTAKDSVGDKAKLIAGTGTYSTNESIEYTKLAEDLGMDGIMIVTPYYSKPSQYGILKHFEAISNTTNLPIMAYNIPGRTGTLIELDTLEKLVNDISIHSIKDAVGDIKFSKDQIDLIGEKVKIYSGDDALTFDFVKNGAVGVVSVASHVVGNEISQMISHIQSGDINKAEEINTSLQEFFSLILKNL

SEQ ID NO: 152193 - protein, 161 aa, Unknown
  Bacterial polypetide isolated from the Sargasso Sea
NIPGRSVIDMSVDTMARLYELKNIVGVKDATGDLDRVNQTLEKMGKDFIQLTGNDDNAFEFNKRGGVGTISVTANIAPKLCSDFQKFSKSDTDNEMKEAERLDKILQPVHHSMFVESNPSPVKYAAKLLGLCDDNVRLPLVKVTDTTKEIVKKALQSAKLI

SEQ ID NO: 152194 - protein, 76 aa, Unknown
  Bacterial polypetide isolated from the Sargasso Sea
MTSPAALSPTPFGRVVTAMVTPFDASGAVDLPLAGRLARHLVEQGSDGLVVSGTTGESPHLSWQEQLHLLQAVREA

SEQ ID NO: 152195 - protein, 98 aa, Unknown
  Bacterial polypetide isolated from the Sargasso Sea
MQALNGSLVALITPMNLKGEVDFDSLEKLIEWHIANDTNGIVSVGTTGESATLKVDEHLKVIEHTVKCVNGRIPVIAGSGSNSTTQAIETTTESQRIG

SEQ ID NO: 152196 - protein, 70 aa, Unknown
  Bacterial polypetide isolated from the Sargasso Sea
MSSLSSAPFGRVITAMVTPFATDGSLDLPLAARLAKHLVENGSDGLLVCGTTGESPTLSWDEQLALIKTV

SEQ ID NO: 152197 - protein, 65 aa, Unknown
  Bacterial polypetide isolated from the Sargasso Sea
MFKGSNVALITPFKNNQLDVDCYIKLIHFHLKNGTNGLVPAGTTGESPTLSHKEHEQVIELCIKE

SEQ ID NO: 152198 - protein, 106 aa, Unknown
  Bacterial polypetide isolated from the Sargasso Sea
MIPDKTECNNPLFGKILTAMVTPFTENGDVDYELAIKLSNYLFENGSDGIVLCGTTGESPTLSWTEQHDLFIAVKGSLDSSCKVIVGTGSNCTSEAVEATKKAYDS

SEQ ID NO: 152199 - protein, 293 aa, Unknown
  Bacterial polypetide isolated from the Sargasso Sea
MTAIKTPYKSGGEIDLDCYDELVTEQMRNGVEGLIVCGTTGEGHLMDWEEHLMLIAHSVNSFGDELVIVGNTGSNNTREALKATRYGFAFGMDASLQINPYYGKTSEKGLREHFNRVLDLGPAIIYNVSSRTGQDLQPELIESLAEHSNLVGVKECSGNERMGYYESKGIACWSGNDDQCFEGRHRNQSHGVISVIANLLPGLMRKLMDEDNSKLNQRLQPLMAWLFHVPSPNALNTAMAMTGAVPPVFRLPYAPLDSNARQEGFQLLNAFSDEERVGNTLKLMDGSDFELSC

SEQ ID NO: 152200 - protein, 248 aa, Unknown
  Bacterial polypetide isolated from the Sargasso Sea
SPTLNNDEHKRVIEIAVKESKGKIPVIAGSGSNSTEEAVNLSKHAEKAGADALLIVTPYYNKPTQEGLYQHYKLINDNVGIPIIIYNIPPRSVIDMSVDTMARLFELKNIAGVKDATADLERVDKQMKKMGPEFIQLSGEDATALEFNMRGGTGCISVTANVAAKLCSDFQDASLAKNNNNLLSKAKEINEKLMPLHKALFIESNPSPVKYAASLLNLSSEEVRLPLVKLTENTKKEVQKALKIANLL

SEQ ID NO: 152201 - protein, 293 aa, Unknown
  Bacterial polypetide isolated from the Sargasso Sea
MTAIKTPYKSGGEIDLDCYDELVTEQMRNGVEGLIVCGTTGEGHLMDWEEHLMLIAHSVNRFGDELVIVGNTGSNNTREALKATRYGFAFGMDASLQINPYYGKTSEKGLREHFNRVLDLGPAIIYNVSSRTGQDLQPELIESLAEHSNLVGVKECSGNERMSYYESKGIACWSGNDDQCFEGRHRNQSHGVISVIANLIPGLMRKLMDADNSELNQRLQPLMAWLFHVPSPNALNTAMAMTGAAPPVFRLPYAPLDSNARQEGFQLLNAFSDEERVGNTLKLMDDSDFELSC

SEQ ID NO: 152202 - protein, 101 aa, Unknown
  Bacterial polypetide isolated from the Sargasso Sea
MFKGSNVALITPFKNDKLDDETYIKLIHFHIENGTNGLVPAGTTGESPTLSHDEHERVIDLCVKEGNGKLPVFAGTGSNSTEEAISLTTHAEKMGADGALI

SEQ ID NO: 152203 - protein, 192 aa, Unknown
  Bacterial polypetide isolated from the Sargasso Sea
MHVTPYYNKPTQEGMYRHFMAIADAVDLPIIIYNIPPRSIIDMSVDTMKRLSEHTNIVGVKDATQDLVRPLATRLEIGADFCQLSGEDATIVPYLSQGGHGCISVTCNVAPGPLSKMHKAWQRGDLDTVREINDRLLPLHDALFCETSPGPVKYAAHLLGLCSPNARLPICEIAEDSKTKVAAAMRHAGLIN

SEQ ID NO: 152204 - protein, 199 aa, Unknown
  Bacterial polypetide isolated from the Sargasso Sea
MSFTFWALFKALFHFFCLIKSIVSFALSKSFLLRTFELFTSFDETLYVIGFFLGYTNVDDTCVFTSSLISFFISLFLTASFFCSTTAGLLSSFFSNNGFGAGRFLLILSWICFSDFLKIDGFFCGNKKPVSEYTILTFKNDNKNTRLINLLSISLRISILYCFMLKGSIVALITPFKDDNLDENTYKSLINYHLNNGTN

SEQ ID NO: 152205 - protein, 47 aa, Unknown
  Bacterial polypetide isolated from the Sargasso Sea
MFKGSIVALITPFKNNKLDEENYREILQHHLKNGTNGVVPAGTTGES

SEQ ID NO: 152206 - protein, 196 aa, Unknown
  Bacterial polypetide isolated from the Sargasso Sea
GANYGLVVTPYYNKPNQLGLINHFKKIAKVSPLKQLIYNIPGRSIVDLSFDSFKELNKVSNIVGIKDASNDMSRPLIMRTFMKKDFNYLSGEDGTIAGFLAQGGHGCISVTANVAPKLTSMLHYYWKKKNYKEFDKVNLKLAPLSKILFAEPNPTPAKYALSLMGKCKANIREPLYELSSDTKKQVRKIIKDLNFI

SEQ ID NO: 152207 - protein, 202 aa, Unknown
  Bacterial polypetide isolated from the Sargasso Sea
MITGSIVALVTPMHPDGAIDWSAYARLIEYHIESDTGGLGVVGTTGESPTLTVPEHCEVIRFAVEQAGGRIPVVAGTGGNSTHEAIELTVSAAEAGADYSLSVTPYYNKPTQQGLFEHFQAVARSVNLPIILYNVPGRTGCDLLNDTVVKLSQIDNVVAIKDATGDVARGAALIEAVPDGFAVFSGDDATALELMRRGGQGN

SEQ ID NO: 152208 - protein, 49 aa, Unknown
  Bacterial polypetide isolated from the Sargasso Sea
MFKGSLPAMVTPFDNGEVDVKGLKNLVNWHIEQGSHGLVPVGTTGESPT

SEQ ID NO: 152209 - protein, 273 aa, Unknown
  Bacterial polypetide isolated from the Sargasso Sea
VDYNSFEKIIEYHILNGSNGLVPCGTTGESPTLSHDEHKKIIEETIRICDKRIPIIAGTGSNNTIEALEYTKHAEKAGADAALIVTPYYNKPTQSGLYEHYKIISENTSIPIIIYNIPGRSIVDMSISTMVELSKLKNIIGVKDATNDLFRPLLTKNIMNSDFCFLSGEDGTALAFLAQGGHGCISVTANIAPKLCSEMHNAWRKGDINLAQEINIKLAKLHNSLFLESSPGPVKYAASLIGLCSSETRLPLVEISQETKNIVKNCLIENQLI

SEQ ID NO: 152210 - protein, 113 aa, Unknown
  Bacterial polypetide isolated from the Sargasso Sea
MFKGSNVALVTPFKGDSLDEETYIKIINFHLENGTNGLVPAGTTGESPTLSHREHEKVIELCIQEAKGKIPVIAGTGSNSTTEAISLTEHAEKAGADGALIVTPYYNKPTQEG

SEQ ID NO: 152211 - protein, 246 aa, Unknown
  Bacterial polypetide isolated from the Sargasso Sea
VGTTGESATLNKEEREEIFKFAKGSTDIPLMAGIGSSSTLEACELADIALKNNINECLAVTPYYNKPSQKGLSLHYQELCKTGANIMLYNVPGRTGVDLLPKTVLELAEIENITGIKEAVNTEDRFRDLLEVKAIRPEFLLLSGDDPTFVSFMREGADGIISVAANVIPKQIKELSDLCFSKKFEEAKTINERYLNFYELLFTEASPSPCKFLLEKMSLLENNLRLPLHPLSEEFREKIYEAFNKI

SEQ ID NO: 152212 - protein, 251 aa, Unknown
  Bacterial polypetide isolated from the Sargasso Sea
TTGESATLNFNDHVKVLEKTISYIDNKIVAIAGTGANSTDEAIELNKAASSIGYEFALSVTPYYNKPTQMGLEAHYKKIADSSEIKNILYNVPSRTACDLKPDTVNKLINHKNIVGIKEAVDDPSRYKALIEIANNSSEPFYVLSGDDPTFFDFMKSGGHGVISVAANVIPAQVAEIAVSCLNGNFEDAKEINQRYKNLFELLFIESNPIPVKWMLKKMSKIDGGIRLPLTELQEKNHASIEDEMLKFKLL

SEQ ID NO: 152213 - protein, 63 aa, Unknown
  Bacterial polypetide isolated from the Sargasso Sea
MFKGSIVALITPFKDNVLDEDKYRFLIGHHIKNGTKGVVPAGTTGESPTLNHDEHKKINEIAV

SEQ ID NO: 152214 - protein, 78 aa, Unknown
  Bacterial polypetide isolated from the Sargasso Sea
MFFGSIPAVITPFKNKQVDYKSLDKIVNHLILNGSNGLVPCGTTGESPTLSHEEHKSIIEQTIKISDKRVPVIAGTGS

SEQ ID NO: 152215 - protein, 286 aa, Unknown
  Bacterial polypetide isolated from the Sargasso Sea
SYTALLTPFANGKVDYDSYKKLIEHQIINGTHGLVPVGTTGESPTLTHEEHKKVIEVCIEQVNGRVPIIAGAGSNSTVEAIDFVKHACSAGADGLLVVTPYYNKPTQAGLKAHYLALAEKSSKPIIIYDIPGRSVIGMTDETMLELSKHDLILGVKDATADLGRPTRLLNLIGEDFIQLSGEDGTALPYLAAGGHGCISVTANIAPNLLSRMHNAWKQGDIENCLQINKQLMPLHDALFCETSPGPLKYAASLLGLCSDETRLPIVEIYPESKEKVQLALQIAELI

SEQ ID NO: 152216 - protein, 77 aa, Unknown
  Bacterial polypetide isolated from the Sargasso Sea
MFKGSNVALITPFKNNKLDVESYIKLVHFHLKNGTNGLVPAGTTGESPTLNHEEHEKVIEICIKESNGKIPVIAGTG

SEQ ID NO: 152217 - protein, 65 aa, Unknown
  Bacterial polypetide isolated from the Sargasso Sea
LVPAGTTGESPTLNHDEHQKVIEICIKESNGKLPVIAGTGSNSTEEAISLTKHAEKVGADGALVV

SEQ ID NO: 152218 - protein, 218 aa, Unknown
  Bacterial polypetide isolated from the Sargasso Sea
MITDKTECNNPLFGKILTAMVTPFTENGDVDYELAIKLSNYLFENGSDGIVLCGTTGESPTLSWTEQHDLFIAVKGSLDSNCKVIVGTGSNSTSEAVEATKKAYDSGADGALVVVPYYNKPPQEGLYKHFSSVANSAKDLPLMLYNIPGRTGCNLLPDTVKKLMDFSNILSIKAASGRIEEVTELRAICGSELSVYSGDDSLLLPMVICRCCRSSKCA

SEQ ID NO: 152219 - protein, 150 aa, Unknown
  Bacterial polypetide isolated from the Sargasso Sea
SISPSIVSKLMDCSNVVSFKAASGTTDEVTQLRNYCGSDLAIYSGDDALVLPMLSVGAVGVVSVASHLVGPDLKKIIERFLEGKYAEALYLHEILQPLFKSLFSTTNPIPVKAALQLIGWSVGPPRSPLVSLNSEMKEELMKILSSMGLI

SEQ ID NO: 152220 - protein, 213 aa, Unknown
  Bacterial polypetide isolated from the Sargasso Sea
NSTSEAIEATKEAANSGADGALVVFPYYNKPPQEGLEVHFRAIANAAPQLPLMLYNIPGRTGCSISPSIVSKLMDCSNVVSFKAASGSTEEVTQLRNYCGSDLAIYSGDDALLLPMLAVGAVGVVSVASHLVGPNLKKIIESFLEGKYTDSLYLHETLQPLFKSLFSTTNPIPVKAALQLIGWSVGPPRSPLVSLNREMEEELLKILSSLRLI

SEQ ID NO: 152221 - protein, 184 aa, Unknown
  Bacterial polypetide isolated from the Sargasso Sea
QEGIYQHFKAINDSCDLPIVIYNIPGRSVIDIDIDTMIKLSKLKNIVGVKDSSNDLTRPLLTSQSISKDFCQISGEDATVVPFLSQGGHGCISVTANIAPKLCSELHNAWQKNNLKKVKLLNSYLFPLHNALFLETSPGPVKYAASLLRICSDELRLPLVKISSINKKKIKNTLSKLKLKPIKK

SEQ ID NO: 152222 - protein, 283 aa, Unknown
  Bacterial polypetide isolated from the Sargasso Sea
MSDFGKLLTAVITPFDRNGVLNTDTLWRLCKKLVHEKSDGLVLSGTTGESPNLTKEDRKIIYSTAKDSVGDKAKIIAGTGTYSTKESIEYTKMANDIGVDGIMIVTPYYSKPSQDGILKHFEEISKNTDLPIMAYNIPGRTATLIEIDTLEKLVDDIGIHSIKDAVGDLEFSKNELETLKGKVDIYSGNDGETIEFMKMGGKGVVSVASHIVGNEIYDLINHVLNDEIESAEHLQNQLLPLFDLLFEEPSPGPVKYLLTQTWEDVGLPLMPITDISSELANKL

SEQ ID NO: 152223 - protein, 297 aa, Unknown
  Bacterial polypetide isolated from the Sargasso Sea
SASLMTAIKTPTGPDGEVDLETFDSLVEAQIKSGVEGLIVCGTTGEGHLMDWEEHLMLIAHCVNQFGDQLAIVGNTGSNNTREALKGTKYGFAFGMDAALQINPYYGKTSESGLKEHFARVLDLGPSIIYNVPSRTGQDLQPELIEKLAEHPNLIGMKECAGNERMGYYESKGIACWSGNDDQCFEGRHRHGSHGVISVISNLLPGLMRRLIDNDDPDLNERLLPLMAWLFHVPSPNALNTVLSMTGAIQPVFRLPYSPVDLTARQEIFEMLQGFEAEDWVGSGLELMDDRQFVLTA

SEQ ID NO: 152224 - protein, 134 aa, Unknown
  Bacterial polypetide isolated from the Sargasso Sea
MLKGSIPAIITPFSNGDVDYDSFEKILNWQIKSGISGVTVCGTTGESPTLSHDEHMKLVEFAIKVASKKIPVIAGTGSNSTKEAIEFTKHAYKAGANYGLVVTPYYNKPNQLGLINHFKKIAKVSPLKQLYYNI

SEQ ID NO: 152225 - protein, 131 aa, Unknown
  Bacterial polypetide isolated from the Sargasso Sea
MLVFVVVRHYHRQPENFGALSMFSGSIVALITPMDPVGAVDYDSLKRLVDFHLSNQTDALVIMGTTGESVTLSFAEQQQVLKAVLAQVDGRIPVIAGNGSNSTADAVEKTKTLSALPVAGFLTVTPYYNKP

SEQ ID NO: 152226 - protein, 189 aa, Unknown
  Bacterial polypetide isolated from the Sargasso Sea
MFFGSLPAIITPFKNKEVDYSSFEKIVNHLIENGSNGLVPCGTTGESPTLSHEEHKKIINETIKINDHRLPIIAGTGSNNTEEAIDYTKYAESAGANAALIVTPYYNKPTQKGLYAHFKIIADSVKLPIIIYNIPGRSVIDMSIETMIELSKIENVIGVKDATNDLFRPLLTAAKMKNDFCYLSGEDEQ

SEQ ID NO: 152227 - protein, 167 aa, Unknown
  Bacterial polypetide isolated from the Sargasso Sea
MSDLGRLITAMITPFDDKGEIDYEEAGHLATSLINSGSDGVIVSGTTGESPALSKEEKIKLLSAVKEAVGNKGSVIAGTSNNNTQESIEISQAAQQAGADGLLLTVPYYNKPPQQGLYEHFKLIAESVDVPCMLYNVPSRTSTNMTDETTVRLSHIENIVGVKEASS

SEQ ID NO: 152228 - protein, 198 aa, Unknown
  Bacterial polypetide isolated from the Sargasso Sea
ADAALVVTPYYNKPTQEGLYQHYKAINDNCGIPIIIYNIPSRSVIDMSVETMAKLFELKNIIGVKDATGDLNRVDQQKSKMGEEFIQLTGNDDNAFEFNKRGGVGSISVTANVAPKLCSDFQKFSKSSNANEIKEAERLDEILQPLHKSLFIESNPSPVKYVAKLMGLCDDVVRLPLVNCTKETKKILEEVSKKAKLI

SEQ ID NO: 152229 - protein, 223 aa, Unknown
  Bacterial polypetide isolated from the Sargasso Sea
MFFGSIPAVITPFKNRDVDYSSLSNINEFLINEGSNGLVPCGTTGESPTLTHDEHKKIIEETIRLADKRVPIIAGTGSNNTIEAIEYTQHAEKVGADAALVVTPYYNKPTQKGLYEHYKNIAENTSLPIIIYNIPGRSVVDMTIETMIECSKIKNIIGVKDATNDLFRPLLTQRKMNGEFCYLSGEDGTALAFLAQGGNGCISVSANVAPKICSEMHKAWRSG

SEQ ID NO: 152230 - protein, 171 aa, Unknown
  Bacterial polypetide isolated from the Sargasso Sea
IALNSKLPIVLYNVPSRTGCNLSAETVFKLSANKNIIGIKEANPDLEQLKKIIKLCPSSFQVVSGDDLSVHKAINFGAVGSISVIGNAFPKQFKNLINLSISSDQSLSEKAFYKLKRIINLIFEEGNPTGIKCLLNNLGFYENFLRMPLTPASEELKIKIIKEIKYLSYQK

SEQ ID NO: 152231 - protein, 179 aa, Unknown
  Bacterial polypetide isolated from the Sargasso Sea
LTSHAEKIGADGALIVTPYYNKPTQEGLFQHYKSINDKCGIPIIIYNIPGRSVIDMSVDTMARLYELKNIIGVKDATGELNRVDQTLKKMGKDFLQLTGNDDNALEFNRRGGVGAISVTANIAPKLCSKFQKLSIENEEKSLSEAKTIDKILQPVHHSMFVESNPSPVKYAAKLLNLCE

SEQ ID NO: 152232 - protein, 168 aa, Unknown
  Bacterial polypetide isolated from the Sargasso Sea
DKCELPIVIYNIPGRSSIDMSPETMGRLAKLPRVIGVKDATGDLARVCAQRITCGTDFLQISGEDATAHGFNAQGGVGCISVTANVAPKLSAQLQAATLAGDYDKALELQDKLMPLHHAIFTEPGLVGVKYAMSLLGLCSDEVRLPLIPLSNETKKLIKSAIQTAGLT

SEQ ID NO: 152233 - protein, 146 aa, Unknown
  Bacterial polypetide isolated from the Sargasso Sea
MFKGSIVALVTPFKGNEIDEFALRKLVDWHISEGTDGIVPVGTTGESPTLNHDEHERVVEIVIDQSNKRVPIIAGTGSNSTVEAINLLKHAESAGADAALVVTPYYNKPTPEGLYAHYEALDSASSGIPIIIYNIPSRSVIDINVD

SEQ ID NO: 152234 - protein, 187 aa, Unknown
  Bacterial polypetide isolated from the Sargasso Sea
FLKVSNSNIIKKFKVNPYINEKNQSIFAGIGVAVVTPFTENNEIDKEAIYKLSDHLFFNGISYVVVQGTTGESSVLNDQEKNLVNSLFTDAFKGRLPLILGMSSNNTRYICDLISNYDFSGFEAIMSVCPYYNKPSQDGIFQHFSKISDLSPLPLILYNVPGRTSCDISNNTIIKLSEYSKNIIGIK

SEQ ID NO: 152235 - protein, 235 aa, Unknown
  Bacterial polypetide isolated from the Sargasso Sea
GESPTLSHEEHQRVIELCVKESNGKLPVFAGTGSNSTEEAISLTSHAEKMGANGALIVTPYYNKPTQEGLFQHYKSINDKCGIPIIIYNIPGRSVIDMSVDTMARLYELKNIIGVKDATGDLNRVNQTLNKMGKDFIQLTGNDDNALEFNKRGGVGAISVTANIAPKLCSEFQKFSILNDDKSIKEAKKLNDILQPIHHSMFIESNPSPVKYAAKLLNLCDDAVRLPLVKVTKLT

SEQ ID NO: 152236 - protein, 175 aa, Unknown
  Bacterial polypetide isolated from the Sargasso Sea
MKGSVVAIVTPMDNKGSIDFDSFSKLIKFHEDSETDGIVLVGTTGESATLNKEEREEIFKFAKGSTDIPLMAGIGSSSTLEACELADVALKNNINECLAVTPYYNKPSQKGLSLHYQELCKTGANIMLYNVPGRTGVDLLPRTVLELAEIENITGIKEAVNTEDRFRDLLEVKAI

SEQ ID NO: 152237 - protein, 143 aa, Unknown
  Bacterial polypetide isolated from the Sargasso Sea
MNKLRGTGIAMVTPFKGDKSVDFEALTTLTNHLIEGGVDYLVVMGTTAESPTLSKVEKIKVLDHVLQINDGRLPIVYGMGGNSTQALVDEFNHADLEGVDAILSASPYYNKPSQIGIIEHYTKIADASPRPVILYNVPGRTAS

SEQ ID NO: 152238 - protein, 84 aa, Unknown
  Bacterial polypetide isolated from the Sargasso Sea
MFKGSNVALVTPFKGDSLDVETYIKIINFHLENGTNGLVPAGTTGESPTLSHREHEKVIELCIQEVKGKIPVIAGTGSNSTAEA

SEQ ID NO: 152239 - protein, 223 aa, Unknown
  Bacterial polypetide isolated from the Sargasso Sea
VIAGTGSNSTSEAIELSKHAEKTGANGLLIVTPYYNKPTQEGLYQHYKLINDNVGIPIIIYNIPSRSVIDMSVDTMARLFELKNIVGVKDATADLNRVDEQLKKMGKEFIQLSGEDGTALEFNLRGGVGCISVTANVAAKLCSEFQDASLSKNNSNLLSKAKLINEKLMPLHTALFIESNPSPVKYAASLLNLSSDEVRLPLVKITEKTKKEVEKALKIAKLL

SEQ ID NO: 152240 - protein, 237 aa, Unknown
  Bacterial polypetide isolated from the Sargasso Sea
MSPATTDIVFSGSCTALVTPFDSGQLDKNAFCKLVEWQIESGTDALIPVGTTGESPTLSHQEHDVVVELCIKQAAGRVPVIAGAGSNSTAEAVRLARHAGKVGADAVLIVSPYYNKPTQDGLYQHFSAVAEAVSVPVIVYDIPGRSIVQVAEETLVRLAADYPNISGIKDATADVARPTRIRNLLGANFAQLSGEDATALPYLAAGGHGCISVTANVAPKLLSNMHKAGRLVILPRR

SEQ ID NO: 152241 - protein, 220 aa, Unknown
  Bacterial polypetide isolated from the Sargasso Sea
SCKVIVGTGSNCTSEAVEATKKAYDSGADGALVVVPYYNKPPQEGLYKHFSSIAKSAKDLPLMLYNIPGRTGCNLLPETVKKLMDFSNILSIKAASGRIEEVTELRAICGSKLSVYSGDDSLLLPMLSLGAVGVVSVASHLVGLQLKEMIHSFQSGKVSKALAIHEKLQPLFKALFMTTNPIPIKAALELSGWDVGNPRSPLSPLTNDMKKQLSFILNSL

SEQ ID NO: 152242 - protein, 47 aa, Unknown
  Bacterial polypetide isolated from the Sargasso Sea
MLKGSIVALITPFDGDNLCEESYIKLINYHLENGTNGVVPGGTTGES

SEQ ID NO: 152243 - protein, 71 aa, Unknown
  Bacterial polypetide isolated from the Sargasso Sea
MFKGSHTALITPFDGKSIDEKSFRSLIDFQISEGIHGLVPVGTTGESPTLSHEEHKLAVEICVKKQQNVYQ

SEQ ID NO: 152244 - protein, 229 aa, Unknown
  Bacterial polypetide isolated from the Sargasso Sea
MLGSLRKENPQFIGSMTALITPFENGRLDVNSFKKIVNHQIKNGTDGLIPVGTTGESPTLSHDEHQKVVDVCIQESSGRVPIIAGAGSNSTKEASKLASHAGKAGADAVLVVTPYYNKPTQSGLYSHFMSVADAAKIPLIVYDIPGRSIVPVHDSTLVKLCENHELISGIKDATADISRPPRLLRLIGSGFSQLSGEDATALPYLAAGGHGCISVSSNIAPKLLAEMHD

SEQ ID NO: 152245 - protein, 132 aa, Unknown
  Bacterial polypetide isolated from the Sargasso Sea
MFKGSNVALVTPFKGDSLDEETYIKIINFHLENGTNGLVPAGTTGESPTLSHGEHEKVIELCIKEAKGKIPVIAGTGSNSTVEAISLTKHAEKAGADGALIVTPYYNKPTQEGLYAHYKAINDSCGIPIINL

SEQ ID NO: 152246 - protein, 293 aa, Unknown
  Bacterial polypetide isolated from the Sargasso Sea
MVEFGRLLTAMITPFNADGTINFPQARKLAQSLVSSGTEGLVIGGTTGEAPSMSDDEKIRLFAEVKEAVGDSAAVIAGTTDNNHNKSIELSKEAEKVGADALLLTVPAYNKPTQEGLYRNFKAIAEATSLPGILYNVPSRTSLNMSVETTLRLAEIDNIIGVKEASSDFTQITTIIDKAPDGFNVWSGNDDETFPIMCVGGYGIVSVASHILGNQIKTMIGYILDGNLESAASEHKRLLPIFKALFWVTNPIPVKYAVNRHGFNAGIHRLPLCEPDQSFIEDFNPVMDSYSID

SEQ ID NO: 152247 - protein, 203 aa, Unknown
  Bacterial polypetide isolated from the Sargasso Sea
AERIGANGALIVTPYYNKPTQEGLYQHYKAINDKCGIPIIIYNIPGRSVIDMSVDTMARLYELKNIIGVKDATGDLDRVNQTVKKLGKDFLQLTGNDDNAFEFNKRGGSGAISVTANIAPKLCSDFQKYTKSSNDNDIEQAERLDEVLQPLHHAMFIESNPSPVKYAAKLLHLCEDDVRLPLVKVTDKTKEIVKKALLLAKLI

SEQ ID NO: 152248 - protein, 104 aa, Unknown
  Bacterial polypetide isolated from the Sargasso Sea
MNYQGSYCALITPFKNGTIDKDSFINIVKWHITQGTKGIVPCGTTGESPTLSHNEHKEIVELAVEAAEKKMQVIAGTGSNSTAEAISLTKHAKDAGADSALIVV

SEQ ID NO: 152249 - protein, 231 aa, Unknown
  Bacterial polypetide isolated from the Sargasso Sea
MTQAATLSPTPFGRVVTAMVTPFDASGAVDLSVAANLARHLVDQGSDGLLVCGTTGESPTLSWDEQLQLLQAVREAVGGNAKVLAGTGSNSTAEAVEATKEAAAAGADGALVVVPYYNKPPQEGLEAHFRAIAEAAPELPLMLYNIPGRTGCSIAPATVARLMDCPNVVSFKAASGTTEEVTALRLACGPQLAIYSGDDGLTLPMLAVGAVGVVSVGSHVAGPEIRAMIEA

SEQ ID NO: 152250 - protein, 89 aa, Unknown
  Bacterial polypetide isolated from the Sargasso Sea
MFKGSNVALVTPFKNNNLDEETYIKIINFHLENGTNGLVPAGTTGESPTLSHKEHEKVIELCIKEAKGKIPVIAGTGSNSTSEAISLTK

SEQ ID NO: 152251 - protein, 139 aa, Unknown
  Bacterial polypetide isolated from the Sargasso Sea
MNKFKGAGVALITPFKSDFSVDFIALEKLVEHQINNGTNYLVVQGTTGESATLSDKEKTAVLDFVVEVNSGRLPVVLGVGGNNTQAVGKQLKSWEKSKVDGFLSVSPYYNKPSQKGLVAHYKHLSSCTDLPIILYNVPG

SEQ ID NO: 152252 - protein, 216 aa, Unknown
  Bacterial polypetide isolated from the Sargasso Sea
RHWFNSTAEAIELSKHAENSGADGLLIVTPYYNKPTQEGLFQHYKSINDNVGIPIIIYNIPSRSVIDMSVDTMARLYELKNIKGVKDATGDLKRVTMQLNKMGKDFIQLTGEDDNAIEFNKRGGVGCISVTANVATKLCADFHKASLSNDNETALKINKLLSPLHKALFIESNPSPVKYAASLLKLAPPEVRLPLVQVMESTKKEVERALKFAKLL

SEQ ID NO: 152253 - protein, 107 aa, Unknown
  Bacterial polypetide isolated from the Sargasso Sea
MFKGSLVALITPFLDGKVDENAFRKLVNWQIDEGTDGLIPVGTTGESPTLSHEEHKQVVELCVDEANGRVPVIAGAGSNSTAEAVEFTAHAKEAGAAAALHVTPYYN

SEQ ID NO: 152254 - protein, 80 aa, Unknown
  Bacterial polypetide isolated from the Sargasso Sea
MFKGSIPAVITPFDGDKVDYVSFSKVLNHLIDNGSHGLVPCGTTGESPTLSHDEHKKIIEETIIIADNRIPVIAGTGSNN

SEQ ID NO: 152255 - protein, 100 aa, Unknown
  Bacterial polypetide isolated from the Sargasso Sea
MFKGSNVALITPFKNNLLDEEAYVKLIHFHIENGTSGLVPAGTTGESPTLSHDEHQKVIDLCIKESNGKIPVIAGTGSNSTEEAISLTSHAEKAGANGAL

SEQ ID NO: 152256 - protein, 242 aa, Unknown
  Bacterial polypetide isolated from the Sargasso Sea
MLKGSIVALATPFLGEKVDEKAFQELVDWQINQGTNGLLPVGTTGESPTLSHEEHKRVVEMCIDISSKRVPVLAGAGSNSTDEAIALAKHAKGAGADAILVVTPYYNKPTQGGLFAHFKAIHDQVDIPIVVYNIPGRSVVDINQGTLVKIAELPNVIGIKDATSNISRVSSTRLILGSDFCQLSGEDATALAFMAHGGHGCISVTANVAPKLCSQFYEAWFNNDPVTALSINDKLMPLHISL

SEQ ID NO: 152257 - protein, 181 aa, Unknown
  Bacterial polypetide isolated from the Sargasso Sea
GLYQHYKAINDKCGIPIIIYNIPGRSVIDMSVDTMARLYELKNIVGVKDATGDLDRVNQQLNKMGKDFIQLTGNDDNAFEFNKRGGVGTISVTANIAPKLCSEFQKNSISKNEVDLAKAKELDNILQPVHTAMFVESNPSPVKYAAKLMNLCDDEVRLPLVKVTEETKIIVKKAIETAKLI

SEQ ID NO: 152258 - protein, 205 aa, Unknown
  Bacterial polypetide isolated from the Sargasso Sea
ATNLDGFDAIMSVCPYYNKPSQDGLYNHFLNISQATTKPILMYNVPSRTGVNINNETIINIYKNSDNIVGVKEASGEVNRIKQLKSKLENDFLVISGDDFTMIDAIRNGADGIISVAANVYPKIMVETYNQIISDINNVKTLNDNNFVLNEFINLIFEECNPSGIKYALSKLNLCSSKVRLPLSEISENLKYKIEKFIKKYPPIN

SEQ ID NO: 152259 - protein, 155 aa, Unknown
  Bacterial polypetide isolated from the Sargasso Sea
MFFGSIPAVITPFANNKVDYLSFEKIVDFLISNGSNGLVPCGTTGESPTLSHSEHKKIIEECIRITDKRIPIIAGTGSNNTLEAIEYTNHAEKVGADAVLVVTPYYNKPTQLGLYNHYKSIAENTKLPIIIYNIPGRSVVDMTIETMIELSKIKI

SEQ ID NO: 152260 - protein, 105 aa, Unknown
  Bacterial polypetide isolated from the Sargasso Sea
MFKGSNVALVTPFKNDKLDEECYIKLINFHLENGTNGLVPAGTTGESPTLSHAEHNKVIELCINEAKGKIPVIAGTGSNSTDEAVALTKHAEKAGADGALVVTPY

SEQ ID NO: 152261 - protein, 251 aa, Unknown
  Bacterial polypetide isolated from the Sargasso Sea
SPTLTHDEQIALIEAVANSVDAPVIAGTGSNDTKAAVELTQRAQAVGASGILSVTPYYNRPSQQGLLQHFTIIAECTDLPVMLYDIPIRSGRKIETKTILELAHNLKNIVALKDAAGDPSETASLLSQSPDGFQIYSGDDSLNLALLSIGASGVVGVATHWTGAEHQNLVHAIINGDYEAAKKINQSLQDSFAFESTLDAPNPIPTKVMMNLLGFNVGHGRAPMDTVPEGLLEKAQSIVSATIVGSQMGFS

SEQ ID NO: 152262 - protein, 114 aa, Unknown
  Bacterial polypetide isolated from the Sargasso Sea
MFKGSNVALITPFKNNQLDIDCYIKLIHFHLKNGTNGLVPAGTTGESPTLSHKEHEKVIELCINEVKGKIPIIAGTGSNSTEEAISLTKHAENAGADGALIVTPYYNKPTQEGL

SEQ ID NO: 152263 - protein, 146 aa, Unknown
  Bacterial polypetide isolated from the Sargasso Sea
EAGDLSKYAEKARSDALLVVTPYYNKPTQEGLYQHYKKINDNVGIPIIIYNIPSRSVIDMSVETMTRLYELKNIAGVKDATGDLNRVDQQLKSMGKEFVQLTGNDDNALEFNKRGGVGSISVTANIAAKLCSEFQKSCVNDFKDSD

SEQ ID NO: 152264 - protein, 238 aa, Unknown
  Bacterial polypetide isolated from the Sargasso Sea
ALKNKLPLILGISSNSTTELCDLISKTDTTGFEAIMSVCPYYNKPSQEGIYQHFKNAVDISPLPILLYNVPGRTSSDISDDTIIKLSSYSKKIIGIKEASGITNRIANLRKNTHDEFLVISGDDFTMIDAVRAGADGIISVAANAYPSIMNSTYIQLLYENDKSKPQNISKTKLNSSEFVLNNFFQLIFDEGNPSGIKFALSKLNLCKEKVRLPLTGISNKLKDKILKFLKKYPANDL

SEQ ID NO: 152265 - protein, 247 aa, Unknown
  Bacterial polypetide isolated from the Sargasso Sea
MGESPTLSHEEHKKIVEETIRINDKRVPIIAGTGSNNTLEAIEFTNHAEKAGADAALVVTPYYNKPTQKGLYEHYKSICENSNIPIIIYNIPGRSIIDMTIDTMVELSKLKNIIGVKDATNDLFRPVLTRKNLHKDFCYLSGEDGTALAYLAQGGHGCISVTANIAPKLCSEMHKHWRDGNIKKAQEINLKLSNLHHALFLESSPGPIKYAAFLKGLCELDTRLPLAEISNTTKDAVRKCLKENDLI

SEQ ID NO: 152266 - protein, 141 aa, Unknown
  Bacterial polypetide isolated from the Sargasso Sea
MARFGKVLTAMVTPFGESGDLDLSVAASLANWLIANGNDGLVIAGTTGESPTLTHDEQAELIATVVNAVDAPVIAGAGSNDTSAAIELTQKADQAGASAILSVTPYYNRPSQAGLMDHFRAIAGATELPIVLYDIPARSGR

SEQ ID NO: 152267 - protein, 180 aa, Unknown
  Bacterial polypetide isolated from the Sargasso Sea
QHYKAINDKCGIPIIIYNIPGRSVIDMTVDTMARLFELKNIVGVKDATGDLNRVDETFKKIGNEFIQLTGEDGLAYEYNKRGGVGCISVTANIAPKMCSDMQKFSKSEDKDEQKKAGEIDKKLQPVHKSLFIESNPSPVKYAAKLIGLCDDNVRLPLVTVLDETKAEVKKALISAELINE

SEQ ID NO: 152268 - protein, 92 aa, Unknown
  Bacterial polypetide isolated from the Sargasso Sea
MFFGSIPALITPFDNEKVDYLAFEKIIENCIINGSNGLVPCGTTGESPTLSHSEHKKIIEECIKINDTRVPIIAGTGSNNTEEAIDFTKHAE

SEQ ID NO: 152269 - protein, 239 aa, Unknown
  Bacterial polypetide isolated from the Sargasso Sea
SHNEHKRIIDISVKECKSKIPVVAGTGSNSTTEAVELSKYAEKAGSDALLVVTPYYNKPTQEGLYQHYKKINDNVGIPIIIYNIPSRSVIDMSVETMTKLYELKNIAGVKDATGDLNRVDQQLKAMGKEFIQLTGNDDNALEFNKRGGVGSISVTANIAAKLCSNFQKSCFNEIKEAEKLDKILQPVHTAMFLESNPSPVKYAASLLGMCDPEVRLPLVQVQERTKKKISEALKVAKIL

SEQ ID NO: 152270 - protein, 245 aa, Unknown
  Bacterial polypetide isolated from the Sargasso Sea
MTAIKTPYRPDGEVDLTTFDSLVEAQIKNGVEGLIVCGTTGEGHLMDWEEHLMLIAHCVNKFGDHLTIVGNTGSNNTREALKGTKYGFSFGMDAALQINPYYGKTSEAGLKEHFTRVLDLGPSIIYNVPSRTGQDLQPDLIEKLAEHQNFIGMKECAGNERMGYYESKGIACWSGNDDQCFEGRHRHGSHGVISVISNLFPGLMRRLMDNDDPNLNERLQPLMAWLFHVPSPNALNTVMSMTGAI

SEQ ID NO: 152271 - protein, 213 aa, Unknown
  Bacterial polypetide isolated from the Sargasso Sea
EEAVSLTKHAEKAGADGALVVTPYYNKPTQEGLYQHYKAINDNTSLPIIIYNIPGRCVIDMSVDTMAKLFELKNIAGVKDATGDLNRLDQTIKKLGSDFIQLTGEDGLALEFNKRGGVGIISVTANIAPKQCSDMQKFSKSMNSDDIKKAEHIDKILQPLHKSLFIESNPAPVKYAAKILGLCDDEIRLPLVNIQKKTEEEVNKALSLAKLVD

SEQ ID NO: 152272 - protein, 205 aa, Unknown
  Bacterial polypetide isolated from the Sargasso Sea
YAEKIGANAALVVTPYYNKPTQEGLYQHFKSINDNCSIPIIIYNIPPRSVVDMSVDTMSRLFELKNIIGVKDATGDLNRVDLQRKKMGPDFIQLSGEDGTALEFNLRGGVGCISVTANVAPKLCSEFQEASISKNNSNLLAKAKQINEKLMPLHKSLFIESSPSPVKYAASLLNLSSDEVRLPLVKVTDETKKVVKSAMSHANLI

SEQ ID NO: 152273 - protein, 143 aa, Unknown
  Bacterial polypetide isolated from the Sargasso Sea
SNHQNIIGIKEAVNNQKRINELVKISKESQEDFLIFSGDDESFFNLISSGGHGVISVAANVIPKSISNICKLIMEERIEEANELNKKYQILYDLLFVESNPIPVKWMLSKMGFIKNSLRLPLINLDKKFEENIMSEMIKLKLL

SEQ ID NO: 152274 - protein, 102 aa, Unknown
  Bacterial polypetide isolated from the Sargasso Sea
MKGSLRQGSPKFNGSMTALITPFANGELDIKSFKKIVNFQIDNGTDGLIPVGTTGESPTLTHYEHEKIVEECIKVADNRVPVIAGAGSNSTQEACKLAKHAA

SEQ ID NO: 152275 - protein, 195 aa, Unknown
  Bacterial polypetide isolated from the Sargasso Sea
ALIVTPYYNKPTQEGLYQHYKAINDKCGIPIIIYNIPGRSVIDMSVDTMAKLYELKNIIGVKDATGDLNRVDETLKKMGKDFMQLTGNDDNALEFNKRGGVGAISVTANIAPKLCSEFQKFSVMNDEKSKSESEKLNEILQPVHHSMFVESNPSPVKYAAKLLNLCEDDVRLPLVKVTDSTKEIVKKALKSANLI

SEQ ID NO: 152276 - protein, 188 aa, Unknown
  Bacterial polypetide isolated from the Sargasso Sea
YYNKPTQKGLINHYTKLANEVDIPQILYNVPSRTACDILPETVEVLSAHNNIIGIKEAVDTEERIDDLIAISSNNQNFQLFSGDDPSFIKMIQKGGDGVISVAANVVPSKISEICKLIEDKKYDEAITINDTLTNLYDLLFIESNPIPVKWMLFKMNLIKNSIRLPLEELDEIHQENIINEMLKLKII

SEQ ID NO: 152277 - protein, 272 aa, Unknown
  Bacterial polypetide isolated from the Sargasso Sea
MNGSLRQGSPQFNGSMTALITPFENGELDIKSFEKIVNFQIDNGTNGLIPVGTTGESPTLSHYEHEKIVEECIKVADKRVPIIAGAGSNSTQEACKLAKHAAKAGAQAVLVVTPYYNKPTQDGLYSHFMAVADSAKIPIIVYDIPGRSIIPVHDKTLVKLCENNELIAGIKDATADISRPPRLIRLIGSGFSQLSGEDATALPYLAAGGHGCISVSSNIVPHLLSEMHNAWKNGDMNGAFQIHLKLINFHDAMFCESSPGPVKFAAEKIGLV

SEQ ID NO: 152278 - protein, 92 aa, Unknown
  Bacterial polypetide isolated from the Sargasso Sea
MFKGSNVALITPFKNNKVDEEKYIKLINFHIENGTNGLVPCGTTGESPTLSHDEHEKLIEICIKESNGKLPVIAGTGSNSTEEAVSLTKHAE

SEQ ID NO: 152279 - protein, 174 aa, Unknown
  Bacterial polypetide isolated from the Sargasso Sea
MFKGSIPALITPFKNGEVDFSALENLVEWHISEGSTAIVAVGTTGESPTLSHQEHKEVVEAIINFSAKRIPIIAGAGSNSTAESIELMEFSEKVGADAALVVTPYYNKPNQKGLLNHYTRLHDNSNLPIIIYNIPGRSIIDMNPDTMGQLSKLPRIIGVKDATGDVSRVSIPEK

SEQ ID NO: 152280 - protein, 194 aa, Unknown
  Bacterial polypetide isolated from the Sargasso Sea
SDALLVVTPYYNKPTQEGLFQHYKKINDSVGIPIIIYNIPSRSVIDMSVETMSRLYELKNIVGVKDATGDLNRVDQQLKAMGKEFIQLTGNDDNALEFNKRGGVGSISVTANIAARLCSDFQKSCANKFKESEKLDKVLQPLHTAMFIESNPSPVKYAASLLGMCDPEVRLPLVQVKEETKNRISKALKDAKIL

SEQ ID NO: 152281 - protein, 206 aa, Unknown
  Bacterial polypetide isolated from the Sargasso Sea
ELSKHAEKSGSDGLLIVTPYYNKPTQEGLYQHYKKINDNVGIPIIIYNIPPRSVIDMTVDTMARLFELKNIVGVKDATADLDRVDQQLKKLGPEFIQLSGEDGTALEFNKRGGVGCISVSANVAAKLCSEFQEACLNKNHNKAKDINEKLMPLHKALFIESNPSPVKYAASLLNLSSDEVRLPLVKVTNSKTKDEIKKALKIANLL

SEQ ID NO: 152282 - protein, 218 aa, Unknown
  Bacterial polypetide isolated from the Sargasso Sea
GCGSNDTRIALDHMYAAQGAGADAALVVAPYYNKPNQDGVYQHFAYLAERCSLPIVLYNVPSRTITDIGVPVIHRLSEEFQTIVGIKDATGNLGRVSAQRLACRPDFCQLSGNDETALGFNAMGGKGCISVTANVAPRLTADFQAACAAHDWDGALALQDRLYPLHDALFSDSSPGPVKYALTRVRPDMPGDVRLPITWPSESSRAAVDRALEIAGLV

SEQ ID NO: 152283 - protein, 108 aa, Unknown
  Bacterial polypetide isolated from the Sargasso Sea
MFKGSNVALITPFKDNVLDIDSYIKLINFHIENGTNGLVPAGTTGESPTLNHDEHEKVIEICIKEAGGKIPVIAGTGSNSTEEAISLTKHAEKAGASGVLVVTPYYNK

SEQ ID NO: 152284 - protein, 100 aa, Unknown
  Bacterial polypetide isolated from the Sargasso Sea
MFKGSNVALITPFKDNKLDEESYIKIINHHLENGTNGLVPVGTTGESPTLSHDEHQRTIELCIKEATGKLPIIAGTGSNSTEEAVSLTKHAEKAGADGAL

SEQ ID NO: 152285 - protein, 192 aa, Unknown
  Bacterial polypetide isolated from the Sargasso Sea
LLIVTPYYNKPTQEGLFQHFKSVNDNVGIPIIIYNIPPRSVVDMSVETMARLFELKNIVGVKDATADLDRVDKQLKKMGPEFIQLSGEDGTALEFNMRGGTGCISVTANVAAKLCSEFQEACLKKNNSKAKEINEKLMPLHKALFIESNPSPVKYAASLLKLSSEEVRLPLVKVTDKTKKEVEKALKFAKLL

SEQ ID NO: 152286 - protein, 227 aa, Unknown
  Bacterial polypetide isolated from the Sargasso Sea
MTDFGKLLTASITPFDSNGVINTDTFWRLCRKLVHDKSDGLVLTGTTGESPNLTIKDREIIYSTALDSVGDKASIVAGTGTYSTSETLEITKMADSIGVHGIMIVTPYYSKPSQRGILKHFEEVSKVTDLPIMAYNIPGRTSTLIELETLVSLADDIGIHSIKDAVGNSDFSKKELEALHDKVDIYSGNDNETLDFMKNGGQGVVSVASHVVGNEIYEMMESGQNND

SEQ ID NO: 152287 - protein, 64 aa, Unknown
  Bacterial polypetide isolated from the Sargasso Sea
MLKGSIVALITPFKNDSLDEDTYRKLIDYHLKNGTNGVVPGGTTGESPTLSHSEHKKIIQIAVK

SEQ ID NO: 152288 - protein, 193 aa, Unknown
  Bacterial polypetide isolated from the Sargasso Sea
SLLVTPYYNKPSQKGLIEHYLKIADSCDIKQILYNVPSRTACDLSPDTVKILSKHENIIGIKESVNSIERINKLMDISNENNDFLVFSGDDESFIDLLSLGGHGVISVAANVIPKGISEICMFHKDNKDHAIKLNKKYKNLYELLFVESNPIPVKWMMHKMGLIKNSIRLPLIELDKKYQENIISEMLKLQLI

SEQ ID NO: 152289 - protein, 274 aa, Unknown
  Bacterial polypetide isolated from the Sargasso Sea
MFSGSIVALITPMDPDGAVDYGSLKRLVDFHLSNQTDALVIMGTTGESVTLSFSEQVQVLEAVLAQVDARIPVIAGNGSNSTADAVEKTKTLSALPVAGFLTVTPYYNKPMQKGMLAHYQAVAAATDKPVILYNVPGRTGVDLLPETVAELAKVPNIVGIKEATGSMPRLAQLQALCPADFLLFSGDDATCCEFMLKGGHGVISVTTNIAPALMAQMSKAAIEKNTELAQQLDQQLQGLHHQLFIEANPIPSKWALLKMGLIADDMARFTFDRL

SEQ ID NO: 152290 - protein, 206 aa, Unknown
  Bacterial polypetide isolated from the Sargasso Sea
KHAEKAGADGVLVVTPYYNKPTQEGLYQHYKSINDNTALPIIIYNIPSRCVIDMSVDTMARLFELKNIAGVKDATGDLNRLDQTISKLGNEFIQLTGEDGLAFEFNKRGGAGIISVTANIAPRLCSDMQRLSISKNKDDIKKAEIIDRNLQPLHKALFIESNPAPVKYAAKILGLCNDEIRLPLVNVKKETEQEINKALSFAKLTN

SEQ ID NO: 152291 - protein, 127 aa, Unknown
  Bacterial polypetide isolated from the Sargasso Sea
MQVGRIEEVTELRTICGSELSVYSGDDSLLLPMLSVGAVGVVSVASHLVGLQLKEMIHSFQSGEVSNALVIHEKLQPLFKALFMTTNPIPIKAALELSGWDVGNPRSPLSPLTNDMKKQLSFILKSL

SEQ ID NO: 152292 - protein, 180 aa, Unknown
  Bacterial polypetide isolated from the Sargasso Sea
QHGLYSHFEAISKATTLPIIIYNIPGRSIVDMHTNTMRELFKIKNIVGVKDATSDIPRVYETKTTIGNDFNQLTGDDATTLAFMVYGGHGSISVTSNIAPKLCSEFMKHCLDQNFAKASEINDKLMPLHHALFIESSPAPVKYAASKLGLCNDDIRLPLTSISEETKQLVDKAMNHASLI

SEQ ID NO: 152293 - protein, 227 aa, Unknown
  Bacterial polypetide isolated from the Sargasso Sea
GKIPVIAGTGSNSTAEAIELSKHAEKAGANGLLIVTPYYNKPTQEGLYQHYKLINDNVGIPIIIYNIPPRSVIDMSVDTMARLFELKNIAGVKDATADLSRVDQQLKKMGPEFIQLSGEDGTALEFNMRGGVGCISVTANVAAKLCSEFQDASLSKNNSNLLAKAKEINEKLMPLHKALFIESNPSPVKYAASLLNLSSDEVRLPLVRVTDKTKKEVQKALKIANLL

SEQ ID NO: 152294 - protein, 259 aa, Unknown
  Bacterial polypetide isolated from the Sargasso Sea
KNGTNGVVPAGTTGESPTLSHIEHKKVIEIAIKECKGKIPIIAGTGSNSTSEAIELSKHAENAGADGLLIVTPYYNKPTQEGLYQHYKSINDSVGIPIIIYNIPSRSVIDMTVDTMARLYELKNIQGVKDATGNLNRVTLQLNKMGKEFIQLTGEDDNALEFNKRGGVGCISVTANVATKLCADFQKASLSNDNETALSINKLLSPMHKALFIESNPSPVKYAASLLKLSPADVRLPLVQVTEKTKEEIKKALKFANLI

SEQ ID NO: 152295 - protein, 205 aa, Unknown
  Bacterial polypetide isolated from the Sargasso Sea
ISFVEHAKNVGANAALVVTPYYNKPTQAGLIAHFTELAKIGLPIIIYNIPGRSVVDMSPETMGELAKLNEIVGVKDATGDLARVCDQRLSCGDDFIQLSGEDATAHGFNAQGGVGCISVTANVAPGLCSKMQEATLKGDYSLALEFQDKLMPLHKAIFTEPGLVGAKYAMSKLGLCKDEVRLPLTPLSEPTKEKIHSALKHADLI

SEQ ID NO: 152296 - protein, 110 aa, Unknown
  Bacterial polypetide isolated from the Sargasso Sea
MFKGSNVALVTPFKNNKLDIDSYIKLIHFHIENGTKGLVPAGTTGESPTLSHDEHQRVIDLCVKESDGKLPVIAGTGSNSTEEAISLTCHAEKMGANGALIVTPYYNKPT

SEQ ID NO: 152297 - protein, 291 aa, Unknown
  Bacterial polypetide isolated from the Sargasso Sea
MLFHSSYTALLTPFKDNQLDINAYRNLVDFQIENGTHGLVPVGTTGESPTLSHDEHKKLVEVCVEQANGRVPVIAGAGSNSTSEAVDFVKHACAAGADGLLVVTPYYNKPTQSGLLAHYNELIKNSSKPIIIYDIPGRSVIKMSDNTMAELAENDLIVGVKDATADLARPTRLQSLIGDDFIQLSGEDGTALAYLAAGGHGCISVTANIAPNLLSRMHNAWKQGDITNAQDINKKLMPLHDSLFCETSPGPLKYAASLLGICSSEARLPIVEIEEISKKNVDNALKTAGLI

SEQ ID NO: 152298 - protein, 285 aa, Unknown
  Bacterial polypetide isolated from the Sargasso Sea
MKGSIVAIVTPMKSDYSVDFHSLKKLFLFHEEAKTDGIVLIGTTGEAGTLSISEREDIYKFACDNTAIPLMAGVGSSSTSDSLKFIDLALNCGIEKCLAVTPYYNKPSQEGLIAHFKKLASSDALIYLYNVPGRTGVDLQPESVDELLGENNIVGIKEAINTHDRMEKLSKLLEKRKDFYLLSGDDPSFVEFGKYGAVGIISVAANIVPEVIKQISDLIQEKNFEEAALISKKYEKLFNILLENSPGPSKYLLAKIKMLENNLRLPLVKISEKLGKEIDEIYSNT

SEQ ID NO: 152299 - protein, 293 aa, Unknown
  Bacterial polypetide isolated from the Sargasso Sea
MTEFGSLLTASITPFDSRGVLNTDTLWRLCRKLVHDKSEGLVLTGTTGESPNLSIKDREIIYSTAIDSVSDKAKIIAGTGTYSTSESIEITKMADSLGVDGIMIVTPYYSKPSQHGILRHFEEISKITDLPIMAYNIPGRTSTLIELETLQTLVDDIGIHSIKDAVGDFEFSKKQLELLKDKADIYSGNDNQTYDFVINGGVGVVSVASHVVGDEISEMISFAKDNDLEKAEEINMQLSNLFEAIFEEPSPGPIKKILSESWEEVGEPLLPITSITPELANKIRGFYKKIKEN

SEQ ID NO: 152300 - protein, 291 aa, Unknown
  Bacterial polypetide isolated from the Sargasso Sea
MFKGSIVALVTPFKGNEIDESALRKLVDWHISEGTDGIVPVGTTGESPTLNHDEHERVVEIVIDQCNKRVPIIAGTGSNSTAEAINLLKHAENAGADAALVVTPYYNKPTPEGLYAHYEALDSASSGIPIIIYNIPSRSVIDIDVDLMGRLSQLDSIVGVKDATSDISRIKQHKELCKNDFIQLSGEDETIYDYMINGGQGCISVTANILPKICSDMHKAFSNNDLIEAKKLNETLMPLHKALFVETSPSPVKYILSKMDLIDYEIRLPLVEIRNETKDILDKIINDLEIG

SEQ ID NO: 152301 - protein, 175 aa, Unknown
  Bacterial polypetide isolated from the Sargasso Sea
MTAMVTPFTENGDVDYELAIKLSNYLFENGSDGIVLCGTTGESPTLSWAEQHDLFIAVKGSLDASCKVIVGTGSNCTSEAVEATKKAYDSGADGALVVVPYYNKPPQEGLYKHFSSIAKSAKDLPLMLYNIPGRTGCNLLPDTVKKLMDFSNILSIKAASGRIEEVTELRAICGS

SEQ ID NO: 152302 - protein, 291 aa, Unknown
  Bacterial polypetide isolated from the Sargasso Sea
MFKGSIVALVTPFKGNEIDEFALRKLVDWHISEGTDGIVPVGTTGESPTLNHDEHERVVEIVIDQSNKRVPIIAGTGSNSTAEAINLLKHAESAGADAALVVTPYYNKPTPEGLYAHYEALDSASSGIPIIIYNIPSRSVIDINVDLMGRLSHLQSIVGVKDATSDISRIKEHNELCEDGFIQLSGEDETIYEYMINGGQGCISVTANILPKVCSDMHKAFSNNDLEEAKRLNNILMPLHKSLFIETSPSPVKYILSKMDLIDYEIRLPLVKIRQETKSILDEIISNLEIK

SEQ ID NO: 152303 - protein, 224 aa, Unknown
  Bacterial polypetide isolated from the Sargasso Sea
RIPGDRGARRGNSTTEAIELTQQAKEVGADATLQVVPYYNKPTQEGIYRHFAKIAETVDLPVILYNVPGRTVADMSNETILRCAQVPGIIGVKEATGNIDRAAHLIKSAPAHFGIYSGDDPTAIALMLLGGHGNISVTANVAPRAMSELCKAALAADAKTAREIHLKLLSLHKNLFIESNPIPAKWALQQLGRVQGGIRLPLTPLDAQYHEVVRGALREAGLLG

SEQ ID NO: 152304 - protein, 197 aa, Unknown
  Bacterial polypetide isolated from the Sargasso Sea
AGADASLSVTPYYNKPTQEGLFQHYTQIADQVEFPQVLYNVPGRTSCDLLPETIARLAPHENISGIKEATGDLSRLDILKKLISDETFFLYSGDDATATDFILNGGHGNISVTANVVPDLMSKLCDFALEESSEAKVIESKISNLNTMLFLESNPIPVKWVLSRMGLIDIGIRLPLTNLSKEHQQTLQEELLKLELI

SEQ ID NO: 152305 - protein, 260 aa, Unknown
  Bacterial polypetide isolated from the Sargasso Sea
DVIYLVVQGTTGESATLSEEEKISILEFIIEINNSRLPILFGVGGNNTFETIKKIDFFSKYKIDGFLSVSPYYNKPTQFGIYEHFKNISKATNHPIILYNVPSRTSSNMSSETTLKLANDFNNIVGIKEASGNLDLIMRIINNKPKNFLVISGDDALTLAHLALGGSGVISVIANAFPKRLSTMVNSCLNSNLTISREKHYELLEIINFIFKDGNPAGIKYLLKLINICSDHVRLPLVNIKKSTADKLYKLVAEIDNTLV

SEQ ID NO: 152306 - protein, 286 aa, Unknown
  Bacterial polypetide isolated from the Sargasso Sea
MKGSVVAIVTPMDNKGSIDFDSFSKLIKFHEDSETDGIVLVGTTGESATLNKEEREEIFKFAKDSTDIPLMAGIGSSSTLEACELAGIALKNNINECLAVTPYYNKPSQKGLSLHYQELCKTGANIVLYNVPGRTGVDLLPKTVLELAEIENITGIKEAVNTKDRFRELLEVKAIRPEFLLLSGDDPTFVSFMREGADGIISVAANVIPKQIKELSDLCFSKKFEEAKTINEKYLNFYELLFTEASPSPCKFLLEKMSLLENNLRLPLHPLSEEFREKIYEAFNKI

SEQ ID NO: 152307 - protein, 227 aa, Unknown
  Bacterial polypetide isolated from the Sargasso Sea
KSKGRVPVIAGAGSNNTRESVDLMKFAKKVGADAALIVTPYYNKPNQKGLHLHFSNLNDCCDLPIIIYNIPGRSIVDMDILTLSSLSKLKNIIGIKDATGDVSRVSDTRKYCGENFIQLSGEDASALGFNAHGGVGCISVIANAAPKLSAEFQKAMLQCDYKKALILQDKLLPLHRATFLEPSPAPIKYALNKLGKCVNELRAPLVTVNENTQKIMDNALRHAELLN

SEQ ID NO: 152308 - protein, 193 aa, Unknown
  Bacterial polypetide isolated from the Sargasso Sea
SSCTPYYNKPTQAGLIKHYTKIADSCNIPQILYNVPSRTSCDLLPETVKHLSNHRNIVGIKEAVNDKQRINDLINISKDNDNFKILSGDDPTFCEFLQLGGDGVISVAANVIPNDISKICKAVRNNNNEEATEINKKYFNLYELLFIESNPIPVKWMLYKMGLIDNILRLPLIELDTKYHEIISAEMIKLQLI

SEQ ID NO: 152309 - protein, 106 aa, Unknown
  Bacterial polypetide isolated from the Sargasso Sea
MFKGSNVALITPFKNNKLDIDAYIKIIHFHLENGTNGLVPAGTTGESPTLDHDEHQKVIELCIKEAKGKIPVIAGTGSNSTDEAISLTKHAEKMGADGVLVVTPYY

SEQ ID NO: 152310 - protein, 104 aa, Unknown
  Bacterial polypetide isolated from the Sargasso Sea
MFKGSIVALVTPFKGNEIDEFALRKLVDWHISEGTDGIVPVGTTGESPTLNHDEHERVVEIVIDQSNKRVPIIAGTGSNSTAEAINLLKHAESAGADAALVVTP

SEQ ID NO: 152311 - protein, 104 aa, Unknown
  Bacterial polypetide isolated from the Sargasso Sea
MNQVLKGSIVALVTPMKKNGDIDFLSLDKLIEWHIGNGTNAIVSVGTTGESATLSVKEHLKVIEHTVKKVDKRIPVIAGSGSNSTSQAIETTWNQKKLAQTSLS

SEQ ID NO: 152312 - protein, 64 aa, Unknown
  Bacterial polypetide isolated from the Sargasso Sea
MFQGSHTALITPFKEGSIDEASFRSLIDFQVTEGIHGLVPVGTTGESPTLSHEEHKFAVEVCID

SEQ ID NO: 152313 - protein, 286 aa, Unknown
  Bacterial polypetide isolated from the Sargasso Sea
MKGSIVAIVTPMNQDETIDFDSFIKLIKFHEDSRTDGIVLVGTTGESATLSKTEREEIFKFAKSATNIPLIAGIGSSSTSEACELADIALKNDIRDCLAVTPYYNKPSQKGLSLHYEELSKTGANVILYNVPGRTGVDLLPSTVLKLTENQNITGIKEAVNTESRFKDLLAVKAMRPDFLLLSGDDPTFVSFMKSGADGIISVAANVMPKQIKKLSDLCFSKKFEEAEAINKKYLNLYELLFTEASPSPCKFLLEKMLLLENNLRLPLHPLSEEFKEEIYEAFNKI

SEQ ID NO: 152314 - protein, 230 aa, Unknown
  Bacterial polypetide isolated from the Sargasso Sea
MVVKLVAGRIPVIAGAGSNNPVEAIEYTRHAEQAGADATLHVAGYYNRPNQEGLYHHFKAVHDATSKPIIVYNIPPRAIVDVQPATLARLAELPRIAGVKDATGDLARPWTERQLIKKPFAWLSGEDATAVAYNIGGGQGCISVTANVAPKLVAEVQNLTLAGQWQAARELQDKLIPLHQAMFAEPSPAGAKYAVSLLGFCSEECRLPVMPLSEATRTRIRDAMQALNLL

SEQ ID NO: 152315 - protein, 215 aa, Unknown
  Bacterial polypetide isolated from the Sargasso Sea
NSTEEAVSLTRHSEKAGADGALVVTPYYNKPTQEGLYQHYKSINDNTSLPIIIYNIPSRCVIDMSVDTMSRLFELKNIAGVKDATGDLNRLDQTIKKLGPEFIQLTGEDGLALKFNKRGGVGIISVTANIAPKLCSDMQRFSKSKSDNEIKEAERIDQLLQPLHKSLFIESNPAPAKYAAKLLGLCSDEIRLPLVKIKKETEEEVKKALSFAKLI

SEQ ID NO: 152316 - protein, 94 aa, Unknown
  Bacterial polypetide isolated from the Sargasso Sea
MQPLQGSFVALVTPMFQNGELDYGSLKDLIEWQIKDGISGIVSVGTTGESATVNVMEHLEIIEKTIEYTNGRVPVIAGTGNNSTQEAIELTKTA

SEQ ID NO: 152317 - protein, 234 aa, Unknown
  Bacterial polypetide isolated from the Sargasso Sea
MQVLNGSIVALVTPMNEDGSVDFNAIKKLVDWHVKEGTSGIVAVGTSGESATLEIDEHLEVIKSVVKYADGRIPIIAGSGSNSTAQAIKTTSESYKIGADYSLLVTPYYNKPSQKGLIEHYLKIADSCDIKQILYNVPSRTSCDLRPDTVEILSRHENIIGIKESVNTKERMKKLKNISDLNKDFLVFSGDDETFIDLLSIGGSGVISVAANVIPKAISEICMYYADDKSRAIE

SEQ ID NO: 152318 - protein, 133 aa, Unknown
  Bacterial polypetide isolated from the Sargasso Sea
GVKEASGNLVQVSEIIKSCGPTFKVISGEDALTWPILALGGKGVISVTANLVPDKFARLCSAALAGDMETARSVHYELMKLNDIMFIETNPIPVKTALAIMGRIDNEFRAPLCAPSENNLAALQSVLKEYSLA

SEQ ID NO: 152319 - protein, 190 aa, Unknown
  Bacterial polypetide isolated from the Sargasso Sea
VVPYYNKPPQDGLAAHFRAIAEAAPELPLMLYNIPGRTGCSMAPETVAQLMDCPNVVSFKAASGTTEEVTALRLACGSQLAIYSGDDGLTLPMISVGAVGVVSVASHVVGPQIRAMIKAYMQGDAAVALALHEQLQPLFKALFATTNPIPVKAALQINGWSVGDPRPPLSPLSDDMRSTLAQTMAALRQT

SEQ ID NO: 152320 - protein, 172 aa, Unknown
  Bacterial polypetide isolated from the Sargasso Sea
LANEVDIPQILYNVPSRTACDILPETVEILSNHNNIVGIKEAVDSKERIDDLIAISSNNQNFQLFSGDDPSFIKMIQKGGDGVISVAANVVPRKISEICKLVEEKKHDEANIIDNTLSNLYALLFIESNPIPVKWMLFKMNLIKNSIRLPLEELDKIYQEDIINEMLKLKLI

SEQ ID NO: 152321 - protein, 171 aa, Unknown
  Bacterial polypetide isolated from the Sargasso Sea
ADSVSIPGLLYNVPSRTSLNMDTDTTLKLAKIDNIVGVKEASSDPDQITNIISDSPENFKVWSGNDNETFSIMSTGGHGVVSVASNIIGNQVKKLMGFILDGQTELAAKEHKRLLLFFNALFWVTNPIPIRHALNRSGFRMGPPRLPMVEAPKDFTDKFDPVMDQYDMDIS

SEQ ID NO: 152322 - protein, 285 aa, Unknown
  Bacterial polypetide isolated from the Sargasso Sea
MKGSIVAIVTPMKSDYSVDFHSLKKLFLFHEEAKTDGIVLIGTTGEAGTLSISEREEIYKFASDNTTIPLMAGVGSSSTSDSLKFIDLALNCGIEKCLAVTPYYNKPSQEGLVAHFKKLASSDALIYLYNVPGRTGVDLQPESVEELLDENNVVGIKEAVNTKNRMEKLSKLLKKRKDFDLLSGDDPSFVEFGKYGAVGIISVAANIVPEVIKQISDLIQEKNFEKAASISEKYEKLFNILLENSPGPSKYLLAKIKMLENNLRLPLVRIPEKLEKKIDEIYSNT

SEQ ID NO: 152323 - protein, 297 aa, Unknown
  Bacterial polypetide isolated from the Sargasso Sea
MITEDRLITAMITPFQKNGDVDYDVAKNLAVALSKSGSDGILIGGTTGESPTLSDEEKLKLFKVVKEAVGDNARVIAGTTDNNNSKSIELSVEAQKLGVDALLLTVPAYNKPTQQGLIDHFSKIADSVEIPGILYNVPGRTSLNMTAETTLALSSHQNIVGIKEASSDLGQITSIISESSGTDFRVWSGNDDETFSIMALGGFGVVSVASNIVGVQIKRMIGSILEGSIESAADQHKELLPLFQGLFWITNPILIKRALNLSGFEVGGLRLPMKDSDELNRDFSELLSRYDIDVTNV

SEQ ID NO: 152324 - protein, 301 aa, Unknown
  Bacterial polypetide isolated from the Sargasso Sea
MANGTQDGIQIRGSIPAIVTPMLEDGSLDLPAFRKLIDWHIAEGTDALVVVGTSGESATLNVEEHILMIRTAVEHAAKRIPIIAGAGGNSTAEAIELTKHAKAVGADATLQVVPYYNKPTQEGIYRHFKTIAEAVDLPVILYNVPGRTVADMAHETTLRLAEVPGIIGVKEATGNIDRAAHLIKAAPKHFAIYSGDDPTAIALMLLGGHGNISVTANVAPRAMSDLCRAALAGDVQTARALHMKLLSLHKNLFIEANPIPVKWALQAMGKMQGGIRLPLTALDERCHEAVRSALVEAGVLA

SEQ ID NO: 152325 - protein, 162 aa, Unknown
  Bacterial polypetide isolated from the Sargasso Sea
MFNPKSSYNKEELIACSNGELFTKKGDGRLPSDLMLMFDEIVNIDDFSGNYNKGSIEAVLNVNPDLWFFKYHFKEDPVMPGCLGLDAMWQLLGFYLLWTGLPGIGRALGAENVKFFGQVLPKAKKVVYKLDIKRIINRGAIVGLADGEMFVDNKKIYSAEKL

SEQ ID NO: 152326 - protein, 159 aa, Unknown
  Bacterial polypetide isolated from the Sargasso Sea
MSFRERSNFTYDDLIDCGHGRLFGDGNAQLPLPPMLMFDRIINISEDGGEFGKGEVIAEFDISPELWFFPCHFESDPVMPGCLGLDALWQLVGFHLGWLGAPGRGRALGLGSLKFNGQVTPDAKLVTYRIDIKRTVRRGFAISIANGTLDVDGQMVYEA

SEQ ID NO: 152327 - protein, 89 aa, Unknown
  Bacterial polypetide isolated from the Sargasso Sea
MKKNSYSYDDLITCGNGDLFGPGNAKLPLPPMLMFDRITEINENNGTFNKGSLKAELDIKDDLWFFDCHFKKDPVMPGCLGLDAMWQLV

SEQ ID NO: 152328 - protein, 50 aa, Unknown
  Bacterial polypetide isolated from the Sargasso Sea
MDWQKSCYELTDLLRCARGELFGPGNARLPLPPMLMFDRISNIADEGGAH

SEQ ID NO: 152329 - protein, 181 aa, Unknown
  Bacterial polypetide isolated from the Sargasso Sea
KKNSYEKDELLKSGQGLLMGPNTGKLPIEPMLMVDRISDIYQDGGKYDKGRIKAELDIDESLWFFHCHFKNDPVMPGCLGLDGMWQLVGFFLTWVGGKGRGRALGVGDVKFKGQIRPYHTRVTYNIDIKRLLDRDGQLMVWADGTVTTNEEKTIYFAKNLQVGLFNNLTYDFGGDPSQDSF

SEQ ID NO: 152330 - protein, 170 aa, Unknown
  Bacterial polypetide isolated from the Sargasso Sea
SNKTKFSFEDLIACGNRNLFDKNGPPLPSPPMLMFDRITKITKDSGEFNKGEVNAELDLNPNLWFFNCHFKGDPVMPGCLGLDALWQLLGFYLGWLGGKGSGRALSVGSVKFSGQILPKNSSVTYSLNIKRVLMRKLVLGIADGKVICDGNEVYQANEIRVGLFENKDVK

SEQ ID NO: 152331 - protein, 66 aa, Unknown
  Bacterial polypetide isolated from the Sargasso Sea
MHFSERNSFGYDDLITCANGGLFGPGNAQLPAPPMLMFDRIIKINATGGRHGKGELDAELDIKSDL

SEQ ID NO: 152332 - protein, 69 aa, Unknown
  Bacterial polypetide isolated from the Sargasso Sea
NPGRGRALGVSTVKFTGEVLKNVKMATYVIDMKRILIKGETTVGLANGILMADDKKIYSADGLKVGLFK

SEQ ID NO: 152333 - protein, 99 aa, Unknown
  Bacterial polypetide isolated from the Sargasso Sea
MKQKNSYNYQDLIDCGNGILFGEGNAKLPLPPMLMFDRITKIENNTGSFKRGYLEAELDIKDDLWFFKCHFNNDPVMPGCLGLDAMWQLVGFYLGGLES

SEQ ID NO: 152334 - protein, 66 aa, Unknown
  Bacterial polypetide isolated from the Sargasso Sea
RGRALGVSSVKFTGEVLKNIKIASYEIDMKRILIKEGATVGLANGVLKADGKKIYSAENLKVGLFK

SEQ ID NO: 152335 - protein, 55 aa, Unknown
  Bacterial polypetide isolated from the Sargasso Sea
MNRLNAFSREQLLASARGELFGPNKGRLPNDPMLMFDRIKDIRDDGGPHGKGLVR

SEQ ID NO: 152336 - protein, 75 aa, Unknown
  Bacterial polypetide isolated from the Sargasso Sea
YLGWLGNPGKGRALGVGTVKFTGEVLKSVKKAKYVIDMKKIISPGGTTVGLANGILLADDKKIYSAENLKVGLFK

SEQ ID NO: 152337 - protein, 90 aa, Unknown
  Bacterial polypetide isolated from the Sargasso Sea
MQKKSSYSFEELINCGNGKLFGPGNAKLPLPPMLMFDRITEVREDNGAFKKGSITAELDIKDDLWFFNCHFKEDPVMPGCLGLDANVANW

SEQ ID NO: 152338 - protein, 85 aa, Unknown
  Bacterial polypetide isolated from the Sargasso Sea
MKKNSYSYDDLITCGNGELFGPGNAKLPLPPMLMFDRITEINDNNGTFNKGSLKAELDIKDNLWFFDCHFKSDPVMPGCLGLDAM

SEQ ID NO: 152339 - protein, 102 aa, Unknown
  Bacterial polypetide isolated from the Sargasso Sea
MTFIPQNSYSKDDLIACADGELFTKPGDGRLPSDHMLMFDEISNIDDYSGTYKKGSISAHLNINPDLWFFKCHFKTDPVMPGCLGLDAMWQLLGFYLLWSGL

SEQ ID NO: 152340 - protein, 66 aa, Unknown
  Bacterial polypetide isolated from the Sargasso Sea
KGRALGVNTVKFTGEVLKSAKMASYEIDMKRILIKEGTTVGLADGILSADGKKIYSAENLKVGLFK

SEQ ID NO: 152341 - protein, 173 aa, Unknown
  Bacterial polypetide isolated from the Sargasso Sea
MTFTPQNQYSKKDLIACGDGELFGIGNGRLPSDQMLMFDEIESIFDSGGVYDKGHIKASLNINPELWFFDCHFKEDPVMPGCLGLDAMWQLVGFYLCWLKLPGYGRALGVEKVKFFGQVTPKAKLVEYKIDMKRVVNRGAVVGFGDGDMFVDGKHVYSAKGLRVGLFKDTSEF

SEQ ID NO: 152342 - protein, 158 aa, Unknown
  Bacterial polypetide isolated from the Sargasso Sea
LCSEGSLFGDDNGKLPNSEMLMINRILKINSNEGDYENGLLIGELDINPDLWFFKCHFKGDPVMPGCLGLDAMWQLLGFYLLWDGNPGIGRALGAGEVKFFGQVLPKAQLVRYEISIKRIRKQKLVVGFADGKMFVDNKEIYTAKNLRVGLFKDPSNF

SEQ ID NO: 152343 - protein, 97 aa, Unknown
  Bacterial polypetide isolated from the Sargasso Sea
HFEMDPVMPGCLGLDAMWQLVGFYLGWIGEPGRGRALGSGNVKFGGEILKDSKLVEYKIEMKKIIKRGVIVGVGDGVVEVDGKQIYSAEGLKVGLIK

SEQ ID NO: 152344 - protein, 123 aa, Unknown
  Bacterial polypetide isolated from the Sargasso Sea
MFNPKSSYNKEELIACSNGELFTKEGDGRLPSDLMLMFDEIVNIDDFSGNYNKGSIEAVLNVNPDLWFFKYHFKEDPVMPGCLGLDAMWQLLGFYLLWTGLPGIGRALGAENVKFFGAVLPKA

SEQ ID NO: 152345 - protein, 66 aa, Unknown
  Bacterial polypetide isolated from the Sargasso Sea
KGRALGVGTVKFTGEVLQSVKNVRYEIDMKKIMSPGGTTVGLANGIVLADNKKIYSAESLKVGLFK

SEQ ID NO: 152346 - protein, 126 aa, Unknown
  Bacterial polypetide isolated from the Sargasso Sea
MEPKNTYNKNELLSMANGNMFGQENAKLPLEPMLMIDRILNIENSGGKYGKGSINAELDITDESWFFHCHFKGDPVMPGCLGLDGMWQLVGFFLTWSGAKGKGRALGVGDLKFRGQVRPYHDKVVY

SEQ ID NO: 152347 - protein, 93 aa, Unknown
  Bacterial polypetide isolated from the Sargasso Sea
MKKNSYSYDDLISCGNGQLFGPGNAKLPLPPMLMFDRITEINDDNGAFKKGSLKAELDIKKSLWFFDCHFKEDPVMPGCLGLDAMWQLVGFYL

SEQ ID NO: 152348 - protein, 69 aa, Unknown
  Bacterial polypetide isolated from the Sargasso Sea
KGRALGVGEVKFTGQVLKTVKKVSYHISLKRLILRKLILGVGDGILKADGETIYEAKDMKVGLFSPDKK

SEQ ID NO: 152349 - protein, 81 aa, Unknown
  Bacterial polypetide isolated from the Sargasso Sea
LGFYLGWLGQPGKGRALGVGEVKFTGQVLKTVKKVTYHISLKRLILRKLILGVGDGILQADGETIYEAKDMKVGLFSPNKK

SEQ ID NO: 152350 - protein, 111 aa, Unknown
  Bacterial polypetide isolated from the Sargasso Sea
MAFSPKNSYSKEELLGCANGNLFGEDNGRLPTPNMLMFDRITKISDSEGKYNKGKIIAELDVNPDLWFFDCHFKGDPVMPGCLGLDAMWQLVGFYLCWLGNPGRGRALGAS

SEQ ID NO: 152351 - protein, 76 aa, Unknown
  Bacterial polypetide isolated from the Sargasso Sea
YLGWLGNPGRGRALGVSTVKFTGEVLKNVKMATYIIDIKRILIKGETTVGLANGILLADDKKIYSADGLKVGLFKK

SEQ ID NO: 152352 - protein, 77 aa, Unknown
  Bacterial polypetide isolated from the Sargasso Sea
GFYLGWIGNPGKGRALGVGAVKFTGEVLQSVKNVRYEIDMKKIMSPGGTTVGLANGVVLADNKKIYSADSLKVGLFK

SEQ ID NO: 152353 - protein, 85 aa, Unknown
  Bacterial polypetide isolated from the Sargasso Sea
MEKKSSYSYKELINCGNGELFGPGNAKLPLPPMLMFDRITEVKEDNGAFRKGSITAELDIKDDLWFFDCHFKEDPVMPGCLGLDA

SEQ ID NO: 152354 - protein, 88 aa, Unknown
  Bacterial polypetide isolated from the Sargasso Sea
MKKNSYSYNDLITCGNGELFGPGNAKLPLPPMLMFDRITEINENNGSYNKGSLKAELDIKDDLWFFDCHFKKDPVMPGCLGLDANVAN

SEQ ID NO: 152355 - protein, 111 aa, Unknown
  Bacterial polypetide isolated from the Sargasso Sea
NDPVMPGCLGLDGMWQIVGFYLTWIGGKGRGRALGVGDVKFKGQIRPYHKKIIYSIDIKRIVNKNNKYMIWADGTVTTDKQKTIYFAKNLQVGLFGNLTYDFGEDPSLDSF

SEQ ID NO: 152356 - protein, 66 aa, Unknown
  Bacterial polypetide isolated from the Sargasso Sea
KGRALGVGTVKFTGEVLQNVKLVRYEIDMKKIMSPGGTTVGLANGVVLADDKKIYSADSLKVGLFK

SEQ ID NO: 152357 - protein, 153 aa, Unknown
  Bacterial polypetide isolated from the Sargasso Sea
PKPPMLMMDKIIHISDQGGAYGKGEIKAELNINKSLWFFDCHFKNDPVMPGCLGLDGFWQLLGFFLTWAGGKGKGRALGVKDLKFKGQVRPYHEKITYKIDIKKFITKPTHMVWGDAVLEVKNKAIYFAKDLQVGLFESLTWDHGKDPAVDPF

SEQ ID NO: 152358 - protein, 181 aa, Unknown
  Bacterial polypetide isolated from the Sargasso Sea
MTKKKRFSKQDLLSSGMGKLFETLDGKLPKPPMLMMDKIIHISDEGGAYGKGEIKAELNIDKSLWFFDCHFKNDPVMPGCLGLDGFWQLLGFFLTWAGGKGKGRALGVKDLKFKGQVRPYHEKITYKIDIKKFITKPTHMVWGDAVLEVKNKAIYFAKDLQVGLFESLTWDHGKDPAVDPF

SEQ ID NO: 152359 - protein, 181 aa, Unknown
  Bacterial polypetide isolated from the Sargasso Sea
MSRKSSFSKKDLLEIAKGQFRDKSIGKLPLPPMLMIDRIIEISEVGGDYEKGYIKAEMDISDNNWFFECHFKNDPVMPGCLGLDGFWQLIGFFLSWAGGKGKGRALGVKDLKFKGQVRPYHDIITYTIHIRKFIKKPTYMAWGNATLSVNNKEIYFAKDLQVGLFEKLVWDTGMDPSVDPF

SEQ ID NO: 152360 - protein, 183 aa, Unknown
  Bacterial polypetide isolated from the Sargasso Sea
MNQKSSYTNEDLIKSGNGLLFGPTTGKLPTPPMLMVDRILEINDSGGKFKKGKILAELDINDEMWFFNCHFKNDPVMPGCLGLDGLWQLVGFFLTWSGGKGRGRALGVGDVKFKGQIRPYHTKITYSIDVKKLLNRNDQLMIWADGTVTTNDNRTIYFTKNLQVGLFNNLTYDFGGDPSQDSF

SEQ ID NO: 152361 - protein, 183 aa, Unknown
  Bacterial polypetide isolated from the Sargasso Sea
MNQKNSYTNKELLKSSNGLLMGPNTGKLPLPPMLMVDRILEIKDSGGKFNKGKIIAELDINEDLWFFHCHFKNDPVMPGCLGLDGLWQLVGFYLTWNGGKGRGRALGVGDVKFKGQIRPYHTKITYNIDIKKLLIRNEQVMIWADGNVTTSDDKTIYFAKNLQVGLFNNLTYDFGGDPSQDSF

SEQ ID NO: 152362 - protein, 181 aa, Unknown
  Bacterial polypetide isolated from the Sargasso Sea
MSRKSSYNKKDLLEIANGQFIDSSIGKLPLPPMLMIDRIIEISEDGGKYGKGFIKAELDISDNDWFFKCHFKNDPVMPGCLGLDGFWQLIGFFLSWCGGEGKGRALGVKDLKFKGQVRPYHTIITYTIHIRKFIKRPTYMAWGDASLSVKNKEIYFAKDLQVGLFEKLVWDTGMDPSLDPF

SEQ ID NO: 152363 - protein, 74 aa, Unknown
  Bacterial polypetide isolated from the Sargasso Sea
DKPGRGRALGASEVKFFGQVLPSAKLVTLKIDMKRILNLDLTVGIGEGSMLVDGREIYSAKGLKVGLFQDTSSF

SEQ ID NO: 152364 - protein, 85 aa, Unknown
  Bacterial polypetide isolated from the Sargasso Sea
MKQNSFTYEQLIDCAKGVLFGKGNAQLPMPPMLMFDRITSINESGGLFSKGEVIAELDIKKDLWFFECHFKGDPVMPGCLGLDAM

SEQ ID NO: 152365 - protein, 74 aa, Unknown
  Bacterial polypetide isolated from the Sargasso Sea
MGWLGNPGKGRALGVGTVKFTGEVLQNVKNVRYEIDMKKIMSPSGTTVGLANGIVLADDKKIYSAESLKVGLFK

SEQ ID NO: 152366 - protein, 84 aa, Unknown
  Bacterial polypetide isolated from the Sargasso Sea
MKKSSFNYDELMSCANGELFGPGNAKLPSPPMLMFDRITEISEKNGAFNKGLMKAELDIKDDLWFFDCHFKEDPVMPGCLGLDA

SEQ ID NO: 152367 - protein, 166 aa, Unknown
  Bacterial polypetide isolated from the Sargasso Sea
LFKESFNYQELIDCAKGTLAGVDFPKLPLPPMLMFDEVTSIKETGGAYNKGTAHAQFKITPDKWFFPCHFKNDPVMPGCLGMDALWQLLGFSLGNMGGRGKGRAISVGEVKFTGQVLPIAKKVEYLLDFKRIIMRKLILGIADGKVICDDKIVFEASDIRVGLFKD

SEQ ID NO: 152368 - protein, 115 aa, Unknown
  Bacterial polypetide isolated from the Sargasso Sea
MSRKSSFSKKDLLEIAKGQFRDKSIGKLPLPPMLMIDRIIEISEVGGNYDKGYIKAEMDISDNNWFFECHFKNDPVMPGCLGLDGFWQLIGFFLSWAGGKGKGRALGVKDLKLKA

SEQ ID NO: 152369 - protein, 173 aa, Unknown
  Bacterial polypetide isolated from the Sargasso Sea
MKFTEKNSFTKEELQLCSNGKLFHENDGKLPSSNMLMLDRITSISGDQGNYSNGLIEAELDINENLWFFDCHFKDDPVMPGCLGLDAMWQILGFYLLWSGNHGIGRALGAGQVKFYGQVLPHAKTVKYEIHVKRMLSTKTVLGVADGLMYVDGKEIYSAKNLKVGLFENPGNF

SEQ ID NO: 152370 - protein, 89 aa, Unknown
  Bacterial polypetide isolated from the Sargasso Sea
MKQKNSYNYQDLIDCGNGILFGEGNAKLPLPPMLMFDRITKIENNTGSFQRGYLEAELDIKDDLWFFKCHFQNDPVMPGCLGLDAMWQL

SEQ ID NO: 152371 - protein, 80 aa, Unknown
  Bacterial polypetide isolated from the Sargasso Sea
MNKVFKPKDSYSKEDLVDCGFGQLFGEGNGRLPVDPMLMFDRITKINNTGGKYSKGEVYAELDVNPDLWFFDCHFKEDPV

SEQ ID NO: 152372 - protein, 138 aa, Unknown
  Bacterial polypetide isolated from the Sargasso Sea
MDKKSSYNYEELIDCGNGKLFGSGNAKLPLPPMLMFDRISEISENKGEFKKGLIKAELDIKDNLWFFECHFKDDSVMPGCLGLDAMWQLVGFYLGWLGNPGKGRALGVNTVKFTGEVLKNVKMASYEIDMKRILIKEG

SEQ ID NO: 152373 - protein, 118 aa, Unknown
  Bacterial polypetide isolated from the Sargasso Sea
DKGLMKAELDIKDDLWFFDCHFKEDPVMPGCLGLDAMWQLVGFYLGWLGNPGRGRALGVSTVKFTGEVLKNVKMATYIIDIKRILIKGETTVGLANGILLADNKKIYSADGLKVGLFK

SEQ ID NO: 152374 - protein, 81 aa, Unknown
  Bacterial polypetide isolated from the Sargasso Sea
WQLVGFFLGWLGNPGKGRALGVGTVKFTGEVLQSVKNVRYEIDMKKIMSPGGTTVGLANGIVLADNKKIYSAESLKVGLFK

SEQ ID NO: 152375 - protein, 92 aa, Unknown
  Bacterial polypetide isolated from the Sargasso Sea
MPGCLGLDAMWQLVGFYLGWLGKPGKGRALGVNAVKFTGEVLKNIKMASYEIDMKRILIKEGTTVGLANGILKADGKKIYSAENLKVGLFKK

SEQ ID NO: 152376 - protein, 125 aa, Unknown
  Bacterial polypetide isolated from the Sargasso Sea
MKQKNSYNYQDLIDCGNGILFGEGNAKLPLPPMLMFNRITKIENNTGSFKRGYLEAELDIKDDLWFFKCHFQNDPVMPGCLGLDAMWQLVGFFLGWTGEPGKGRALGVSTVKFTGEVLKKVKIAT

SEQ ID NO: 152377 - protein, 173 aa, Unknown
  Bacterial polypetide isolated from the Sargasso Sea
MFNPKSSYNKEELIACSNGELFTKEGDGRLPSDLMLMFDEIVNIDDFSGNYNKGSIEAVLNVNPDLWFFKYHFKEDPVMPGCLGLDAMWQLLGFYLLWTGLPGIGRALGAEHVKFFGQVLPKAKKVVYKLDIKRVINRGAIVGLADGEMFVDNKKIYSAEKLKVGLFKDPSNF

SEQ ID NO: 152378 - protein, 173 aa, Unknown
  Bacterial polypetide isolated from the Sargasso Sea
MFNPKSSYNKEELIACSNGELFTKEGDGRLPSDLMLMFDEIVNIDDFSGNYNKGSIEAVLNVNPDLWFFKYHFKEDPVMPGCLGLDAMWQLLGFYLLWTGLPGIGRALGAENVKFFGQVLPKAKKVVYKLDIKRVINRGAIVGLADGEMFVDNKKIYSAEKLKVGLFKDPSNF

SEQ ID NO: 152379 - protein, 103 aa, Unknown
  Bacterial polypetide isolated from the Sargasso Sea
MKQKNNYNYNELIDCANGDLFGEGNARLPSPPMLMFDRITQIQSDEGKFKKGIIKAELDIKNNMWFFDCHFKSDPVMPGCLGLDAMWQLVGFYLGWIGEPGKG

SEQ ID NO: 152380 - protein, 130 aa, Unknown
  Bacterial polypetide isolated from the Sargasso Sea
RITEISEKNGAFDKGLMKAELDIKDDMWFFDCHFKEDPVMPGCLGLDAMWQLVGFYLGWLGNPGRGRALGVSTVKFTGEVLKNVKMATYIIDMKRILIKGETTVGLANGILLADGKKIYSADSLKVGLFK

SEQ ID NO: 152381 - protein, 86 aa, Unknown
  Bacterial polypetide isolated from the Sargasso Sea
GLDAMWQLVGFFLGWLGNPGRGRALGVSTVKFTGEVLKNVKMATYEIDMKRILIKGETTVGLANGILLADGKKIYSAENLKVGLFK

SEQ ID NO: 152382 - protein, 92 aa, Unknown
  Bacterial polypetide isolated from the Sargasso Sea
MPGCLGLDAMWQLVGFYLGWLKNPGKGRALGVGAVKFTGEVLKNIKIASYEIDMKRILIKEGTTVGLANGILKADGKKIYSAENLKVGLFKQ

SEQ ID NO: 152383 - protein, 115 aa, Unknown
  Bacterial polypetide isolated from the Sargasso Sea
LEAELDIKDDLWFFKCHFQKDPVMPGCLGLDAMWQLVGFYLGWTGEPGKGRALGVSTVKFTGEVLKKIKMATYKINIKRILKKEGAVVGLANGTLDADGKVIYVAENLKVGLFKS

SEQ ID NO: 152384 - protein, 173 aa, Unknown
  Bacterial polypetide isolated from the Sargasso Sea
MFNPKSSYNKEELIACSNGELFTKKGDGRLPSDLMLMFDEIVNIDDFSGNYNKGSIEAVLNVNPDLWFFKYHFKEDPVMPGCLGLDAMWQLLGFYLLWTGLPGIGRALGAENVKFFGQVLPKAKKVVYKLDIKRIINRGAIVGLADGEMFVDNKKIYSAEKLKVGLFKDPSNF

SEQ ID NO: 152385 - protein, 98 aa, Unknown
  Bacterial polypetide isolated from the Sargasso Sea
HFKEDPVMPGCLGLDAMWQLVGFYLGWLGNPGKGRALGVGTVKFTGEVLKNVKIAEYIIDMKRILIKEGTTVGLANGVLLADGKKIYSTENLKVGLFK

SEQ ID NO: 152386 - protein, 174 aa, Unknown
  Bacterial polypetide isolated from the Sargasso Sea
MKFNPKNTYNKEELIACSNGNLFTKEGDGRLPSDLMLMFDEIINIDDFSGYYKKGSIEAVLNINPDLWFFKYHFKEDPVMPGCLGLDAMWQLLGFYLLWTGLPGIGRALGADNVKFFGQVLPKAKKVVYKLDIKRVINRGAIVGLADGEMFVDEKKIYSAEKLKVGLFKDPSNF

SEQ ID NO: 152387 - protein, 134 aa, Unknown
  Bacterial polypetide isolated from the Sargasso Sea
MAFSPKNSYSKEELLDCADGNLFGEDNGKLPTPNMLMFDRITKISDSEGKYKKGKIIAELDVNQDLWFFDCHFKGDPVMPGCLGLDAMWQLVGFYLCWLGNPGRGRALGASEVKFFGQVLPTAKKVTLTIDMKR

SEQ ID NO: 152388 - protein, 89 aa, Unknown
  Bacterial polypetide isolated from the Sargasso Sea
GCLGLDAMWQLVGFYLGWLGNPGRGRALGVSTVKFTGEVLKNVKLATYEIDMKRILIKEGTTVGLANGILKADDKKIYSAENLKVGLFK

SEQ ID NO: 152389 - protein, 115 aa, Unknown
  Bacterial polypetide isolated from the Sargasso Sea
IKAELDVKDNLWFFDCHFKEDPVMPGCLGLDAMWQLVGFYLGWLGNPGKGRALGVGSVKFTGEVLKNVKIAEYIIDMKRVLIKEGTTVGLANGVLLADGKKIYTTENLKVGLFKS

SEQ ID NO: 152390 - protein, 139 aa, Unknown
  Bacterial polypetide isolated from the Sargasso Sea
MKKSSFNYNELIDCANGKLFGPGNAKLPSPPMLMFDRITEITESKGFYKKGSMKAELDIKDNLWFFDCHFREDPVMPGCLGLDAMWQLVGFFLGWLGNPGRGRALGVSTVKFTGEVLKNVKMATYEIDMKRISVKGRTL

SEQ ID NO: 152391 - protein, 119 aa, Unknown
  Bacterial polypetide isolated from the Sargasso Sea
MNTFTPQSSYSYEEIIECGKGNLFGKGNAQLPAPPMLMFDRITNVNKDGGVHGKGEITAELDINADLWFFKCHFLGDPIMPGCLGLDALWQMLGFYLGWLGYPGKGRALGVGEIKFVEE

SEQ ID NO: 152392 - protein, 133 aa, Unknown
  Bacterial polypetide isolated from the Sargasso Sea
MFDRITEINDDKGAFKKGLLKAELDIKNDLWFFDCHFKEDPVMPGCLGLDAMWQLVGFYLGWIGNPGKGRALGVGTVKFTGEVLQNVKLVTYEIDMKKIMSPGGTTVGLANGVVLADGKKIYSADSLKVGLFK

SEQ ID NO: 152393 - protein, 102 aa, Unknown
  Bacterial polypetide isolated from the Sargasso Sea
FDCHFQNDPVMPGCLGLDAMWQLVGFFLGWVGEPGKGRALGVNSVKFTGEVLKKVKMATYEINMKRILKKEGAVVGLANGILTADGKKIYTAENLKVGLFKS

SEQ ID NO: 152394 - protein, 107 aa, Unknown
  Bacterial polypetide isolated from the Sargasso Sea
MKQNSFTYDQLIDCAKGVLFGKGNAQLPMPPMLMFDRITSINENGGVFAKGEVIAELDIKEDLWFFECHFKDDPVMPGCLGLDAMWQLLGFYLGWLGQPGKGRALGV

SEQ ID NO: 152395 - protein, 136 aa, Unknown
  Bacterial polypetide isolated from the Sargasso Sea
MKKNSYTYDELINCGEGGLFGPENAKLPLPPMLMFDRITEISEKNGTYKKGIIKAELDIKDNLWFFNCHFKEDPVMPGCLGLDAMWQLVGFYLGWLGKPGKGRALGVNTVKFTGEVLKSVKIATYEINMKRILIKE

SEQ ID NO: 152396 - protein, 173 aa, Unknown; identical to SEQ ID NO: 152378
  Bacterial polypetide isolated from the Sargasso Sea

SEQ ID NO: 152397 - protein, 141 aa, Unknown
  Bacterial polypetide isolated from the Sargasso Sea
MKKNSYSYDDLITCGNGDLFGPGNAKLPLPPMLMFDRITEINENNGAFKKGSLKAELDIKNDLWFFDCHFKKDPVMPGCLGLDAMWQLVGFFLGWLGNPGKGRALGVGTVKFTGEVLQNVKNVRYEIDMKKIMSPGGTTVG

SEQ ID NO: 152398 - protein, 117 aa, Unknown
  Bacterial polypetide isolated from the Sargasso Sea
KGSITAELDIKDDLWFFNCHFKEDPVMPGCLGLDAMWQLVGFYLGWLGNPGKGRALGVGTVKFTGEVIKSVKKAKYIIDMKKIMSPNGTTVGLANGVLLADEKKIYSAENLKVGLFK

SEQ ID NO: 152399 - protein, 123 aa, Unknown
  Bacterial polypetide isolated from the Sargasso Sea
MKKSSFNYNELIDCANGKLFGPGNAKLPSPPMLMFDRITEITESEGFYKKGSMKAELDIKDNLWFFDCHFKEDPVMPGCLGLDAMWQLVGFFLGWLGNPGRGRALGVSTVKFTGEVLKNVKMA

SEQ ID NO: 152400 - protein, 99 aa, Unknown
  Bacterial polypetide isolated from the Sargasso Sea
CHFKSDPVMPGCLGLDAMWQLVGFYLGWLGNPGKGRALGVGTVKFTGEVLQSVKNVRYEIDMKKIMSPGGTTVGLANGVVFADNKKIYSADSLKVGLFK

SEQ ID NO: 152401 - protein, 171 aa, Unknown
  Bacterial polypetide isolated from the Sargasso Sea
MGKKHVFSTDDLIKHGEQAMFGAGNARLPIDQMRMMDRISKMTEDGGKYGRGEVIAELDIDPGQWFFKCHFVDDPVMPGCLGLDALWQLLGFFLAWSGGKGRGRALGCGEVKFTGQVLPTSGMVSYQLDIKRVINASLTLGIADGVVLLEDRVIYTAKNLRVGLFTSTDDL

SEQ ID NO: 152402 - protein, 120 aa, Unknown
  Bacterial polypetide isolated from the Sargasso Sea
FKKGFIKAELDIKDNLWFFDCHFRKDPVMPGCLGLDAMWQLVGFYLGWIGEPGKGRALGVNSVKFTGEVLKNIKLATYEINMKRILKKEGTVVGLANGILSADGKIIYRAENLKVGLFKS

SEQ ID NO: 152403 - protein, 117 aa, Unknown
  Bacterial polypetide isolated from the Sargasso Sea
MKQNSFAYEELIDCGKGVLFGKDNAQLPLPPMLMFDRITSINETGGFFSKGEVIAELDIKEDLWFFECHFKNDPVMPGCLGLDAMWQLLGFYLGWLGQPGKGRALGVGEVKFTGQVL

SEQ ID NO: 152404 - protein, 165 aa, Unknown
  Bacterial polypetide isolated from the Sargasso Sea
MQKNSFNYDELIACGKGDLFGEGNAKLPLPPMLMFDRITEIKKDIGEFKKGLIKAELDIKDNLWFFDCHFQNDPVMPGCLGLDAMWQLVGFYLGWIGEPGKGRALGVNSVKFTGEVLKKVKMATYEINMKRILKKEGAVVGLADGILTADGKIIYKAENLKVGFI

SEQ ID NO: 152405 - protein, 135 aa, Unknown
  Bacterial polypetide isolated from the Sargasso Sea
MTDRPSKIDYDGLISCAKGEMFGPGNPQLPMPPMLMFDRIIEISDNAGKASKGHVVAEFQIQPSHWFFECHFQGDPVMPGCLGLDALWQLTGFNLGWRGMVGKGRALGVGEVKFSGMVTPKTSLVTLSVEFTRVI

SEQ ID NO: 152406 - protein, 168 aa, Unknown
  Bacterial polypetide isolated from the Sargasso Sea
MKQKNSYNYNELIDCGNGNLFGEGNARLPLPPMLMFDRITEIKSGLGKFKKGIVRAELDIKDKMWFFDCHFKEDPVMPGCLGLDAMWQLVGFYLGWMGEPGKGRALGVNSVRFTGEVLKKVKIATYEVDMKKILKTEGGTVGFADGILKADGKQIYSAENLKVGVYKK

SEQ ID NO: 152407 - protein, 117 aa, Unknown
  Bacterial polypetide isolated from the Sargasso Sea
MRQNSFSYEQLIDCAKGLLFGKGNAQLPMPPMLMIDRITKINETGGNFSKGEVIAELDISSDLWFFKCHFKDDPVMPGCLGLDAMWQLVGFYLGWLGQPGKGRALGVGEVKFTGSSF

SEQ ID NO: 152408 - protein, 174 aa, Unknown
  Bacterial polypetide isolated from the Sargasso Sea
MNFLPQKKYTKDELINCSDGKLFTKDGDGRLPSDQMLMFDEISEINSSSGNYEKGKIIASLNIDPELWFFKCHFKEDPVMPGCLGLDAMWQLLGFYLLWSGLPGIGRALGAEKVKFFGQVLPTSKLVKYELDIKRVFSRGAIVGLADGKMFVDGKEVYTAENLKVGLFKDPSNF

SEQ ID NO: 152409 - protein, 109 aa, Unknown
  Bacterial polypetide isolated from the Sargasso Sea
KSNLWFFDCHFKDDPVMPGCLGLDAMWQLVGFYLGWLGQPGKGRALGVGEVKFTGQVLNTVKKVTYHISLKRLILRKLILGVADGILKADDKTIYEAKDMKVGLFTENK

SEQ ID NO: 152410 - protein, 133 aa, Unknown
  Bacterial polypetide isolated from the Sargasso Sea
MAEYPSSFSREDLLKCAKGELFGAGNAQLPEPPMLMMDRVTDISLDRGENGKGHVIAEYDINPDLWFFNCHFPGNPIMPGCLGLDGLWQLTGFNLGWRGWQGRGYALGVGEVKLTGMVRPDRKLLKYTVNSQK

SEQ ID NO: 152411 - protein, 98 aa, Unknown
  Bacterial polypetide isolated from the Sargasso Sea
HFKGDPVMPGCLGLDAMWQLVGFFLGWKGEPGKGRALGVNTVKFTGEVLINAKVAMYKVHMKRILKKEGAVVGLADGTLFSDGKAIYEAENLKVGLFK

SEQ ID NO: 152412 - protein, 124 aa, Unknown
  Bacterial polypetide isolated from the Sargasso Sea
YYKKGSIEAVLNINPDLWFFKYHFKEDPVMPGCLGLDAMWQLLGFYLLWTGLPGIGRALGADNIKFFGQVLPKAKKVVYKLDIKRVINRGAIVGLADGEMFVDEKKIYSAEKLKVGLFKDPSNF

SEQ ID NO: 152413 - protein, 150 aa, Unknown
  Bacterial polypetide isolated from the Sargasso Sea
MEKKSSYNYQDLIKCANGGLFGPGNAKLPLPPMLMFDRITEISENKGTLKKGLLKAELDIKDELWFFNCHFKEDPVMPGCLGLDAMWQLVGFFLGWLGNPGRGRALGVGSVKFTGEVLKSTKIASYEIEMKRILIKEGTAVGLANGILKA

SEQ ID NO: 152414 - protein, 166 aa, Unknown
  Bacterial polypetide isolated from the Sargasso Sea
MKSKSSFTKEELLKCAHGTMFGIGNARLPLPPMLMFDRIIKISADDGKFGKGEIIAELDVNPSLWFFDCHFEMDPVMPGCLGLDAMWQLVGFYLGWIGEPGRGRALGSGNVKFGGEILKDSKLVEYNIDMKKIIKRGVVVGVGDGIVKVDGKEIYRAEGLKVGLIK

SEQ ID NO: 152415 - protein, 101 aa, Unknown
  Bacterial polypetide isolated from the Sargasso Sea
FPGDPVMPGCLGLDALWQLVGFFLAWRGYPGKGRALGAGEVKFTGEIRPDAKKVTYELSISRIIDRKLVVGLADGTVAVDDKIIYTTKSLKVGLFTPEQTF

SEQ ID NO: 152416 - protein, 101 aa, Unknown
  Bacterial polypetide isolated from the Sargasso Sea
FDCHFKEDPVMPGCLGLDAMWQLVGFYLGWLGNPGRGRALGVSTVKFTGEVLKDVKMATYIIDMKRILIKGETTVGLANGILLADGKKIYSADSLKVGLFK

SEQ ID NO: 152417 - protein, 79 aa, Unknown
  Bacterial polypetide isolated from the Sargasso Sea
FLCWSELPGIGRALGAEKVKFFGQVLPTAKKVNYVLDIKRVVNRGAVVGFSDADMFVDDKHVYSADNLKVGLFADPSKF

SEQ ID NO: 152418 - protein, 120 aa, Unknown
  Bacterial polypetide isolated from the Sargasso Sea
MKKNSFKFDELIDCANGKLFGAGNAKLPSPPMLMFDRITNIQENKGVYSKGLIQAELDIKEKMWFFDCHFKEDPVMPGCLGLDAMWQLVGFYLGWTGEPGKGRALGVNSVKFTGEVLKTS

SEQ ID NO: 152419 - protein, 92 aa, Unknown
  Bacterial polypetide isolated from the Sargasso Sea
MPGCLGLDAMWQLVGFYLGWIGEPGKGRALGVNSVKFTGEVLKNIKMATYEINMKRILKKEGTAVGLANGILSADGKIIYTAENLKVGLFKS

SEQ ID NO: 152420 - protein, 168 aa, Unknown
  Bacterial polypetide isolated from the Sargasso Sea
MKQKNSYNYNELIDCANGSLFGEGNARLPLPPMLMFDRITEINSDTGKFKKGIIKAELDIKDNLWFFDCHFKEDPVMPGCLGLDAMWQLVGFYLGWIGEPGKGRALGVNSVRFTGEVLKKVKLATYEVDMKKVLKTEGGTVGFANGILKADGKLIYTAETLKVGVYKQ

SEQ ID NO: 152421 - protein, 102 aa, Unknown
  Bacterial polypetide isolated from the Sargasso Sea
FFNCHFKEDPVMPGFLGLDAMWQLVGFYLGWLGNPGKGRALGVGTVKFTGEVLKSVKKAKYVIDMKKIISPGGTTVGLANGVLFADDKKIYSAENLKVGLFK

SEQ ID NO: 152422 - protein, 96 aa, Unknown
  Bacterial polypetide isolated from the Sargasso Sea
KSDPVMPGCLGLDAMWQLVGFYLGWLGNPGKGRALGVGTVKFTGEVLQSVKNVRYEIDMKKIMSPGGTTVGLANGVVFADDKKIYSADSLKVGLFK

SEQ ID NO: 152423 - protein, 152 aa, Unknown
  Bacterial polypetide isolated from the Sargasso Sea
MKKNSYSYDELINCGEGNLFGPGNAKLPLPPMLMFDRITEINDNKGAFNKGSIKAELDIKNDLWFFDCHFKKDPVMPGCLGLDAMWQLVGFFLGWQGNPGKGRALGVSTVKFTGEVLQTVKNVRYEIDMKKIMSPGGTTVGLANGVLLADEK

SEQ ID NO: 152424 - protein, 126 aa, Unknown
  Bacterial polypetide isolated from the Sargasso Sea
NKDVGVHGKGEITAELDINPDLWFFKCHFLGDPIMPGCLGLDALWQMLGFYLGWLGYPGKGRALGVGEIKFVEEIKPDKELIEYKVSLKKSLNKKGLSIGYGDGQIIHKEKMIYHANDLRVGLFNE

SEQ ID NO: 152425 - protein, 116 aa, Unknown
  Bacterial polypetide isolated from the Sargasso Sea
MNKKSSYNYQELIDCGNGNLFGPGNAKLPLPPMLMFDRISEISENKGAFKKGIIKAELDIKDSLWFFECHFKNDSVMPGCLGLDAMWQLVGFYLGWLGNPGKGRALGVHSVKFTGE

SEQ ID NO: 152426 - protein, 166 aa, Unknown
  Bacterial polypetide isolated from the Sargasso Sea
MKKNSFSYDELISCANGELFGPGNAKLPSPPMLMFNRISEIDENKGFFKKGVIKAELDIKEDLWFFDCHFREDPVMPGCLGLDAMWQLVGFYLGWLGNPGRGRALGVSSVKFTGEVLKNVKIATYEIDMKRILIKGETTVGLANGILCADGKKIYSAENLKVGLVK

SEQ ID NO: 152427 - protein, 174 aa, Unknown
  Bacterial polypetide isolated from the Sargasso Sea
MSFNPKNKYSKEELVACSNGELFTKEGDGRLPSDLMLMFDEISNIDDHSGIYKKGSIEANLKINPDLWFFKYHFKEDPVMPGCLGLDAMWQLLGFYLLWTGLPGIGRALGADNIKFFGQVLPSANNVNYKIDIKRVINRGAIVGLADGEMFVDGRKIYSAEKLKVGLFKDPSSF

SEQ ID NO: 152428 - protein, 139 aa, Unknown
  Bacterial polypetide isolated from the Sargasso Sea
MNKKSSYNYQELIDCGNGKLFGPGNAKLPLPPMLMFDRISEIRENKGTFKKGLIKAELDIKDSLWFFECHFKNDSVMPGCLGLDAMWQLVGFYLGWLGNPGKGRALGVNSVKFTGEVLKNVKLATYEIDMKRVSIKEGT

SEQ ID NO: 152429 - protein, 122 aa, Unknown
  Bacterial polypetide isolated from the Sargasso Sea
NGAFKKGSLKAELDIKKDLWFFDCHFKEDPVMPGCLGLDAMWQLVGFYLGWIGNPGKGRALGVGTVKFTGEVLQNVKLVTYEIDMKKIMSPGGTTVGLANGVVTADGKKIYSADSLKVGLFK

SEQ ID NO: 152430 - protein, 108 aa, Unknown
  Bacterial polypetide isolated from the Sargasso Sea
IKEKMWFFDCHFKEDPVMPGCLGLDAMWQLVGFFLGWTGEPGKGRALGVNAVKFTGEVLKNVKIASYQIDMKRILKKKGTVVGLADGTLLADKKPIYEAENLKVGLFK

SEQ ID NO: 152431 - protein, 132 aa, Unknown
  Bacterial polypetide isolated from the Sargasso Sea
FDRITEISEDKGSFKKGLMRAELDIKDDLWFFDCHFREDPVMPGCLGLDAMWQLVGFYLGWLGNPGRGRALGVGTVKFTGEVLKSVKLATYEIEMKRVLIKEGTTVGLANGILKADEKKIYSADNLKVGLFK

SEQ ID NO: 152432 - protein, 101 aa, Unknown
  Bacterial polypetide isolated from the Sargasso Sea
MKKGSFNYEELISCANGELFGPGNAKLPSPPMLMFDRIIEINENKGFFKKGLIKAELDVKDNLWFFDCHFKEDPVMPGCLGLDAMWQLVGFYLGWLGNPGR

SEQ ID NO: 152433 - protein, 95 aa, Unknown
  Bacterial polypetide isolated from the Sargasso Sea
DPVMPGCLGLDAMWQLVGFFLGWIGNPGKGRALGVGTVKFTGEVLQSVKLVKYEIDMKKIMSPGGTTVGLANGIVLADGKKIYSADNLKVGLFRS

SEQ ID NO: 152434 - protein, 126 aa, Unknown
  Bacterial polypetide isolated from the Sargasso Sea
MSQKNSFTKKELLACASGDLFTKKHSRVPTDPMLMIDRITNISTEGGNFNKGIINAEKDINEENWFFHSHFIGDPVMPGCLGLDGFWQLTGFFLTWYGCTGRGRALGVGNVKFKGQVRPYHDIITY

SEQ ID NO: 152435 - protein, 143 aa, Unknown
  Bacterial polypetide isolated from the Sargasso Sea
ARLPAPPMLMFDRITQIKSDEGKFKKGTVKAELDINDKMWFFDCHFKADPVMPGCLGLDAMWQLVGFYLGWIGEPGKGRALGVNSVRFTGEVIKKVKMATYEVDMKKVLKTEGGTVGFADGILKADGKQIYTAENLKVGVYKQ

SEQ ID NO: 152436 - protein, 91 aa, Unknown
  Bacterial polypetide isolated from the Sargasso Sea
MPGCLGLDAMWQLVGFFLGWLGNPGRGRALGVSTVKFTGEVLKNVKMATYEIDIKRILVKGETTVGLANGILLADGKKIYSAENLKVGLFK

SEQ ID NO: 152437 - protein, 152 aa, Unknown
  Bacterial polypetide isolated from the Sargasso Sea
MKKNSFDYDELISCANGELFGSGNARLPSPPMLMFDRITEISEKNGAFDKGLMKAELDIKEDLWFFDCHFREDPVMPGCLGLDAMWQLVGFYLGWLGNPGRGRALGVSTVKFTGEVLKNVKMATYIIDMKRILIKGETTVGLANGILLADGK

SEQ ID NO: 152438 - protein, 120 aa, Unknown
  Bacterial polypetide isolated from the Sargasso Sea
AFDKGLMKAELDIKDDLCFFDCHFKEDPVMPGCLGLDAMWQLVGFYLGWLGNPGRGRALGVSTVKFTGEVLKNVKMATYIIDMKRILIKGETTVGLANGILLADGKKIYSADSLKVGLFK

SEQ ID NO: 152439 - protein, 117 aa, Unknown
  Bacterial polypetide isolated from the Sargasso Sea
KGSITAELDIKDDLWFFNCHFKEDPVMPGCLGLDAMWQLVGFYLGWLGNPGKGRALGVGTVKFTGEVLKSVKKAKYIIDMKKIISPGGTTVGLANGVLFADNKKIYSAENLKVGLFK

SEQ ID NO: 152440 - protein, 128 aa, Unknown
  Bacterial polypetide isolated from the Sargasso Sea
MKLGGLFKKGEIIAELDIKTDLWFFDCHFKGDPVMPGCLGLDAMWQLVGFYLGWLKQPGKGRALGVGEVKFTGQVLNTVKKVTYHISLKRLILRKLILGVADGILKADGQSIYEAKDMKVGLFQSKEK

SEQ ID NO: 152441 - protein, 141 aa, Unknown
  Bacterial polypetide isolated from the Sargasso Sea
DLMLMFDEIVNIDDFSGNYNKGSIEAVLNVNPDLWFFKYHFKEDPVMPGCLGLDAMWQLLGFYLLWTGLPGIGRALGAEHVKFFGQVLPKAKKVVYKLDIKRVINRGAIVGLADGEMFVDNKKIYSAEKLKVGLFKDPSNF

SEQ ID NO: 152442 - protein, 109 aa, Unknown
  Bacterial polypetide isolated from the Sargasso Sea
DVKDSLWFFDCHFKEDPVMPGCLGLDAMWQLVGFYLGWLGNPGRGRALGVNSVKFTGEVLKNVKLASYIIDMKRILIKKGTTVGLANGVLLADGKKIYSAENLKVGLFR

SEQ ID NO: 152443 - protein, 143 aa, Unknown
  Bacterial polypetide isolated from the Sargasso Sea
MKKNSYSNDELINCANGKLFGPGNAKLPLPPMLMFDRITEINDNKGAFKKGILKAELDIKKDLWFFDCHFKGDPVMPGCLGLDAMWQLVGFYLGWIGNPGKGRALGVGTVKFTGEVLQQVKLVSYEIDMKKIMSPGGTTVGLA

SEQ ID NO: 152444 - protein, 104 aa, Unknown
  Bacterial polypetide isolated from the Sargasso Sea
MKKKSYTYDELINCGEGGLFGPGNAKLPLPPMLMFDRITEISEKGGNNKKGIIKAELDIKDNLWFFNCHFKEDPVMPGCLGLDAMWQLVGFFLGWLGNQEKVGL

SEQ ID NO: 152445 - protein, 99 aa, Unknown
  Bacterial polypetide isolated from the Sargasso Sea
CHFKDDPVMPGCLGLDAMWQLVGFFLGWKGEPGKGRALGVNNVKFTGEVLINAKIAKYKVDMKRILKKEGAVVGLADGTLYCDNKAIYEAENLKVGLFK

SEQ ID NO: 152446 - protein, 159 aa, Unknown
  Bacterial polypetide isolated from the Sargasso Sea
MEKNSYNYDELISCGEGKLFGEGNAKLPLPPMLMFDRITEIKKDAGEFKKGFIEAELDIKDNLWFFNCHFQKDPVMPGCLGLDAMWQLVGFYLGWIGEPGKGRALGVNSVKFTGEVLKNIKMAKYEINMKRVLKKEGTTVGLANGTLSADGKTIYRAEN

SEQ ID NO: 152447 - protein, 151 aa, Unknown
  Bacterial polypetide isolated from the Sargasso Sea
MTKKHSFKYEELIDCANGKMFGPGNAKLPSPPMLMFDRITNIEDNKGIFGRGLIEAELDIKDKMWFFDCHFKEDPVMPGCLGLDAMWQLVGFFLGWKGEPGKGRALGVNSVKFTGEVLKNVKIAKYKVDMKRILKKEGAVVGLADGILFAD

SEQ ID NO: 152448 - protein, 115 aa, Unknown
  Bacterial polypetide isolated from the Sargasso Sea
MKQKNNYNYNELIDCANGVLFGEGNARLPSPPMLMFDRITQIQSSEGKFKKGIIKAELDIKDNMWFFDCHFKSDPVMPGCLGLDAMWQLVGFYLGWMGEPGKGRALGVNSVRFTG

SEQ ID NO: 152449 - protein, 149 aa, Unknown
  Bacterial polypetide isolated from the Sargasso Sea
LFGVGNARLPSPPMLMFDRITEIKSDTGKFKKGIVKAELDIKEKMWFFDCHFKEDPVMPGCLGLDAMWQLVGFYLGWIGEPGKGRALGVNSVRFTGEVIKKIKIASYEVNMKKILKTEGGTVGFADGVLKADGKQIYTAETLKVGVYKQ

SEQ ID NO: 152450 - protein, 111 aa, Unknown
  Bacterial polypetide isolated from the Sargasso Sea
MEKKSSYSYKDLINCGNGELFGPGNAKLPLPPMLMFDRITEVKEDNGAYKKGSITAELDIKDDLWFFNCHFKEDPVMPGCLGLDAMWQLVGFYLGWLGNPGKGRALGVGTV

SEQ ID NO: 152451 - protein, 110 aa, Unknown
  Bacterial polypetide isolated from the Sargasso Sea
LDIKPDLWFFECHFKNDPVMPGCLGLDAMWQLLGFYLGWLGKPGKGRALGVGEVKFSGEVLTTAKKVTYHISLKKLVLKRLTLGVADGIMNVDGKNIYSAKDMKVGLFKT

SEQ ID NO: 152452 - protein, 126 aa, Unknown
  Bacterial polypetide isolated from the Sargasso Sea
FEKKSSYSYQELIECGNGKLFGPGNAKLPLPPMLMFDRISEINEKKGIFKKGHMRAELDIKDSLWFFECHFKDDSVMPGCLGLDAMWQLVGFYLGWLGNPGKGRALGVNTVKFTGEVLKNVKMVKL

SEQ ID NO: 152453 - protein, 163 aa, Unknown
  Bacterial polypetide isolated from the Sargasso Sea
MKKNSFSYDDLISCGNGKLFGPGNAKLPLPPMLMFDRISEISENKGVFKKGFIKAELDIKDNLWFFDCHFREDPVMPGCLGLDAMWQLVGFYLGWLGNPGRGRALGVGTVKFTGEVLKIAKLASYEIDMKRILIKEGTTVGLANGILKADGEKIYSAENLKVG

SEQ ID NO: 152454 - protein, 110 aa, Unknown
  Bacterial polypetide isolated from the Sargasso Sea
MKKNSYSYNDLITCGNGDLFGPGNAKLPLPPMLMFDRITEINENNGAFNKGSLKAELDIKDDLWFFDCHFKKDPVMPGCLGLDAMWQLVGFFLGWLGNPGKGRALGVGNV

SEQ ID NO: 152455 - protein, 114 aa, Unknown
  Bacterial polypetide isolated from the Sargasso Sea
MKAELDIKDDLWFFDCHFKEDPVMPGCLGLDAMWQLVGFYLGWLGNPGRGRALGVSTVKFTGEVLKNVKMATYIIDMKRILIKGETTVGLANGILLADGKKIYSADSLKVGLFK

SEQ ID NO: 152456 - protein, 133 aa, Unknown
  Bacterial polypetide isolated from the Sargasso Sea
MFDRITEITENQGFYKKGSMKAELDIKDDLWFFDCHFKEDPVMPGCLGLDAMWQLVGFFLGWLGNPGRGRALGVSTVKFTGEVLKNVKMATYEIDIKRILVKGETTVGLANGILLADGKKIYSAENLKVGLFK

SEQ ID NO: 152457 - protein, 158 aa, Unknown
  Bacterial polypetide isolated from the Sargasso Sea
MKQKNNYNYDELIDCANGALFGEGNARLPSPPMLMFDRITQIQSGEGKFKKGIIKAELDIKDSMWFFDCHFKSDPVMPGCLGLDAMWQLVGFYLGWIGEPGKGRALGVNSVRFTGEVIKKVKMATYEVNMKKVLKTEGGTVGFADGILKADDKQIYTA

SEQ ID NO: 152458 - protein, 168 aa, Unknown
  Bacterial polypetide isolated from the Sargasso Sea
MKQNSFTYDQLIDCAKGILFGKGNAQLPMPPMLMFDRITLINEDGGIFSKGEVIAELDINENLWFFECHFKNDPVMPGCLGLDAMWQLLGFYLGWLGQPGKGRALGVGEVKFTGQVLQTVKKVTYHISLKRLILRKLILGVGDGVLKADGETIYEAKDMKVGLFSPEK

SEQ ID NO: 152459 - protein, 82 aa, Unknown
  Bacterial polypetide isolated from the Sargasso Sea
WQLVGFYLGWIGEPGKGRALGVNSVKFTGEVLKNIKMATYEINMKRILKKEGTAVGLANGILSADGKIIYKAENLKVGLFKS

SEQ ID NO: 152460 - protein, 115 aa, Unknown
  Bacterial polypetide isolated from the Sargasso Sea
LFKAELDIKKDLWFFDCHFKEDPVMPGCLGLDAMWQLVGFYLGWIGNPGKGRALGVGTVKFTGEVLQNVKLVKYEIDMKKIMSPGGTTVGLANGILLADEKKIYSADNLKVGLFK

SEQ ID NO: 152461 - protein, 111 aa, Unknown
  Bacterial polypetide isolated from the Sargasso Sea
MKKSSFNYNELIDCANGKLFGPGNAKLPSPPMLMFDRITEITESEGFYKKGSMKAELDIKDNLWFFDCHFREDPVMPGCLGLDAMWQLVGFFLGWLGNPGRGRALGVSTVK

SEQ ID NO: 152462 - protein, 112 aa, Unknown
  Bacterial polypetide isolated from the Sargasso Sea
ELDIKDNMWFFDCHFKSDPVMPGCLGLDAMWQLVGFYLGWIGEPGKGRALGVNSVRFTGEVLKKIKMATYEVDMKKVLKTEGGTVGFADGVLKADGKQIYTAENLKVGVYKQ

SEQ ID NO: 152463 - protein, 118 aa, Unknown
  Bacterial polypetide isolated from the Sargasso Sea
KKGLIKAELDIKDDLWFFNCHFKEDPVMPGCLGLDAMWQLVGFYLGWLGNPGRGRALGVSTVKFTGEVLKNVKKATYEIDMKRIIIKGETTVGLANGILLADGKKIYSAENLKVGLFK

SEQ ID NO: 152464 - protein, 161 aa, Unknown
  Bacterial polypetide isolated from the Sargasso Sea
MKKNSYSYDDLITCGNGELFGPGNAKLPLPPMLMFDRITEINDNNGTFNKGSLKAELDIKDNLWFFDCHFKSDPVMPGCLGLDAMWQLVGFYLGWLGNPGKGRALGVGTVKFTGEVLKNVKLVTYKIDMKKIMSPGGTTVGLANGFVFADDKKYIQQTALK

SEQ ID NO: 152465 - protein, 168 aa, Unknown
  Bacterial polypetide isolated from the Sargasso Sea
MKQKNSYNYNELIDCANGVLFGEGNARLPSPPMLMFDRITQIKLDEGKFKKGTIKAELDIKDNMWFFDCHFKADPVMPGCLGLDAMWQLVGFFLGWIGEPGKGRALGVNSVRFTGEVIKKVKMATYEVDMKKVLKTEGGTVGFADGILKADGKQIYTAENLKVGVYKQ

SEQ ID NO: 152466 - protein, 136 aa, Unknown
  Bacterial polypetide isolated from the Sargasso Sea
MKKNSYSYNELINCGEGKLFGPGNAKLPLPPMLMFDRITQINNDKGAFNKGSLSAELDIKKDLWFFDCHFQNDPVMPGCLGLDAMWQLVGFFLGWIGNPGKGRALGVGTVKFTGEVLQNVKLVRYEIDMKKIMSPG

SEQ ID NO: 152467 - protein, 134 aa, Unknown
  Bacterial polypetide isolated from the Sargasso Sea
MEKKSSYNYKELIECGNGKLFGPGNAKLPLPPMLMFDRISEIRESKGAFKKGLIKAELDIKDNLWFFECHFKEDSVMPGCLGLDAMWQLVGFYLGWLGNPGKGRALGVNSVKFTGEVLKNVKVASYKIDMKRIL

SEQ ID NO: 152468 - protein, 173 aa, Unknown; identical to SEQ ID NO: 152378
  Bacterial polypetide isolated from the Sargasso Sea

SEQ ID NO: 152469 - protein, 131 aa, Unknown
  Bacterial polypetide isolated from the Sargasso Sea
MKKNSYSYDDLISCGNGELFGPGNAKLPLPPMLMFDRITDINDDKGTFDKGSLKAELDIKDSLWFFDCHFKSDPVMPGCLGLDAMWQLVGFYLGWLGNPGKGRALGVGTVKFTGEVLKNVKLVTYKIDMKK

SEQ ID NO: 152470 - protein, 156 aa, Unknown
  Bacterial polypetide isolated from the Sargasso Sea
MKQNSFTYDQLIDCAKGLLFGKGNAQLPMPPMLMFDRITSINENGGIFSKGEVIAELDIKKDLWFFECHFKDDPVMPGCLGLDAMWQLLGFYLGWLGQPGKGRALGVGEVKFTGQVLQKVRKVTYHISLKRLILRKLILGVGDGVLKADGGNNLRS

SEQ ID NO: 152471 - protein, 168 aa, Unknown
  Bacterial polypetide isolated from the Sargasso Sea
MKQKNNYNYNELIDCANGNLFGEGNARLPSPPMLMFDRITEIQSDKGKFKKGVVKAELDIKDKMWFFDCHFKGDPVMPGCLGLDAMWQLVGFYLGWIGEPGKGRALGVNSVRFTGEVIKKVKMATYEVNMKKVLKTEGGTVGFADGILKADEKQIYTAENLKVGVYKQ

SEQ ID NO: 152472 - protein, 131 aa, Unknown
  Bacterial polypetide isolated from the Sargasso Sea
IELLKFNDDKGAFKKGSLKAELDIKKNLWFFDCHFKEDPVMPGCLGLDAMWQLVGFYLGWIGNPGKGRALGVGTVKFTGEVLQDVKLVKYEIDMKKIMSPGGTTVGLANGVVLADNKKIYSADSLKVGLFK

SEQ ID NO: 152473 - protein, 120 aa, Unknown
  Bacterial polypetide isolated from the Sargasso Sea
AFDKGVMKAELDIKKDLWFFDCHFKEDPVMPGCLGLDAMWQLVGFYLGWLGNPGRGRALGVSTVKFTGEVLKNVKMATYIIDMKRILIKGETTVGLANGILLADGKKIYSADSLKVGLFK

SEQ ID NO: 152474 - protein, 131 aa, Unknown
  Bacterial polypetide isolated from the Sargasso Sea
MKKKSFSYQDLISCGNGDLFGPGNAKLPLPPMLMFDRISEISENKGNFKKGYIKAELDIKDNLWFFDCHFKEDPVMPGCLGLDAMWQLVGFYLGWLGNPGRGRALGVGTVKFTGEVIKTVKMATYEIDRKE

SEQ ID NO: 152475 - protein, 112 aa, Unknown
  Bacterial polypetide isolated from the Sargasso Sea
INPELWFFKCHFKEDPVMPGCLGLDAMWQLLGFYLLWTGLPGIGRALGAENVKFFGQVLPKAKKVTYRLDIKRVINRGAIVGLADGEMLVDDKKIYSAEKLKVGLFKDPSNF

SEQ ID NO: 152476 - protein, 124 aa, Unknown
  Bacterial polypetide isolated from the Sargasso Sea
DEGKFKKGIIKAELDIKDNMWFFDCHFKSDPVMPGCLGLDAMWQLVGFYLGWIGEPGKGRALGVNSVRFTGEVIKKVKMATYEVNMKKVLKTEGGTVGFADGILKADDKQIYTAENLKVGVYKQ

SEQ ID NO: 152477 - protein, 172 aa, Unknown
  Bacterial polypetide isolated from the Sargasso Sea
VNPKSSYTKEELIACSNGELLQKEGDGRLPSDLMLMFDEIVNIDDFSGNYNKGSIEAVLNVNPDLWFFKYHFKEDPVMPGCLGLDAMWQLLGFYLLWTGLPGIGRALGAENVKFFGQVLPKAKKVVYKLDIKRVINRGAIVGLADGEMFVDNKKIYSAEKLKVGLFKDPSNF

SEQ ID NO: 152478 - protein, 96 aa, Unknown
  Bacterial polypetide isolated from the Sargasso Sea
MQKNSFNYEELIACGKGDLFGEGNAKLPLPPMLMFDRITQIKKDLGEFKKGYIKAELDIKESLWFFDCHFQNDPVMPGCLGLDAMWQLVGFYLGWI

SEQ ID NO: 152479 - protein, 82 aa, Unknown
  Bacterial polypetide isolated from the Sargasso Sea
MWQLVGFYLGWIGNPGKGRALGVNAVKFTGEVLKSAKMATYEIDMKRILIKEGTTVGLADGILLADGKKIYSAENLKVGLFK

SEQ ID NO: 152480 - protein, 110 aa, Unknown
  Bacterial polypetide isolated from the Sargasso Sea
DIKDNLWFFDCHFKNDPVMPGCLGLDAMWQLVGFYLGWIGEPGKGRALGVNSVKFTGEVLKKVKMATYEINMKRILKKEGAVVGLANGILSADKKIIYTAENLKVGLFKS

SEQ ID NO: 152481 - protein, 173 aa, Unknown
  Bacterial polypetide isolated from the Sargasso Sea
MFHPKSSYNKEELIACSNGELFTKEGDGRLPSDLMLMFDEIVNIDDFSGNYNKGSIEAVLNVNPDLWFFKYHFKEDPVMPGCLGLDAMWQLLGFYLLWTGLPGIGRALGAENVKFFGQVLPKAKKVVYKLDIKRVINRGAIVGLADGEMFVDNKKIYSAEKLKVGLFKDPSNF

SEQ ID NO: 152482 - protein, 117 aa, Unknown
  Bacterial polypetide isolated from the Sargasso Sea
GLIKAELDIKDKMWFSDCHFKGDPVMPGCLGLDAMWQMVGFYLGWMGEPGKGRALGVNSVRFTGEVLKKVKIATYEVDMKKVLKTEGGTVGFADGVLKADGKQIYSAENLKVGVYKQ

SEQ ID NO: 152483 - protein, 168 aa, Unknown
  Bacterial polypetide isolated from the Sargasso Sea
MIKKNSFKYEELIDCANGKLFGPGNAKLPSPPMLMFDRITNIQDKKGEFNKGLIEAELDIKDKMWFFDCHFKQDPVMPGCLGLDAMWQLVGFFLGWIGEPGKGRALGVNAVKFTGEVLTNTKIAKYKVDMKRLMKREGSVVGLANGILYADEKPIYEAENLKVGLYKS

SEQ ID NO: 152484 - protein, 138 aa, Unknown
  Bacterial polypetide isolated from the Sargasso Sea
MKKNSYSYNELINCGEGKLFGPGNAKLPLPPMLMFDRITEINDDKGAFKKGSLKAELDIKKNLWFFDCHFKEDPVMPGCLGLDAMWQLVGFYLGWIGNPGKGRALGVGTVKFTGEVLKDVKMVRYEIDMKKIMSPGGT

SEQ ID NO: 152485 - protein, 122 aa, Unknown
  Bacterial polypetide isolated from the Sargasso Sea
FQRPIIAELDIHPDLWFFDCHFKGDPVMPGCLGLDAMWQLVGFYLCWMDNPGRGRALGASEVKFFGQVLPSAKLVTLKIDMKRILNLDLTVGIGEGSMLVDGREIYSAKGLKVGLFQDTSSF

SEQ ID NO: 152486 - protein, 115 aa, Unknown
  Bacterial polypetide isolated from the Sargasso Sea
MEAELDIKDDLWFFKCHFQKDPVMPGCLGLDAMWQLVGFYLGWTGEPGKGRALGVSTVKFTGEVLKKIKMATYKINIKRILKKEGAVVGLANGTLDADGKVIYVAENLKVGLFKS

SEQ ID NO: 152487 - protein, 162 aa, Unknown
  Bacterial polypetide isolated from the Sargasso Sea
MKQNSFTYDQLIDCAKGILFGKGNAQLPMPPMLMFDRITRINENGGVFSKGEVIAELDIREDLWFFECHFKDDPVMPGCLGLDAMWQLLGFYLGWLGQPGKGRALGVGEVKFTGQVLQKVKKVTYHISLKRLILRKLILGVGDGVLKADGETIYEAKDMKVG

SEQ ID NO: 152488 - protein, 174 aa, Unknown
  Bacterial polypetide isolated from the Sargasso Sea
MSFIPKNYYSKDELIACSNGKLFTKDGDGKLPSDQMLMFDEINRIDNDSGTYKKGSIEATLNINPDLWFFKYHFKDDPVMPGCLGLDAMWQLLGFYLLWTGLPGIGRALGAENIKFFGQVLPTSKKVLYKINIKRIINRDAIVGLADGEMYVDDRKIYTAEKLKVGLFRDPSKF

SEQ ID NO: 152489 - protein, 168 aa, Unknown
  Bacterial polypetide isolated from the Sargasso Sea
MKQNSFNYDQLIDCAKGVLFGKGNAQLPMPPMLMFDRITSINESGGVFSKGEVIAELDIKEDLWFFECHFKDDPVMPGCLGLDAMWQLLGFYLGWLGQPGKGRALGVGEVKFTGQVLQKVKKVTYHISLKRLILRKLILGVGDGVLKADGETIYEAKDMKVGLFSPEK

SEQ ID NO: 152490 - protein, 85 aa, Unknown
  Bacterial polypetide isolated from the Sargasso Sea
MWQLVGFYLGWLEQPGKGRALGVGEVKFTGQVLDTVKKVTYQISIKRLILRKLILGVADGVLKADGKPIYEAKDMKVGLFQSDNK

SEQ ID NO: 152491 - protein, 194 aa, Unknown
  Bacterial polypetide isolated from the Sargasso Sea
MNCVLLLIGRAEGIWNKVSSERKFSFNYDELIECAKGRLFGPGNARLPLPPMLMFDRITRISEKGGANGKGEVEAEFDVKPDLWFFKCHFESDPVMPGCLGMDGLWQLLGFTLGWLGGPGSGRAISVGEVKFSGQVLPTAKLLKFQLDLKRVIMRRLFMGIADGRVLCDGETVFEAKDIKVGLFANNARAEAIS

SEQ ID NO: 152492 - protein, 175 aa, Unknown
  Bacterial polypetide isolated from the Sargasso Sea
MNKVFKPKDSYSKEDLVDCGFGQLFGEGNGRLPVDPMLMFDQITKINNTGGKYSKGEVYAELDVKSDLWFFDCHFKEDPVMPGCLGLDAMWQLLGFFLCWSELPGIGRALGAEKVKFFGQVLPTAKKVNYILDIKRVVNRGAVVGFSDADMFVDDKHVYSANNLKVGLFADPSKF

SEQ ID NO: 152493 - protein, 141 aa, Unknown
  Bacterial polypetide isolated from the Sargasso Sea
MRQKNTYSYDELINCANGSLFGEGNARLPLPPMLMFDRITQIKSGEGKFKKGVVKAELDIKDKMWFFDCHFKGDPVMPGCLGLDAMWQLVGFYLGWMGEPGKGRALGVNSVRFTGEVLKKVKIATYKVDMKKILKTEGGTV

SEQ ID NO: 152494 - protein, 132 aa, Unknown
  Bacterial polypetide isolated from the Sargasso Sea
MKQKNSYNYNELIDCANGNLFGEGNARLPLPPMLMFDRITEIKSGEGKFKKGLIKAELDIKEKMWFFDCHFKEDPVMPGCLGLDAMWQMVGFYLGWMGEPGKGRALGVNSVRFTGEVLKKVKMATYEVDMKK

SEQ ID NO: 152495 - protein, 167 aa, Unknown
  Bacterial polypetide isolated from the Sargasso Sea
MKQKNSYNYNELIDCANGSLFGEGNARLPLPPMLMFDRITEIKSGDGKFKKGLVKAELDIKDKMWFFDCHFKKDPVMPGCLGLDAMWQLVGFYLGWMGEPGKGRALGVNSVRFTGEVLKKVKIATYEVDMKKVLKTEGGTVGFADGILKADGKQIYSAENLKVGVYK

SEQ ID NO: 152496 - protein, 160 aa, Unknown
  Bacterial polypetide isolated from the Sargasso Sea
MKKKDSYDYKELIDCGKGLIFGEGNAKLPLPPMLMFDRITKIQENSGIYKKGFIKAELDIKDDLWFFNCHFQDDPVMPGCLGLDAMWQLVGFYLGWIGNPGKGRALGVSTVKFTGEVLKKTKMAVYEIDMKRILIKEGTTVGLANGILKADGKKYIQQKT

SEQ ID NO: 152497 - protein, 368 aa, Unknown
  Bacterial polypetide isolated from the Sargasso Sea
MNQTDLIKQIYSNYLSKIIDAKSFFNRPLTFTEKILFSHLSKDLQSIPERTKTFCTLSPDRVAMQDATAQMALLQFINAGMQTTAVPTTVHCDHLITAIKGADDDLDNALLTNKEVYDFLKSVCAKFGIGFWKPGAGIIHQTILENYAVPGTMMIGTDSHTPNAGGLGMVAIGVGGADAVDVMTNSPWEVNWPGIIGVKLTGQLSDWASPKDIILKLAGILTVKGGTGKIIEYFGEGTETISCTGKATITNMGAEVGATTSIFPYDKKMYEYLEATNRKDIADLADEIKNHLKADDDVHENPEKYYDEVIEINLSELEPHIVGPYSPDLSREISDMPDAVKDNNYDDDLKVGLIGSCTNSSYEDIEKA

SEQ ID NO: 152498 - protein, 90 aa, Unknown
  Bacterial polypetide isolated from the Sargasso Sea
VLDAMWQLVGFYLCWLGNPGRGRALGASEVKFFGQVLPTAKKVTLTIDMKRILNLDLTVGIGEGTMLVDDREIYTAKGLKVGLFQDTSSF

SEQ ID NO: 152499 - protein, 123 aa, Unknown
  Bacterial polypetide isolated from the Sargasso Sea
TESGLYSKGQVIAEMSISKDSWFFDCHFRGDPVMPGCLGLDALWQLLGFYLGWLGQPGKGRALGVGEVKFFGMITPKIKRLEYIINIKKLITRNLTLGVADGDLYADGEKVYSAENLKVGLFE

SEQ ID NO: 152500 - protein, 168 aa, Unknown
  Bacterial polypetide isolated from the Sargasso Sea
MKQKNNYNYNELIDCANGILFGEGNARLPSPPMLMFDRITQIQSGEGKYKKGIIKAELDIKDNMWFFDCHFKSDPVMPGCLGLDAMWQLVGFFLGWIGEPGKGRALGVNSVRFTGEVLKKVKMATYEINMKKVLKTEGGTVGFADGILKADDKQIYTAENLKVGVYKQ

SEQ ID NO: 152501 - protein, 87 aa, Unknown
  Bacterial polypetide isolated from the Sargasso Sea
LGLDAMWQLVGFYLGWLGNPGKGRALGVGTVKFTGEVLKNIKLVTYKIDMKKIMSPGGTTVGLANGFVFADDKKIYSADSLKVGLFK

SEQ ID NO: 152502 - protein, 133 aa, Unknown
  Bacterial polypetide isolated from the Sargasso Sea
MEKKSSYNYEELINCGNGKLFGPGNAKLPLPPMLMFDRITEVKEDNGAFKKGSITAELDIKDDLWFFSCHFKEDPVMPGCLGLDAMWQLVGFYLGWLGNPGKGRALGVGTVKFTGEVLKSVKKAKYIIDRKKL

SEQ ID NO: 152503 - protein, 120 aa, Unknown
  Bacterial polypetide isolated from the Sargasso Sea
MKQKNNYNYNELIDCANGSLFGEGNARLPLPPMLMFDRITEIKSGIGKFKKGVIKAELDIKDKLWFFDCHFKGDPVMPGCLGLDAMWQLVGFYLGWMGEPGKGRALGVNSVRFTGEVLKN

SEQ ID NO: 152504 - protein, 145 aa, Unknown
  Bacterial polypetide isolated from the Sargasso Sea
MQKNSYNYDELISCAEGKLFGEGNAKLPLPPMLMFDRIAEIKKDTGEFKKGFIKAELDIKDNLWFFDCHFKKDPVMPGCLGLDAMWQLVGFYLGWIGEPGKGRALGVNSVKFTGEVLKNIKMATYEINMKRILKKEGTVVGLANG

SEQ ID NO: 152505 - protein, 174 aa, Unknown
  Bacterial polypetide isolated from the Sargasso Sea
MTFIPQNSYSKDDLIACANGELFTKPGDGRLPSDQMLMFDEISNIDDSSGTYKKGSISAHLNINPDLWFFKCHFKTDPVMPGCLGLDAMWQLLGFYLLWSGLPGIGRALGADNVKFFGQVLPNAKEVTYKIDIKRIINRGAIVGLADGEMFVDDRKIYTAEKLKVGLFKDPSNF

SEQ ID NO: 152506 - protein, 166 aa, Unknown
  Bacterial polypetide isolated from the Sargasso Sea
MEQKNNYNYEDLLTCAKGELFGPGNAQLPMPPMLMFEKITNISSNGGTNDKGVIQAEMAIKPDLWFFDCHFIDDPVMPGCLGLDAMWQLLGFYLGWLGEKGRGRAISVGNVKFSGMILPQTKKLEYTINLKRVLTSKLVLGIADGLLSADGELIYEASDLRVALFS

SEQ ID NO: 152507 - protein, 166 aa, Unknown
  Bacterial polypetide isolated from the Sargasso Sea
MKKGSFNYDELITCANGELFGPGNAKLPSPPMLMFNRITEIDENKGFFNKGLIKAELDIKDNLWFFDCHFKEDPVMPGCLGLDAMWQLVGFYLGWLGNPGRGRALGVNSVKFTGEVLKNVKMATYVIDMKRILIKEGTTVGLANGILLADGKKIYSAESLKVGLFK

SEQ ID NO: 152508 - protein, 84 aa, Unknown
  Bacterial polypetide isolated from the Sargasso Sea
VALVGFYLGWLGQPGKGRALGVGEVKFTGQVLNTVKKVTYHISLKRLILRKLILGVADGILKADGSPIYEAKDMKVGLFQSAEK

SEQ ID NO: 152509 - protein, 168 aa, Unknown
  Bacterial polypetide isolated from the Sargasso Sea
MKQKNNYNYNELIDCANGVLFGEGNARLPSPPMLMFDRITQIQSGEGKFKKGIIKAELDIKDNMWFFDCHFKSDPVMPGCLGLDAMWQLVGFYLGWMGEPGKGRALGVNSVRFTGEVIKKVKMATYEVNMKKVLKTEGGTVGFADGILKADDKQIYTAENLKVGVYKQ

SEQ ID NO: 152510 - protein, 167 aa, Unknown
  Bacterial polypetide isolated from the Sargasso Sea
SYNKEELIACSNGELFTKEGDGRLPSDLMLMFDEIVNIDDFSGNYNKGSIEAVLNVNPDLWFFKYHFKEDPVMPGCLGLDAMWQLLGFYLLWTGLPGIGRALGAENVKFFGQVLPKAKKVVYKLDIKRVINRGAIVGLADGEMFVDNKKIYSAEKLKVGLFKDPSNF

SEQ ID NO: 152511 - protein, 472 aa, Unknown
  Bacterial polypetide isolated from the Sargasso Sea
VKLTGQLSDWASPKDIILKLAGIFTVKGGTGKIIEYFGEGTETISCTGKATITNMGAEVGATTSIFPYDKKMYEYLEATNRKDIANLAHEIKNHLKADDDVHENPEKYYDEVIEINLSELEPHIVGPYSPDLSREISDMPDAVKDNNYDDDLKVGLIGSCTNSSYEDIEKAAHVAKQALDAGLKAKSEFYITPGSNQIKATMERDGYTKIFEELGGKVLANACGPCIGQWKRSDISDGEKNTIITSFNRNFAKRNDGNAATESFVASPEIVTALAISGKLSFNPSKDKLTLNDGSSFSFESPVGSELPEMGFEKIGSDDFLKAELRPNTEIVIKEESDRLQVLEPFMEWNKEEMNNLKILLKAEGKCTTDHVSPAGPWLKYRGHLENISQNMYSGALNAFTKTNGEAIDLINDKTDNIYEVAKTYKENNIDWIAVADENYGEGSSREHAAMEPRFMGCKIIIAKSFARIAQT

SEQ ID NO: 152512 - protein, 97 aa, Unknown
  Bacterial polypetide isolated from the Sargasso Sea
MKKNSYSYDELINCGEGKLFGPGNAKLPLPPMLMFDRITEINDDKGAFKKGLLKAELDIKNDLWFFNCHFKEDPVMPGCLGLDAMWQLVGFYLGWIG

SEQ ID NO: 152513 - protein, 91 aa, Unknown
  Bacterial polypetide isolated from the Sargasso Sea
GCLGLDAMWQLVGFYLGWLGQPGKGRALGVGEVKFTGQVLNTVKKVSYHISLKKLILRKLILGVADGVLKADGESIYQAKDMKVGLFTPNK

SEQ ID NO: 152514 - protein, 376 aa, Unknown
  Bacterial polypetide isolated from the Sargasso Sea
MNQTDLIKQIYNNYLSKIIDAKSFFNRPLTYTEKILFSHLSEDLQSIPERTKTFCTLSPDRVAMQDATAQMALLQFINAGMQTTAVPTTVHCDHLITAIKGADDDLDNALLTNKEVYDFLKSVCAKYGIGFWKPGAGIIHQTILENYAVPGTMMIGTDSHTPNAGGLGMVAIGVGGADAVDVMTNSPWEVNWPGMIGVKLTGQLSDWASPKDIILKLAGILTVKGGTGKIIEYFGEGTETISCTGKATITNMGAEVGATTSIFPYDKKMYEYLEATNRKDIADLAHEIKNHLKADDDVHENPEKYYDEVIEINLSELEPHIVGPYSPDLSREISDMPDAVKDNNYDDDLKVGLIGSCTNSSYEDIEKAAHVAKQAL

SEQ ID NO: 152515 - protein, 168 aa, Unknown
  Bacterial polypetide isolated from the Sargasso Sea
MKQKNNYNYNELIDCANGALFGEGNARLPSPPMLMFDRITQIQSGEGKFKKGIIKAELDVKDNMWFFDCHFKSDPVMPGCLGLDAMWQLVGFYLGWIGEPGKGRALGVNSVRFTGEVIKKVKMATYEVNMKKVLKTEGGTVGFADGILKADDKQIYTAENLKVGVYKQ

SEQ ID NO: 152516 - protein, 126 aa, Unknown
  Bacterial polypetide isolated from the Sargasso Sea
KRIQGEFKKGFIKAELDIKDNLWFFDCHFKKDPVMPGCLGLDAMWQLVGFYLGWIGEPGKGRALGVNSVKFTGEVLKNVKMATYEINMKRILKKEGTAVGLANGILSADGKIIYTAENLKVGLFKS

SEQ ID NO: 152517 - protein, 161 aa, Unknown
  Bacterial polypetide isolated from the Sargasso Sea
MKKNSFSYDDLISCGNGQLFGPGNAKLPLPPMLMFDRITKINENEGSFKKGLIKAELDIKDELWFFKCHFNEDPVMPGCLGLDAMWQLVGFYLGWLGNPGKGRALGVNTVKFTGEVLKNVKMASYEIDMKRILIKEGTTVGLANGILMADGKKIYSAENLK

SEQ ID NO: 152518 - protein, 116 aa, Unknown
  Bacterial polypetide isolated from the Sargasso Sea
GSITAELDIKDDLWFFDCHFKEDPVMPGCLGLDAMWQLVGFYLGWLGNPGKGRALGVGNVKFTGEVLKRVKKAKYIIDMKKILSPSGTTVGLANGILLADEKKIYSAENLKVGLFK

SEQ ID NO: 152519 - protein, 166 aa, Unknown
  Bacterial polypetide isolated from the Sargasso Sea
MEQKNNYNYEDLITCARGELFGPGNAQLPMPPMLMFDKINNISSEGGSNNKGVINAEMEIKPDLWFFDCHFIDDPVMPGCLGLDAMWQLLGFYLGWLGEKGRGRAISVGNVKFSGMILPQTKKLEYTINLKRVLTSKLVLGIADGILSADGEIIYEASDLRVALFS

SEQ ID NO: 152520 - protein, 168 aa, Unknown
  Bacterial polypetide isolated from the Sargasso Sea
MKQNSFTYDQLIDCAKGVLFGKGNAQLPMPPMLMFDRITSINENGGVFAKGEVIAELDIKEDLWFFECHFKDDPVMPGCLGLDAMWQLLGFYLGWLGQPGKGRALGVGEVKFTGQVLQKVKKVTYHISLKRLILRKLILGVGDGVLKADGETIYEAKDMKVGLFSPEK

SEQ ID NO: 152521 - protein, 174 aa, Unknown
  Bacterial polypetide isolated from the Sargasso Sea
MSFNPKNKYSKEELVACSNGELFTKEGDGRLPSDLMLMFDEISNIDDHSGIYKKGSIEANLKINPDLWFFKYHFKEDPVMPGCLGLDAMWQLLGFYLLWTGLPGIGRALGADNIKFFGQVLPSANNVIYKIDIKRVINRGAIVGLADGEMFVDGKKIYSAEKLKVGLFKDPSSF

SEQ ID NO: 152522 - protein, 175 aa, Unknown
  Bacterial polypetide isolated from the Sargasso Sea
MELPSDRKNSYDYDELLSCANGTLFSPDSGRLPLPGMLMTDRINLISKEGGEYGKGEIHAELDINPEMWFFKSHFHEDPVMPGCLGLDALWQLVGFHLVWLGFKGRGRALGVNKVRFTGQILPTSKLVSFKLDFKRFITRKLILAIADGTVAVDGRKIYEAEDLRVGLFTSTEDF

SEQ ID NO: 152523 - protein, 168 aa, Unknown
  Bacterial polypetide isolated from the Sargasso Sea
MKQKNNYNYNELIDCANGVLFGEGNARLPSPPMLMFDRITQIQSGEGKFKKGIIKAELDIKDNMWFFDCHFKSDPVMPGCLGLDAMWQLVGFYLGWIGEPGKGRALGVNSVRFTGEVIKKVKMATYEVNMKKVLKTEGGTVGFADGTLKADDKQIYTAENLKVGVYKQ

SEQ ID NO: 152524 - protein, 171 aa, Unknown
  Bacterial polypetide isolated from the Sargasso Sea
MNTFTPQSSYSYEEIIECGKGNLFGEGNAQLPAPPMLMFDRITRVNKDGGIHGKGEITAELDINADLWFFKCHFLGDPVMPGCLGLDALWQMLGFYLGWLGYPGKGRALGVGEIKFVEEIKPDKELIEYKVSLKKSLNKKGLSIGYGDGQIIHKEKIIYHANDLRVGLFNE

SEQ ID NO: 152525 - protein, 173 aa, Unknown
  Bacterial polypetide isolated from the Sargasso Sea
MFNPKSCYKKDELIACSNGELFTKEGDGRLPSDLMLMFDEITNIDDFSGNYNKGSIEAVLDINPDLWFFKYHFKEDPVMPGCLGLDAMWQLLGFYLLWTGLPGIGRALGADNIKFFGQVLPKAKKVVYKLDIKRVINRGAIVGLADGEMFVDGKKIYSAERLKVGLFKDPSNF

SEQ ID NO: 152526 - protein, 163 aa, Unknown
  Bacterial polypetide isolated from the Sargasso Sea
MKISKEELLKCSSGEMFGIGNPQLPMPPMLMFDHICEISKDSGINKMGHVVAELIISPNMWFFDCHFVGDPVMPGCLGLDALWQLTGFNLGWRGLKGRGRALGVGEVKFKGMVTPNTKLIRYEINFSRVLERRLKLGISDGKVFADGEEIFTAKGLKVGLFED

SEQ ID NO: 152527 - protein, 181 aa, Unknown
  Bacterial polypetide isolated from the Sargasso Sea
MNNKKHFSKKDLLSSGIGKLFESLDGKLPTPPMLMMDRIIHISDQGGAYGKGEIKAELDIDKSLWFFDCHFKNDPVMPGCLGLDGFWQLLGFFLTWAGGKGKGRALGVKDLKFKGQVRPYHEKITYHIDIKKFITRPTHMVWGDAVLKVKNKAIYFAKDLQVGLFESLTWDHGKDPSLDPF

SEQ ID NO: 152528 - protein, 166 aa, Unknown
  Bacterial polypetide isolated from the Sargasso Sea
MKSKSSFTKEELLECAHGSMFGVGNARLPLPPMLMFDRITKITDHGGKFNKGEIMAEFDINPSLWFFDCHFEMDPVMPGCLGLDALWQLVGFYLGWIGEPGRGRALGSGAVKFGGEILKDSKLVEYHIDMKKVIKRSVIVGVGDATVKVDGKEIYQAENLKVGLIK

SEQ ID NO: 152529 - protein, 121 aa, Unknown
  Bacterial polypetide isolated from the Sargasso Sea
MKKSSFNYDELISCANGELFGPGNAKLPSPPMLMFDRITEISEKNGAFDKGIMKAELDIKDDLWFFDCHFKEDPVMPGCLGLDAMWQLVGFYLGWLGNPGRGRALGVSTVKFTGEVLKNVK

SEQ ID NO: 152530 - protein, 165 aa, Unknown
  Bacterial polypetide isolated from the Sargasso Sea
DLIECAKGRLFGPGNARLPLPPMLMFDRITRISEEGGANGKGEVEAEFDVKPDLWFFKCHFESDPVMPGCLGMDGLWQLLGFTLGWLGGPGSGRAISVGEVKFSGQVLPTAKLLKFQLDLKRVIMRRLFMGIADGRVLCDGETVFEAKDIKVGLFANNPSIEAAT

SEQ ID NO: 152531 - protein, 167 aa, Unknown
  Bacterial polypetide isolated from the Sargasso Sea
MKQKNNYNYNELIECANGNLFGEGNARLPSPPMLMFDRITEIKSDGGEFKKGVIKAELDIKEKMWFFDCHFKGDPVMPGCLGLDAMWQLVGFFLGWIGEPGKGRALGVNSVRFTGEVLKNVKLASYEIDMKKVLKTEGGTVGFADGILKADGKKIYTAENLKVGVYK

SEQ ID NO: 152532 - protein, 91 aa, Unknown
  Bacterial polypetide isolated from the Sargasso Sea
MPGCLGLDAMWQLVGFYLGWLGNPGKGRALGVGTVKFTGEVLKSVKKAKYIIDMKKIISPGGTTVGLANGILLADDKKIYGAENLKVGLFK

SEQ ID NO: 152533 - protein, 174 aa, Unknown; identical to SEQ ID NO: 152488
  Bacterial polypetide isolated from the Sargasso Sea

SEQ ID NO: 152534 - protein, 170 aa, Unknown
  Bacterial polypetide isolated from the Sargasso Sea
MRKNFSSINYEGLISCAKGEMFGEGNPQLPMPPMLMIDRITEISSDGGTNEKGHVIAELDIDPELWFFKCHFFNDPVMPGCLGVDALWQLTGFNLGWRGMEGRGRALGVGEVKFTGMVTPQIKLVTYEVNFTRIINRRLKLGLADGRVFADGEQIYSTRDMKVGLFNQQT

SEQ ID NO: 152535 - protein, 173 aa, Unknown
  Bacterial polypetide isolated from the Sargasso Sea
MFSPQNSYTKDDLVACSNGELFTKDGDGRLPSDQMLMFDEITNIDDFSGAYKKGSIEAVLNINPELWFFKCHFKEDPVMPGCLGLDAMWQLLGFYLLWTGLPGIGRALGAENVKFFGQVLPKAKKVTYRLDIKRVINRGAIVGLADGEMLVDDKKIYSAEKLKVGLFKDPSNF

SEQ ID NO: 152536 - protein, 228 aa, Unknown
  Bacterial polypetide isolated from the Sargasso Sea
ASGIVSSLYHLEPGMVWKKEEISSRLAEISGSKSHPTNLSWQVVESLPVSEVIKTGSHPRDEHIKAWIESMENLSELGINVICYNFMPILDWTRTELAAPMSSGATAMYFDLLDFIAFDCFILERINAQSYYEKQLMDVAKKRFEGFSKEKKSTLSKNITAGLPGAGEKLTFEEVKRRLEGYSAIDADKLRENFKYFLDAVVPTAEKLGVRLCCHPDDPPWPLLGLPR

SEQ ID NO: 152537 - protein, 182 aa, Unknown
  Bacterial polypetide isolated from the Sargasso Sea
KKNYGIFLEEVIPTAEKFGIKMCVHPDDPPRNILGLPRVVSSEADIDWILNYYPSKSNGLTLCSGSLGASEDNDVIKIASKFSNKVFFAHLRNVSKEFDGSFEETAHLTGDINMTKLISVILDEEKRRRSSGESQIDIPFRPDHGHELLSDGKKNTHPGYPLIGRLRGLSELRGVVHAIESL

SEQ ID NO: 152538 - protein, 198 aa, Unknown
  Bacterial polypetide isolated from the Sargasso Sea
ALDLYKNIDSEQLKKNLAYFLEEIIPVAEEAGVRMAIHPDDPPRPLLGLPRIISTEKDLSELLNMIDSPSNGFTMCAGSYGANPDNDLVGMIERYGHRLSFTHLRSTKTIEGKDWCFYEADHLAGDADMYGIVRALVKEQRKRVAQGRADHQIPMRPDHGHRMLDDLKKESNPGYSCIGRLRGLAELRGLEMGIEKSL

SEQ ID NO: 152539 - protein, 283 aa, Unknown
  Bacterial polypetide isolated from the Sargasso Sea
FRWFGHNDPSKLDQIRQIGVEGIVTSLAQMKYGEKWSSIEIKKRKKFIETFNISKNKKLTWSVVESLPVHNDIKKRSGKYRYYIDQYKESLVNLGKNNIKNICYNFMPLIDWVRTDLNHQLPNGAFALKYNHLHVCAFENFILKSKTAKKRYSTKDIHTSKKILQKMNSSDLKKLKMSLLGGLAANDRKYTIKDLNYEIDQFAELNHSDLQNNLKDFIEEIYPIIKKYNIHYNIHPDDPPYNVYGLPRIVSNEKDINFIVNIKKDTNVGLTFCTGSLGVNKKK

SEQ ID NO: 152540 - protein, 304 aa, Unknown
  Bacterial polypetide isolated from the Sargasso Sea
ESLPVSEEIKKQSGNWQCHIENYIKSMQNIAESGVFTICYNFMPILDWTRTDLSWRLSNGARCLRFDLIDFLIFDVYILKRSGAKSNYLNSQLKSAEKRLKKLSQVKIDQLTYNIIKGLPGTVENLSINDVKKQILSYSEISEKQLRKNFIEFLSRVIPAAQDLGIKLCCHPDDPPFSLMGLPRIVSTEKDYKTILEEVDLPANGITLCSGSLGVRHDNDVLGIMKRYGHRVHFLHLRNVKRENSSIPCSFYEAEHLNGDTDMIGLITEILFQEKCRRDEGREDWSIPFRPDHGHEILDDLDRS

SEQ ID NO: 152541 - protein, 272 aa, Unknown
  Bacterial polypetide isolated from the Sargasso Sea
MLYSFRWFGHNDLQKLDQIRQIGVKGIVSSLAQIKYGEKWSAFEIKKRKKFIESFKINNNKNLTWSVVESLPVHNDIKKRSGRYKYYIDQYKESLVNLGKNKIKNICYNFMPLIDWVRTDLNYQLPNGAFALKYNHLHVCAFENFILKSKTAKKRYSPKDIHTSKKILQKMNSSDLKKLKMSLLGGLAANDRKYTIKDLNYEIDQFAELNHSDLQNNLKDFIEEIYPIIKKYNIHYNIHPDDPPYNVYGLPRIVSNEKDINFIVNIKKRYKW

SEQ ID NO: 152542 - protein, 277 aa, Unknown
  Bacterial polypetide isolated from the Sargasso Sea
NNANNINLKWNVVESIPVHNDIKLRHKNFRKFIDNYKDTISNISKNNIRTICYNFMPIVDWTRTQLDFKLPTDGLALKFNYQHIIIFETFILKLNDVDSRYSSKEIRIAEKIFKKMNKKDIENLKIAVMGGLPASEKKYSINEFKKMIYAYRNYQKKELQENLIDFVKEIIPVAEECKVNMTLHPDDPPVALFGIPKIVSNLKDYKFILDSYNSLSNGMAFCSGSLASNVNNNIYKIFDTFKEKINFIHLRNVKIDKDRKSFYETNHLSGDVDFVKL

SEQ ID NO: 152543 - protein, 175 aa, Unknown
  Bacterial polypetide isolated from the Sargasso Sea
CSCCSELGLRLCCHPDDPPFPLLGLPRIMSTEKDYKIIMDEIPLKSNGITLCSGSLGVRAENNLIKMMSRLGDRVHFLHLRNVKRESDMVPNSFYEEEHLKGNTDMVSLIRAILEEEKRRRKNKREDWSIPFRPDHGHNILDDLKKKSKPGYPAIGRLKGLAELRGILTALSNSL

SEQ ID NO: 152544 - protein, 196 aa, Unknown
  Bacterial polypetide isolated from the Sargasso Sea
MELSFRWYGPNDVVKLTDIRQSNADYIVTSLHQIPAGEKWNYSDINERVNFIEKSNHKNSNRLKLNVIESIPVHNDIKLRKGNYRKYIDNYKDSIVNVAKNNIKTICYNFMPIIDWTRTQIDYKLPTDGLALRFSFIHFIIFEKFILKLPELEERYNENLLIKAENEYKIMSERDIDNLKIAIMGGLPASETKYNI

SEQ ID NO: 152545 - protein, 285 aa, Unknown
  Bacterial polypetide isolated from the Sargasso Sea
WTRTELAAPMSSGATAMYFDLLDFIAFDCFILERIKAQNDYEKKLVDKAKHRFEGFSKEKKLTLTKNITAGLPGASEKLTFQEVKRRLESYSGIDAHKLRENFKYFLDAVVPSAEKMGVRLCCHPDDPPWPLLGLPRIMSSEEDFNWLVNIHPSKANGITLCTGSLGTSFENDLPGMVSRMGKHIHFLHLRNVTREQESIPTSFYEDEHLSGHTDMIETISEIIREENRRKAEGREDWSIPMRPDHGQNILDDHGRNAMPGYPAIGRLKGLAELRGVFKALERKI

SEQ ID NO: 152546 - protein, 395 aa, Unknown
  Bacterial polypetide isolated from the Sargasso Sea
MLYSFRWFGHNDPSKLDQIRQIGVEGIVSSLAQIKYGEKWSSIEIKKRKKFIESFKISKNKKLTWSVVESLPVHNDIKKRSGRYRYYIDQYKKSLINLGKNKIKNICYNFMPLIDWVRTDLNHQLPNGAFALKYNHLHVCAFENFILKSKTAKKRYSSKEIHTSKKILQKMNSSDLKKLKMSLLGGLAANDRKYTIKDLNYEIDQFAELNHSDLQNNLKDFIEEIYPIIKKYNIHYNIHPDDPPYNVYGLPRIVSNEKDINFIVNIKKDTNVGLTFCTGSLGVNKKNNLVNIIKKYGSYINFIHLRNIRHIPKSLDFYEDDHLNGSLDMVSIVKAILKEENKRKKSNHPIKQIPMRPDHGHTILHDQFNSVIPGYSLLGRMKGLDQLKGVIKAIN

SEQ ID NO: 152547 - protein, 258 aa, Unknown
  Bacterial polypetide isolated from the Sargasso Sea
MQYSFRWYGPKDPVKLTDIRQSNADYIVTSLHQIPTGEKWNYTDVEDRINLINKSNNDYANKLKWNVVESIPVHNDIKLRKNNFKRYIANYKDTIVNIAKNKIPIICYNFMPIIDWTRTQLDLQLPTDGLALRFSYVQIIIFEKYILKLNNLENRYSDELLSEASNQYKLMSNSDLENLKFSVMGGLPAAEKKYTVEEFKEMLLSYKDINNDELQSNFSEFLKEIIPVAEENNIKMALHPDDPPISLFGLPRIVSNHE

SEQ ID NO: 152548 - protein, 234 aa, Unknown
  Bacterial polypetide isolated from the Sargasso Sea
MLETWRWFGPDDPVTCSDIRQAGADGIVTALHAAAPGEVWQADDIAARKGFIEAEGLTWSVVESIPVHPAIKLGNDRAAQHIDGWIQTMRNLAANGLEVICYNFMPVVDWTRTDLRWKARRGGLALRFDPVEFAAYDLFVLRRADADRDYTAEIIAQAEALHASMDEAAIERLESTIIAGLPGSELSHGREGIRAAIADYDELTAADLRANLIAFLEQAAPAAEECGVRICLHP

SEQ ID NO: 152549 - protein, 53 aa, Unknown
  Bacterial polypetide isolated from the Sargasso Sea
MEQTWRWYGPNDPVTLADVRQAGATGVVTALHHIPNGEVWTVDEILKRKAIIE

SEQ ID NO: 152550 - protein, 303 aa, Unknown
  Bacterial polypetide isolated from the Sargasso Sea
ENLSKCGIYNICYNFMPVLDWTRTHLHYQMKDGSKALYFDKTALAAYDLFIVKRKNAKKQYNENIILEAKNYYDSLTKEEIETLSMSIIAGLPGSEEEYSLEKFRNQLEYYESINKSDLQKNLIYFLEQIIPVAEKFGVRMCIHPDDPPFDLFGIPRVVSTYEDLDFIFKAIPSLSNGLTFCTGSLGVRTDNNLLEIFQEFAERIHFLHLRSTKRDDKGNFYEANHLEGDFDMFEVVRAILIEEQKRKKGNRSDWKIPMRPDHGHQMLDDLNKKTNPGYSAIGRLRGLAEIRGLALGIDKILS

SEQ ID NO: 152551 - protein, 252 aa, Unknown
  Bacterial polypetide isolated from the Sargasso Sea
MKETWRWYGEFDKISLAEIAQTGAQGIVTALHQIPYGDVWEKEPISVLKSKIENSGFDFTWDVVESLPVHENIKMGKGNLKTLFANYRTSIENLADAGVRTICYNFMPVLDWTRTHLKQPVSGGGTALRFSAAHMAAFEINMLGRKDAETEYSPDAVENGLRWIASSSDEEKNNLLLSIMAGLPGKFTRYDVAGLKSAISLYNGIDQAVLRQNYGRFLDEVIPTAEKLGIKMCVHPDDPPKEYFRVASNSFE

SEQ ID NO: 152552 - protein, 217 aa, Unknown
  Bacterial polypetide isolated from the Sargasso Sea
MSKETITNNTNENYNENHHHSHNLLPEEPELRVRALETLLVKKGLVDPNTLNKLIDTYENKVGPRNGARVIAKAWVDISFKERLLKNSTKAIEELSYTGRQGEHMVVVENTDEIHNMVVCTLCSCYPWPVLGLPPSWYKSDEYRARAVREPRKVLKEFGLVLKDNVRIKVWDSTSEMRYLVLPMRPKGTDLLSEDELAKLVTRNSMIGTGLPEIIND

SEQ ID NO: 152553 - protein, 185 aa, Unknown
  Bacterial polypetide isolated from the Sargasso Sea
LRVRALESLLQEKGLIDPAALDDLIDTYEHKVGPRNGAQVVAKAWNDPEYKRRLLEDATAAIAELGFSGVQGEDMLVVENTADVHNVTVCTLCSCYPWPVLGLPPVWYKSAPYRSRIVIDPRGVLAEFGLNIPESKEVRVWDSSAELRYLVLPERPAGTDGWSEAQLVELVTRDSMIGTGLVAAP

SEQ ID NO: 152554 - protein, 188 aa, Unknown
  Bacterial polypetide isolated from the Sargasso Sea
MSTHHHSTVPSDPELRVKALESLLVEKGLVAPKTLDELVDLYETKIGPRNGAKVVAKAWKDPEFKKYLLEKPTDAIASIGYRGRQGEQMRVVENTADIHNIVVCTLCSCYPWPVLGLPPVWYKSAPYRSRVVSDPRSVLEEFGTQLAENVEIRVWDSTSEMRYFVLPEAPADFQNKSLDELESMVSQK

SEQ ID NO: 152555 - protein, 144 aa, Unknown
  Bacterial polypetide isolated from the Sargasso Sea
MSTHHHTTVPSDPELRVKALESLLEEKGLVDPKTLNELVDLYETKIGPRNGAKVVAKAWKDPKFKKYLLEKPTDAIASLGYRGRQGEHMRVVENTADIHNIVVCTLCSCYPWPVLGLPPVWYKSAPYRSRVVSDPRSVWRNSEP

SEQ ID NO: 152556 - protein, 137 aa, Unknown
  Bacterial polypetide isolated from the Sargasso Sea
FKTWWLEDATEAMRPLGYTGRQGEHMMVTENTAEVHNVVVCTLCSCYPWPVLGLPPVWYKAAPYRSRVVADPRGVLREFGTELADDVEVRVWDSTAEMRYLVLPMRPAGTDDWSIEKLETLVTRNSMIGVELAQDPV

SEQ ID NO: 152557 - protein, 215 aa, Unknown
  Bacterial polypetide isolated from the Sargasso Sea
MTSDDHHSHDHTELPDSLTLKVKALESLLVEKGLVSEETLDALIETYEHKVGPRNGAQVVAKAWTHPEFKAWLLKDPNGAIASLGFTGRQGEHMQVVENTDTVHNLVVCTLCSCYPWPVLGLPPVWYKSAPYRARAVRDPRGVLTEFGTKLEPDIHIEVWDSTAEMRYLVLPQRPMGTEGWPEEKLADLVTRNSMIGVEKISLPGDDPSAGGEVS

SEQ ID NO: 152558 - protein, 166 aa, Unknown
  Bacterial polypetide isolated from the Sargasso Sea
MSDDHHSHDHTEPPDNLALKVKALESLLIEKGLVSEKTLDALIETYEHKVGPRNGAQVVAKAWTDPEFKAWLLKDPNGAIASLGFTGRQGEHMRVVENTDKVHNLVVCTLCSCYPWPVLGLPPVWYKSAPYRARAVRDPRGVLAEFGTQLGGDIQVEVWDSTAEMR

SEQ ID NO: 152559 - protein, 203 aa, Unknown
  Bacterial polypetide isolated from the Sargasso Sea
MSTHHHSTVPSDPELRVKALESLLVEKGLVDPKTLDELVDLYETKIGPRNGAKVVAKAWKDPEFKKYLLEKPTDAIASIGYRGRQGEHMRVVENSNDIHNIVVCTLCSCYPWPVLGLPPVWYKSAPYRSRVVSDPRSVLEEFGTQLAENVEIRVWDSTSEMRYFVLPEAPTDFHNKSLHELESMVTRNSIIGVEKIKEPENQS

SEQ ID NO: 152560 - protein, 275 aa, Unknown
  Bacterial polypetide isolated from the Sargasso Sea
GTIIWEARRLHAKGEINYEEFMDMAAASSPSPGHCNTMGTASSMNSVAEALGMSLPGCAVIPAPYREREQISFETGTRIVNMVHEDLTPSKIMTKKAFENAVVVASAIGASSNCTTHLIAIAKHMGVKFDLSNWQKLGHKIPLLANCQPAGEHLMEGFYRAGGIPAIMKELMKHKKIHQNLITVTGKTVAQNLRKKINVDRDVIKTFKDNLTDKAGFLVMKGNFFSSAIMKTSVISKEFRERYLSNPKHPNVFKGKKVVFEGPEDYHKRINSKKL

SEQ ID NO: 152561 - protein, 77 aa, Unknown
  Bacterial polypetide isolated from the Sargasso Sea
MLRGVGFTTEDFSKPFVGIASTGAKVTPCNMHINKLSETVEDSVNSSGGKGVLFNTITVSDGISMGTQGMKYSLISR

SEQ ID NO: 152562 - protein, 167 aa, Unknown
  Bacterial polypetide isolated from the Sargasso Sea
MVVVRYEGPVGGPGMPEMLDSTSRITAICREKNIVVGLMTDGRFSGGSVGLVIGHVGPEAAIGGPIGLLEDGDIIEVNLNKNELNCEQLSNPDIYRFRKSEWKNKLDKNNNFHPAVGVADTRLLNRMRCSAVSAVYGAGMHPNSSLWVSNPREPEVSNFVPENNHKQ

SEQ ID NO: 152563 - protein, 253 aa, Unknown
  Bacterial polypetide isolated from the Sargasso Sea
MKKRNFDHNKLPSRHVRVGSQKAPHRSYYYAMGLDEDDIDKPFVGVATCWNESAPCNISLMRQSKSVKDGVSKEGGTPREFTTITVTDGIAMGHQGMKSSLVSREIISDSIEVSMRGHCYDALVGVAGCDKSLPGMMMAMLRLNVPSVFIYGGSILPGSYKGKDVTVVDVFEAVGEFSAGKISEEELHELECVACPSAGSCGGQFTANTMACVSEAIGLALPYSAGPPAPDEGRDKYALESGKAVMDLLENNI

SEQ ID NO: 152564 - protein, 258 aa, Unknown
  Bacterial polypetide isolated from the Sargasso Sea
AVIDERSLVNGLVALLASGGSTNHSIHMVALARAAGLHLTWDDISDLSDVVPLLVRMYPNGPADVNAFEQAGSVPGLMRRLAEEGLIHLDATPVFGEMQDYLSRPALVDGQLVWQSVGESGDASVLSPSGSRFQATGGTKLLAGNLGRAVVKVSAVAPEYRVIEAPARVFSSQHAVEAAYKAGDLNQDAVIVVRHNGPAANGMPELHKLMPVLGNLQKAGYKVALVTDGRLSGASGKIPAAIHVTPEALHGGAIGLLA

SEQ ID NO: 152565 - protein, 337 aa, Unknown
  Bacterial polypetide isolated from the Sargasso Sea
KLAGSGMVVWEARKMLAKGEIKYEEFMDMVASSAPSAGHCNTMGTASSMNSVAEALGMSLPGGAIIPAPYREREQISYETGKRIVRMVHEDLTPSKIMTRKAFENAVVVASAIGGSSNCTAHLSAIAKHMGIKFDLSDWQKLGHNIPLLVNCQPAGEYLMESFHRAGAIPAVMKELIKNKKIHTNIKTVTGKTVGENLRKKVDVDNKVIKTFKNALTEKAGFLVMKSNFFSSAIMKTSVISKEFRDQYLSNPKQPNVFECKAIVFEGPEDYHKRLNDKKLKIDENSLLIIRGCGPVGYPGSAEVVNMQPPDRLLKKGIRHLPTLGDGRQSGTSESPS

SEQ ID NO: 152566 - protein, 303 aa, Unknown
  Bacterial polypetide isolated from the Sargasso Sea
MAASSAPSVGHCNTMGTASSMNSVAEALGMSLPGCAVIPAPYKERKHISFETGKRIVGMVHENLTPSKIMTRKAFENAIVVASAIGGSSNCTTHLSAIAKHMGIKFNLSDWQKLGHEIPLLVNCQPSGEYLMESFYSSGGVPAVMKELIKNNKIHKNLLTVTGKNIAQNLRKNIKVDPKVIKSFKNSLADKAGFLVMRSNFFSTAIMKTSVISKEFKDRYLSNPKHLNVFKCNAVVFEGPEDYHKRLNSKKLQIDENSILIIRGCGPFGYPGSAEVINMQPPDRLLKRGINTLPTLGDGRQSG

SEQ ID NO: 152567 - protein, 175 aa, Unknown
  Bacterial polypetide isolated from the Sargasso Sea
MKKFNKKKLPSRHTSLGPDKAPQRSFYYAMDLTEKDVAKPFVGVVSTWNEAAPCNIALMRQAQSVKKGVHQAGGTPREFCTITVTDGIAMGHEGMKSSLISRDVIADSTELTVRGHCYDALVGVAGCDKSLPGLMMAMVRLNVPSVFIYGGSILPGRFNGKDVTVVDVFEGVGKF

SEQ ID NO: 152568 - protein, 131 aa, Unknown
  Bacterial polypetide isolated from the Sargasso Sea
MLKFNKKKLPSRHTSLGPDKAPQRSFYYAMNLTEKDVAKPFVGVVSTWNEAAPCNIALMRQAQSVKKGVHQSGGTPREFCTITVTDGIAMGHEGMKSSLISRDVIADSTELTVRGHCYDALVGVAGCDKSL

SEQ ID NO: 152569 - protein, 348 aa, Unknown
  Bacterial polypetide isolated from the Sargasso Sea
FLLTQFKKLGKKPTAMLDRNLSYLSLVEILYGYPLDGVILTTGCDKTTPAALMAAATVNIPAIVLSGGPMLDGNYKGKKAGAGTIIWEARRLHAKGEINYEEFMDMAAASSPSPGHCNTMGTASSMNSVAEALGMSLPGCAVIPAPYREREQISFETGSRIVKMVHEDLTPSKIMTKKAFENAVIVASAIGASSNCTTHLIAIAKHMGVKFDLSNWQKLGHKIPLLANCQPAGEHLMEGFYRAGGIPAIMKELMKNNKIHQNLITVTGKTVAQNLRKKIDVDRDVIKTFKDNLTDKAGFLVMKGNFFSSAIMKTSVISKEFRKRYLSNPKHPNVFKGKAVVFEGPEDY

SEQ ID NO: 152570 - protein, 113 aa, Unknown
  Bacterial polypetide isolated from the Sargasso Sea
MKTFNKKKLPSRHTSLGPDRAPQRSFYYAMGETEKDVAKPFVGVVSTWNEAAPCNIALMRQAQSVKKGVKSGGGTPREFCTITVTDGIAMGHEGMKSSLVSRDVIADSTELTV

SEQ ID NO: 152571 - protein, 119 aa, Unknown
  Bacterial polypetide isolated from the Sargasso Sea
GGPGMPEMLKPTAAIMGAGLGKSVALITDGRFSGGTHGFVVGHIVPEAQEGGEIGLLKDGDQITIDAEKNTLSVDLSNSELANRKAAWKKPHYKFEKGILYKYIKNVATASEGCVTDSN

SEQ ID NO: 152572 - protein, 128 aa, Unknown
  Bacterial polypetide isolated from the Sargasso Sea
MKKFNKKKLPSRHTSLGPDKAPQRSFYYAMNLTEKDVAKPFVGVVSTWNEAAPCNIALMRQAQSVKKGVQSAGGTPREFCTITVTDGIAMGHEGMKSSLISRDVIADSTELTVRGHCYDALVGVAGCD

SEQ ID NO: 152573 - protein, 154 aa, Unknown
  Bacterial polypetide isolated from the Sargasso Sea
MKKFNKKKLPSRHTSLGPDKAPQRSFYYAMDLTEKDVAKPFVGVVSTWNEAAPCNIALMRQAQSVKKGVHQAGGTPREFCTITVTDGIAMGHEGMKSSLISRDVIADSTELTVRGHCYDALVGVAGCDKSLPGLMMAMVRLNVPKCFHLWWFNI

SEQ ID NO: 152574 - protein, 150 aa, Unknown
  Bacterial polypetide isolated from the Sargasso Sea
TGETLAEQVDRLAPKKPDGRVIYPVKKPYKETGGLRLLGGNLSPEFSSILKLAGVEGGLDNNVFIGKARIFDGEQKLLWTLENEPESFNNNDMVVVRYEGPVGGPGMPEMLDSTSRITTLCREREIIVGLMTDGRFSGGSVGLVIGHVGP

SEQ ID NO: 152575 - protein, 128 aa, Unknown
  Bacterial polypetide isolated from the Sargasso Sea
MKKFNKKKLPSRHTTIGADKAPQRSFYYAMDLTEKDVAKPFVGVVSTWNEAAPCNINLMKQAQSVKKGVQATGGTPREFCTITVTDGIAMGHEGMKSSLISRDVIADSTELTVRGHCYDALVGLAGCD

SEQ ID NO: 152576 - protein, 98 aa, Unknown
  Bacterial polypetide isolated from the Sargasso Sea
MAKFNKKKLPSRHTSLGADRAPHRSFYYAMGETEKDVAKPFVGVVSTWNEAAPCNIALMRQAQSVKKGVRANGGTPREFCTITVTDGIAMGHEGMKSS

SEQ ID NO: 152577 - protein, 141 aa, Unknown
  Bacterial polypetide isolated from the Sargasso Sea
MAKFNKKKLPSRHTSLGPDKAPQRSFYYAMNLTEKDVAKPFVGVVSTWNEAAPCNIALMRQAQSVKKGVSLSGGTPREFCTITVTDGIAMGHEGMKSSLISRDVIADSTELTVRGHCYDALVGVAGCDKSLPGLMMAMVRL

SEQ ID NO: 152578 - protein, 279 aa, Unknown
  Bacterial polypetide isolated from the Sargasso Sea
NYEEFMDMAAASSPSPGHCNTMGTASSMNSVAEALGMSLPGCAVIPAPYREREQISFETGSRIVKMVHEDLTPSKIMTKKAFENAVIVASAIGASSNCTTHLIAIAKHMGVKFDLSNWQKLGHKIPLLANCQPAGEHLMEGFYRAGGIPAIMKELMKNNKIHQNLITVTGKTVEQNLRKKIDVDRDVIKTFKNNLTDKAGFLVMKGNFFSSAIMKTSVISKEFRERYLSNPKHPNVFKGKAVVFEGPEDYHHRINSKKLNINENSILIIRGCGPVGYPG

SEQ ID NO: 152579 - protein, 52 aa, Unknown
  Bacterial polypetide isolated from the Sargasso Sea
QAGETVLRLIEKNICPLDILTKEAFENAITVVMALGGSTNAGFTSSCYGQCG

SEQ ID NO: 152580 - protein, 174 aa, Unknown
  Bacterial polypetide isolated from the Sargasso Sea
MIKFNKKKLPSRHTTLGPEKAFQRSFYYGMNLTEKDVSKPFVGVVSTWNEAAPCNIALMRQAQSVKKGVKSAGGTPREFCTITVTDGIAMGHEGMKSSLVSRDVIADSTELTVRGHCYDALVGLAGCDKSLPGLMMAMVRLNVPSVFIYGGSILPGRLNGKDITVQDVIEGVGE

SEQ ID NO: 152581 - protein, 93 aa, Unknown
  Bacterial polypetide isolated from the Sargasso Sea
MIDKSRLPSRHVTIGAKSSPHRSYYYAMGLSEKEINQPFVGVATCWNESAPCNISLSRQAQAAKKGIKDRKGTPREFTTIAVTDGIAMGHEGM

SEQ ID NO: 152582 - protein, 167 aa, Unknown
  Bacterial polypetide isolated from the Sargasso Sea
MIIVRYEGPSGAPGMPEMLDSTSRITTLCRENNIVVGLMTDGRFSGGSVGLVIGHVGPEAALGGEIALIENGDEIVIDLNLNEINCTPLQNEETLNKRRNLWKETVEANGGTHPSIGLADTRLLNRMRRSAVSAVYGAGMHPDRQLWVSEPRDPVMTEFSPTNKYRD

SEQ ID NO: 152583 - protein, 125 aa, Unknown
  Bacterial polypetide isolated from the Sargasso Sea
MNKFNKKKLPSRHTSLGADKAPQRSFYYAMGETQKDVAKPFVGVVSTWNEAAPCNIALMRQAQSVKKGVKFSGGTPREFCTITVTDGIAMGHEGMKSSLVSRDIIADSTELTVRGHCYDALVGVA

SEQ ID NO: 152584 - protein, 199 aa, Unknown
  Bacterial polypetide isolated from the Sargasso Sea
EEFNNLSRNVIPVVIDARPFGQYSMVDIDAKGGMQVIVKELMDAGLLNGDTLTCTGETLSEQVERLNPPSPDEDVIYTVQNPYKDTGGLRVLGGNLSPEFSAVLKLAGVEGGLENNIFKGKAKVFDGEQELLKALDSQADMFENFDMIVVRYEGPFGAPGMPEMLDSTSRITALCREKNIVVGLMTDGRFSGGSVGLVI

SEQ ID NO: 152585 - protein, 102 aa, Unknown
  Bacterial polypetide isolated from the Sargasso Sea
KGAGLGKDVLLITDGRFSGGTTGLCIGHVTPESFDNGPIAICETGDEISLDLKKRELNLNVDEEEIEKRLKKYTNPEPRYNSGVLNKYSKLVTGADRGAVTG

SEQ ID NO: 152586 - protein, 279 aa, Unknown
  Bacterial polypetide isolated from the Sargasso Sea
ALMAAATVNIPAIVLSGGPMLDGNYKGKKAGAGTIIWEARRLHAKGEINYEEFMDMASASSPSPGHCNTMGTASSMNSVAEALGMSLPGCAVIPAPYREREQISFETGSRIVKMVHEDLTPSKIMTKKAFENAVIVASAIGASSNCTTHLIAIAKHMGVKFDLSNWQKLGHKIPLLANCQPAGEHLMEGFYRAGGIPAIMKELMKNNKIHQNLITVTGKTVAQNLRKKIDVDRDVIKTFKNNLTDKAGFLVMKGNFFSSAIMKTSVISKEFRDRYLSNP

SEQ ID NO: 152587 - protein, 158 aa, Unknown
  Bacterial polypetide isolated from the Sargasso Sea
MTKFNKKKLPSRHTSLGPDKAPQRSFYYAMNLTEKDVAKPFVGVVSTWNEAAPCNIALMRQAQSVKRGVSLSGGTPREFCTITVTDGIAMGHEGMKSSLISRDVIADSTELTVRGHCYDALVGVAGCDKSLPGLMMAMVRLNVPSGFYIWRFNSTQVD

SEQ ID NO: 152588 - protein, 286 aa, Unknown
  Bacterial polypetide isolated from the Sargasso Sea
VYEAGGFPLEFPVFSASESNLRPTAMLFRNLASMDVEEAIRGNPIDGVVLLMGCDKTTPSLMMGAASVDIPTIGVSGGPMLNGHHRGEIIGSGTGVWQLDADLNAGKITEDDFVSAEISMSRSKGNCMTMGTASTMGSMVEALGMSLPHNAAIPAVDARRYALAHMSGKRIVEMVKENLNMSKVVSKDSFENAIKVNGAIGGSTNAVIHLAAIAGRLEIDLSLDDWEKCGKDIPTLVNLQPSGKYLMEDFYYAGGLPAVIRQLLEKNLLSKDALTVNGKTIEENNL

SEQ ID NO: 152589 - protein, 71 aa, Unknown
  Bacterial polypetide isolated from the Sargasso Sea
FDGGLLGMVENGDNITIDITKRTIDLEVSEQEIKRRKDNWVCPQARYTRGVLAKYAKLVSSASLGAVTDLA

SEQ ID NO: 152590 - protein, 277 aa, Unknown
  Bacterial polypetide isolated from the Sargasso Sea
EVPFCLPDVQIILRSTPVLANFAPRGKRTMVDLHNLGGTPVFLKLLLDAGLLHGDCATVTGKTMAENLAEVPEVPDDQDLLAPADKPFKAHADMQVCFGNVAPYGVVFKVSSMEDTSFRGIALCFDDAREVAQAVEAGNIKPGMVVVLRYQGPVACGMPEVLVATAALALPELDGKVAFLSDTRVSGVSHGAIGVHCAPEAAVGGPIALVQDGDEISFDLLAGEITLQVSDKDLAKRRESWTAATPDYRGRGYLADFSATVAQANFGCVSRAHYPEC

SEQ ID NO: 152591 - protein, 69 aa, Unknown
  Bacterial polypetide isolated from the Sargasso Sea
CEELSPTQSIIKPLSSPIKKTGHLQILKGNLAPGGAVAKITGKEGLMFKGPARVFDSEETMLEGLREGK

SEQ ID NO: 152592 - protein, 195 aa, Unknown
  Bacterial polypetide isolated from the Sargasso Sea
MKKFNKKKLPSRHTTLGPDKAFQRSFYYAMDLTEKDVAKPFVGVVSTWNEAAPCNIALMRQAQSVKKGVYQSGGTPREFCTITVTDGIAMGHEGMKSSLISRDVIADSTELTVRGHCYDALVGLAGCDKSLPGLMMSMVRLNVPSVFIYGGSILPGRFNGKDVTVVDVIEGVGKYHSGKMSLHALRKLELKACPS

SEQ ID NO: 152593 - protein, 56 aa, Unknown
  Bacterial polypetide isolated from the Sargasso Sea
DETLLDGGFLHGDCITVTGKTIEQNLKDTAFSNRARCNLSCYQSFVQNWRCSRFKG

SEQ ID NO: 152594 - protein, 287 aa, Unknown
  Bacterial polypetide isolated from the Sargasso Sea
MLHAPELSRAAGYSNFNRDIMSASEFNYLSESVVPVVVNARPFGKYSMVDIDKMGGIQVIVKNLLDAGLLNGDTLTCTGETLSQQVDRLSPSNPDGNVIYSVKKPFKKTGGLRLLGGNLSPEFSAILKLAGVEGGLENGIFKGKAKVFDGEQSLLNTLDNQPESFSNFDMVVVRYEGPVGGPGMPEMLDSTSRITALCREKNIVIGLMTDGRFSGGSVGLVIGHVGPEAAIGGPIALIKDGDTITVDLNENTLVCNELTNIETVNQRKDEWDNECNKNKGIHPAVGI

SEQ ID NO: 152595 - protein, 309 aa, Unknown
  Bacterial polypetide isolated from the Sargasso Sea
CHPQGKRNGSGTGVWQLDADLNAGLITEEDFIAAEIAMSRSKGNCMTMGTASTMGSMVEALGMSLPHNAAIPAVDARRYALAYMSGKRIVEMVKENLIMSKILNKKSFENAIKVNGAIGGSTNAVIHLAAIAGRMEIDLSLDDWERCGKNIPTLVNLQPSGKYLMEDFYYAGGLPAVIKRLLEKDLIYKDALTVNGKTINENNLESACWNEDVIRSFDNPVTKDGGIKILKGNIAPDGAILKPSAASPHLMQHTGRAVVFESIEEFHDKIHDPNLDVDKNCILVLKNCGPKGYPGMAEVGNMILPQKNS

SEQ ID NO: 152596 - protein, 166 aa, Unknown
  Bacterial polypetide isolated from the Sargasso Sea
VIVRYEGPSGAPGMPEMLDSTSRITTLCRQKDITIALMTDARFSGGSVGLVIGHVGPEAALGGPIALVEDGDEIVVDLSSNELNCTALDDPAVYAERKSAWDKVLADNQGLHPSCGDVDTRLLNRMRRSAVSAVYGAGMHPDRELWVSEPRAPVQTGFVPQNRWRA

SEQ ID NO: 152597 - protein, 127 aa, Unknown
  Bacterial polypetide isolated from the Sargasso Sea
MKKFNKKKLPSRHTTIGADKAPQRSFYYAMDLTEKDVAKPFVGVVSTWNEAAPCNINLMKQAQSVKKGVQATGGTPREFCTITVTDGIAMGHEGMKSSLISRDVIADSTELTVRGHCYDALVGLAGC

SEQ ID NO: 152598 - protein, 264 aa, Unknown
  Bacterial polypetide isolated from the Sargasso Sea
VEVLYGYPIDGVILTTGCDKTTPAALMAAATVNIPAIVLSGGPMLDGVYKGKLAGSGMVVWEARKMLAKGEIKYEEFMDMVASSAPSAGHCNTMGTASSMNSVAEALGMSLPGGAVIPAPYREREQISYETGKRIVGMVHEDLTPSKIMTRKAFENAVVVASAIGGSSNCTAHLSAIAKHMGIKFDLSDWQKLGHNIPLLVNCQPAGEYLMESFHRAGAIPAVMKELIKNKKIHTNIKTVTGKTVGENLRKKVDVDSKVIKSFK

SEQ ID NO: 152599 - protein, 285 aa, Unknown
  Bacterial polypetide isolated from the Sargasso Sea
ATVNIPSIVLSGGPMLDGNYKGKLAGSGTIVWEARKLLGKGKINYEEFMDMVSAAAPSIGHCNTMGTASSMNSVAEALGMSLPGCAVIPAPYREREQISFETGKRIVGMVHENLKPSKIMTRKAFENAVIVASAIGGSSNCTTHLIAIANHMGIKFDLSNWQKLGHKIPLLVNCQPAGEYLMESFYRAGGIPAIMKELIRNKKIHTNIITVTGKTVGENLKKKIQIDRKVIKSFKDNLSEKAGFLIMKGNFFSSAVMKTSVISSEFRERYLSNPGHLNVFKGKAV

SEQ ID NO: 152600 - protein, 241 aa, Unknown
  Bacterial polypetide isolated from the Sargasso Sea
GQVIYSVKNPYKDTGGLRVLGGNLSPEHSAILKLAGVEGGLENNVFSGRARIFDGEQSLLDTLDKTPEIFKNFDMIIVRYEGPVGGPGMPEMLDSTSRITTLCRENNIVVALMTDGRFSGGSVGLVIGHVGPEAAVGGPIALIEEGDEIIVDLNKNEINCTPLQDTNAYNQRKATWQSTVDNNNGTHPSVGEANTRLLNKMRCTAVSAVYGAGMHPGREIFVNEPRTGSVSEFKPSNKFRS

SEQ ID NO: 152601 - protein, 306 aa, Unknown
  Bacterial polypetide isolated from the Sargasso Sea
MNSVAEALGMSLPGGAVIPAPYREREQISYETGKRIVGMVYEDLTPSKIMTRKAFENAVVVASAIGGSSNCTAHLSAIAKHMGIKFDLSDWQKLGHNIPLLVNCQPAGEYLMESFHRAGAIPAVMKELIKNKKIHTKIKTVTGKTVGENLRKKVDVDSKVIKTFKNALTEKAGFLVMKSNFFSSAIMKTSVISKDFRDQYLSNPKHPNVFECKAIVFEGPEDYHKRLNDKKLKIDENSLLIIRGCGPVGYPGSAEVVNMQPPDRLLKKGIRHLPTLGDGRQSGTSESPSILHVSPESAVGGDLGIV

SEQ ID NO: 152602 - protein, 135 aa, Unknown
  Bacterial polypetide isolated from the Sargasso Sea
MWKFNKKKLPSRHTSIGPDKAPQRSFYYAMDLTEKDVAKPFVGVVSTWNEAAPCNINLMKQAQSVKKGVHSAGGTPREFCTITVTDGIAMGHEGMKSSLISRDVIADSTELTVRGHCYDALVGLAGCDKSLPGLM

SEQ ID NO: 152603 - protein, 155 aa, Unknown
  Bacterial polypetide isolated from the Sargasso Sea
MKFNKSKLPSRHVSVGVKSAPHRSMYYAMGLKNEDIQKPFVGVATTWNEAAPCNITLSRQAQSAKKGVKIAGGTPREFTTITVTDGIAMGHAGMKSSLISREVIADSVELTMRGHCYDALVGLAGCDKSLPGLMMVMLRLNVPSVFIYGGSILPR

SEQ ID NO: 152604 - protein, 298 aa, Unknown
  Bacterial polypetide isolated from the Sargasso Sea
MNSVAEALGMSLPGGAVIPAPYREREQISYETGKRIVGMVQEDLTPSKIMTRKAFENAVVVASAIGGSSNCTAHLSAIAKHMGIKFDLSDWQKLGHNIPLLVNCQPAGEYLMESFHRAGAIPAVMKELIKNKKIHTNIKTVTGKTVGENLRKKVDVDNKVIKSFKNALTEKAGFLVMKSNFFSSAIMKTSVISKEFRDQYLSNPKHPNVFECKAIVFEGPEDYHKRLNDKKLKIDENSLLIIRGCGPVGYPGSAEVVNMQPPDRLLKKGIRHLPTLGDGRQSGTSESPSILHVSPESG

SEQ ID NO: 152605 - protein, 301 aa, Unknown
  Bacterial polypetide isolated from the Sargasso Sea
STNVLLHAPEIARSAGYSDFERDIMNMKEFNDLSQNIVPVVIDARPFGKYSMVDIDEKGGIQVIIKNLFDSGLLNGDTLTCTGETLSEQVLRLNPNSPDNKVIYHVESPFKKTGGLRLLGGNLSPENTAILKLAGVERGLENNIFKGKARIFNGEKKLLEKLDNDPDFFNDLDMIIVRYEGPVGAPGMPEMLDPTSRITTLCRQRDITLALMTDARFSGGSVGLVIGHVGPEAALGGPIALVEEGDTIEANLNTNELNCIELQDKETFLSREKKWKEEVEKNGGIHPLVGEVDTRLLARMR

SEQ ID NO: 152606 - protein, 98 aa, Unknown
  Bacterial polypetide isolated from the Sargasso Sea
MPKINKKKLPSRYTSLGPDRAPHRSFYYAMGETEEDVAKPFVGVVSTWNEAAPCNTALMRQAQSVKKGVKQSGGTPREFCTITVTDGIAMGHEGMNHL

SEQ ID NO: 152607 - protein, 310 aa, Unknown
  Bacterial polypetide isolated from the Sargasso Sea
DRNLSYLSLVEILYGYPLDGVILTTGCDKTTPAALMAAATVNIPAIVLSGGPMLDGNYKGKKAGAGTIIWEARRLHAKGEINYEEFMDMAAASSPSPGHCNTMGTASSMNSVAEALGMSLPGCAVIPAPYKEREQISFETGSRIVKMVHEDLTPSKIMTKKAFENAVIVASAIGASSNCTTHLIAIAKHMGVKFDLSNWQKLGHKIPLLANCQPAGEHLMEGFYRAGGIPAIMKELMKNNKIHQNLITVTGKTVAQNLRKKIDVDRDVIKTFKDNLTDKAGFLVMKGNFFSSAIMKTSVISKEFRERILS

SEQ ID NO: 152608 - protein, 259 aa, Unknown
  Bacterial polypetide isolated from the Sargasso Sea
VIHGYPIDGVVLTTGCDKTTPAMLMGAATVDLPAIVLSGGPMLDGWWNGQLAGSGMIVWESRRLLADGTIDYEEFISRVCASAPSLGHCNTMGTASTMNSLAEALGMSLPGCAAIPAPFRERMEMAYQTGKRAVQMVHEDLKPSDIMTRKAFENAIVVNSAIGGSTNAPPHLQAIARHVGVELDVKDWQTHGFDIPLLVNMQPAGKYLGESYYRAGGVPAVMGELLSENKLHSDVMTASGNTLGENLKGKRSLDLGVIA

SEQ ID NO: 152609 - protein, 264 aa, Unknown
  Bacterial polypetide isolated from the Sargasso Sea
NLRPTAMLFRNLAIMDVEEAIRGNPIDGVVLLMGCDKTTPSLLMGAASVDLPTIGVSGGPMLNGHHRGETIGSGTGVWRLDADLSAGKITEEDFIEAEISMSRSKGNCMTMGTASTMGSMVEALGMSLPNNAAIPAVDARRYSLAYMSGKRIVDMVKENLVMSKIINKQSFENAIKVNGAIGGSTNAVIHLAAIAGRLEIDLKLSDWEKCGKNIPTLVNLQPSGKYLMEDFYYAGGVPVVIKRLLEKNLLNSDSLTANGKTIFE

SEQ ID NO: 152610 - protein, 119 aa, Unknown
  Bacterial polypetide isolated from the Sargasso Sea
MKKFNKKKLPSRHTSLGPDKAPQRSFYYAMNLTEKDVAKPFVGVVSTWNEAAPCNIALMRQAQSVKKGVQSAGGTPREFCTITVTDGIAMGHEGMKSSLISRDVIADSTELTVRGHCYD

SEQ ID NO: 152611 - protein, 293 aa, Unknown
  Bacterial polypetide isolated from the Sargasso Sea
PIDGVILTTGCDKTTPAALMAAATVNIPAIVLSGGPMLDGVYKGKLAGSGMVVWEARKMLAKGEIKYEEFMDMVASSAPSAGHCNTMGTASSMNSVAEALGMSLPGGAVIPAPYREREQISYETGKRIVGMVHEDLTPSKIMTRKAFENAVVVASAIGGSSNCTAHLSAIAKHMGIKFDLSDWQKLGHNIPLLVNCQPAGEYLMESFHRAGAIPAVMKELIKNKKIHTKIKTVTGKTVGENLRKKVDVDNKVIKTFKDALTEKAGFLVLKSNFFSSAIMKTSVISEEFRDQYL

SEQ ID NO: 152612 - protein, 104 aa, Unknown
  Bacterial polypetide isolated from the Sargasso Sea
ITDGRFSGATRGFCIGHVGPEASVGGPIALLRNGDIIDLDAKKGTINVRLTKKELAKRRKKWKPKKINFGNGTLWKYAQTVGPAYLGAPTHPGGKNEVKTYADI

SEQ ID NO: 152613 - protein, 109 aa, Unknown
  Bacterial polypetide isolated from the Sargasso Sea
MRKFNKKKLPSRHTSLGADRAPHRSFYYAMGETEKDVSKPFVGVVSTWNEAAPCNIALMRQAQSVKKGVRSSGGTPREFCTITVTDGIAMGHEGMKSSLISREVMQTRQ

SEQ ID NO: 152614 - protein, 98 aa, Unknown
  Bacterial polypetide isolated from the Sargasso Sea
MFKFNKKKLPSRHTSLGPDKAPQRSFYYAMNLTEKDVAKPFVGVVTTWNEAAPCNIALMRQAQSVKKGVKTSGGTPREFCTITVTDGIAMGHEGMKSS

SEQ ID NO: 152615 - protein, 143 aa, Unknown
  Bacterial polypetide isolated from the Sargasso Sea
MKKFNKKKLPSRHTSLGPDKAPQRSFYYAMNLTEKDVSKPFVGVVSTWNEAAPCNIALMRQAQSVKKGVQSAGGTPREFCTITVTDGIAMGHEGMKSSLISRDVIADSTELTVRGHCYDALVGVAGCDKSLPGLMMAMVRLNV

SEQ ID NO: 152616 - protein, 162 aa, Unknown
  Bacterial polypetide isolated from the Sargasso Sea
RYEGPVGGPGMPEMLDSTSRITALCREKNIVVGLMTDGRFSGGSVGLVIGHVGPEAAIGGPIALIEEGDDIIVNLNSNEINCIQLSDNTTYKKRKQSWDEKVSHNNGIHPSVGSADTRLLNRMRSSAVSAVYGAGMHPNRQIWISDPRNSDKVNFKPQNKFK

SEQ ID NO: 152617 - protein, 134 aa, Unknown
  Bacterial polypetide isolated from the Sargasso Sea
MKKFNKKKLPSRHTSLGPDKAPQRSFYYAMNLTEKDVAKPFVGVVSTWNEAAPCNIALMRQAQSVKKGVQATGGTPREFCTITVTDGIAMGHEGMKSSLISRDVIADSTELTVRGHCYDALVGLAGCDKSLPGL

SEQ ID NO: 152618 - protein, 288 aa, Unknown
  Bacterial polypetide isolated from the Sargasso Sea
HCNTMGTASSMNSVAEALGMSLPGCAIIPATYRERSQISFETGKRIVKMVNEDLTPSKIMTKKAFENAVVVASAIGASSNCTTHLIAIAKHMGIKFNLSNWQKLGHKIPLLANCQPAGEYLMEDFYRAGGIPAIMKELIKNKKININSLTVTGKTVGQNLKNKIKVDRNVIKTFEENITDKAGFLVMKGNFFSSAIMKTSVISREFRERYLLNPKHPNIFNGKAVVFEGPEDYHDRINSKKLKIDENSILIIRGCGPVGYPGSAEVVNMQPPDRLLKKGINALPTLGD

SEQ ID NO: 152619 - protein, 290 aa, Unknown
  Bacterial polypetide isolated from the Sargasso Sea
SALSPSGTPAWHDIARRSARALVMMEHRGVTSTDILVDAAFENAMAVHAACGGSTNLLLHMPAIAHAAGRKRMTVEDWNRVNLDVPRLVDVLPNGPVGHPTTQLYAAGGVPEVMLHLRSLGLINTDVLTATGQTLDENLDWWEDSERRHDVRKYLKDVDGVDPEDVIMSPDRASEKKLTSTVTFPRGNIAPEGSVIKSTAIDPSVVDRDGVYRKVGPARVFRSERAAMGAIKSRDDEHKIKAGDIMVVTCGGPLGTGMEEVYQLTAALKHLSYGKHVALITDARFSGVST

SEQ ID NO: 152620 - protein, 102 aa, Unknown
  Bacterial polypetide isolated from the Sargasso Sea
MSKIDKKKLPSRHTSLGPDRAPHRSFYYAMGETEQDVAKPFVGVVSTWNEAAPCNTALMRQAQSVKKGVKQFGGTPREFCTITVTDGIAMGHEGMKSSLISR

SEQ ID NO: 152621 - protein, 108 aa, Unknown
  Bacterial polypetide isolated from the Sargasso Sea
SAIMGKGLGEDVALITDGRFSGGSHGFVVGHVTPEAYDGGPIAVVRDGDPISIDAESNKITLELSDNEIEVRLAEWKKPSPRYKRGVLAKYAASVASASEGAVTDKYL

SEQ ID NO: 152622 - protein, 131 aa, Unknown
  Bacterial polypetide isolated from the Sargasso Sea
MKKFNKKNLPSRHTTLGPDKAPQRSFYYAMKLTEKDVAKPFVGVVSTWNEAAPCNIALMRQAQSVKKGVYQRGGTPREFCTITVTDGIAMGHEGMKSSLISRDVIADSTELTVRGHCYDALVGLAGCDKSL

SEQ ID NO: 152623 - protein, 42 aa, Unknown
  Bacterial polypetide isolated from the Sargasso Sea
MLRSDAVTKGIQRSPNRAMLRAVGIGDSDFGKPILGIANGYS

SEQ ID NO: 152624 - protein, 150 aa, Unknown
  Bacterial polypetide isolated from the Sargasso Sea
MRKFNKKKLPSRHTSLGPDKAPQRSFYYAMDLTEKDVAKPFVGVVSTWNEAAPCNINLMKQAQSVKKGVHAAGGTPREFCTITVTDGIAMGHEGMKSSLISRDVIADSTELTVRGHCYDALVGLAGCDKSLPGLMMSMVRLNVPSVFIYG

SEQ ID NO: 152625 - protein, 180 aa, Unknown
  Bacterial polypetide isolated from the Sargasso Sea
MKKFNKKKLPSRHTTIGADKAPQRSFYYAMDLTEKDVAKPFVGVVSTWNEAAPCNINLMKQAKSVKKGVQATGGTPREFCTITVTDGIAMGHEGMKSSLISRDVIADSTELTVRGHCYDALVGLAGCDKSLPGLMMSMVRLNIPSVFIYGGSILPGRFNGKDVTVVDVFEGVGKYTSKKM

SEQ ID NO: 152626 - protein, 169 aa, Unknown
  Bacterial polypetide isolated from the Sargasso Sea
MPSRHVTEGPERAPHRSYLYAMGLTEKQIHQPLVGVATCWNEAAPCNISLSRQAQAAKRGVAENGGTPREFTTITVTDGIAMGHAGMKSSLVSREIIADSVELTMRGHCYDALVGLAGCDKSLPGMMMAMVRLNVPSVFIYGGTILPGRFKGRDVTVVDVFEGVGMHAA

SEQ ID NO: 152627 - protein, 133 aa, Unknown
  Bacterial polypetide isolated from the Sargasso Sea
MRKFNKKKLPSRHTSLGPDKAPQRSFYYAMDLTEKDVAKPFVGVVSTWNEAAPCNINLMKQAQSVKKGVHSAGGTPREFCTITVTDGIAMGHEGMKSSLISRDVIADSTELTVRGHCYDALVGLAGCDKSLPG

SEQ ID NO: 152628 - protein, 117 aa, Unknown
  Bacterial polypetide isolated from the Sargasso Sea
GGPGMREMLQITAAMKGAGLGKDILLITDGRFSGGTTGLCIGHVTPESFDNGPIAICETGDEISLDLKKRELNLNVDEDEIEKRLKKYTNPEPRYNSGVLNKYSKLVTGADRGAVTG

SEQ ID NO: 152629 - protein, 147 aa, Unknown
  Bacterial polypetide isolated from the Sargasso Sea
MPKFNKKKLPSRHTSVGPDKAPQRSFYYAMNLTEKDVAKPFVGVVSTWNEAAPCNIALMRQAQSVKKGVQSAGGTPREFCTITVTDGIAMGHEGMKSSLISRDIIADSTELTVRGHCYDALVGVAGCDKSLPGFNDGNGKVKCTKCF

SEQ ID NO: 152630 - protein, 53 aa, Unknown
  Bacterial polypetide isolated from the Sargasso Sea
GLTVTGKTMKENLTNIKFNTNQKVLREYNNPLSPEGGVVGLKGNLAPDGAIVK

SEQ ID NO: 152631 - protein, 222 aa, Unknown
  Bacterial polypetide isolated from the Sargasso Sea
LDGVYKGKLAGSGTVIWEARKLLAKGEINYEEFMNMVASSAPSVGHCNTMGTASSMNSVAEALGMSLTGCAIIPAPYREREQISFETGKRIVGMVHENLTPSKIMTRKAFENAVVVASAIGGSSNCTTHLSAIAKHMGIKFDLSDWQKLGHKIPLLVNCQPAGEYLMESFYRAGGVPAVMKELIKNKKIHTNIKTVSGKTVGQNLKRKIDTNKKVIKSFKDC

SEQ ID NO: 152632 - protein, 116 aa, Unknown
  Bacterial polypetide isolated from the Sargasso Sea
MRKFNKKKLPSRHTSLGPDKAPQRSFYYAMDLTEKDVAKPFVGVVSTWNEAAPCNINLMKQAQSVKKGVHAAGGTPREFLHITVTDGIAMGHEGMKSFLISRDVIADSTETTVRGH

SEQ ID NO: 152633 - protein, 302 aa, Unknown
  Bacterial polypetide isolated from the Sargasso Sea
YLSMVEVLYGYPIDGVVLTTGCDKTTPAALMAAATVNLPAIVLSGGPMLDGNYKGKLAGSGTIVWEARKLLSKGKINYDEFMDMVSAAAPSIGHCNTMGTASSMNSVAEALGMSLPGCAVIPAPYREREQISFDTGKRIVGMVHEDLKPSKIMTRKAFENAVIVASAIGGSSNCTTHLTAIAKHIGIKFDLSNWQKLGHEIPLLVNCQPAGEYLMESFYRAGGIPAIMKELIKNKKIHTNIITVTGKTVKENLKKKIEVNRKVIKTFEESLTENAGFLVMKGNFFSSAIMKTSVISSEFRER

SEQ ID NO: 152634 - protein, 119 aa, Unknown
  Bacterial polypetide isolated from the Sargasso Sea
GPVGGPGMREMLSPTAAIMGKGLGGKVAFLTDGRFSGGTHGFVVGHISPEAHLGGPLALIEEGDVISIDANKNEINLMVEDQILLQRKNKWQAPKNENVGVLAKYSKMVSSASKGAFTS

SEQ ID NO: 152635 - protein, 275 aa, Unknown
  Bacterial polypetide isolated from the Sargasso Sea
MAAYRQLEHFVEGPSNQLAYRSVCRLLEDPQHASPMSPLFLHGDCGVGKTHLLQGAVRAASAQFSRIRYYSAEQFTNEYIRAVREHDLERFRQQLRTLDLLAIDDVHFFSHKEGTQNEFLHMLDACLLHGTKLLLAGDGHPNRFKAFSRALSSRCVSGMVVHIESPDVNTRLAIVNHLASRRGLTLEPAAAELVVERTLGTVRELEGALTRLDAMARLVGSGETIGLHLVTQTLGAAAAPRPVRPADVVNAVCEALNIPHHELLGNSRHRRITLA

SEQ ID NO: 152636 - protein, 258 aa, Unknown
  Bacterial polypetide isolated from the Sargasso Sea
RGNPIDGVVLLMGCDKTTPSLLMGAGSVDLPTIGVSGGPMLNGQHKGEIIGSGTGVWKLDADLNAGLITEDEFIEAEISMSRSKGNCMTMGTASTMGSMVEALGMSLPGNAAIPAVDSRRYTLAHMSGKRIVEMVKDNLKMSKIITKKSFENAIKINGAIGGSTNAVIHLAAIAGRLEIDLSLNDWEKCGKNIPTLVNLQPSGKYLMEDFYYAGGLPVVIKKLLDQKLLHKDCITVNGKTISENNEKAKCWNNEVIKD

SEQ ID NO: 152637 - protein, 270 aa, Unknown
  Bacterial polypetide isolated from the Sargasso Sea
MLDRNLSYLSLVEVLYGYPIDGVILTTGCDKTTPAALMAAATVNIPAIVLSGGPMLDGVYKGKLAGSGMVVWEARKMLAKGEIKYEEFMDMVASSAPSAGHCNTMGTASSMNSVAEALGMSLPGGAVIPAPYREREQISYETGKRIVGMVHEDLTPSKIMIRKAFENAVVVASAIGGSSNCTAHLSAIAKHMGIRFDLSDWQKLGHNIPLLVNCQPAGEYLMESFHRAGAIPAVMKELIKNKKIHTNIKTVTGKTVGENLRKKVDVDNKV

SEQ ID NO: 152638 - protein, 105 aa, Unknown
  Bacterial polypetide isolated from the Sargasso Sea
FITDGRFSGATRGFCIGHVGPEASIGGPIGLLKNGDIIHIDAKKGTINVNLSRKELSKRKKKWKPKKINFGNGTLWKYAQTVGPAYLGASTHPGGREEVKCYADI

SEQ ID NO: 152639 - protein, 278 aa, Unknown
  Bacterial polypetide isolated from the Sargasso Sea
YEEFMDMAAASSPSPGHCNTMGTASSMNSVAEALGMSLPGCAVIPAPYREREQISFETGSRIVKMVHEDLTPSKIMTKKAFENAVIVASAIGASSNCTTHLIAIAKHMGIKFDLSNWQKLGHKIPLLANCQPAGEHLMEGFYRAGGIPAIMKELMKNNKIHQNLITVTGKTVAQNLRKKIDVDRDVIKTFKDNLTDKAGFLVMKGNFFSSAIMKTSVISKEFRDRYLSNPKHPNVFKGKAVVFEGPEDYHDRINSKKLKIDENSILIIRGCGPVGYPG

SEQ ID NO: 152640 - protein, 152 aa, Unknown
  Bacterial polypetide isolated from the Sargasso Sea
MPKFNKKKLPSRHTSVGPDKAPQRSFYYAMNLTEKDVAKPFVGVVSTWNEAAPCNIALMRQAQSVKKGVKLSGGTPREFCTITVTDGIAMGHEGMKSSLISRDVIADSTELTVRGHCYDALVGVAGCDKSLPGLMMAMVRLNVPSVFIYGGS

SEQ ID NO: 152641 - protein, 87 aa, Unknown
  Bacterial polypetide isolated from the Sargasso Sea
MNKLRSSAITQGVQRSPNRSMLRAVGFNDEDFNKPIIGVANGYSTITPCNMGLNKLALKAEESIKRSGGMPQMFGTITVSDGISMGT

SEQ ID NO: 152642 - protein, 66 aa, Unknown
  Bacterial polypetide isolated from the Sargasso Sea
WDINRKPSEEVKEFYSAAPGMIPTTQPFSQNKRYPELDLDRENGCIRGSDSAHSQDGGLAVLKGII

SEQ ID NO: 152643 - protein, 342 aa, Unknown
  Bacterial polypetide isolated from the Sargasso Sea
KTPDMTALYLERYLNYVLTRKECISGNPIIGIAQSGSDLSPCNRHFMSLSKRIKDGIRRAGGIPMEFPTHPIQETGKRPTAMLDRNLSYLSLVEVLYGYPIDGVILTTGCDKTTPAALMAAATVNIPAIVLSGGPMLDGVYKGKLAGSGMVVWEARKMLAKGEIKYEEFMDMVASSAPSAGHCNTMGTASSMNSVAEALGMSLPGGAVIPAPYREREQMSYETGKRIVGMVHEDLTPSKIMTRKAFENAVVVASAIGGSSNCTAHLSAIAKHMGIKFDLSDWQKLGHYIPLLVNCQPAGEYLMESFHRAGAIPAVMRELIKNKKIHTNIKTVTGKTVGKIKK

SEQ ID NO: 152644 - protein, 305 aa, Unknown
  Bacterial polypetide isolated from the Sargasso Sea
KRIKDGIRRAGGIPMEFPTHPIQETGKRPTAMLDRNLSYLSLVEVLYGYPIDGVILTTGCDKTTPAALMAAATVNIPAIVLSGGPMLDGVYKGKLAGSGMVVWEARKMLAKGEIKYEEFMDMVASSAPSAGHCNTMGTASSMNSVAEALGMSLPGGAVIPAPYREREQISYETGKRIVGMVHEDLTPSKIMTRKAFENAVVVASAIGGSSNCTAHLSAIAKHMGIKFDLSDWQKLGHNIPLLVNCQPAGEYLMESFHRAGAIPAVMKELIKNKKIHTNIKTVTGKTVGENLRKKVDIDNKSNQNI

SEQ ID NO: 152645 - protein, 131 aa, Unknown
  Bacterial polypetide isolated from the Sargasso Sea
MKKFNKKKLPSRHTSVGPDKAPQRSFYYAMNLTEKDVAKPFVGIVSTWNEAAPCNINLMKQAQFVKKGVHSSGGTPREFCTITVTDGIAMGHEGMKSSLISRDVIADSTELTVRGHCYDALVGLAGCDKSL

SEQ ID NO: 152646 - protein, 146 aa, Unknown
  Bacterial polypetide isolated from the Sargasso Sea
MPKFNKKKLPSRHTSLGPDKAPQRSFYYAMNLTEKDVAKPFVGVVSTWNEAAPCNIALMRQAQSVKKGVSMSGGTPREFCTITVTDGIAMGHEGMKSSLISRDIIADSTELTVRGHCYDALVGVAGCDKSLPGLMMAMVRLNVPSV

SEQ ID NO: 152647 - protein, 205 aa, Unknown
  Bacterial polypetide isolated from the Sargasso Sea
YEEFMDMAAASSPSPGHCNTMGTASSMNSVAEALGMSLPGCAVIPAPYREREQISFETGSRIVKMVHEDLTPSKIMTKKAFENAVIVASAIGASSNCTTHLIAIAKHMGVKFDLSNWQKLGHKIPLLANCQPAGEHLMEGFYRAGGIPAIMKELMKNNKIHQNLITVTGKTVAQNLRKKIDVDRDVIKTFKNNLTDKAGFLVMKG

SEQ ID NO: 152648 - protein, 82 aa, Unknown
  Bacterial polypetide isolated from the Sargasso Sea
QNVIRDIDDPLYKKGHLAILKGNLASEGSVAKISGVKNPVLTGPAKIFESEEDCLKSILNNDIKAGDVVVIRNEGPVGGPGM

SEQ ID NO: 152649 - protein, 577 aa, Unknown
  Bacterial polypetide isolated from the Sargasso Sea
MNKKNKYRSSNWYNSKSHRRDTFIHRGWMRNQGHPNHLFDGRPVIGICNTWSELTPCNGHFREIAESVKKGVYEAGGFPLEFPVFSASESNLRPTAMLFRNLASMDVEEAIRGNPIDGVVLLMGCDKTTPSLMMGAASVDLPTIGVSGGPMLNGHHQGETIGSGTGVWKLDADLNAGIITEEDFINAEISMSRSKGNCMTMGTASTMGSMVEALGMSLPGNAAIPAVDSRRYALAHMSGKRIVEMVKEDITMSKIVTKKSFENAIKVNGAIGGSTNAVIHLAAIAGRMEIDLDLDDWNKCGEGIPTLVNLQPSGKYLMEDFYYAGGVPVVIKRLMEKKLLDENSMTVNGKTIAENNINSKCWNNDVIKEFENPLTKNGGIKILRGNIAPNGAIIKPSAASPELMKHTGKAVVFESVEEFHEKIDDPNLEVDENSILVLKNCGPKGYPGMAEVGNMRLPQKVLKKGVRDMIRISDARMSGTAYGTVILHTAPEAAVKGPLAAVQNGDEIEVDVDQGTMNLKVDDETIKNRLENYSPVVPEITGGYQKMYVEHVMQADKGADLDFLIGKRGAEVKRHSH

SEQ ID NO: 152650 - protein, 415 aa, Unknown
  Bacterial polypetide isolated from the Sargasso Sea
GEIKYEEFMDMVASSAPSAGHCNTMGTASSMNSVAEALGMSLPGGAVIPAPYREREQISYETGKRIVGMVHEDLTPSKIMTRKAFENAVVVASAIGGSSNCTAHLSAIAKHMGIKFDLSDWQKLGHNIPLLVNCQPAGEYLMESFHRAGAIPAVMKELIKNKKIHTKIKTVTGKTVGENLRKKVDVDNKVIKTFKNALTEKAGFLVMKSNFFSSAIMKTSVISKEFRDQYLSNPKHPNVFECKAIVFEGPEDYHKRLNDKKLKIDENSLLIIRGCGPVGYPGSAEVVNMQPPDRLLKKGIRHLPTLGDGRQSGTSESPSILHVSPESAVGGDLGIVKTYDKIKIDLNKRRVDLLISQDEFKKRRKNKKVFKPNNQTPWQEIFRNTVGQLDDGACINSRGKYLDVSHTKGLPRDSH

SEQ ID NO: 152651 - protein, 569 aa, Unknown
  Bacterial polypetide isolated from the Sargasso Sea
MTKKRRSGLWYGNKDRDGFIHRSWMKNQGFPDHAFDGRPIIGICNTWSELTPCNSSLRDLAEGVKRGVWEAGGFPVEFPVMSLGETQMKPTAMLFRNLLAMDVEESIRAYGIDGVVLLGGCDKTTPGQLMGAASVNIPTIVVSSGPMLNGKWQGKDIGSGTDVWKFSEAVRAGDMSLSEFMAAESGMSRSKGVCMTMGTASTMSSLVEAMGLSLPANGALPAVDARRMALAHLTGKRIVEMVDEDLKLSEILTRDAFINAIITNAAVGGSSNAVVHLLAIAGRVGVELRLDDIDLGKHVPLLVNCMPSGSYLMEDFCYAGGIPAVLAEISHLLKPVKTVLGSDLEDYYRDAKCWNRDVIFSFKNPIKRDAGLTVLRGTLAPEGAVIKPSAATPELLEHRGPAYVFENVEDMKANINNEDLPVTKDTILVLKGCGPKGYPGMAEVGNMPIPAKLVKEGLRDMVRISDARMSGTAYGTVVLHVAPEAAAGGVLALVKTGDEIVLSAKDGRLDLLVDEKELLARSAYMSTPLPDYERGYIKLYIDHVSGADKGADLDFLVGNDTRVPQRESH

SEQ ID NO: 152652 - protein, 474 aa, Unknown
  Bacterial polypetide isolated from the Sargasso Sea
MPKKRKKSFRSHHWFNNPKNPDMTALYLERYLNYGLTRKELQSGNPIIGIAQSGSDLSPCNRHFLSLSERIKDGIRRAGGIPMEFPTHPIQETGKRPTAMLDRNLSYLSLVEVLYGYPIDGVILTTGCDKTTPAALMAAATVNIPAIVLSGGPMLDGVYKGKLAGSGMVVWEARKMLAKGDINYEEFMEMAASSAPSAGHCNTMGTASSMNSVAEALGMSLPGGAVIPAPYREREQISYETGKRIVGMVHENLTPSKIMTRKAFENAVVVASAIGGSSNCTIHLSAIAKHMGIKFDLSDWQKLGHDIPLLVNCQPAGEYLMESFHRAGAIPAVMKELIKNKKLHTNIKTVTGKTVGENLRKKVDVDNKVIKSFKNSLTEKAGFLVMKSNFFSSAIMKTSVIGKEFRDRYLSNPKHINAFDCNAVVFEGPEDYHKRLNSKKLKIDENSILIVRGCGPVGYPGSAEVINMQPPDKL

SEQ ID NO: 152653 - protein, 127 aa, Unknown
  Bacterial polypetide isolated from the Sargasso Sea
GMREMLQTTAAIYGQEKGEKVALITDGRFSGATRGFCIGHVGPEASIGGPIALLKNGDIIDIDAKKGSINVRLSKKELSLRKKKWKQRKMNFGNGTLWKYAQTVGPAYLGAPTHPGGKNEVKTYADI

SEQ ID NO: 152654 - protein, 129 aa, Unknown
  Bacterial polypetide isolated from the Sargasso Sea
GDVIVVRYEGPVGGPGMREMLKPTSAIMGKGMGDKVAFITDGRFSGGSHGFVVGHITPEAAEGGLIGLLEDGDQITIDAIEGKIDANLSQEEILKRRKSWCNPKPYNKKGVLSKYARVVSSASLGAITD

SEQ ID NO: 152655 - protein, 594 aa, Unknown
  Bacterial polypetide isolated from the Sargasso Sea
MLRKRKTKLRSDQWFNNPKNPDMTALYLEKYMNYGLKRKDLQSGKPIIGIAQSGSDLSPCNRHFLSLSKKIKDGIRKAGGIPMEFPTHPIQETGKRPTAMLDRNLSYLSLVEVLYGYPIDGVILTTGCDKTTPAALMAAATVNIPAIVLSGGPMLDGFYKGKLAGSGTIIWEARKLLAKGEINYDEFMDMAASSAPSVGHCNTMGTASSMNSVAEALGMSLPGCAIIPAPYKERKQISFETGKRIVDMVHENLTPSKIMTRKAFENAVVVASAIGGSSNCTTHLSAIAKHMGIKFNLSDWQKLGHNIPLLVNCQPAGEYLMESFFRSGGVPAVMKELIKNKKIHTNLMTVTGKSITQNLIKKIKVNPNVVKTFKNALADKAGFLVMRSNFFSTAIMKTSVISKEFRDRYLSNPKHPNVFNGKAVVFEGPEDYHKRLNSKKLNIDENSVLIVRGCGPVGYPGSAEVINMQPPDRLLKKGINTLPTLGDGRQSGTSASPSILHVSPESAVGGDLGIVKTGDKIKIDLNKRRVDLLISQAEFKNRRKKRKKFKINNQTPWQEIFRDTVGQLEDGACIKSRGVYLNVSTSKGIPRDSH

SEQ ID NO: 152656 - protein, 593 aa, Unknown
  Bacterial polypetide isolated from the Sargasso Sea
MSHTPRRLRSQEWFDDPAHADMTALYVERFMNYGLTREELQSGRPVIGIAQTGSDLAPCNRHHIELAERTKAGIRDAGGIPMEFPVHPLAEQSRRPTAALDRNLAYLGLVEVLHGFPLDGVVLTTGCDKTTPACLMAAATVDMPAIVLSGGPMLDGWHDGKRVGSGTVIWHARNLLAAGEIDYEGFMQLTTASSPSIGHCNTMGTALSMNSLAEALGMSLPGCASIPAAYRERGQMAYATGKRAVELVRENVRPSAIMTRAAFENAIVVASALGASTNCPPHLIAIARHMGVELGLDDWQRLGEAVPLLVNCMPAGEYLGESFHRAGGVPAVLRQLDAAGLLRRDCATVSGRAIGEIADTAPDADHDVIRTPDAPLKHGAGFMVLSGNFFDSAIMKMSVVGEAFRRTYLAEPGAENTFEARAIVFEGPEDYHARINDPALNIDERCILVIRGCGTVGYPGSAEVVNMAPPAELVKRGVTSLPCMGDGRQSGTSASPSILNVSPEAAVGGGLALLRTNDRIRVDLNRRSVDVLVDEDELARRRETASFTVPQAQTPWQALYRQFVGQLSTGGCLEPATLYLKVIEQRGNPRHSH

SEQ ID NO: 152657 - protein, 343 aa, Unknown
  Bacterial polypetide isolated from the Sargasso Sea
PACLMAAATMNIPAIVLNGGPMLDGWYKGKPAGSGTAVWDGRVEYAAGRINYKEFVDIVTSSAPSDGHCNVMGTASTMNSLAEALGMSLTGSANIPAPYRERGQMAYRTGERIVEMVEEDLTPSKIMTREAFENSIIVNSAIGGSTNAQMHITAIARHMGLELETEAWQNLGYDIPLLANVQPAGKYLTESYHKAGGTAALMGELLKNKMINGNVMTASGKILADNLEGIDIQDEDVIRPINKPLMERAGFCVLKGNLFDAAIMKTSVISESFRKKFLENKGREGILEGRAIVFEGSEDYHNRVNDKDLKMDENSILVIRGAGPIGWPGSDEVVNMQPSDDLI

SEQ ID NO: 152658 - protein, 561 aa, Unknown
  Bacterial polypetide isolated from the Sargasso Sea
MPKKRKKSFRSQQWFNNPKNPDMTALYLERYLNYGLTRKELQSGNPIIGIAQSGSDLSPCNRHFMSLSKRIKDGIRRAGGIPMEFPTHPIQETGKRPTAMLDRNLSYLSLVEVLYGYPIDGVILTTGCDKTTPAALMAAATVNIPAIVLSGGPMLDGVYKGKLAGSGMVVWEARKMLAKGEIKYEEFMDMVASSAPSAGHCNTMGTASSMNSVAEALGMSLPGGAVIPAPYREREQISYETGKRIVGMVHEDLTPSKIMTRKAFENAVVVASAIGGSSNCTAHLSAIAKHMGIKFDLSDWQKLGHNIPLLVNCQPAGEYLMESFHRAGAIPAVMKELIKNKKIHTNIKTVTGKTVGENLRKKVDVDNKVIKTFKNALTEKAGFLVMKSNFFSSAIMKTSVISKEFRDQYLSNPKHPNVFECKAIVFEGPEDYHKRLNDKKLKIDENSLLIIRGCGPVGYPGSAEVVNMQPPDRLLKKGIRHYPTLGDGRQSGTSESPSILHVSPESAVGGDLGIVKTYDKIKIDLNKRRVDLLISQAEFKKRRKNKKVFKPNNQTLLAGNI

SEQ ID NO: 152659 - protein, 651 aa, Unknown
  Bacterial polypetide isolated from the Sargasso Sea
MNENVEPLKNIEASIKNKEFNEALNLCNKYNKSISKRDYFYLTSVCYRYLNELDKAIKGLDNLIQIDPKYGRAFQEFGHVHVLLKDKDKALKAYLRAVRHNPSLQASWLGILSIEESNQDLIKFVEQNVFYLKNLPPELKTVISFTHEGKLARADHICRQYLQEHPHDIEAMRLLANIGRDLNIYEDAEFLLESALLFDPDNAMIKYDYINILTKRQKYGEALKHAQAFYDEDPKNLNAMKLLSTALFRTDRYKEAIDIYNDILKVEPKNTDVMLSMGHLYKTSGEINKSIDSYQKAYKTDKYFGDSYWSLANLKTYEFSDKEVSSLKQMVKDKYVDEEEKTFMHFALGKAYEDREKFNLSFEHYKAGNQIKKNKALFNIDDFERDCNNQKDVCTNELFEMKKDWGSENKAPIFILGLPRVGSTLIEQILSSHSMVEATHELPNIISTALRLNERKAQDITSRYPDILLSLSAPQLKMIGDKYIADSEVFRTDKQYFLDKMPNNFRHIGLIKLILPNAKIIDIRRSSMSACFACYKQLFAEGQEFTYDLKDLAGYYNNYIELMDHWNKVLPNQILSINYEDVVNNFEESVNQILEYCEIPFENECLEFYKSKRSVKTPSAEQVRQPIYKSGMDYWKNYESYLDELKNNLKY

SEQ ID NO: 152660 - protein, 473 aa, Unknown
  Bacterial polypetide isolated from the Sargasso Sea
MLETLKNFGGKKLGGLILIIVIIIAFGFGGFGGGFSTNNQNNIAKINKTNVTTQDFMDYVNQSGISLDAIRTNLDNNIIEELLSGLISTTLIDLEIKDFALSISERTILKTIKDNKNFQDENGIFQRVKYEKFLLSSNLSAPMFELKLKNRELQKHLFDIIGAGTITPNFLIEKKYEENNKTLSLEYFNMEGLYKDKNEYTEEDLLIFIKENEDQLKREYIDFKYVVLNPKNLIGVEEFNQEFFDEIDKIENQISQGADFGTISESIKVNVNEIIEYAPSSEAQTSENLIYQNKSSKLNLIEDGDNFLLYNVDKEYSKSPNLNDDKTKSELAELIYQKGKFDFNRKILEEIQSNEFNNSKFEDLGNNDLLKLEVKTINDDATFDINSIKMLYTLPVNSFTLVNDKDNNIFLVKIIDSKKNFFNKSDKDYVQFVKNQNTDNRKSILQSYDQLLNNKYEVKVNQKSVDRVKNYFK

SEQ ID NO: 152661 - protein, 512 aa, Unknown
  Bacterial polypetide isolated from the Sargasso Sea
GRPVIGICNTWSELTPCNGHFREIADSVKKGVYEAGGFPLEFPVFSASESNLRPTAMLFRNLASMDVEEAIRGNPIDGVVLLMGCDKTTPSLLMGAASVDIPTIGVSGGPMLNGHHQGKTIGSGTGVWELDADLSAGKITEDDYAAAEISMSRSKGNCMTMGTASTMGSMVEALGMSLPHNAAIPAVDARRYSLAHMSGKRIVEMVKENLIMSKIVTKTSFENAIKVNGAIGGSTNAVIHLAAVAGRLEIDLTLDDWERCGKSIPTLVNLQPSGKYLMEDFYYAGGVPAVIKKLLEKKLINKEVLTVNGKTIEQNNINAECWNSDVIKDYESPLVKDGGIKILRGNIAPNGAILKPSAASSQLMKHKGKAIVFESIEEFQEKIDDPNLEVDETCILVLKNCGPKGYPGMAEVGNMRLPQKILKKGIRDMIRISDARMSGTAYGTVILHTSPEAAVKGPLAAVQNGDLIEVDVVEGKLNLDVSDDIINERLKKYEPVLPDIKGGYQKMYVDHV

SEQ ID NO: 152662 - protein, 591 aa, Unknown
  Bacterial polypetide isolated from the Sargasso Sea
MKTKNLRSQKWFNNPDNPSMTALYLERYLNFGLTRNELQSGKPIIGIAQSGSDLSPCNRHFLDLSNRIKAGIRDAGGIPFEFPTHPIQETGKRPTAALDRNLAYLSLVEVLFGYPLDGVVLTTGCDKTTPASLMAAATVNLPSIVLSGGPMLDGNYNGKKVGSGTIVWEARRMHARGEINYEEFMDLVSASAPSIGHCNTMGTASSMNSLAEALGMSLPGCAAIPAPYRERSQMAYDTGYRSVGLVLEDIKPSDIMTIKAFKNAIVTASAIGASSNAPPHIIAIAKQLNLDLKLQHWENWGESIPLLVNLQPAGEYLGEGYFKAGGVPAVMKELLDNDKLNSDCLTVSGKNVRDNLEKIVCSDRKIIYSFSKPMKEKAGFLILRSNFFDTAIMKMSVVSKEFKERYLSDKKHPMEFTLKAIVFDGPEHYHKEINNPKLKIDENCILIIRGCGPIGYPGAAEVVNMQPPDYLLKKGVTSLPCLGDGRQSGTSESPSILNVSPEAAVGGGLSIIKNYDLVKVNLNKKRVDLLIDDQEIKNRFKEVKFIYPENQTPWQEISRQYTGQLEDGACLDLKEGYFSVAQSKGIPRDNH

SEQ ID NO: 152663 - protein, 201 aa, Unknown
  Bacterial polypetide isolated from the Sargasso Sea
MKKFNKKKLPSRHTSLGPDKAPQRSFYYAMNLTEKDVAKPFVGVVSTWNEAAPCNIALMRQAQSVKKGVQSAGGTPREFCTITVTDGIAMGHEGMKSSLISRDVIADSTELTVRGHCYDALVGVAGCDKSLPGLMMAMVRLNVPSVFIYGGSILPGRLNGKDITVVDVFEGVGKYSSGKISEHALRKIELKACPTAGACGG

SEQ ID NO: 152664 - protein, 403 aa, Unknown
  Bacterial polypetide isolated from the Sargasso Sea
NRVHLKLAERVREGIRSAGGIALEFPVHPIQETLKRPTASVDRNLAYLGLVEILHGYPIDGVVLTTGCDKTTPACLMAAGTVDIPAIVLSGGPMLDGWHNGKLAGSGMAVWDSRVELAAGRIDYEEFMDIVTSSAPSDGHCNTMGTASTMNSLAEALGMSLTGNANIPAPYRERGQMAYRTGMRIVEMVNEDLTPSKIMTRKAFENAIVVNSAIGGSTNAQIHITAIARHVGIDLETDAWQNFGYDIPLMVNIQPAGKYLCESYHRAGGTAAVMNELLKNEKIHGDVTTASGKKLSECLKDKNIKNHDVITSFNEPLKKRAGFIVLKGNLFESAIMKTSVISDKFKENFLSRPGQEGILEGRAIVFEGSEDYHDRVNDDSLKMDENSILVIRGAGPVGWPGSA

SEQ ID NO: 152665 - protein, 345 aa, Unknown
  Bacterial polypetide isolated from the Sargasso Sea
MKIKNEKFSNALNHIPQKIPPIWFMRQAGRYHSHYQGLKQSYTFEELCKNPDLAAETALGPINDFDFDVAILFSDILFILEALGMSLKYDPGPIFSAFIDEQNYSELESPENAIKKMRFQEDALLATRDLLPQDKSLIGFVGGPWTVASYGLGLNKGIKYDGNYANNFVFRVLSEKVIPIIKYNISLQLNAGAEIVMIFDTDAKSISNKEHYSQYSKYLYEEIIKEFPKQIGYYSKSPFDNKFFVEDLNSDESYLAGLGVDHHLSMDHWFKEINNGFIQGNFNQESMVKAHDEFKKDFDLYIDNFQNINEIDRAGWVCGLGHGILKETPEENVHYFIENIRKIFS

SEQ ID NO: 152666 - protein, 345 aa, Unknown
  Bacterial polypetide isolated from the Sargasso Sea
MKICNERFSNALEHIPQKTPPIWFMRQAGRYHSHYQNLKKNYTFEELCKNPDLAAETALGPINDFDFDVAILFSDILFVLEALGMSLKYDPGPIFGNFIDENNYEELQSPENAIKEMSFQENALLATRDLLPDHKSLIGFVGGPWTVLSYGLGLNKGIQYENNYSNSFVFKVLSEKIIPLIKYNISLQLNAGAEVVMIFDTDAKSISDSENFNNYSKYLYKEVIKEFPKKIGYYSKSPFDNKFFVDELNSDDCLLAGLGVDHQLSMDHWFKEINNGFIQGNFNQESMVKDHDEFKKDFDIYVDHIQSINEKDRAGWVCGLGHGILKDTPEENVHYFIETIRKIFS

SEQ ID NO: 152667 - protein, 128 aa, Unknown
  Bacterial polypetide isolated from the Sargasso Sea
PGMREMLSTTGAIYGQGKGEKVALITDGRFSGATRGFCVGHVGPEAALGGPIALLRNGDVIDIDAKKGTINVRLTKAQLTSRKRKWKARKSDFGSGTLWKYAQTVGPAFLGAPTHPGKKKEVKDYSKI

SEQ ID NO: 152668 - protein, 199 aa, Unknown
  Bacterial polypetide isolated from the Sargasso Sea
MKKFNKKKLPSRHTSLGPDKAPQRSFYYAMNLTEKDVAKPFVGVVSTWNEAAPCNIALMRQAQSVKKGVQSAGGTPREFCTITVTDGIAMGHEGMKSSLISRDVIADSTELTVRGHCYDALVGVAGCDKSLPGLMMAMVRLNVPSVFIYGGSILPGRLNGKDITVVDVFEGVGKYSSGKISEHALRKIELKACPTAGAC

SEQ ID NO: 152669 - protein, 256 aa, Unknown
  Bacterial polypetide isolated from the Sargasso Sea
TPVLADLKPSGKYSMAELVNIGGVAPLMKNLVNKKLMHGDCLTVSGKTLAQNLKNIKPYPSNQKIIMPLISPVKKDGHLIILRGNIAPDGAVAKISGKEGTYFKGKAKVFESEEQCLKTILSGKISKGTVIVIRSEGPVGGPGMREMLSPTSAIMGQGLGDHVALITDGRFSGGSHGFVVGHIAPEAAIGGPLALIKNSDEIEICAIKKEINLLISKKEISSRNKKLKNKNVKHTNGALKKYARLVSQANTGATTT

SEQ ID NO: 152670 - protein, 452 aa, Unknown
  Bacterial polypetide isolated from the Sargasso Sea
MKKKNLRSKEWFDNPEDPGLTALYLERYLNYGLKKKDLQSGKPIIGIAQSGSDLSPCNRHFLSLSKTIKDGIRIAGGVPMEFPTHPIQETGKRPTAALDRNLSYLSLVEVLYGYPIDGVILTTGCDKTTPAALMAAATVNIPSIVLSGGPMLDGTYKGKKAGSGTIIWEARKLHAKGEIDYDEFMDMAAASAPSVGHCNTMGTASSMNSIAEALGMSLTGGAIIPAPYKERENISFETGKRIVDMVHEDLTPSKIMTKKAFENATYVASAIGASSNCPPHLTAIAKHMGIDFGIENWEKLGHDIPLLVNCQPAGEHLMEGFFKAGGIPVIMQELLKNNKLHKNVMTVTGKTIEENLKNINNNNEDVIKSFNNPIVSNAGFIVMKSNFFSSAVMKTSVISYEFRERYLSNLENPNVFEANAVIFEGPEDYHLRINDENLEINENSILMIRGCG

SEQ ID NO: 152671 - protein, 364 aa, Unknown
  Bacterial polypetide isolated from the Sargasso Sea
WGLTLPGASSIPAPDASHKRMATDCGRRIVEMIWEDLTPNEIINEASTRNAVTVAMATGCSTNAIIHLIAMARRAGVNLMLDQLDEIGRTTPVIANIRPSGKDYLMEDFFYAGGLRALMVELGDKLDLSVKTVTGKTLGECIQGSENFNTDVIRTLNNPVYHEGSLAVLKGNLAPNGAVIKPAAMDPKFQKHSGPAIVADSYAELKEIINDEDYPITADHILVLRNAGPKGGPGMPEWGMIPMPKALLKQGHRDMIRLSDARMSGTSYGACILHVAPEAFIGGPLALIKTGDIIRVDIPNRKLDVDVSESEMKKRKKEWVEPKPRYERGYGYMYSKHIEQADKGCDFDFLRTDFGVAVEEPDIN

SEQ ID NO: 152672 - protein, 137 aa, Unknown
  Bacterial polypetide isolated from the Sargasso Sea
GGRSHQDAVIVVRHNGPAANGMPELHKLMPVLGNLQKAGYKVALVTDGRLSGASGKIPAAIHVTPEALHGGAIGLLADGDLLRVDAVNGNLDCLTDLSGRTQAEIDLTLEQEGWGRELFSVMRRAVSSAECGATIFD

SEQ ID NO: 152673 - protein, 591 aa, Unknown
  Bacterial polypetide isolated from the Sargasso Sea
MKKKNLRSKQWFDDPKDPGMTAMYLERYLNYGLTRKELQSGNPIIGIAQSGSDLSPCNRHFLDLSKRIKDGIRRAGGIPMEFPTHPIQETGKKPTAMLDRNLSYLSLVEILYGYPLDGVILTTGCDKTTPAALMAAATVNIPAIVLSGGPMLDGNYKGKKAGAGTIIWEARRLHAKGEINYEEFMDMAAASSPSPGHCNTMGTASSMNSVAEALGMSLPGCAVIPAPYREREQISFETGSRIVNMVHEDLTPSKIMTKKAFENAVIVASAIGASSNCTTHLIAIAKHMGVKFDLSHWQKLGHKIPLLANCQPAGEHLMEGFYRAGGIPAIMKELMKNNKIHKNLITVTGKTVAQNLRKKIDVDRNVIKTFKDNLTDKAGFLVMKGNFFSSAIMKTSVISKEFRDRYLSNPKHPNVFKGKAVVFEGPEDYHDRINSKKLKIDENSILIIRGCGPVGYPGSAEVVNMQPPDRLLKKGINALPTLGDGRQSGTSESPSILHVSPESAVGGDLAIVKTGDKMTIDLNKRRVDLQITKLEFIKRRKKKRIKKLTNQTPWQEISRSNVGQLEDGACIMSRDQYLDITKTKGVLRNSH

SEQ ID NO: 152674 - protein, 108 aa, Unknown
  Bacterial polypetide isolated from the Sargasso Sea
MVDKDLRKHSKKIVDGVEQAPSRAMLRAVGFRTKDFKIPQVGIASTWSMITPCNMHLNDLAQETSSGVEESGAKGIIFNTITVSDGISMGTPGMRYSLVSREIIADSI

SEQ ID NO: 152675 - protein, 104 aa, Unknown
  Bacterial polypetide isolated from the Sargasso Sea
AIKGAGLGKDVLLITDGRFSGGTTGLCIGHVTPESFDLGPIAICQNGDFINLNLSKRELNIELTESEIKKRFESYKLPEPRYKSGVLSKYSKLVSGADSGAVTS

SEQ ID NO: 152676 - protein, 435 aa, Unknown
  Bacterial polypetide isolated from the Sargasso Sea
MPKKRKKSFRSQQWFNNPKNPDMTALYLERYLNYGLTRKELQSGNPIIGIAQSGSDLSPCNRHFLSLSKRIKDGVRRAGGIPMEFPTHPIQETGKRPTAMLDRNLSYLSLVEVLYGYPIDGVILTTGCDKTTPAALMAAATVNIPAIVLSGGPMLDGVYKGKLAGSGMVVWEARKMLAKGEIKYEEFMDMVSSSSPSAGHCNTMGTASSMNSVAEALGMSLPGGAVTPAPYREREQISYETGKRIVGMVHENLTPSKIMTRKAFENAVVVASAIGGSSNCTTHLSAIAKHMGIKFDLSDWQKLGHNIPLLVNCQPAGEYLMESFHRAGAIPAVMKELIKNKKLHTNIKTVTGKTVKENLRKKIDVDNKVIKSFKNSLAEKAGFLVMKSNFFSSAIMKTSVISKEFKERYLSNPKHLNVFNGKAVVLKDQRITIRD

SEQ ID NO: 152677 - protein, 195 aa, Unknown
  Bacterial polypetide isolated from the Sargasso Sea
MEDKGSNSKSKLPSRYVSVGPKSAPHRSYYYAMGLKEHEIYQPFVGVVSTWNESAPCNITLQDQAQHVKTGVKSSGGTPREFTTITVTDGIAMGHEAMKSSLISREVIADSIELSVRGHCYDAIVGLAGCDKSLPGLMMAMVRLNVPSVFIYGGSILPGRYKGKDVTVIDVFEAVGKHAAGSITDQDLKDLEQVA

SEQ ID NO: 152678 - protein, 583 aa, Unknown
  Bacterial polypetide isolated from the Sargasso Sea
MSATKPRLRSTQWFGTNDKNGFMYRSWMKNQGIPDHEFDGRPIIGICNTWSELTPCNAHFRKLAEHVKRGISEAGGFPVEFPVFSNGESNLRPSAMLTRNLASMDVEEAIRGNPIDAVVLLAGCDKTTPALLMGAASCDVPAIVVSGGPMLNGKLEGKNIGSGTAVWQLHEALKAGEIDVHHFLSAEAGMSRSAGTCNTMGTASTMACMAEALGVALPHNAAIPAVDSRRYVLAHMSGIRIVEMALEGLVLSKILTRAAFENAIRANAAIGGSTNAVIHLKAIAGRIGVPLELEDWMRIGRDTPTIVDLMPSGRFLMEEFYYAGGLPAVLRRLGEGGLLPNPDALTVNGKSLWDNVREAPNYDEEVIRPLDRPLIADGGIRILRGNLAPRGAVLKPSAASPELLKHRGRAVVFENLDHYKATINDEALDIDASSVMVLKNCGPRGYPGMAEVGNMGLPPKLLRQGVKDMVRISDARMSGTAYGTVVLHVAPEAAAGGPLAAVRNGDWIELDCEAGTLHLDITDDELHRRLSDVDPTAAPGVAGQLGKGGYARLYIDHVLQADEGCDLDFLVGTRGAEVPSHSH

SEQ ID NO: 152679 - protein, 79 aa, Unknown
  Bacterial polypetide isolated from the Sargasso Sea
FVVGHISPEAAEGGMIAFIKDGDVIVIDAIKNEINVKLNKNELDSRKKEWIKPELKYKSGILYKYSKLVSSASKGCITD

SEQ ID NO: 152680 - protein, 56 aa, Unknown
  Bacterial polypetide isolated from the Sargasso Sea
MCDGIYYWFSWLFQQKALNKLCLYGFIYHFVEINNELCKVAPLNSLLQNATNFYAN

SEQ ID NO: 152681 - protein, 50 aa, Unknown
  Bacterial polypetide isolated from the Sargasso Sea
MRNARLHSGKTEVTMAKLRSATTTEGRKRAGARALWRATGMTDTDFGKPI

SEQ ID NO: 152682 - protein, 254 aa, Unknown
  Bacterial polypetide isolated from the Sargasso Sea
SEQITRLNPPLPDGDVIYTVKDPYKPTGGLRVLGGNLSPEFSSVLKLAGVEGGLENNIFIGTARVFDGEEGLLYSLANEPEVFQNGDMIIVRYEGPSGAPGMPEMLDSTSRITTLCREKNIIVGLMTDGRFSGGSVGLVIGHVGPEAALGGEIAFIENGDEIVIDLNSNEINCTPLKDEKILTHRKKAWMETVEANGGTHPSIGIADTRLLNRMRRSAVSAVYGAGMHPDRQLWVSEPRDPVMTKFSPANKYRS

SEQ ID NO: 152683 - protein, 118 aa, Unknown
  Bacterial polypetide isolated from the Sargasso Sea
VGGPGMREMLSPTSAIMGKGLGNDVALITDGRFSGGSHGFVVGHISPEAAIGGPLQIVKNNDPIEICARKREINILVAKKEIDKRMREFQKPNSKTENGALTKYARLVSQADTGAITN

SEQ ID NO: 152684 - protein, 150 aa, Unknown
  Bacterial polypetide isolated from the Sargasso Sea
VISRKYKDGDIIIIRYEGPIGGPGMREMLQTTAAIYGQGKGEKVALITDGRFSGATRGFCIGHVGPEASVGGPIALLRNGDIIDIDAKKGTINVRLTKKELSARRKKWKPRKMNFGNGTLWKYAQTVGPAYKGAPTHPGGKNEVRTYADI

SEQ ID NO: 152685 - protein, 229 aa, Unknown
  Bacterial polypetide isolated from the Sargasso Sea
MKKFNKKKLPSRHTTIGADKAPQRSFYYAMDLTEKDVAKPFVGVVSTWNEAAPCNINLMKQAQSVKKGVKASGGTPREFCTITVTDGIAMGHEGMKSSLISRDVIADSTELTVRGHCYDALVGLAGCDKSLPGLMMSMVRLNIPSVFIYGGSILPGRFNGKDVTVVDVFEGVGKYTSKKMTAHALRKLELKACPSAGACGGQFTANTMACVSEAIGLALPFSAGTPAPY

SEQ ID NO: 152686 - protein, 165 aa, Unknown
  Bacterial polypetide isolated from the Sargasso Sea
VKVAGIDVDRFDGRARVFDGEDAAMAAVLGSQIEAGDIVVIRYEGPKGGPGMREMLAITGAMKGAGRGGDAALITDGRFSGGTHGFCVGHVAPEAVDGGPIALVAEGDRIVIDVVSHTIDLMVDELTLAERRANLKPFEPRYTSGFLAKYAALAQGAEKGAVTQA

SEQ ID NO: 152687 - protein, 171 aa, Unknown
  Bacterial polypetide isolated from the Sargasso Sea
MVDKGSNIKSKLPSRHVSVGPKSAPHRSMYYAMGMTEDQIYQPFIGVATTWNESAPCNITLGRQAQSVKIGVKEKNGTPREFTTITVTDGIAMGHEAMKASLVSREVIADSVELSVRGHCYDGIVGLAGCDKSLPGLMMAMVRLNIPSVFIYGGSILPGKYKGKDMTIIDF

SEQ ID NO: 152688 - protein, 250 aa, Unknown
  Bacterial polypetide isolated from the Sargasso Sea
MSKINKKKLPSRHTSLGPDRAPHRSFYYAMGETEQDVAKPFVGVVSTWNEAAPCNTALMRQAQSVKKGVKENGGTPREFCTITVTDGIAMGHEGMKSSLISREIIADSAELTVRGHCYDALVGIAGCDKSLPGLMMSMLRLNVPSVFIYGGSILPGKYKGKDVTVVDVFEAVGKHSSGSMSSEELRELELVACPSAGACGGQFTANTMACVSEAIGLALPYSAGTPAPYEERDKYAFESGQTVMNLLEKI

SEQ ID NO: 152689 - protein, 163 aa, Unknown
  Bacterial polypetide isolated from the Sargasso Sea
MRKFNKKKLPSRHTSLGADRAPHRSFYYAMGETEKDVSKPFIGVVSTWNEAAPCNIALMRQAQSVKKGVRASGGTPREFCTITVTDGIAMGHEGMKSSLISREVIADSAELTVRGHCYDALVGIAGCDKSLPGLMMSMVRLNVPSVFIYGGSILPGKYKGKDV

SEQ ID NO: 152690 - protein, 95 aa, Unknown
  Bacterial polypetide isolated from the Sargasso Sea
NRIYYRWEDFQVAPHGFVVGHVSPEAAEGGLIALVEDGDTILIDAESDQLVLKVDDDEIKRRQSIWENPNSKPKKGVLAKYAESVKSASLGAITD

SEQ ID NO: 152691 - protein, 286 aa, Unknown
  Bacterial polypetide isolated from the Sargasso Sea
GLPSNAAIPAADSRRKVVARMVGQRIVDMVKENLTIDKILTKEAFENAIMVNGAIGGSTNAVVHLMAIAGRLGVELTLDDWDRLGRNMPCLVNLMPSGKYLMEDFFYAGGLPAVIKEIGDNLHKDALTVNGQSIWENSKDAVCYDRDVIFEKNNPFKESGGIVVLHGNLAPTGAILKPSAATEELMQHRGRAVVFEDIDHFKEKVNDPDLDVEPNDVLVLKNCGPKGYPGFPEVGNLELPPKILAQGITDMVRISDARMSGTAYGTVVLHTSPEAAAGGTLALVRD

SEQ ID NO: 152692 - protein, 356 aa, Unknown
  Bacterial polypetide isolated from the Sargasso Sea
MKKTLRSHPIDGAVLMGGCDKSTPALIMGATSMGLPFIYMPAGAMLRGNYAGGKLGSGTDVWKYWDERRAGNISKEQWDGVQGGIARSYGTCMTMGTASTMMSIADGWGLTLPGASSIPAPDASHKRMATDCGRRIVEMIWEDLTPNKIINETSTRNAVTVAMATGCSTNAIIHLIAMARRAGVNLTLDQLDEIGRTTPVIANIRPSGKDYLMEDFFYAGGLRALMVELGDKLDLNVKTVTGKTLGECIKGAENFNTDVIRALDNPVYHEGSLAVLKGNLAPDGAVIKPAAMDPKFQKHRGPAIVADSYSELKEIINNENYPITVDHVLVLRNAGPKGGPGMPEWGMIPMPNALLK

SEQ ID NO: 152693 - protein, 267 aa, Unknown
  Bacterial polypetide isolated from the Sargasso Sea
MSKIDKKKLPSRHTSLGPDRAPHRSFYYAMGETEQDVAKPFVGVVSTWNEAAPCNTALMRQAQSVKKGVKQFGGTPREFCTITVTDGIAMGHEGMKSSLISREIIADSAELTVRGHCYDALVGIAGCDKSLPGLMMSMLRLNVPSVFIYGGSILPGKYKGKDVTVVDVFEAVGKHSSGKMSSEELRELELVACPSAGACGGQFTANTMACVSEAIGLALPYSAGTPAPYEERDKFAFESGKAVMNLLEKKIKPREIVTKKSLENAAT

SEQ ID NO: 152694 - protein, 163 aa, Unknown
  Bacterial polypetide isolated from the Sargasso Sea
MYNKYSRVVTKDDSQPAAQAMLHATGLSEEDFDKPFIGIASTGYEGNPCNMHLNDLSVKIKNSISASEYVGLIFNTIGVSDGISMGTFGMRYSLPSRDIIADSMETVVQAMSYDGLVTVVGCDKNMPGALMAMLRLDRPSILVYGGTIDSGCYNNKELDVVSA

SEQ ID NO: 152695 - protein, 208 aa, Unknown
  Bacterial polypetide isolated from the Sargasso Sea
SGKISEHALRKIELKACPTAGACGGQFTANTMACVSEAMGLALPYSAGTPAPFNRRDKYALASGKAVMNLLAKNIRPRDIVTKKALENAATIVAATGGSTNAALHLPAIANEIGIKFDLMDVAKIFKRTPYLADLKPGGKYVAKDMWKAGGVPMLLKTLMDGGYIHGNCMTVTGNTMKENLKNVKFNVNQKVMRKYNNPLSPDGGVVG

SEQ ID NO: 152696 - protein, 235 aa, Unknown
  Bacterial polypetide isolated from the Sargasso Sea
MLHAPELARAAGYKTFANEIMSPEEFNNLSRNVIPVVIDARPFGQYSMVDIDAKGGMQVIVKELMDAGLLNGDTLTCTGETLSEQVERLNPPTPDEDVIYTVQKPYKETGGLRVLGGNLSPEFSAVLKLAGVEGGLENNIFKGTAKVFDGEQELLKALDSQADMFENFDMIVVRYEGPFGAPGMPEMLDSTSRITALCREKNIVVGLMTDGRFSGGSVGLVIGHVGPEAAAGGAI

SEQ ID NO: 152697 - protein, 147 aa, Unknown
  Bacterial polypetide isolated from the Sargasso Sea
KSITDGDVIIIRYEGPVGGPGMREMLSTTGAIYGQGKGEKVALITDGRFSGATRGFCVGHVGPEAALGGPIGLLRTGDIIDIDAKKGTINVRLSKKEMAARKRKWRARKSDFGSGTLWKYAQTVGPAFLGAPTHPGKKKEVKDYSEI

SEQ ID NO: 152698 - protein, 279 aa, Unknown
  Bacterial polypetide isolated from the Sargasso Sea
MAKFNKKKLPSRHTSLGPDKAPQRSFYYAMNLTEKDVAKPFVGVVSTWNEAAPCNIALMRQAQSVKKGVKLSGGTPREFCTITVTDGIAMGHEGMKSSLVSRDVIADSTELTVRGHCYDALVGVAGCDKSLPGLMMAMVRLNVPSVFIYGGSILPGRFNGKDVTVVDVFEGVGKYSSGKMTEHALRKLELVACPSAGACGGQFTANTMACVSEAIGLALPYSAGTPAPYEQRDKYALQSGKAVMNLLKKNIRPRQIVTRKSLENAATIVAATGGSTMQL

SEQ ID NO: 152699 - protein, 211 aa, Unknown
  Bacterial polypetide isolated from the Sargasso Sea
MKKFNKKKLPSRHTTVGADKAPQRSFYYAMDLTEKDVAKPFVGVVSTWNEAAPCNINLMKQAQFVKKGVHLSGGTPREFCTITVTDGIAMGHEGMKSSLISRDVIADSTELTVRGHCYDALVGLAGCDKSLPGLMMSMVRLNIPSVFIYGGSILPGRFNGKDVTVVDVFEGVGKYTSNKMTAHALRKLELKACPSAGACGGQFTANTMACV

SEQ ID NO: 152700 - protein, 182 aa, Unknown
  Bacterial polypetide isolated from the Sargasso Sea
MAKFNKKKLPSRHTSLGADRAPHRSFYYAMGETEKDVAKPFVGVVSTWNEAAPCNIALMRQAQSVKKGVRANGGTPREFCTITVTDGIAMGHEGMKSSLISREVIADSAELTVRGHCYDALVGIAGCDKSLPGLMMSMVRLNVPSVFIYGGSILPGRYKGKDVTVVDVFEAVGKHSSGQMSA

SEQ ID NO: 152701 - protein, 130 aa, Unknown
  Bacterial polypetide isolated from the Sargasso Sea
MRKFNKKKLPSRHTSLGADRAPHRSFYYAMGETEKDVSKPFIGVVSTWNEAAPCNIALMRQAQSVKKGVRASGGTPREFCTITVTDGIAMGHEGMKSSLISREVIADSAELTVRGHCYDALVGIAGCDKS

SEQ ID NO: 152702 - protein, 129 aa, Unknown
  Bacterial polypetide isolated from the Sargasso Sea
DIVVVRYEGPKGGPGMREMLSPTSAINGRGLSQSVALITDGRFSGGSHGFVIGHISPEAYEGGPLALLEDGDQITIDAESKTIDVDLTQAELDSRKKSWSKPQPYAKKGLLAKYAKLVSSASLGAVTDL

SEQ ID NO: 152703 - protein, 276 aa, Unknown
  Bacterial polypetide isolated from the Sargasso Sea
MRKFNKKKLPSRHTSLGPDRAPHRSFYYAMGETEKDVSKPFIGVVSTWNEAAPCNIALMRQAQSVKKGVRASGGTPREFCTITVTDGIAMGHEGMKSSLISREVIADSAELTVRGHCYDALVGIAGCDKSLPGLMMSMVRLNVPSVFIYGGSILPGKYKGKDVTVVDVFEAVGKHSSGQMSAKELRKLELVACPTAGACGGQFTANTMACVSEAIGLALPYSAGTPAPYEERDKYAKLSGKMVMELLAKKIKPRDIVSKKALENAATIVAATRGFN

SEQ ID NO: 152704 - protein, 253 aa, Unknown
  Bacterial polypetide isolated from the Sargasso Sea
ELSRNVPHLADMKPFGKFHMVDLDKIGGVPVVSKILLENELINPGCMTVTGKTVGENLENVEIPKNQDVISFPDNPISNEGGIAVLKGSLSTKGSVVKTAGIEINNFTGPANVFDSEQDALDALFNGDIEKGQVVVIRNEGPKGGPGMREMLQITAAIKGAGLGKDVLLITDGRFSGGTTGLCIGHVAPESFDKGPISICKDGDIISLDISNRTLNLDISEEEMNKRFGLLTLPEPRYKSGVLHKYSKLVSGS

SEQ ID NO: 152705 - protein, 225 aa, Unknown
  Bacterial polypetide isolated from the Sargasso Sea
MTPATYEERDNYGIESGKAVMHLIEKNIRPRDIVTLESLRNAAVVVAATGGSTNAGLHLPAIANEAGIKFTLKDVVDIYKSTPYIGDMSPGGKYVAKDLYEVGGVPIVIKSLIDGGYINGDCMTVTGKTIGENHRDVIFPKNQDVVYTCDNPISEHSSVVGLWGNLAEDGSISKIAGLKNLQFKGKAKCFDCEEDALTAVLKNEIVAGDAVIIRYEGPIGGPGMR

SEQ ID NO: 152706 - protein, 240 aa, Unknown
  Bacterial polypetide isolated from the Sargasso Sea
MKKFNKKKLPSRHTSLGPDKAPQRSFYYAMDLTEKDVAKPFVGVVSTWNEAAPCNIALMRQAQSVKKGVHQAGGTPREFCTITVTDGIAMGHEGMKSSLISRDVIADSTELTVRGHCYDALVGVAGCDKSLPGLMMAMVRLNVPSVFIYGGSILPGRFNGKDVTVVDVFEGVGKFSSGKMSAHALRKLELKACPSAGACGGQFTANTMACVSEALGLALPYSAGTPAPYTQRDSYALKSG

SEQ ID NO: 152707 - protein, 258 aa, Unknown
  Bacterial polypetide isolated from the Sargasso Sea
MTEKGSNIKSKLPSRHVSVGPKSAPHRSMYYAMGLTEEEIYQPFIGVATTWNESAPCNITLGRQAQAVKIGVKELNGTPREFTTITVTDGIAMGHEAMKASLVSREVIADSVELSVRGHCYDGIVGLAGCDKSLPGLMMAMVRLNIPSVFIYGGSILPGNYKGKDLTIIDVFEAVGKHAQGAIDDAELKNIEKVACPTAGSCGGQFTANTMACISEAVGLALTNSAMTPATYKERDNYGIESGKAVMNLISKNIRPRD

SEQ ID NO: 152708 - protein, 92 aa, Unknown
  Bacterial polypetide isolated from the Sargasso Sea
MVTDSNSRAASRGMLYGVGFKKGDFQKSQVGIASTWGTVTPCNMHINDLAEHAARGVRKAQGMPLTFGTITVSDGISMGTEGMKYSLVSREV

SEQ ID NO: 152709 - protein, 239 aa, Unknown
  Bacterial polypetide isolated from the Sargasso Sea
MKFNKSKLPSRHVSVGVKSAGHRSMYYAMGLKKEDIEKPFIGVATTWNEAAPCNITLSRQAQSVKKGVKSAGGTPREFTTITVTDGIAMGHAGMKSSLISREVIADSVELTMRGHCYDALVGLAGCDKSLPGLMMVMVRLNVPSVFIYGGSILPGNFKGKDVTIADVFEGIGKHSTGAMSEEDLLELESIACPSGGSCGGQFTANTMACVSEALGLALPGSAGTPAIYEERDKFSYSSG

SEQ ID NO: 152710 - protein, 293 aa, Unknown
  Bacterial polypetide isolated from the Sargasso Sea
GMKSSLISREVIADSVELTMRGHCYDALIGLAGCDKSLPGLMMVMLRLNVPSVFIYGGSILPGNYKGKDVTIVDVFEGVGKQSTGKMSKEDLLELESVACPSAGSCGGQFTANTMACVSEAIGLALPGSAGTPAVYETRDKFAIASGEAVMNLIKKNIRPRDIVTRKSLENAAVIVAASGGSTNAALHLPAIANEAGIKFTLEDVTNISKKTPYIADLKPGGKYVAKDLYEIGGVPILIKALLEGGFLHEDCLTVSGKTIGENHKDVVFPSNQKVIYKTSKPLSPRGGFVDER

SEQ ID NO: 152711 - protein, 201 aa, Unknown
  Bacterial polypetide isolated from the Sargasso Sea
MSLLVNQSVIRGIDNPLYKKGHLAILKGNLANEGSVAKISGVKNPVLTGPAKIFESEEDCLKAILNNEIIAGDVVVVRNEGPVGGPGMREMLSPTSAIVGQGLGEKVALITDGRFSGGSYGLVVGHIAPEAAVGGNIALIKQGDLITVDAVKQLIEVNLSDEELEKRKKDWVKPKPKYKRGILSKYSKIVSTSSLGAVTDL

SEQ ID NO: 152712 - protein, 142 aa, Unknown
  Bacterial polypetide isolated from the Sargasso Sea
MKISSRNVVEGTARAPHRAMYKAMGLTNEDLAKSMIGVCHTGNEATPCNIHLPNLAQHAKQGVTDGGTTPREFSTIAVSDGIAMGHEGMKSSLISREVIADSIELMVRAHQYDALVGIAGCDKSLPGTMMGMIRLNIPFRLC

SEQ ID NO: 152713 - protein, 140 aa, Unknown
  Bacterial polypetide isolated from the Sargasso Sea
MLYPTGFKKEDFSKPQIGVASLWSMVTPCNMHINHLADRAVEGADSAGGKGVLFNTITVSDGISMGTPGMRFSLVSREIIADSIETVVCAQGFDGFVAIGGCDKNMPACGIAIARLNRPSVFVYGGTILPGEQRRDIVSV

SEQ ID NO: 152714 - protein, 204 aa, Unknown
  Bacterial polypetide isolated from the Sargasso Sea
MPEGDPNDLNKWSRKITQPKSQGASQAMLYATGLTPEQMNKPQIGVSSVWWQGNPCNKHLLDLAGKVAEGVKAADMVSFQFNTVGVSDGISMGTPGMSFSLQSRDLIADSIETVMGGQWYDGNISLPGCDKNMPGTIMAMGRLNRPALMIYGGTIRPGVSSVDGSSLDIVSAFQSYGQFVTGAITEDQRQDIVRNSCPGAGACG

SEQ ID NO: 152715 - protein, 166 aa, Unknown
  Bacterial polypetide isolated from the Sargasso Sea
MAKFNKKKLPSRHTSLGADRAPHRSFYYAMGETEKDVAKPFIGVVSTWNEAAPCNIALMRQAQSVKKGVRSNGGTPREFCTITVTDGIAMGHEGMKSSLISREVIADSAELTVRGHCYDALVGIAGCDKSLPGLMMSMVRLNVPSVFIYGGSILPGRYKGKDVTGG

SEQ ID NO: 152716 - protein, 220 aa, Unknown
  Bacterial polypetide isolated from the Sargasso Sea
MAENHKDVIFPKDQDVVYSCDKPISEHSSVVGLWGNLAEEGSISKIAGLKNLSFKGKAKCFDCEEDALTAVLKNEIVAGDAVVIRYEGPKGGPGMREMLSTTGAIYGQGLGETVALITDGRFSGGTRGFCIGHVGPEAAVGGMIGLLKNGDEIVIDAIKGEINVSLTDEEIAKRKKEWKPRTTNHNSGSIWKYAQTVGPAHEGAVTQPGAKKETHTYADI

SEQ ID NO: 152717 - protein, 126 aa, Unknown
  Bacterial polypetide isolated from the Sargasso Sea
MLRAVGFTDEDFLKPQIGVASTWSMVTPCNMHINGLAELAAVGADAAGGKSVIFNTITVSDGISMGTAGMRYSLVSREVIADSIETVTAAEGFDGLVTIGGCDKNMPGCVMAMARLNRPSVLSTEV

SEQ ID NO: 152718 - protein, 243 aa, Unknown
  Bacterial polypetide isolated from the Sargasso Sea
MNKFNKRKLPSRHTSLGADKAPQRSFYYAMGETEKDVAKPFVGVVSTWNEAAPCNIALMRQAQSVKKGVKFSGGTPREFCTITVTDGIAMGHEGMKSSLVSRDVIADSTELTVRGHCYDALVGVAGCDKSLPGLMMAMLRLNVPSVFIYGGSILPGRYNGKDVTVLDVFEGVGKYSSGKMSEHALRKLELKACPSAGACGGQFTANTMACVSESHWFSITLFCWNTRAVRTERQICFTKWQGS

SEQ ID NO: 152719 - protein, 202 aa, Unknown
  Bacterial polypetide isolated from the Sargasso Sea
MSNIVSKVTDIRQNIERRSADSRSQYLRIINEWKDKSPNTNSMGCSNVAHTYAACNKSSPDAIHQPMIGIVSAYNDMLSAHAPFEQYPKILKDHGKGLGLNVQVAAGVPAMCDGITQGEPGMELSLFSRDTIALSTAIGLSHNVFNGIVCMGTCDKIVPGLVIGALRHGHLPAIFVSGGPMSTGISNTEKSLSRKELQRGKL

SEQ ID NO: 152720 - protein, 230 aa, Unknown
  Bacterial polypetide isolated from the Sargasso Sea
KLCLMRVLIDGDQLTVTGKTIAQNLESYDYYPKDQDIVKETKAPIKADSHLRVLYGNLAPQGAVAKISGKEGLSFQGKAKVYDSEESAMEGILSNQISEGDVLVIRYEGPRGAPGMREMLSPTSAIMGKGLGDKVAFLTDGRFSGGTHGFVVGHITPEAFDGGPISLIKDGDIISIDAETNQINFDLSEEELKKRKESWVCPVKEEEGGVLDKYRSLVTSASLGAVTTKK

SEQ ID NO: 152721 - protein, 133 aa, Unknown
  Bacterial polypetide isolated from the Sargasso Sea
GPKGSPGMPEMLSTTAAIVGQGLGEEVALITDGRFSGATHGFCIGHVGPEAAIGGPIGLVKDNDIVEIDAEKGLLKVQLNKGEFLKRKRKWKPKKIEYNSGTLWKYSQTVGPAFKGAVTHPGAYKDKKTYADI

SEQ ID NO: 152722 - protein, 272 aa, Unknown
  Bacterial polypetide isolated from the Sargasso Sea
MKKFNKKKLPSRHTSLGPDKAPQRSFYYAMNLTEKDVAKPLVGVVSTWNEAAPCNITLMRQAQSVKKGVKLSGGTPREFCTITVTDGIAMGHEGMKSSLISRDVIADSTELTVRGHCYDALVGVAGCDKSLPGLMMAMVRLNVPSVFIYGGSILPGRFNGKDVTVVDVFEGVGKYSSGKMTAHALRKLELKACPSAGSCGGQFTANTMACVSEAIGLALPYSAGTPAPYEQRDKYAFESGKAVMNLLEKNIRPRQIVTRKSLENAATIVLQQ

SEQ ID NO: 152723 - protein, 230 aa, Unknown
  Bacterial polypetide isolated from the Sargasso Sea
MEDKGSNSKSNLPSRYVSVGPKSAPHRSYYYAMGLKEHEIYQPFVGVVSTWNESAPCNITLQDQAQHVKTGVKDAGGTPREFTTITVTDGIAMGHEAMKSSLISREVIADSIELSVRGHCYDAIVGLAGCDKSLPGLMMAMVRLNVPSVFIYGGSILPGKYKGKDVTVIDVFEAVGKHAAGTISDQDLKDIEQVACPSAGSCGGQFTANTMACISEAVGLALTNSAMPPA

SEQ ID NO: 152724 - protein, 102 aa, Unknown
  Bacterial polypetide isolated from the Sargasso Sea
RGLGNDVALITDGRFSGGSHGFVIGHITPEAFDGGLLGIVENGDNITIDITKRTIDLEVSEDEIKSRQDSWVCPKAHYNRGVLAKYAKLVSSASLGAVTDLD

SEQ ID NO: 152725 - protein, 308 aa, Unknown
  Bacterial polypetide isolated from the Sargasso Sea
IDKSKLPSRHTSLGPSSAPHRSYYYAMGMTKEEINQPFVGVVSTWNESAPCNITLRRQAQSVKKGVSDASGTPREFTTITVTDGIAMGHQGMKASLASRETIADSIELSVRGHSYDGLVGLAGCDKALPGVMMAMLRLNIPSVFIYGGSILPGVHKGKNITVQDVFEAVGNFSGGVINKDELEEIEKVACPSAGSCGGQFTANTMACVSEAIGLAIPNSTMAPAPYESRDEYGYEAGKTVMNLLASDIRPRDIVTRESLENAAMVVAASGGSTNAALHLPAMAHEAGIKFDLFDVADIFKSTPYIADL

SEQ ID NO: 152726 - protein, 261 aa, Unknown
  Bacterial polypetide isolated from the Sargasso Sea
KPGGNYVQKDMHEAGGVPMLLRTLLDEGFINGDCLTVTGNTLEENISEVVFDNTQKVIYPASSPITETGGVVGLKGNFAPDGAIVKVAGMENLTFTGPARCFDCEEDAFTAVENKKYNDGDVIVIRYEGPKGGPGMREMLSTTAALYGQGKGDKVALVTDGRFSGGTRGFCIGHVGPEAADGGPIALIKDGDIISINANEGTIDVDLSEDELESRKKQWIKPKTDYNSGTLWKYSNQVGPARYGAVTHPGAKEETHCYADI

SEQ ID NO: 152727 - protein, 290 aa, Unknown
  Bacterial polypetide isolated from the Sargasso Sea
KENFENAIMVNGAIGGSTNAVVHMLAIAGRMGINITLDDWDRLGRDIPCLVNLMPSGEYLMEDFFYAGGLPAVIKELEQWINKDAMTANGNTIWENCQDAECYSRDVIYSVNKPFKPNGGIAVLKGNLAPDGAIIKPSAASPDLMVHRGRAVVFESIEEYHSRIDDPELDIDETCIMVLKYCGPKGYPGMAEVGNMGLPSKVLKKGITDMVRISDARMSGTAYGTVVLHTAPEAAAGGSLAFVENGDFIELDVPNRKLHLEISDEELAKRKAGWKRVFISLRKGLHKDLC

SEQ ID NO: 152728 - protein, 147 aa, Unknown
  Bacterial polypetide isolated from the Sargasso Sea
GPDRAPHRSFYYAMGETEQDVAKPFVGVVSTWNEAAPCNTALMRQAQSVKKGVKENGGTPREFCTITVTDGIAMGHEGMKSSLISREIIADSAELTVRGHCYDALVGIAGCDKSLPGLMMSMLRLNVPSVFIYGGSILPGKYKGKDV

SEQ ID NO: 152729 - protein, 246 aa, Unknown
  Bacterial polypetide isolated from the Sargasso Sea
MRKFNKKKLPSRYTTVGADRAPQRSFYYAMDLTEKDVAKPFVGVVSTWNEAAPCNINLMKQAQFVKQGVNSSGGTPREFCTITVTDGIAMGHEGMKSSLISRDVIADSTELTVRGHCYDALVGLAGCDKSLPGLMMSMVRLNIPSVFIYGGSILPGRFEGKDVTVVDVFEGVGKYTSKKMTAHALRKLELKACPSAGACGGQFTANTMACVSEAIGLALPYSAGTPAPYKERHKYAINSGKAVMKL

SEQ ID NO: 152730 - protein, 262 aa, Unknown
  Bacterial polypetide isolated from the Sargasso Sea
LPSRHTSLGPDKAPQRSFYYAMNLTEKDVAKPFVGVVSTWNEAAPCNIALMRQAQSVKKGVSLSGGTPREFCTITVTDGIAMGHEGMKSSLISRDVIADSTELTVRGHCYDALVGVAGCDKSLPGLMMAMVRLNVPSVFIYGGSILPGRFNGKDVTVVDVFEGVGKYSSGKMTKHALRKLELIACPSAGACGGQFTANTMACVSEAIGLALPYSAGTPAPYEQRDKYALQSGKAVMNLLKRNIRPRQIVTRKSLENAATIVA

SEQ ID NO: 152731 - protein, 293 aa, Unknown
  Bacterial polypetide isolated from the Sargasso Sea
MKNFNKKKLPSRHTSLGPDKAPQRSFYYAMNLTEKDVAKPFVGVVSTWNEAAPCNIALMRQAQSVKKGVKSSGGTPREFCTITVTDGIAMGHEGMKSSLVSRDVIADSTELTVRGHCYDALVGVAGCDKSLPGLMMAMLRLNVPSVFIYGGSILPGRFNGKDVTVLDVFEGVGKYSSGKMTEHALRKLELKACPSAGACGGQFTANTMACVSEAIGLALPYSAGTPAPYEQRDRYALQSGKTVMNLLKKNIRPRDIVTRKSLENAATIVAATGGSNNAALHLPALANEIGIKF

SEQ ID NO: 152732 - protein, 271 aa, Unknown
  Bacterial polypetide isolated from the Sargasso Sea
SIVTSYNRNFPKRNDGYASTFAFVTSPETVVALSIAGKLDFDPAVDSLTTENGEEVKLSVDVGEELPSKGFDSGEEGLFKPPPSENSQIEISISQESERLQALTPFAPWDGNDFEGLPVLMKAKGKCTTDHISMAGSWLKYRGHLENISGNLYLGVVNSFTGEIGTGVDITDNQIRPFPEIAKRYHEAGIEWVAIGDENIGEGSSREHAAMEPRFRGCRVVIARSFARIHETNLKKQGILPLTFANPGDYDLIGQEDRISVIDIKNMRANE

SEQ ID NO: 152733 - protein, 237 aa, Unknown
  Bacterial polypetide isolated from the Sargasso Sea
MAKFNKKKLPSRHTSLGPDKAPQRSFYYAMNLTEKDVAKPFVGVVSTWNEAAPCNIALMRQAQSVKKGVKLSGGTPREFCTITVTDGIAMGHEGMKSSLVSRDVIADSTELTVRGHCYDALVGVAGCDKSLPGLMMAMVRLNVPSVFIYGGSILPGRFNGKDVTVVDVFEGVGKYSSGKMTEHALRKLELVACPSAGACGGQFTANTMACVSEAIGLALPYSAGTPAPYEQRDKYAL

SEQ ID NO: 152734 - protein, 144 aa, Unknown
  Bacterial polypetide isolated from the Sargasso Sea
EQDALDALFNNKIEKGDVVVIRNEGPKGGPGMREMLQITAAIKGAGLGKDVLLITDGRFSGGTTGLCIGHVTPESFDLGPIAICQNGDLINLNLSKRELNLELTESEIKKRFESYKLPEPRYKSGVLSKYSKLVSGADSGAVTS

SEQ ID NO: 152735 - protein, 66 aa, Unknown
  Bacterial polypetide isolated from the Sargasso Sea
MLRSDAVTKGIQRSPNRAMLRAVGFGDSDFGKPILGIANGYSTITPCNVGLNDLAKRAEEAARQAG

SEQ ID NO: 152736 - protein, 143 aa, Unknown
  Bacterial polypetide isolated from the Sargasso Sea
SGDVIVIRYEGPKGSPGMPEMLSTTGAIYGQGLGEKVALITDGRFSGGTHGFSIGHIGPEAAVGGPIGLIKNGDVIEIDAEKGILKVNLSKKELSKRKKKWRPKKIEYTSGTLWKYSRSVGPAFKGAVTHPGAAKEKKCYADI

SEQ ID NO: 152737 - protein, 189 aa, Unknown
  Bacterial polypetide isolated from the Sargasso Sea
MAKFNKKKLPSRHTSLGADRAPHRSFYYAMGETEKDVAKPFVGVVSTWNEAAPCNIALMRQAQSVKKGVRASGGTPREFCTITVTDGIAMGHEGMKSSLISREVIADSAELTVRGHCYDALVGIAGCDKSLPGLMMSMVRLNVPSVFIYGGSILPGKYKGKDVTVVDVFEAVGKHSTGQMSAAELRKLE

SEQ ID NO: 152738 - protein, 102 aa, Unknown
  Bacterial polypetide isolated from the Sargasso Sea
MGLGLGDKVAFITDGRFSGGTHGFVVGHISPEAADGGLIALIEDGDSILIDSNTDKLTLKVNEDEIEKRKSNWNNPTKTPKKGVLSKYAKSVQSASLGAITD

SEQ ID NO: 152739 - protein, 251 aa, Unknown
  Bacterial polypetide isolated from the Sargasso Sea
ARFDPPAPDGDVIHPVSAPYKPTGGLRVLGGNLSPEFSAVLKLAGVEGGLENNIFAGTARIFDGEQKLLEMLDSTPEKFQDGDMIVVRYEGPVGGPGMPEMLDSTSRITALCRERGIVVGLMTDGRFSGGSVGLVIGHVGQEAAVGGPIGLLEDGDEVIVDLNDNELNCPQLDDPQVRAARKAQWDAAVEANGGTHPSVGDANTRLLNRMRCSAVSAVQGAGMHPGGSLFVPEPRAAVATDFTPANRHRES

SEQ ID NO: 152740 - protein, 287 aa, Unknown
  Bacterial polypetide isolated from the Sargasso Sea
SEDPRRIKEFPEELVDYLSNLINKDITPRDIVTKDSLRNAIIVAMSVGGSTNVMLHAPELARAAGYANFNRDIMSSEEFNYLSEKVIPVVVNARPFGKYSMVDIDDKGGIQVIIKNLLEAGLLNGKTLTCTGETLVEQVERLSPPDPDGEIIYKIENPFKKTGGLRLLGGNLSPEFSAILKLAGVEGGLENGVFKGNAKVFDGEQSLLNTLDNSPESFANFDMVVVRYEGPVGGPGMPEMLDSTSRITTLCRERNIIIGLMTDGRFSGGSVGLVIGHVGPEAAIGGP

SEQ ID NO: 152741 - protein, 209 aa, Unknown
  Bacterial polypetide isolated from the Sargasso Sea
KLAGVEGGLENNVFVGTARVFDGEQGLLYSLANEPEIFQNGDMIIVRYEGPSGAPGMPEMLDSTSRITTLCRENNIVVGLMTDGRFSGGSVGLVIGHVGPEAALGGEIALIENGDEIIIDLNLNEINCTPLQNEETLNKRRNLWKETVEANGGTHPSIGLADTRLLNRMRRSAVSAVYGAGMHPDRQLWVSEPRDPVMTDFSPTNKYRD

SEQ ID NO: 152742 - protein, 309 aa, Unknown
  Bacterial polypetide isolated from the Sargasso Sea
REVIADSVELTMRGHCYDALVGLAGCDKSLPGLMMVMLRLNVPSVFIYGGSILPGKFKGKDVTIVDVFEGVGKYSTGNMSKKDLLKLESVACPSAGSCGGQFTANTMACVSEAIGLALPGSAGTPAVYETRDKFAALSGHAVMNLLKKNIRPRDIVTKKSLENAAVVVAASGGSTNAALHLPAIANEAGIKFTLEDVTNISKKTPYIADLKPGGKYVAKDLYEIGGVPVLIKALLDGGYLHDDCMTVSGKTIGENHRNVEFPNNQKIIYKTSKPLSPRGGFVGLKGNLAPDGAIVKVAGMNRKKLKVKP

SEQ ID NO: 152743 - protein, 107 aa, Unknown
  Bacterial polypetide isolated from the Sargasso Sea
MRKFDKKKLPSRHTSLGADRAPHRSFYYAMGETEKDVSKPFVGVVSTWNEAAPCNIALMRQAQSVKKGVRASGGTPREFCTITVTDGIAMGHEGMKSSLISREVIAD

SEQ ID NO: 152744 - protein, 184 aa, Unknown
  Bacterial polypetide isolated from the Sargasso Sea
ILRGNLSPEGCVVKLAGHGRRLHRGPAKVFEREEECFSAVRNGEIVDGDVVVIRYEGPVGGPGMREMLGVTAAIQGAGLGDTVALITDGRFSGATHGFMVGHITPEAAVGGPIGLVKNGDYIVLDVENRELNLEVDSEELSRRKAEWTAPAPKYTTGVFSKYAKSVASASEGAITSPGLTGSIW

SEQ ID NO: 152745 - protein, 132 aa, Unknown
  Bacterial polypetide isolated from the Sargasso Sea
MWKFNKKKLPSRHTSLGADRAPHRSFYYAMGETEKDVSKPFIGVVSTWNEAAPCNIALMRQAQSVKKGVRASGGTPREFCTITVTDGIAMGHEGMKSSLISREVIADSAELTVRGHCYDALVGIAGCDKSCQ

SEQ ID NO: 152746 - protein, 125 aa, Unknown
  Bacterial polypetide isolated from the Sargasso Sea
MRKFNKKKLPSRHTSLGADRAPHRSFYYAMGETEKDVSKPFVGVVSTWNEAAPCNIALMRQAQSVKKGVRAFGGTPREFCTITVTDGIAMGHEGMKSSLISREVIADSAELTVRGHCYDALVGIA

SEQ ID NO: 152747 - protein, 175 aa, Unknown
  Bacterial polypetide isolated from the Sargasso Sea
MSKISDDVTKGVEKAAARAMLRAVGLDDEDFNKYQVGIVSAGNEVTPCNLTGPELSEHAKKGVNYKDAVGLIFSTIAVSDGISMGHEGMRASLVSREVIADSVELVMHAERFDGMVTIAGCDKSLPGMLMASARVNRPSIFLYGGSSLPGKHKGKDISIVDVFEGIGSVGKGLMT

SEQ ID NO: 152748 - protein, 208 aa, Unknown
  Bacterial polypetide isolated from the Sargasso Sea
MRKFNKKKLPSRHTSLGPDKAPQRSFYYAMDLTEKDVAKPFVGVVSTWNEAAPCNINLMKQAQSVKKGVHSAGGTPREFCTITVTDGIAMGHEGMKSSLISRDVIADSTELTVRGHCYDALVGLAGCDKSLPGLMMSMVRLNVPSVFIYGGSILPGRFNGKDVTVVDVFEGVGKYTSKKMTAHALRKLELKACPSAGACGGQFTANTM

SEQ ID NO: 152749 - protein, 164 aa, Unknown
  Bacterial polypetide isolated from the Sargasso Sea
KAKCFDCEEDALTAVLKNEIVAGDAVIIRYEGPKGGPGMREMLSTTGAIYGQGLGETVALITDGRFSGGTRGFCIGHVGPEAAVGGMIGLLKDGDEIIIDAIKGEINVNLSQSEIDKRKKEWKPRKTNHNSGTIWKYAQTVGPAYEGAVTQPGAKEETHTYADI

SEQ ID NO: 152750 - protein, 159 aa, Unknown
  Bacterial polypetide isolated from the Sargasso Sea
GPAVVFDNEFAAIDGILDGTVKKGNVIVIRFEGPKGGPGMPEMLKPTSAVMGAGLGQDVALITDGRFSGGSHGFVVGHVSPEAQEGGVIGLVKNGDIITIDAENNVMNVDVSDEELENRRKDWKPKELPKRGVLAKYARQVSSASTGALTDFFQLNKVS

SEQ ID NO: 152751 - protein, 145 aa, Unknown
  Bacterial polypetide isolated from the Sargasso Sea
YKDGDIIIIRYEGPIGGPGMREMLQTTAAIYGQGKGEKVALITDGRFSGATRGFCIGHVGPEASVGGPIALLRNGDVIDIDAKKGTINVRLTKKELSARRKKWKPRKVNFGNGTLWKYAQTVGPAYKGAPTHPGGKNEVRTYADI

SEQ ID NO: 152752 - protein, 163 aa, Unknown
  Bacterial polypetide isolated from the Sargasso Sea
AKCFDCEEDALTAVLKNEIVAGDAVIIRYEGPKGGPGMREMLSTTGAIYGQGLGETVALITDGRFSGGTRGFCIGHVGPEAAVGGMIGLLKDGDEIIIDAIKGEINVNLSQSEIDKRKKEWKPRKTNHNSGTIWKYAQTVGPAYEGAVTQPGAKEETHTYADI

SEQ ID NO: 152753 - protein, 203 aa, Unknown
  Bacterial polypetide isolated from the Sargasso Sea
YDALVGLAGCDKSLPGLMMSMVRLNVPSVFIYGGSILPGRFNGKDVTVVDVIEGVGKYHSGKMSLHALRKLELKACPSAGACGGQFTANTMACVSEAIGLALPYSAGTPAPYTKRDKYAVDSGKAVMNLLAKNIRPRDIVTRKSLENAATIVAATGGSTNAALHLPAIANEIGIKFDLMDVAKIFKKTPYLADLKPGGKYVAK

SEQ ID NO: 152754 - protein, 133 aa, Unknown
  Bacterial polypetide isolated from the Sargasso Sea
GPKGGPGMREMLQTTAAIYGQGMGEKVALITDGRFSGATRGFCIGHVGPEASVGGPIGLLKNGDIIHIDAKKGIINVNLSKKELLKRKKKWKPKKINFGNGTLWKYAQTVGPAYLGASTHPGGKEEVKCYADI

SEQ ID NO: 152755 - protein, 148 aa, Unknown
  Bacterial polypetide isolated from the Sargasso Sea
MAKFNKKKLPSRHTSLGADRAPHRSFYYAMGETEKDVAKPFIGVVSTWNEAAPCNIALMRQAQSVKKGVRSNGGTPREFCTITVTDGIAMGHEGMKSSLISREVIADSAELTVRGHCYDALVGIAGCDKSLPGLMMSMVRLNVPRCIY

SEQ ID NO: 152756 - protein, 184 aa, Unknown
  Bacterial polypetide isolated from the Sargasso Sea
MRKFDKKKLPSRHTSLGADRAPHRSFYYAMGETEKDVSKPFVGVVSTWNEAAPCNIALMRQAQSVKKGVRASGGTPREFCTITVTDGIAMGHEGMKSSLISREVIADSAELTVRGHCYDALVGIAGCDKSLPGLMMSMVRLNVPSVFIYGGSILPGKYKGKDVTVVDVFEAVGKHSSGQMSAKE

SEQ ID NO: 152757 - protein, 106 aa, Unknown
  Bacterial polypetide isolated from the Sargasso Sea
MGKKRSIQSGHRRYSKLVTDTNARAASRGMLYGVGFKKDDFKKSQIGIASTWGNVTPCNMHINDLAEHSARGVKKAKGVPLTFGTITVSDGISMGTEGMKYSLVSR

SEQ ID NO: 152758 - protein, 147 aa, Unknown
  Bacterial polypetide isolated from the Sargasso Sea
MSKIDKKKLPSRHTSLGPDRAPHRSFYYAMGETEQDVAKPFVGVVSTWNEAAPCNTALMRQAQSVKKGVKQSGGTPREFCTITVTDGIAMGHEGMKSSLISREVIADSAELTVRGHCYDALVGIAGCDKSLPGFMMSMLRLNVPSVF

SEQ ID NO: 152759 - protein, 154 aa, Unknown
  Bacterial polypetide isolated from the Sargasso Sea
MRKFNKKKLPSRHTSLGADRAPHRSFYYAMGETEKDVSKPFVGVVSTWNEAAPCNIALMRQAQSVKKGVRAFGGTPREFCTITVTDGIAMGHEGMKSSLISREVIADSAELTVRGHCYDALVGIAGCDKSLPGLMMSMVRLNVPSVFIYGGSIL

SEQ ID NO: 152760 - protein, 301 aa, Unknown
  Bacterial polypetide isolated from the Sargasso Sea
TNQILPRDIVTKESIRNAIIVSMAIGGSTNVMLHAPEISRAAGYSNFSKDIMSPSEFNYLSEKVVPVIVDARPFGKFSMVDIDKKGGIEVIVKDLLNAGLLNGNTMTCTGETLYKQLTRLKPKQPDGKVIYSVKKPFKNTGGLRILGGNLSPDKSAILKLAGVEVGLEKNIFVGKAKVFDGEQKLLETLEKNPSKFKNKDIVVVRFEGPVGGPGMPEMLDSTSRITTLCREKNIVVALITDGRFSGGSVGLVIGHIGPEAALGGPIALIKNGDKIEIDLNKNKIFCHELDNSKILNSREKD

SEQ ID NO: 152761 - protein, 139 aa, Unknown
  Bacterial polypetide isolated from the Sargasso Sea
MSKGNRKYSSKIVDGVEQAPSRAMLRAVGFENEDFNKPQVGVASTWSMVTPCNMHIDKLADSTVKGVNESGSKGVIFNTITVSDGISMGTQGMRFSLVSREVIADSIETVVSGQGFDGLVTIGGCDKNMPACLMAMARL

SEQ ID NO: 152762 - protein, 241 aa, Unknown
  Bacterial polypetide isolated from the Sargasso Sea
ASPPAEDDRRNIMVLETGKACAKLLQLGIKPLDIVTFEAFENSITMLNAVGGSTNGILHLLAMANEAGINLTYDDFERIRKKTPHLADMKPGGNYVMNSLDKIGGIPLVMKKLLDKNLIHGDSLTVTGKTIKENLEELAIVEVPDQQIIKPVEQPIHEVGTAVILKGTLAPEGGVIKTAGVEMTEFTGTAKVFDREEYAFEAVSKGEIDEGDVVVIRYEGPKGGPGMREMLSTTAALVGQG

SEQ ID NO: 152763 - protein, 203 aa, Unknown
  Bacterial polypetide isolated from the Sargasso Sea
PSVFIYGGSILPGRLNGKDITVVDVFEGVGKYSSGKISEHALRKIELKACPTAGACGGQFTANTMACVSEAMGLALPYSAGTPAPFNRRDKYALGSGKAVMNLLAKNIRPRDIVTKKALENAATIVAATGGSTNAALHLPAIANEIGIKFDLMDVAKIFKRTPYLADLKPGGKYVAKDMWKVRWCSECYLKLLWMVDIFTEIA

SEQ ID NO: 152764 - protein, 256 aa, Unknown
  Bacterial polypetide isolated from the Sargasso Sea
EYLMYHLHEIGGLPRFMKMLEIKGLLHLDCLTVTGKMLGENLNEVSFKHYREVEHIIPSKNPQSSHLKILSGNLSPNGCVAKISGKEGDYFRGEALVFESEEQFMGYLSQPETIAYFQDSCSHKKVMVIRNQGPKGGPGMPEMLKPTSAIIGMGIQDKVALITDGRFSGGSHGFIIGHISPEAYLGGPISQVNNGDIITINCQTNSIDWESNFKDPEAVFNPNPIKLLENKKIRSGFLKKYQVSVSGSEEGCVTVN

SEQ ID NO: 152765 - protein, 131 aa, Unknown
  Bacterial polypetide isolated from the Sargasso Sea
VRVQEPGGGQFTANTMACVSEAIGLALPYSAGTPAPYEQRDKYAMLSGKAVMNLLKKNIRPRDIVTRKALENAATIVAATGGSTNAALHLPAIANEVGIKFDLMDVAKIFKKTPYLADLKPGGRYVAKDMW

SEQ ID NO: 152766 - protein, 209 aa, Unknown
  Bacterial polypetide isolated from the Sargasso Sea
TVRGHCYDALVGIAGCDKSLPGLMMSMVRLNVPSVFIYGGSILPGRYKGKDVTVVDVFEAVGKHSSGQMSAVELRKLELVACPSAGACGGQFTANTMACVSEAIGLALPYSAGTPAPYEERDKYAKESGKTVMNLLQKGIKPRDIVTKKALENAATIVAATGGSTNAGLHLPAIANEAGIKFDLMDVAKIFKRTPYLADLKPGGKYVAK

SEQ ID NO: 152767 - protein, 172 aa, Unknown
  Bacterial polypetide isolated from the Sargasso Sea
MKINKNKLPSRHVSIGPERAPHRSYYYAMGMTEDDINKPFVGVVSTWNEAAPCNIALMRQAQSVKKGVAEAEGTPREFCTITVTDGIAMGHQGMKSSLVSREVIADSTELTVRGHCYDAIVGLAGCDKSLPGLMMAMCRLNIPSVFMYGGSILPGKYKGKDVTVVDVFEAVG

SEQ ID NO: 152768 - protein, 149 aa, Unknown
  Bacterial polypetide isolated from the Sargasso Sea
ENKNYNDGDVIVIRYEGPKGGPGMREMLSTTAALYGQGKGDKVALVTDGRFSGGTRGFCIGHVGPEAADGGPIALIKDGDIISIDADSGTIEVDLTKEELSKRKKQWVKPKTDYNSGTLWKYSLQVGPARYGAVTHPGAKEETHCYADI

SEQ ID NO: 152769 - protein, 280 aa, Unknown
  Bacterial polypetide isolated from the Sargasso Sea
EFPDELIKILNNLINNDIKPRDIVTRESIRNAIIVSMAVGGSTNVMLHAPELARAAGYKSFANDIMSPDEFNHLSEKIVPVVINARPFGEYSMVDIDNKGGIQVFVKDLLDAGLLNGNVLTCTGESLEKQIQSLKPAKPDGKVIFSVESPFKPSGGLRVLGGNLSPEFSAVLKLAGVEGGLENNIFKGKAKIFDGEQKLLKSLEETPNQFENLDMIIVRYEGPVGGPGMPEMLDSTSRITTLCREKNIVVGLMTDGRFSGGSVGLVIGHVGPEAAIGGPI

SEQ ID NO: 152770 - protein, 246 aa, Unknown
  Bacterial polypetide isolated from the Sargasso Sea
APGGGVAKITGKEGETFTGVAKVYDSEPAMLDGILKREIKCGQVVIIRYEGPKGGPGLPEMLTPTSAIMGAGLGDCVALLTDGRFSGGSHGFCIGHITPEAQIGGPIALIEDGDPIQIDARNDKRTINVMLTDEQWAERRAKWRPPPLRANQGTLYKYMSVVKTASEGCVTDEQVPDTSPIWAQEDEGGAASGATAPSLETGPMTIEELKTELKRRGVKFYARDRKHVLRAKLDACLSDESCATSR

SEQ ID NO: 152771 - protein, 127 aa, Unknown
  Bacterial polypetide isolated from the Sargasso Sea
MRKFNKKKLPSRHTSLGADRAPHRSFYYAMGETEKDVSKPFVGVVSTWNEAAPCNIALMRQAQSVKKGVRAFGGTPREFCTITVTDGIAMGHEGMKSSLISREVIADSAELTVRGHCYDALVGIAGC

SEQ ID NO: 152772 - protein, 162 aa, Unknown
  Bacterial polypetide isolated from the Sargasso Sea
MKFDKNKLPSRHVSVGPERAPHRSYYYAMGLDENDIAKPFVGVVSTWNEAAPCNIALMRQAQSVKKGVTEAKGTPREFCTITVTDGIAMGHQGMKSSLVSREVIADSTELTVRGHCYDAIVGLAGCDKSLPGLMMAMCRLNVPSVFMYGGSILPGKYKGKDV

SEQ ID NO: 152773 - protein, 184 aa, Unknown
  Bacterial polypetide isolated from the Sargasso Sea
NDKGYIMSKFNKKKLPSRHTSLGADRAPHRSFYYAMGETEKDVSKPFVGVVSTWNEAAPCNIALMRQAQSVKKGVRANGGTPREFCTITVTDGIAMGHEGMKSSLISREVIADSAELTVRGHCYDALVGIAGCDKSLPGLMMSMVRLNVPSVFIYGGSILPGRYKGKDVTVVDVFEASWKTFIR

SEQ ID NO: 152774 - protein, 135 aa, Unknown
  Bacterial polypetide isolated from the Sargasso Sea
MSKGNRKYSSKIVDGVEQAPSRAMLRAVGFENEDFNKPQVGVASTWSMVTPCNMHIDKLADSTVKGVNESGSKGVIFNTITVSDGISMGTQGMRFSLVSREVIADSIETVVSGQGFDGLVTIGRCDKNMPACLMA

SEQ ID NO: 152775 - protein, 157 aa, Unknown
  Bacterial polypetide isolated from the Sargasso Sea
MAKFNKKKLPSRHTSLGADRAPHRSFYYAMGETEKDVAKPFVGVVSTWNEAAPCNIALMRQAQSVKKGVRANGGTPREFCTITVTDGIAMGHEGMKSSLISREVIADSAELTVRGHCYDALVGIAGCDKSLPGLMMSMVRLNVPSVFIYGWVKFFQG

SEQ ID NO: 152776 - protein, 105 aa, Unknown
  Bacterial polypetide isolated from the Sargasso Sea
MLRGVGFTTEDFSKPFVGIASTGAKVTPCNMHINKLSEVVESSVNSSGGKGILFNTITVSDGISMGTQGMKYSLISREVIADSIETVVGCLAYDGLIAIGGCDKN

SEQ ID NO: 152777 - protein, 179 aa, Unknown
  Bacterial polypetide isolated from the Sargasso Sea
MRKFNKKKLPSRHTSLGPDRAPHRSFYYAMGETEKDVSKPFIGVVSTWNEAAPCNIALMRQAQSVKKGVRAFGGTPREFCTITVTDGIAMGHEGMKSSLISREVIADSAELTVRGHCYDALVGIAGCDKSLPGLMMSMVRLNVPSVFIYGGSILPGKYKGKDVTVVDVFEAVGKHSSGQ

SEQ ID NO: 152778 - protein, 242 aa, Unknown
  Bacterial polypetide isolated from the Sargasso Sea
MSKIDKKKLPSRHTSLGPDRAPHRSFYYAMGETEQDVEKPFVGVVSTWNEAAPCNTALMRQAQSVKKGVKKAGGTPREFCTITVTDGIAMGHEGMKSSLISREIIADSAELTVRGHCYDALVGIAGCDKSLPGLMMSMLRLNVPSVFIYGGSILPGKFKGKDVTVVDVFEAVGKHSSGSMTSEELRELELVACPSAGACGGQFTANTMACVSEAIGLALPYSAGTPAPYEERDKYALKAERE

SEQ ID NO: 152779 - protein, 131 aa, Unknown
  Bacterial polypetide isolated from the Sargasso Sea
MSKIDKKKLPSRHTSLGPDRAPHRSFYYAMGETEQDVAKPFVGVVSTWNEAAPCNTALMRQAQSVKKGVKQFGGTPREFCTITVTDGIAMGHEGMKSSLISREVIADSAELTVRGHCYDALVGIAGCDKSL

SEQ ID NO: 152780 - protein, 206 aa, Unknown
  Bacterial polypetide isolated from the Sargasso Sea
QAQSVKKGVKQYGGTPREFCTITVTDGIAMGHEGMKSSLISREVIADSAELTVRGHCYDALVGIAGCDKSLPGLMMSMLRLNVPSVFIYGGSILPGKFKGKDVTVVDVFEAVGKHSSGKMSSEELRELELVACPSAGACGGQFTANTMACVSEAIGLALPYSAGTPAPYEERDKYAFESGQAVMNLLEKKIKPREIVTKKSLENAA

SEQ ID NO: 152781 - protein, 207 aa, Unknown
  Bacterial polypetide isolated from the Sargasso Sea
QKVIYPANKPITITGGVVGLKGNFAPDGAIVKVAGMDNLKFTGPARCFDCEEDAFIAVENKNYNDGDVIVIRYEGPKGGPGMREMLSTTAALYGQGKGDKVALVTDGRFSGGTRGFCIGHVGPEAADGGPIALIKDGDIISIDADAGTIEVDLTKEELSKRKKQWVKPKTDYNSGTLWKYSRQVGPARYGAVTHPGAKEETHCYADI

SEQ ID NO: 152782 - protein, 243 aa, Unknown
  Bacterial polypetide isolated from the Sargasso Sea
VSTWNEAAPCNINLMKQAQFVKQGVNSSGGTPREFCTITVTDGIAMGHEGMKSSLISRDVIADSTELTVRGHCYDALVGLAGCDKSLPGLMMSMVRLNIPSVFIYGGSILPGRFEGKDVTVVDVFEGVGKYTSKKMTAHALRKLELKACPSAGACGGQFTANTMACVSEAIGLALPYSAGTPAPYKERHKYAINSGKAVMKLLEKNIRPRDIVTRKALENAATVVAATGGSNNAGLHLPAIAN

SEQ ID NO: 152783 - protein, 316 aa, Unknown
  Bacterial polypetide isolated from the Sargasso Sea
IIWEARKLHAKGEINYDEFMDMAAASAPSVGHCNTMGTASSMNSIAEALGMSLTGGAIIPAPYKEREKISFKTGKRIVDMVHEDLTPSKIMTKEAFENAIYVASAIGASSNCPPHLTAIAKHMGIDFGIDNWEKLGHNIPLLVNCQPAGEHLMEGFFKAGGVPAIMQELLKNNKLHKKVMTVTGKTLEENLKVKINVDENVIKSFNNPLVKNAGFIVMKSNFFSSAVMKTSVISSEFRKRYLSDPKNPNVFQANAVVFEGPEDYHLRINDENLNIDENSILMIRGCGPVGYPGSGEVVNMQPPDKLLKKGINTLPT

SEQ ID NO: 152784 - protein, 219 aa, Unknown
  Bacterial polypetide isolated from the Sargasso Sea
MKKFNKRKLPSRHTTLGADKAPQRSFYYAMKLTEKDVAKPFVGVVSTWNEAAPCNIALMRQAQSVKKGVYQRGGTPREFCTITVTDGIAMGHEGMKSSLISRDVIADSTELTVRGHCYDALVGLAGCDKSLPGLMMAMVRLNVPSVFIYGGSILPGRFNGKDVTVVDVFEGVGKYSSGKMTAHALRKLELKACPSAGACGGQFTANTMACVSEAIGLAL

SEQ ID NO: 152785 - protein, 264 aa, Unknown
  Bacterial polypetide isolated from the Sargasso Sea
YKGKDVTVVDVFEAVGEFSAGKISEEELHELECVACPSAGSCGGQFTANTMACVSEAIGLALPYSAGPPAPDEGRDKYALESGKAVMDLLENNIRPRDIVTKESFINAAVVVAATGGSTNGALHLPAMANEIGIDFDLFDVADIFKSTPYIADLKPGGNYVAKDMHEAGGVPMLLRTLLDEGFINGDCLTVTGNTLEENISEVVFDNTQKVIYPASSPITETGGVVGLKGNFAPDGAIVKVAGMENLTFKGPARCFDCEEDAFT

SEQ ID NO: 152786 - protein, 218 aa, Unknown
  Bacterial polypetide isolated from the Sargasso Sea
MKKFNKKKLPSRHTTLGPEKAFQRSFYYGMNLTEKDVSKPFVGVVSTWNEAAPCNIALMRQAQSVKKGVKLAGGTPREFCTITVTDGIAMGHEGMKSSLVSRDVIADSTELTVRGHCYDALVGLAGCDKSLPGLMMAMVRLNVPSVFIYGGSILPGRLNGKDITVQDVIEGVGEYSSGRISEHALRKLELKACPSAGACGGQFTANTMACVSEAIGWL

SEQ ID NO: 152787 - protein, 57 aa, Unknown
  Bacterial polypetide isolated from the Sargasso Sea
TVSDGISMGTSGMRYSLVSREVIADSIETVVGCEGFDGFLTIGGCDKNMPGCVIVMA

SEQ ID NO: 152788 - protein, 286 aa, Unknown
  Bacterial polypetide isolated from the Sargasso Sea
PHRSYYYAMGLDEDDIDKPFVGVATCWNESAPCNISLMRQSKSVKDGVSKEGGTPREFTTITVTDGIAMGHQGMKSSLVSREIISDSIEVSMRGHCYDALVGVAGCDKSLPGMMMAMLRLNVPSVFIYGGSILPGSYKGKDVTVVDVFEAVGEFSAGKISEEELHELECVACPSAGSCGGQFTANTMACVSEAIGLALPYSAGPPAPDEGRDKYALESGKAVMDLLENNIRPRDIVTKESFINAAVVVAATGGSTNGALHLPAMANEIGIDFDLFDVADIFKSTPY

SEQ ID NO: 152789 - protein, 153 aa, Unknown
  Bacterial polypetide isolated from the Sargasso Sea
MRKFNKKKLPSRHTSLGADRAPHRSFYYAMGETEKDVSKPFIGVVSTWNEAAPCNIALMRQAQSVKKGVRASGGTPREFCTITVTDGIAMGHEGMKSSLISREVIADSAELTVRGHCYDALVGIAGCDKSLPGLMMSMVRLNVPSVFIYGGSI

SEQ ID NO: 152790 - protein, 88 aa, Unknown
  Bacterial polypetide isolated from the Sargasso Sea
MKSLLDKGLLHGNCMTVTGKTISDNLELVQDYPSDQKIIKDFDNPIKKSSHLEILYGNLAPEGAVAKISGKEGTLFTGNAKVLIQKSL

SEQ ID NO: 152791 - protein, 204 aa, Unknown
  Bacterial polypetide isolated from the Sargasso Sea
ISRDVIADSTELTVRGHCYDALVGLAGCDKSLPGLMMSMVRLNIPSVFIYGGSILPGRFEGKDVTVVDVFEGVGKYTSKKMTAHALRKLELKACPSAGACGGQFTANTMACVSEAIGLALPYSAGTPAPYKERHKYAINSGKAVMKLLEKNIRPRDIVTRKALENAATVVAATGGSTNAGLHLPAIANEIGIKFDLMDVAKIFK

SEQ ID NO: 152792 - protein, 255 aa, Unknown
  Bacterial polypetide isolated from the Sargasso Sea
MSHEEFNHLSQNVIPVVVNARPFGKYSMVDIDSMGGVQVIVKDMIDSGLLNGDTLTCTSETLSEQVARLKPKSPDGDVIYSIKEPFKKTGGLRLLGGNLSPENSSILKLAGVEGGLEDNVFHGKAKTFDGEQKLLDTLENDPDYFQDRDIVVVRYEGPVGGPGMPEMLDSTSRITTLCRDKGIVIALMTDGRFSGGSVGLVIGHVGPEAALGGPIALIEDGDQIIVNLNNNSLSCVELEDHSIYKKRKDEWDKIV

SEQ ID NO: 152793 - protein, 132 aa, Unknown
  Bacterial polypetide isolated from the Sargasso Sea
LKACPSSGACGGQFTANTMACVSEAIGLALPYSAGTPAPYEQRDKYAMLSGKAVMNLLKKNIRPRDIVTRKALENAATIVAATGGSTNAALHLPAIANEVGIKFDLMDVAKIFKKTPYLADLKPRWKICAKD

SEQ ID NO: 152794 - protein, 49 aa, Unknown
  Bacterial polypetide isolated from the Sargasso Sea
MPRIGMLASLLYTTRSFVMPDYRSKTSTFGRNMAGARALWRATGMNDED

SEQ ID NO: 152795 - protein, 235 aa, Unknown
  Bacterial polypetide isolated from the Sargasso Sea
VKKPYKETGGLRLLGGNLSPEFSSILKLAGVEGGLENNVFIGKARIFDGEQKLLWTLENEPESFNNNDMVVVRYEGPVGGPGMPEMLDSTSRITTLCREREIIVGLMTDGRFSGGSVGLVIGHVGPEAAIGGPIALIEDGDEIIVDLNKNEINCSQLNDNNTFKLRKSNWEQIFNSNCGTHPSVGDANTRLLNRMRNSAVSATYGAGMHPNRELWVPNPRDVEVSGFIPKNIHKL

SEQ ID NO: 152796 - protein, 206 aa, Unknown
  Bacterial polypetide isolated from the Sargasso Sea
MAKFNKKKLPSRHTSLGPDRAPHRSFYYAMGETEKDVLKPFVGVVSTWNEAAPCNIALMRQAQSVKKGVRANGGTPREFCTITVTDGIAMGHEGMKSSLISREVIADSSELTVRGHCYDALVGIAGCDKSLPGLMMSMVRLNVPSVFIYGGSILPGTYKGKDVTVVDVFEAVGKHSSGQMSAAELRKLELVACPSAGACGGQFTAN

SEQ ID NO: 152797 - protein, 222 aa, Unknown
  Bacterial polypetide isolated from the Sargasso Sea
NNLIDPDCITVTGKTVGENLENIQIPKNQDVISFPDNPISNEGGIAVLKGSLSPRGSVVKTAGIDINTFTGPANVFDSEQDALDALFNNKIKKGEVVVIRNEGPKGGPGMREMLQITAAIKGAGLGKDVLLITDGRFSGGTTGLCIGHVAPESYDKGPISICQNGDIITLDIENRSLNLEIEKKEFEDRLSKLKLPPPRYNSGVLYKYSKLVSGSDTGAVTS

SEQ ID NO: 152798 - protein, 214 aa, Unknown
  Bacterial polypetide isolated from the Sargasso Sea
MRKFNKKKLPSRHTSLGADRAPHRSFYYAMGETEKDVSKPFIGVVSTWNEAAPCNIALMRQAQSVKKGVRASGGTPREFCTITVTDGIAMGHEGMKSSLISREVIADSAELTVRGHCYDALVGIAGCDKSLPGLMMSMVRLNVPSVFIYGGSILPGKYKGKDVTVVDVFEAVGKHSSGQMSAKELRKLELVACPTAGACGGQFTANTMACVSEA

SEQ ID NO: 152799 - protein, 280 aa, Unknown
  Bacterial polypetide isolated from the Sargasso Sea
MIDKNITPRDIVTRESLRNAIIVAMAVGGSTNVLLHAPELARAAGYKDFANEIMSPKEFNNLSRNVIPVVIDARPFGQYSMVDIDAKGGMQVIVKELMDAGLLNGETLTCTGETLSEQVERLNPPTPDEDVIYTVQKPYKDTGGLRVLGGNLSPEFSAVLKLAGVEGGLENNIFKGTAKVFDGEQELLKALDSQADMFENFDMIVVRYEGPFGAPGMPEMLDSTSRITALCREKNIVVGLMTDGRFSGGSVGLVIGHVGPEAAAGGAIALIETGDEIVVD

SEQ ID NO: 152800 - protein, 289 aa, Unknown
  Bacterial polypetide isolated from the Sargasso Sea
TNVMLHAPELARAAGYKSFSEDIMSPDEFNYLSEKVVPVLVDARPFGKYSMVDIDNEGGVQVFIKDLLNSGLLNGNTLTCTGETLAEQVDRLAPKEPDGRVIYPVKKPYKETGGLRLLGGNLSPEFSSILKLAGVEGGLENNVFIGKARIFDGEQKLLWTLENEPESFNNNDMVVVRYEGPVGGPGMPEMLDSTSRITTLCREREIIVGLMTDGRFSGGSVGLVIGHVGPEAAIGGPIALIEDGDEIIVDLNKNEINCSQLNDINTFQLRKSNWEKIINSNAGTHPSVG

SEQ ID NO: 152801 - protein, 244 aa, Unknown
  Bacterial polypetide isolated from the Sargasso Sea
MRKFNKNKLPSRHTSLGPDRAPHRSFYYAMGETEKDVSKPFVGVVSTWNEAAPCNIALMRQAQSVKKGVRASGGTPREFCTITVTDGIAMGHEGMKSSLISREVIADSAELTVRGHCYDALVGIAGCDKSLPGLMMSMVRLNVPSVFIYGGSILPGKYKGKDVTVVDVFEAVGKHSSGQMSAKELRKLELVACPSAGACGGQFTANTMACVSEAIGLALPYSAGTPAPYEERDKYAKASGRMVM

SEQ ID NO: 152802 - protein, 288 aa, Unknown
  Bacterial polypetide isolated from the Sargasso Sea
SINAALHLPAIANEAGLKFTLRDVVEIYNSTPYIGDMQPGGKYVAKDLYDVGGVPIVIKSLLDGGYINGDCLTVTGKTIAENHKEVIFPTNQDVVYKCENPISNNSSVVGLWGNLAPDGCISKIAGLTNLTFKGKAKCFDSEEEALTAVLKNEIKAGDALIIRYEGPIGGPGMREMLSTTGAIYGQGLGETVALITDGRFSGGTRGFCIGHVGPEAAVGGMIGLLKDGDEIIIDAIKGEINVSLTEDEISKRKKEWKPRKTNHNSGTIWKYAQTVGPANEGAVTQPGA

SEQ ID NO: 152803 - protein, 161 aa, Unknown
  Bacterial polypetide isolated from the Sargasso Sea
CFDCEEDALTAVLKNEIKAGDAVIIRYEGPKGGPGMREMLSTTGAIYGQGLGETVALITDGRFSGGTRGFCIGHVGPEAAVGGMIGLLKDGDEIVIDAIKGEINVILSQDEIDQRKKDWKPRKTNHNSGSIWKYAQTVGPAYEGAVTQPGAKDETHTYADI

SEQ ID NO: 152804 - protein, 240 aa, Unknown
  Bacterial polypetide isolated from the Sargasso Sea
MKNFNKKKLPSRHTSLGPDKAPQRSFYYAMNLKEKDVAKPFVGVVSTWNEAAPCNIALMRQAQSVKKGVKSSGGTPREFCTITVTDGIAMGHEGMKSSLVSRDVIADSTELTVRGHCYDALVGVAGCDKSLPGLMMAMLRLNVPSVFIYGGSILPGRFNGKDVTVLDVFEGVGKYSSGKMTEHALRKLELKACPSAGACGGQFTANTMACVSEAIGLALPYSAGTPAPYGQRDKYALQSG

SEQ ID NO: 152805 - protein, 133 aa, Unknown
  Bacterial polypetide isolated from the Sargasso Sea
MSKINKKRLPSRHTSLGPDRAPHRSFYYAMGETEQDVAKPFVGVVSTWNEAAPCNTALMRQAQSVKKGVKENGGTPREFCTITVTDGIAMGHEGMKSSLISREIIADSAELTVRGHCYDALVGIAGCDKSLPG

SEQ ID NO: 152806 - protein, 249 aa, Unknown
  Bacterial polypetide isolated from the Sargasso Sea
MKFNKSKLPSRHVSVGVKSAGHRSMYYAMGLKKEDIEKPFIGVATTWNEAAPCNITLSRQAQSVKKGVKLAGGTPREFTTITVTDGIAMGHAGMKSSLISREVIADSVELTMRGHCYDALVGLAGCDKSLPGLMMVMVRLNVPSVFIYGGSILPGNFKGKDVTIADVFEGIGKHSTGEMSKKDLFKLESIACPSGGSCGGQFTANTMACVSEAIGLALPGSAGTPAVYEERDRFSVKSGKAVMNLLQKK

SEQ ID NO: 152807 - protein, 198 aa, Unknown
  Bacterial polypetide isolated from the Sargasso Sea
MSKIDKKKLPSRHTSLGPDRAPHRSFYYAMGETEQDVAKPFVGVVSTWNEAAPCNTALMRQAQSVKKGVKESGGTPREFCTITVTDGIAMGHEGMKSSLISREVIADSAELTVRGHCYDALVGIAGCDKSLPGLMMSMLRLNVPSVFIYGGSILPGKFKGKDVTVVDVFEAVGKHSSGKMSSEELRELELVACPSAGA

SEQ ID NO: 152808 - protein, 252 aa, Unknown
  Bacterial polypetide isolated from the Sargasso Sea
MKKFNKKKLPSRHTTLGPEKAFQRSFYYGMNLTEKDVSKPFVGVVSTWNEAAPCNIALMRQAQSVKKGVKLAGGTPREFCTITVTDGIAMGHEGMKSSLVSRDVIADSTELTVRGHCYDALVGLAGCDKSLPGLMMAMVRLNVPSVFIYGGSILPGRLNGKDITVQDVIEGVGEYSSGRITQHALRKLELKACPSAGACGGQFTANTMACVSEAIGLALPYSAGTPAPYQKRDKYAFDSGKMVMNLLRKKIR

SEQ ID NO: 152809 - protein, 212 aa, Unknown
  Bacterial polypetide isolated from the Sargasso Sea
MKKFNKRKLPSRHTTLGPDKAFQRSFYYAMDLTEKDVAKPFVGVVSTWNEAAPCNIALMRQAQSVKKGVYQSGGTPREFCTITVTDGIAMGHEGMKSSLISRDVIADSTELTVRGHCYDALVGLAGCDKSLPGLMMSMVRLNVPSVFIYGGSILPGRFNGKDVTVVDVIEGVGKYHSGKMSLHALRKLELKACPSAGACGGTFTANTMGMCV

SEQ ID NO: 152810 - protein, 240 aa, Unknown
  Bacterial polypetide isolated from the Sargasso Sea
MNKFNKKKLPSRHTSLGADKAPQRSFYYAMGETEKDVAKPFVGVVSTWNEAAPCNIALMRQAQSVKKGVKFSGGTPREFCTITVTDGIAMGHEGMKSSLVSRDVIADSTELTVRGHCYDALVGVAGCDKSLPGLMMAMLRLNVPSVFIYGGSILPGRYNGKDVTVLDVFEGVGKYSSGKMSEHALRKLELKACPSAGACGGQFTANTMACVSEAIGLALPYSAGTPAPYGQRDKYALQSG

SEQ ID NO: 152811 - protein, 236 aa, Unknown
  Bacterial polypetide isolated from the Sargasso Sea
MKFNKNKLPSRHVSVGPERAPHRSYYYAMGMNENDINKPFVGVVSTWNEAAPCNIALMRQAQSVKKGVTEAEGTPREFCTITVTDGIAMGHQGMKSSLVSREVIADSTELTVRGHCYDAIVGLAGCDKSLPGLMMAMCRLNVPSVFMYGGSILPGKYKGKDVTVVDVFEAVGKFSSGNATEEELHELECVACPSAGACGGQFTANTMACVSEAIGLALPYSSGAPAPYEERDKYAY

SEQ ID NO: 152812 - protein, 165 aa, Unknown
  Bacterial polypetide isolated from the Sargasso Sea
MVDKSKLPSRHVSVGPKSAPHRAFYYAMGISEEQINQPFVGVVTTWNESAPCNISLSRQAQSAKKGVWDAKGTPREFTTITVTDGIAMGHEGMKSSLTSREIIADSTELSVRGHCYDALVGLAGCDKSLPGLMMAMLRLNVPSVFMYGGSILPGVYKDRDVTIVD

SEQ ID NO: 152813 - protein, 99 aa, Unknown
  Bacterial polypetide isolated from the Sargasso Sea
MLRGVGFESEDFSKPFVGIASTGAKVTPCNMHINKLSEVVEDSVNLSGGKGVLFNTITVSDGISMGTQGMKYSLVSREVIADSIETVVGCLGYDGLIAI

SEQ ID NO: 152814 - protein, 314 aa, Unknown
  Bacterial polypetide isolated from the Sargasso Sea
MNKFDKKKLPSRHTSVGADKAPQRSFYYAMGETEKDVAKPFVGVVSTWNEAAPCNIALMRQAQSVKKGVKLSGGTPREFCTITVTDGIAMGHEGMKSSLVSRDVIADSTELTVRGHCYDALVGVAGCDKSLPGLMMAMLRLNVPSVFIYGGSILPGRYNGKDVTVLDVFEGVGKYSSGKMSEHALRKLELKACPSAGACGGQFTANTMACVSEAIGLALPYSAGTPAPYGQRDKYALQSGKAVMNLLKKNIRPRDIVSRKSLENAATIVAATGGSTNAALHLPALANEIGIKFDLMDVAKIFRKTPYLADLKPG

SEQ ID NO: 152815 - protein, 230 aa, Unknown
  Bacterial polypetide isolated from the Sargasso Sea
MAKFNKKKLPSRHTSLGADRAPHRSFYYAMGETEKDVAKPFVGVVSTWNEAAPCNIALMRQAQSVKKGVRANGGTPREFCTITVTDGIAMGHEGMKSSLISREVIADSAELTVRGHCYDALVGIAGCDKSLPGLMMSMVRLNVPSVFIYGGSILPGRYKGKDVTVVDVFEAVGKHSSGQMSAAELRKLELVACPSAGACGGQFTANTMACVSEAIGLALPYSAGTPAPYE

SEQ ID NO: 152816 - protein, 188 aa, Unknown
  Bacterial polypetide isolated from the Sargasso Sea
MAKFNKKKLPSRHTSLGADRAPHRSFYYAMGETEKDVAKPFVGVVSTWNEAAPCNIALMRQAQSVKKGVRANGGTPREFCTITVTDGIAMGHEGMKSSLISREVIADSAELTVRGHCYDALVGIAGCDKSLPGLMMSMVRLNVPSVFIYGGSILPGKYKGKDVTVVDVFEAVGKHSTGQMSAAELRKL

SEQ ID NO: 152817 - protein, 172 aa, Unknown
  Bacterial polypetide isolated from the Sargasso Sea
MENLIFKGPARCFDCEEDAFTAVENKKYNDGDVIVIRYEGPKGGPGMREMLSTTAALYGQGKGDKVALVTDGRFSGGTRGFCIGHVGPEAADGGPIALIKDGDIVSIDANEGTIDVDLSEDELESRKKQWIKPKTDYNSGTLWKYSNQVGPARYGAVTHPGAKEETHCYADI

SEQ ID NO: 152818 - protein, 263 aa, Unknown
  Bacterial polypetide isolated from the Sargasso Sea
MKKFNKKKLPSRHTTIGADKAPQRSFYYAMDLTEKDVAKPFVGVVSTWNEAAPCNINLMKQAQSVKKGVKASGGTPREFCTITVTDGIAMGHEGMKSSLISRDVIADSTELTVRGHCYDALVGLAGCDKSLPGLMMSMVRLNIPSVFIYGGSILPGRFNGKDVTVVDVFEGVGKYTSKKMTAHALRKLELKACPSAGACGGQFTANTMACVSEAIGLALPFSAGTPAPYLERNKYAIDSGKAVMNLLAKNIRPRDIVTRKALE

SEQ ID NO: 152819 - protein, 213 aa, Unknown
  Bacterial polypetide isolated from the Sargasso Sea
MRKFNKKKLPSRHTSLGPDKAPQRSFYYAMDLTEKDVAKPFVGVVSTWNEAAPCNINLMKQAQSVKKGVHAAGGTPREFCTITVTDGIAMGHEGMKSSLISRDVIADSTELTVRGHCYDALVGLAGCDKSLPGLMMSMVRLNVPSVFIYGGSILPGRFNGKDVTVVDVFEGVGKYTSKKMTAHALRKLELKACPSAGACGGQFTANTMACVQK

SEQ ID NO: 152820 - protein, 153 aa, Unknown
  Bacterial polypetide isolated from the Sargasso Sea
RGSARPFNSEEEAMEAILGGHIKEGDVVIIRYEGPQGGPGMREMLSPTSAIMGRGLGEKVAFLTDGRFSGGTHGFVVGHITPEAHLGGPLALVEKGDQIEIDADKNEINILVDEKELSERKKNWKPLSKDEEKGVLSKYADSVASASKGAVTT

SEQ ID NO: 152821 - protein, 121 aa, Unknown
  Bacterial polypetide isolated from the Sargasso Sea
MAKFNKKKLPSRHTSLGADRAPHRSFYYAMGETEKDVAKPFVGVVSTWNEAAPCNIALMRQAQSVKKGVRANGGTPREFCTITVTDGIAMGHEGMKSSLISREVIADSAELTVRGHCYDAL

SEQ ID NO: 152822 - protein, 151 aa, Unknown
  Bacterial polypetide isolated from the Sargasso Sea
NAKVFYFEEDGMAAILEKKVKEGDVVVIRFEGPKGGPGMREMLKPTSAIMGQGLGDKVAFITDGRFSGGTHGFVVGHISPEAEMGGPIALIEDGDEITIDANADILSLNISDDEMKRRLENWKNPNSSPKSGVLAKYKKTVQSASKGAITD

SEQ ID NO: 152823 - protein, 127 aa, Unknown
  Bacterial polypetide isolated from the Sargasso Sea
VIVIRYEGPKRWAWNARNVKPTSAIMGLGLGEKVAFITDGRFSGGTHGFVVGHISPEAADGGLIAMIEDGDKILIDAENDQLILKVDDEEINRRESKWKNPIKRPKKGVLAKYAKSVKSASLGAITD

SEQ ID NO: 152824 - protein, 146 aa, Unknown
  Bacterial polypetide isolated from the Sargasso Sea
MTKFNKKKLPSRHTSLGADRAPHRSFYYAMGETEKDVAKPFIGVVSTWNEAAPCNIALMRQAQSVKKGVRSNGGTPREFCTITVTDGIAMGHEGMKSSLISREVIADSAELTVRGHCYDALVGIAGCDKSLPGLMMSMVRLNVPSV

SEQ ID NO: 152825 - protein, 134 aa, Unknown
  Bacterial polypetide isolated from the Sargasso Sea
MLRGVGFETADFSKPLVGIASTWSKVTPCNMHINELADLVESSIDASGCKGVLFNTITVSDGISMGTQGMKFSLVSREVIADSIETVVGCLGYDGVICIGGCDKNMPGALMGLGRLDRPLIFIYGGSISASSIN

SEQ ID NO: 152826 - protein, 490 aa, Unknown
  Bacterial polypetide isolated from the Sargasso Sea
SELTPCNAHFRELAEYVKKGVYEAGGFPLEFPVMSLGESNLRPTAMLFRNLASMDVEESIRGNPIDGVILLCGCDKTTPALLMGAASCDLPALAVSGGPMLNGRYRGETIGSGTGVWQMSEQVRAGTLDMAQFIEAESCMNRSRGHCMTMGTASTMASMVEALGMGLPHNAAIPAVDARRQVLAHMAGRRIVEMVREDLTMSKILTREAFENAIRVNAAIGGSTNAVVHLLAIAGRIGVDLKLEDWERGSDVPCLVNLQPSGEFLMEDFYYAGGLPAVLRELGEAQLLHRDALTVNGRSIWENVSHAECFDRKVIFPVAAPFKPKAGIAVLKGNLAVDGAVIKPSAATPALLQHRGRAVVFENVEDLHARINDENLDIDASCVMVLKGAGPKGYPGFAEVGNMPLPTKVLKQGITDMVRISDGRMSGTAYGAVVLHVAPEAAAGGTLALVRDGDMIELDVAGRRLHLDVDDAELARRRAEWQAPTPPARG

SEQ ID NO: 152827 - protein, 443 aa, Unknown
  Bacterial polypetide isolated from the Sargasso Sea
MRLVQPEYTVATSDGIRNGTKEMRYSLIGREVTNDTLCEHLSASGLEGTIAVVACDKPPVGTLSAILEHNRPAIIMSDGPIRPGIDSVTNEPLDIISSYQIAGSEDEELKRRIACEACPGYGSCGGMFTYNTMQTFIGVVGMQPLHMVSPPSDDKRRLDVFPDQLITYLDNMVKKDIKPRDIVTRDSIRNALIVAMSIGGSTNVMLHAPELARAAGYKSFSEDIMSPDEFNYLSEKVVPVLVDARPFGKYSMVDIDNQGGVQVFIRDLLNTGLLNGNTLTCTGETLAEQVDRLAPKEPDGRVIYPVKKPYKETGGLRLLGGNLSPEFSSILKLAGVEGGLENNVFIGKARIFDGEQKLLWTLENEPDSFNNNDMVVVRYEGPVGGPGMPEMLDSTSRITTLCRERNIIVGLMTDGRFSGGSVGLVIGHVGPEAAIGGPIALIE

SEQ ID NO: 152828 - protein, 163 aa, Unknown
  Bacterial polypetide isolated from the Sargasso Sea
MSDNKKRKYSSIIVDGVEQAPSRAMLRAVGFEEEDFSKPQVGIASTWSMVTPCNMHIDKLAQESARGADESGSKSIIFNTITISDGISMGTKGMRYSLVSREVIADSIETVVAGQLFDGLVAIGGCDKNMPGCMMAIARLNRPAIFVYGGSIKPGENRTDVVS

SEQ ID NO: 152829 - protein, 160 aa, Unknown
  Bacterial polypetide isolated from the Sargasso Sea
MINEESAYKAVINRKYKDGDIIIIRYEGPIGGPGMREMLQTTAAIYGQGKGEKVALITDGRFSGATRGFCIGHVGPEASLGGPIALLRNGDIIDIDAKKGTINVRLTKKELSARRKKWKPRKVNFGNGTLWKYAQTVGPAYKGAPTHPGGKNEVRTYADI

SEQ ID NO: 152830 - protein, 112 aa, Unknown
  Bacterial polypetide isolated from the Sargasso Sea
MKISSRNVVEGTARAPHRAMYKAMGLTNEDLSKSFVGVCHTGNEATPCNIHLPNLAQQAKQGVTEGGATPREFSTIAVSDGIAMGHEGMKSSLISREVIADSIELMVRAHQY

SEQ ID NO: 152831 - protein, 113 aa, Unknown
  Bacterial polypetide isolated from the Sargasso Sea
MREMLKPTSAIMGLGLGDKIGFITDGRFSGGTHGFVVGHVSPEAAEGGLIALVEDGDTILIDAESDQLVLKVDDDEIKRRQSIWKNPNSKPKKGVLAKYAGSVKSASLGAITD

SEQ ID NO: 152832 - protein, 251 aa, Unknown
  Bacterial polypetide isolated from the Sargasso Sea
MAKFNKKKLPSRHTSLGPDKAPQRSFYYAMNLTEKDVAKPFVGVVSTWNEAAPCNIALMRQAQSVKKGVSLSGGTPREFCTITVTDGIAMGHEGMKSSLISRDVIADSTELTVRGHCYDALVGVAGCDKSLPGLMMAMVRLNVPSVFIYGGSILPGRFNGKDVTVVDVFEGVGKYSSGKMTKHALRKLELIACPSAGACGGQFTANTMACVSEAIGLALPYSAGTPAPYEQRDKYALQSGKAVMNLLKRNI

SEQ ID NO: 152833 - protein, 201 aa, Unknown
  Bacterial polypetide isolated from the Sargasso Sea
ITAYPNDQTIIRSLDSPIKDTSHLRVLYGNLAPEGAVAKITGKEGITFTGPAKVFDSEEEGMEAIQGQKIQKGDVIVIRFEGPKGGPGMREMLKPTSAIMGQGLGDEVAFITDGRFSGGTHGFVVGHITPEAYVGGPLAILENGDEITIDAQSNTLSVALSEKEITHRMNNLKITKKIPTKGVLSKYSKSVQSASLGAITD

SEQ ID NO: 152834 - protein, 220 aa, Unknown
  Bacterial polypetide isolated from the Sargasso Sea
MSKDKRKYSSKIVDGVEQAPSRAMLRAVGFGDEDFKKPQVGIASTWSMVTPCNMHIDKLANSVVKGVNESGSKAVIFNTITVSDGISMGTQGMRFSLVSREVIADSIETVVSGQGFDGLVTLGGCDKNMPACLMAMARLNRPSVFVYGGSIKPGKGRTDVISVFEAVGKHSEGQISDIELLDIESSAIPGPGSCGGMYTANTMASAIEAMGMSLPNQFCT

SEQ ID NO: 152835 - protein, 238 aa, Unknown
  Bacterial polypetide isolated from the Sargasso Sea
MEDKGSNRKSNLPSRYVSVGPKSAPHRSYYYAMGLKEHEIYQPFVGVVSTWNESAPCNITLQDQAQHVKTGVKDAGGTPREFATITVTDGIAMGHEAMKSSLISREIIADSIELSVRGHCYDAIVGLAGCDKSLPGLMMAMVRLNVPSVFIYGGSILPGKYKGKDVTVIDVFEAVGKHAAGTISDQDLKDIEQVACPSAGSCGGQFTANTMACISEAIGLALTNSAMPPAVNTDERKS

SEQ ID NO: 152836 - protein, 572 aa, Unknown
  Bacterial polypetide isolated from the Sargasso Sea
MKNSNTVLIDKNPGRNSQTYGIARELGTDLGLIHEPSVGVVGNKGDSQCYIGVSQKVEIIHDALKDRVGSKPGQLPMRLIQPEFTVATSDGIRNGTKEMRYSLIGREVTNDSLSEHLSATGLEGVIAVVACDKPPVSTLAAILEHNRPAILMSDGSIRPGIDSETGESIDLITAYQMAGSDDEKLKSRIAKEACPGYGSCGGMFTYNTMQTFIGVVGMQPLHMISPASEDERRVEEFPAELVDYLANLIDKNIAPRDIVTRESLRNAIIVAMAVGGSTNVLLHAPELARAAGYKDFANEIMSPEEFNNLSRNVIPVVIDARPFGQYSMVDIDAKGGMQVIVKELMDAGLLNGDTLTCTGETLSEQVKRLNPPTPDEDVIYTVQKPYKETGGLRVLGGNLSPEFSAVLKLAGVEGGLENNIFQGKAKVFDGEQELLKALDSQADMFENFDMIVVRYEGPFGAPGMPEMLDSTSRITALCREKNIVVGLMTDGRFSGGSVGLVIGHVGPEAAAGGAIALIETGDEIVVDLNKNELNCTQLQQEETRLERETLWKDLVAENDGLHPSVEMLIPVS

SEQ ID NO: 152837 - protein, 391 aa, Unknown
  Bacterial polypetide isolated from the Sargasso Sea
HWCFRHATIAYGFPASEDYRRIKDFPNELIKFLRKLIEKNITPRDIVTKDSIKNALIVSMALGGSTNVMLHAPEISRAAGYKDFSEEIMSPEEFNHLSKNVIPVLVNARPFGKFSMVDIDKEGGLQVIVKELLDADLLKGNTLTCTCETLKEQVERLQPKKPDGDVIYTLKKPFKKTGGLRILGGNLSPDFSAILKLAGVEGGLENNLFKGNARVFDGEYNLLETLENEPNSFKDKDMIVVRYEGPVGGPGMPEMLDSTSRITTLCRQKKITLGLMTDGRFSGGSVGLVIGHVGPEAAVGGPIGLIKNGDKIIVDLNENKIECEQLKDNSVYKKRKNEWDNLKNKNNGLHPSIGEANTRLLNRMRLTAVPAYQGAGMHPNKKLWVKEPREV

SEQ ID NO: 152838 - protein, 166 aa, Unknown
  Bacterial polypetide isolated from the Sargasso Sea
MEYISTRNNSDHFSFKNVFLKGLADDGGLFVPKSIKPFSKDELNKLSGLNYNELAAEIIFPFIGDFMTKEELISTISKSYSNFRVEDVVKISDLGNLKVLELYHGPTLAFKDIAMQLIGNFYQFHLANEQKKINIIVATSGDTGAAAIDALKGKKNLNVFVLHPNN

SEQ ID NO: 152839 - protein, 178 aa, Unknown
  Bacterial polypetide isolated from the Sargasso Sea
MKYISTRSKEKEYSFGEVFLKGLADDGGLYVPKSINKYNSAELSKLKNLNYRELSSEIISQFLGDFISREELSSLIKKSYSTFREKEVVKLSNVGVTKLLELYHGPTLAFKDVAMQFIGNLYDYHLSKNDKKINIVVATSGDTGAAAIDAIKGKSNLNIFVLHPNNKISSVQRKIMTT

SEQ ID NO: 152840 - protein, 328 aa, Unknown
  Bacterial polypetide isolated from the Sargasso Sea
ASYAGFGHPETAPLVELSDHCKVLELFHGPTLAFKDFALQLLGNLYEIQIARTGRNLTILGATSGDTGAAAISGLLGKRGVTVFILYPDGKVSPLQERQMTCTEAENVFPIAIKGTFDDAQHTVKELFSDLRFREEVGLSAVNSINLARILAQTVYYLYAWLRLGEGARESTTFVVPTGNFGNVFAGWLLTKMGIRISGFRVATNQNDVLHRLFDTGEYSLGSVVPSLAPSMDIQVASNFERLLYFILGGNPQKVREVMDHFRREGRYCFENFAAKGFSSSSASDSEIPGIISMVSREFGYLVDPHTACGVQDLPTDAKSLVLATAHP

SEQ ID NO: 152841 - protein, 228 aa, Unknown
  Bacterial polypetide isolated from the Sargasso Sea
MEYISTRNNSDHFSFKNVFLKGLADDGGLFVPKSIKPFSKDELNKLSGLNYNELAAEIIFPFIGDFMTKEELISTVSKSYSNFRAEDVVKISDLGNLKVLELYHGPTLAFKDIAMQLIGNFYQYHLGNEKKKINIIVATSGDTGAAAIDALKGKKNLNVFVLHPNNRISPVQRRLMTIHEEKNVFNIAIEGNFDDCQNLVKAMFNDEKFSSSINMSGVNSINWARIVA

SEQ ID NO: 152842 - protein, 215 aa, Unknown
  Bacterial polypetide isolated from the Sargasso Sea
MKYISTRGLAPALTFEEAMLTGLALDGGLYVPEYIPKVTKNQILSMQGLRYQEIAFKITKPFMGNAFEDDELHEIIEKAYADFSHISCAPLVELEANHFLLELFHGPTLAFKDFAMQLIGQLFQVALKRRGKRVTIIGATSGDTGSAAIEAFKGLDAVDVFILFPDGRVSDVQRRQMTTAKESNVHAIAVDGTFDDCQSRVKDMFNEHEFQKRSK

SEQ ID NO: 152843 - protein, 268 aa, Unknown
  Bacterial polypetide isolated from the Sargasso Sea
VNEYISTRNNKTEFSAEQVLNYGLAPDGGLFIPSEIPKFSVDQINSLKGKNYFEIADFILTPYLLDLFEADTIKKIINEAYCVFDKEIVSVSNIGDNELLNLFHGPTLAFKDYAMCLLAKIYEYYLKKVGKKLVVIGATSGDTGSAAIQAFKGIENISIFILHPHNSTSLFQRKQMTTSGANNVFNIALNGSFDDCQNSVKKLFRDKDLNEKFSFTAVNSINWFRVLPQSIYYAWSYLNCNVDNFVVPSGNFGNIYSAHLLKSMGFPN

SEQ ID NO: 152844 - protein, 177 aa, Unknown
  Bacterial polypetide isolated from the Sargasso Sea
MRYKSTRGGISGLTFCETLLMGLAPDGGLLLPESIPNISDNLESWRSLSFVDLAQEIIAIFADDIPKDDLDTIIKEAYSTFEHEDVVALEKLGDIHVMELFHGPTLAFKDVALQLLGGLFDYVLSKSNEHLNILGATSGDTGSAAIAGIRGRANMDIFIMYPDEKVSPLQELQMTTN

SEQ ID NO: 152845 - protein, 186 aa, Unknown
  Bacterial polypetide isolated from the Sargasso Sea
MRYISTRGKAPELGFEDVLLSGLANDGGLYIPKEWPKLDFKSLPTTSYSEQAAYVIYPFVSEFLKYEELQSITDKAYSQFPNKEAIGLKEVEKGNYLLELFHGPTLAFKDFAMLLLAQFFETSLRRKNKSITILGATSGDTGSAAIEAFKNNKHCTVFILFPKGRVSEIQRKQMTTVESSTIFPMK

SEQ ID NO: 152846 - protein, 153 aa, Unknown
  Bacterial polypetide isolated from the Sargasso Sea
MRYVSTRDNSKEYSFEDVFIKGLADDGGLYVPKSLKKYSNQELLELKNLNYNELSTEIINPFSTQFISKEELSSLIKKSYSTFREKEVVKISEIGQMKLLELFHGPTLAFKDVAMQFIGNLYEYYLSKNDKKINIVVATSGDTGAAAINAIKG

SEQ ID NO: 152847 - protein, 269 aa, Unknown
  Bacterial polypetide isolated from the Sargasso Sea
MQYYSTRDINLNKTFEEIIIQSLCKSGGLYLPMDYPTFNYEEIFKNNPSYNDIAYSVLSNFIGSSIKDNDLKNIIKKTYDGFSCENSANLFNYAENKFILELFYGPTLAFKDYPLQLLGNLFDYYLNKNNKKITIIGATSGDTGSAAIHACKDKENINIFILHPYQKTSELQRKQMTTVNSKNVFNIAIKGNFDDCQNIIKNLFVSEKLNSLTNLTAINSINWARIISQTIYFIWAIYKTHQYGKQKINFIVPTGNFGIFLLQVWLKNG

SEQ ID NO: 152848 - protein, 307 aa, Unknown
  Bacterial polypetide isolated from the Sargasso Sea
MELATEILFPFVEGDIDRKVFSKLVEETYKEFETENVVELVELTENRQILELFHGPTLAFKDVAMQLLGSLLNHFAKEQGKKIAVLGATSGDTGAAAISACARHENVEVYILYPHKKVTDIQRRQMTTTCSKNVYPLAIQTDFDGCQSIVKEIFLDKDFLIESTRFIAANSINWARCMTQSVYFFWAYLKLKNLEKDIIFSIPSGNFGHAYAGWTAKEMGLPIKKLMIATNSNDVLHKLFSDNHYAKSSVDQTLAPSMDISVASNFERLLYNLHDNNSEAIFSIMNEFPKQPISIPKDKWDLVVKFF

SEQ ID NO: 152849 - protein, 316 aa, Unknown
  Bacterial polypetide isolated from the Sargasso Sea
KNFNHPKIAPIVQIDENKYILELFYGPTLAFKDYALQLLGNLLTHFMASSEKKITILGATSGDTGSAAINAFKGKQNINIFILHPLNKVSEVQRRQMTTVLNDNVFNIAVDGTFDDCQKIVKDLFNNTEVQNKTSLTAVNSINWARIMAQVVYYFWAYLQIAQKKISFIVPSGNFGNIYAARVAKHMGLPINDLHIATNQNDILHKIISLGKMQITNVKETYSPSMDIQVSSNFERQIFESLNFDSNELIKIMQNFNKNKNYLFSEQLKLNFQNIYKSSSVSDKKTLQTIKLFKETYNYLADPHTATGLSVMHETN

SEQ ID NO: 152850 - protein, 269 aa, Unknown
  Bacterial polypetide isolated from the Sargasso Sea
MNYISTRNNQKNFSFKDVFLKGLADDGGLFVLKSIKQFQKEELDNLKNLSYNDLAAEIIYPFIGDFMSKDDLISTISKSYSNFRSDDVVKISNLGNLKVLELFHGPTLAFKDIAMQLIGNFYQYHLARDEKKINIIVATSGDTGAAAIDALKGKSNLNVFVLHPNNKISPVQRRLMTIHEENNVFNIAVEGNFDDCQNLVKAMFNDEKFSKAINMSGVNSINWARIIAQSVYYFYAFFKVGNGQPLSFSVPTGNFGDIYAGYLAKKLTL

SEQ ID NO: 152851 - protein, 233 aa, Unknown
  Bacterial polypetide isolated from the Sargasso Sea
MEYLSTRNDKIREKFEHIFIKGLSDDGGLFLPKQIKKLSDKEFLNLRNLSYVDLATEIISRFTGDFCSNEKLHQIVKKSYSTFNEHNVVKIKKVEDLHVLELFHGPTLAFKDVAMQLIGNFYEYYLSKNTKKINIIVATSGDTGAAAIDAVKGKKNINIFVLHPNNRISPVQRMLMTTNPSKNVFNIAVEGNFDDCQKLVKEMFSDNEFSKSINMSGVNSINWAENSCTNSLL

SEQ ID NO: 152852 - protein, 245 aa, Unknown
  Bacterial polypetide isolated from the Sargasso Sea
MKEVEKGNYLLELFHGPTLAFKDFAMLLLAQFFETSLSKKNKSITILGATSGDTGSAAIEAFKNNKHCTVFILFPKGRVSEIQRKQMTTVDSASIYPIEIDGTFDDCQNLVKHLFQNLEFKEEVSLGAINSINWARVAAQIVYYFSTFQQLQSNRVSFSVPTGNFGDVLAGWVAKKMGLPIDKLIVATNDNDILDRAISNGDYFQEEVKATTSPSMDIQISSNFERLLFESLDRDSEKLRNLFKE

SEQ ID NO: 152853 - protein, 146 aa, Unknown
  Bacterial polypetide isolated from the Sargasso Sea
MNYISTRNNQKNFSFKDVFLKGLADDGGLFVPKSIKQFQKEELDNLKNLSYNDLAAEIIYPFIGDFMSKDDLISTISKSYSNFRSDDVVKISNLGNLKVLELFHGPTLAFKDIALQLIGNFFQYHLDRDQKKINIIVATSGDTGAA

SEQ ID NO: 152854 - protein, 145 aa, Unknown
  Bacterial polypetide isolated from the Sargasso Sea
MKYISTRSKEKEYSFGEVFLKGLADDGGLYVPKSLKKYSSAELLKLKNLNYNELSTEIISQFSADFISREELSSLIKKSYSTFREKEVVKISDVGEMKLLELFHGPTLAFKDVAMQFIGNLYDYYLSKNDKKINIVVATSGDTGA

SEQ ID NO: 152855 - protein, 182 aa, Unknown
  Bacterial polypetide isolated from the Sargasso Sea
MRYVSTRDNSKEYSFEDVFIKGLADDGGLYVPQSLKKHSLQELSKLKNLSYNELSTEIINQFSSDFIKKDELSSLVSKSYSTFREKEVVKISDIGELKLLELFHGPTLAFKDVAMQFIGNLYEYYLNKNDKKINIVVATSGDTGAAAIDAIKGKSNLNIFVLHPNNRISSVQRKIMTTVDEK

SEQ ID NO: 152856 - protein, 216 aa, Unknown
  Bacterial polypetide isolated from the Sargasso Sea
MEYISTRNNNNKFSFSEIFLKGLAEDGGLFIPSNIEKFDESKINSLKKLSYIDLATEIIYLYTGNFLSKKDLNEIIKKSYSTFREKDVVKIAVLNQIKILELFHGPTLAFKDIAMQLIGNMYEHFLKSNNKTINIVVATSGDTGAAAIDAIKGKSNLNIFVLHPNNKISSVQRKIMTTVEEENVFNIAIDGNFDDCQNIVKQLFSDLEFSKSINMS

SEQ ID NO: 152857 - protein, 154 aa, Unknown
  Bacterial polypetide isolated from the Sargasso Sea
MKYISTRSKEKEYSFGEVFLKGLADDGGLYVPKSIKKYNSAELSKLKNLNYSELSAEIISQFSGDFISREELSSLIKKSYSKFREKEVVKFSNVEKIKLLELFHGPTLAFKDVAMQFIGNLYEYYLSKNDKKINIVVATSGDTGAAAIDAIKGK

SEQ ID NO: 152858 - protein, 323 aa, Unknown
  Bacterial polypetide isolated from the Sargasso Sea
NSSKEYNLKQIFIKGLADDGGLFVPKSLKKFNNDELNKLKNLDYNGLSTEIINIFSSDFISRDELSSLIKKSYSTFREKDVVKFSNVGEIKLLELFHGPTLAFKDVAMQFIGNLYEYYLSKNDQKINIVVATSGDTGAAAIDAIKGKSNLNIFVLHPNNRISSVQRKIMTTIDEKNVFNIAIDGNFDDCQNIVKSMFSDLEFSKSINMSGVNSINWARIIAQAVYYFYSYLKLDKETISFSVPTGNFGDVFAGYLAKKMGLPIDKLIVATNENDILHRAISKGDYVSKQVKETLSPSMDIQLASNFERLIYYVNNSDSKITAD

SEQ ID NO: 152859 - protein, 205 aa, Unknown
  Bacterial polypetide isolated from the Sargasso Sea
MEYISTRSDNKIFSFSEVFLKGLADDGGLFIPLNIKKFDKGKMNSLKKLSYVDLATEIIYLYTGDFLSKKELNEIVKKSYSNFREKEVVKIVELNQLKILELFHGPTLAFKDIAMQLIGNMYEHLLKSNNKTINIVVATSGDTGAAAIDAIKGKSNLNIFVLHPNNRISSVQRKIMTTVEEKNVFNIAIDGNFDHCQNIVKQMFS

SEQ ID NO: 152860 - protein, 193 aa, Unknown
  Bacterial polypetide isolated from the Sargasso Sea
MKYISTRSKEKEYSFGEVFLKGLADDGGLYVPKSIKKYNSVELSKLKNLNYNELSTEIISQFSGDFISREELSSLIKKSYSTFREKEVVKLSNIGETKLLELFHGPTLAFKDVAMQFIGNLYQYYLKKNEKKINIVVATSGDTGAAAIDAIKGKSNLNIFVLHPNNKISSVQRKIMTTVDDKNVFNIAIDGKL

SEQ ID NO: 152861 - protein, 283 aa, Unknown
  Bacterial polypetide isolated from the Sargasso Sea
ESIPTLSHGDIAALSGLPYEEIAFRIMRPFIGETFTDDEFAEIIAKTYAGFGHDARAPLVQLAENHFLLELFHGPTLAFKDFAMQLIGQLFEASLKRSGNRVTIVGATSGDTGSAAIEAFRGLDAVDVFILYPHGRVSEVQRRQMTTPSESNVHALAMDGHFDDCQARVKDMFNDFDFRDGVRLAGVNSINWARVLAQVVYYFSSAVSLGAPHRKVSFTVPTGNFGDIFAGYIAKRMGLPIEQLVVATNQNDILHRCLATGDYRPDGVIPSISPSMDIQVSSN

SEQ ID NO: 152862 - protein, 253 aa, Unknown
  Bacterial polypetide isolated from the Sargasso Sea
MKYISTRSKEKQYSFGEVFLKGLADDGGLYVPKSLKKYSSAELSKLKNLNYNELSVEIISQFSEDFISREELSSLIKKSYSTFREKEVVKISNIGEIKLLELFHGPTLAFKDVAMQFIGNLYEYYLNKNDKKINIVVATSGDTGAAAIDAIKGKSNLNIFVLHPNNKISSVQRKIMTTVEEKNVFNIAIDGNFDDCQNIVKQMFSDLEFSKSINMSGVNSINWARIIAQAVYYFYSYFKLDKETVSFSVPTGN

SEQ ID NO: 152863 - protein, 263 aa, Unknown
  Bacterial polypetide isolated from the Sargasso Sea
RLTEKIATPFVGQNLKTKIGMISKKVYKKFNHKDIAPLIKLKNNFYVMELFHGPTLAFKDYAMQFLAELFDNVLSNKNKKIVILGATSGDTGSAALEAFKGKKNSDIFILFPHGRVSEVQRKQMTWINQSGSNALAIRTDFDGCQEIVKSLFNDLKFRNEVSLSAVNSINWARLVPQIVYYFYAGLKLGAPEQKVSFSVPTGNFGNILAGWIAMKLGLPIEKLICASNKNDILTRFFHTGRMERKNVLPSLTPSMDIQVSSNF

SEQ ID NO: 152864 - protein, 130 aa, Unknown
  Bacterial polypetide isolated from the Sargasso Sea
MDVSQPNNWPRIEALIERGYIDKACLKGEMVDEEYTQLAMRQLAQQGYTSEPHAAIAYRAVSHDLEEGEIGLFLGTAHPAKFRETVENVLGNPISLPKPLADVAGEDSLAVDLPATYEALKQHMMSLLKP

SEQ ID NO: 152865 - protein, 157 aa, Unknown
  Bacterial polypetide isolated from the Sargasso Sea
MNYISTRNNSKKVSFEHVFLKGLSEDGGLFIPDKLKKFDHKELEDLSNLNYKNLAFNIIKLFTGDFISELELKNLVNKSYENFRDSNVVKINKINKNYLLELFHGPTLAFKDIAMQLIGNFYEYYLEKSNKKINIIVATSGDTGAAAIDAIRGKKNI

SEQ ID NO: 152866 - protein, 192 aa, Unknown
  Bacterial polypetide isolated from the Sargasso Sea
MKYVSTRDNSNEYNFEEVFIKGLADDGGLYVPTSLKKYTHKELLDLKNLNYNELSTEIINQFLSDFISKEELLSLVKKSYSTFREKEVVKISSIRKLKLLELFHGPTLAFKDVAMQFIGNLYEYYLSKNDKKINIVVATSGDTGAAAIDAIKGKSNLNIFVLHPNNRISPVQRKLMTTVEEKNVFNIAIDGN

SEQ ID NO: 152867 - protein, 283 aa, Unknown
  Bacterial polypetide isolated from the Sargasso Sea
DKKEYSAEQVLNFGLAPDGGLFIPNEIPKFSNNQINALKGKNYFEIANFILTPFLSDLFEAPIIEKIIEEAYCKFDKEIVSISNIGDNDLLNLFHGPTLAFKDYAMCLLAKIYEYYLKKLDKKLVVVGATSGDTGSAAIQAFKDIENISIFILHPHNSTSLFQRKQMTTSGGKNVFNIALNGSFDDCQNLVKKLFRDKDINNKYSFTAVNSINWFRVLPQSIYYAWSYLNHNIDNFVVPSGNFGNIYSAHLLKSMGFPINKLIVATNENNILHRIISNNDLHL

SEQ ID NO: 152868 - protein, 313 aa, Unknown
  Bacterial polypetide isolated from the Sargasso Sea
ISEFTNFSYADLAFQIMSPFIGESLSKKELEQIIKKSYSSFYHPEITPISRISNNEYLLELFHGPTLAFKDCAMQFLGSLFEHFLKKRKEKITIICATSGDTGAAAVEAFKDRELIDLVVLFPRGRISEVQQRQMTTTGSKNIHCLSMDGTFDDCQTIVKNLLNDSDFCNKFNLSAVNSINWVRVMAQVVYYFYAALKLGSPQEKINFSVPTGNFGDIFAGFVASKMGLPIGKLCIATNSNDALERFLIKGEYEIDEVIATLSPSMDIQIASNLERLLYESSGQKSDIIRNIMNDLQINKSFKIESKVLESIK

SEQ ID NO: 152869 - protein, 269 aa, Unknown
  Bacterial polypetide isolated from the Sargasso Sea
LEKKKLLNFQNVGEIKLLELFHGPTLAFKDIAMQFIGNLYEYYLKKNDKKINIVVATSGDTGAAAIDAIKGKSKLNIFVLHPNNRISSVQRKIMTTVDDKNVFNVAIDGNFDDCQNIVKQMFSDLKFSKSINMSGVNSINWARIIAQAVYYFYSYFKLGKETISFSVPTGNFGDVFAGYLAKKMGLPIDKLIVATNENDILHRAISKGDYVSKEVKETLSPSMDIQLASNFERLIYYVNNSDSEKTAEIMKKVKQNSYQIEKNNLDIIQ

SEQ ID NO: 152870 - protein, 189 aa, Unknown
  Bacterial polypetide isolated from the Sargasso Sea
MKYFSTRGLSPAASFSDVMLGGLAPDGGLYMPENNSPLTIDDIDSLRNLSYEELTTKLLFPFVSDELDKKQFSLVVEDAYKTFENQIIDLVEVEDNRWVLELFHGPTLAFKDIAMQLLGSLLQFTSQKRDKKIAVLGATSGDTGSAAISACSRHSDVDVFILFPHGKVTDIQRKQMTTSGSKNIHAIAV

SEQ ID NO: 152871 - protein, 243 aa, Unknown
  Bacterial polypetide isolated from the Sargasso Sea
MRYVSTRDNSKEYSFEDVFIKGLADDGGLYVPTSLKKLSSGELSELKNLNYIDLSTEIINQFSSDFISKDDLSSLIKKSYSTFREKEVVKISNIGYLKLLELFHGPTLAFKDVAMQFIGNLYEYYLSKNDKKINIVVATSGDTGAAAIDAIKGKSNLNIFVLHPNNRISPVQRKLMTTVEDENVFNIAIDGNFDDCQNIVKQMFSDLNFSKSINMSGVNSINWTRIIAQAVYYFYTYFKIGGD

SEQ ID NO: 152872 - protein, 301 aa, Unknown
  Bacterial polypetide isolated from the Sargasso Sea
MNYISTRNKSLNFDFSNIFLRGLAPDGGLFLPSEIKKFSDNKLKELSKLNYIDLGVEIISEFCVPALKKGKIKLILDEAYSSFNTKNIVEIKKIDNINLLELYHGPTLAFKDIAMQVIGLMYEALNLNKKKINIIVATSGDTGSAAIAALKEKKNINLFVLHPHKKISNIQRKIMTTCQSNNIYNIAVKGNFDDCQKIVKQMFNDEQFREKINMSGVNSINWARIICQIVYYFYAYFQMSSKLNFSVPTGNFGDIYAGYIAKKMGLPIDKLIVATNENDILCRVINSGEYRPAEVRPSLSP

SEQ ID NO: 152873 - protein, 193 aa, Unknown
  Bacterial polypetide isolated from the Sargasso Sea
MRYLSTRGVAPELNFDDVLITGLARDGGLYLPTDWPQFSHEDLRSFASLSYPELAIEVMRPFLGDTMSREVFGNIVDATYRKFSHPSVAPIKQLESNIWLMELFHGPTLAFKDYAMQILGRLFDQALLARGKRTTIVGATSGDTGSAAIEACKDREAIDVFIFFPKDRVSPIQQKQMTTVDADNIHAIALEGT

SEQ ID NO: 152874 - protein, 266 aa, Unknown
  Bacterial polypetide isolated from the Sargasso Sea
MNYFSTRDKSLKFSFKDIFLRGLAPDGGLFLPSEIKKFTKEDLKRLSQLSYNELATEIIYSFVSNEISKSELNTLIEKSYSNFKEKKVVTLKKIGNIDLLELYHGPTLAFKDIAMQLIGNLYDHLQVAKTKAVNIIVATSGDTGSAAIAALNNRKNINLFVLHPHKKISNIQRKIMTTIGGSNIYNIAIEGSFDDCQKIVKELFNEDDFRTKINMSGVNSINWVRIVCQIVYYFYSCLKLQKNNISFSVPTGNFGDIFAGYVAKKM

SEQ ID NO: 152875 - protein, 165 aa, Unknown
  Bacterial polypetide isolated from the Sargasso Sea
MEYVSTRNTKKTFSFKDVFLQGLAPDGGLFVPKNIPTLTASELKDLKNLTYNELSTKIILKFCEDEFNEKEIKEIVENSYKNFRIKDVVSVKKIEKINLMELFHGPTLAFKDIAMQIIGNMYDLILKRYNQKINIVVATSGDTGAAAISAIKDRKNMKIFVLHPY

SEQ ID NO: 152876 - protein, 263 aa, Unknown
  Bacterial polypetide isolated from the Sargasso Sea
TDKKFTFEEIILNGLAEDGGLYIPEQTPIFTENDVNRLLCSDYETIAYEVIKQFTGETFTSDLLKRMIHDSYKSFRSDFVTPLTEVDGSLSILELFHGPTLAFKDLAMQLLSRMIEEVLSRTNSKASIICATSGDTGGAAVTSFANKKNIKLFVLYPKGRISEVQRRFMSTVKAENIKVISINGNFDDCQNIVKTLFSDRYFAKNVSLTAVNSINWARIMIQIVYYFSAFSQYKRLEKNINFIVPTGNFGDIFAGYMAKKMGL

SEQ ID NO: 152877 - protein, 223 aa, Unknown
  Bacterial polypetide isolated from the Sargasso Sea
MRYLSTRGIAPELNFDDVLITGLARDGGLYLPMDWPQFSSEDLRAFGSLSYPELAAKVMRPFLGDTITRDVFDNLVEATYRQFTHPLVAPLKQFESNIWLMELFHGPTLAFKDYAMQILGRLFDQALLARGKRTTIVGATSGDTGSAAIEACKDREAIDVFIFFPKDRVSLIQQRQMTTVDADNIHAIALEGTFDDCQDMVKALFNNLEFRDKYALSAINSIN

SEQ ID NO: 152878 - protein, 253 aa, Unknown
  Bacterial polypetide isolated from the Sargasso Sea
VLERYKEFLPVTSNTPLISLGEGDTPLVASNRIIDEVGCERLFFKLEGCNPTGSFKDRGMVVAVAKAMEKGVSSIACASTGNTSASAAAYGAHYNLRTTIIVPKGKIAKGKLAQAVAYGAHIAMIDGNFDQALNIVKELCEKHPIELVNSINPNRIEGQKTASFEIIDDIGSAPDHLFIPVGNAGNITAYWKGFLESKRRNEKLTLPVMNGFQAEGSAPIVNNQIVKNPQTIASAIRIGNPASWEKAINARDE

SEQ ID NO: 152879 - protein, 277 aa, Unknown
  Bacterial polypetide isolated from the Sargasso Sea
SKNKLNKLKKLSYNSLAEKIIFEFCSDEFNKKEIKKLINFSYKKFRVKDVVNIKKVGDLNLLELFHGPTLAFKDIAMQVIGNMYEKILKKNNEKINIIVATSGDTGAAAIEAIKNRNKIKIFVLHPHKKISKVQRKFMTTVNSKNVFNISVLGSFDDCQKLVKSMFADKSFSRKINMSGVNSINWSRIIFQTVYYFYSYFKIAKGMEKINFSVPTGNFGDIYAGYLAKKMGLPINKLLIATNKNDILKRVVKTGIYKPLQVRYTISPKPWIFKWPAT

SEQ ID NO: 152880 - protein, 149 aa, Unknown
  Bacterial polypetide isolated from the Sargasso Sea
MNYKSTRGSKKFNFKDILFSGLAEDGGLFVPIDWPQVNLREIERNITYPELATNIIKPFVHDEISTKDLDNLVENAYSNQFSKGEIISFKNLNTNEVIVELFNGPTLAFKDFAMQLLVPIFDYFLDIEKKKLNLIVATSGDTGSAALMQ

SEQ ID NO: 152881 - protein, 274 aa, Unknown
  Bacterial polypetide isolated from the Sargasso Sea
VKLSNVGEIKLLELFHGPTLAFKDIAMQFIGNLYEYYLNKNNEKINIVVATSGDTGAAAIDAIKGKSNLNIFVLHPNNKISSVQRKIMTTAEEKNVFNIAIDGNFDDCQNIVKQMFSDLEFSKSINMSGVNSINWARIITQAVYYFYSYFKLGKETISFSVPTGNFGDVFAGYLAKKMGLPIDKLIVATNENDILHRAISKGNYVSKEVKETLSPSMDIQLASNFERLIYYVNNSDSKKTAEIMKKVKQNSYQIEKPSLDIIQKDFLSESCNEK

SEQ ID NO: 152882 - protein, 197 aa, Unknown
  Bacterial polypetide isolated from the Sargasso Sea
MKYISTRDDRKELNFEKVFIKGLADDGGLYVPKSLKKYNSEELSELKNLNYNELSTEIINLFSSDFIKKEELSSLMKKSYSTFREKEVVKISKVGEIKLLELFHGPTLAFKDIAMQFIGNLYEYYLSKNDKKINIVVATSGDTGAAAINAIKGKSNLNIFVLHPNNKISPVQRKIMTTVEEKNVFKIAIDGNFDDCQ

SEQ ID NO: 152883 - protein, 200 aa, Unknown
  Bacterial polypetide isolated from the Sargasso Sea
MRYVSTRDTSKTFEFKDVFIKGLADDGGLFIPETVVEYNENEIRDLKKLSYSELAKKIVYPFIGNFMSEAELSKIIDKSYSTFRKDNVVDFIKLGDKTVLELFHGPTLAFKDVAMQLLGNFYEYHLNNQNQKINIVVATSGDTGAAAIDAIKGKKNVNIFVLHPDNRVSPVQRKLMTTGKNENVFNIAIKGNFDDCQNLV

SEQ ID NO: 152884 - protein, 259 aa, Unknown
  Bacterial polypetide isolated from the Sargasso Sea
TTLGKNIHTVAVTSDFDACQHLVKQAFDDSDVRDGLALNSANSINISRLLAQICYYFEAVAQAKKAGNDDIVMSVPSGNFGNLTAGLFAKAMGLPIKRFIAATNSNDTVPRYLQDGAWQPHKTVATMSNAMDVSEPSNWPRVEAICEQMGWPLSLVTGIALSEHDTAAALAQLYQVGYLSEPHAAIAAQALTLELTDDETGIFLGTAHPAKFKDVVDQQLAIELPLPVELAAVTEKPILSAELEADFEQLKAHMFSVLK

SEQ ID NO: 152885 - protein, 196 aa, Unknown
  Bacterial polypetide isolated from the Sargasso Sea
MKYISTRGKAPELGFEDVLLSGLANDGGLYIPKEWPKLDYKELPTTSYSEQAAYVIYPFVKGFLSYEDLNDIASQAYSHFPSKEAIGLKEVEKGNYLLELFHGPTLAFKDFAMLLLAQFFETSLSKKNKSITILGATSGDTGSAAIEAFKNNKHCTVFILFPKGRVSEIQRKQMTTVDSASIYAIEIDGTFDDCQN

SEQ ID NO: 152886 - protein, 201 aa, Unknown
  Bacterial polypetide isolated from the Sargasso Sea
MRYISTRGQAPALNFEDVLLAGLASDGGLYVPENLPRFTQEQIASWAGLPYHELAFNVMRPFVTGSIPDADFKQILQDTYGVFEHKAVAPLRQLDSNEWVMELFHGPTLAFKDFALQLLGRLLDYFLVKRGERVVIMGATSGDTGSAAIEGCKACENVDIFIMHPHNRVSEVQRRQMTSILGDHIHNIAIEGNFHDCQEMV

SEQ ID NO: 152887 - protein, 153 aa, Unknown
  Bacterial polypetide isolated from the Sargasso Sea
MKYISTRNSDKDFSFREVFVKGLADDGGLFVPKSLKKYSSSELQQLKNLNYCELSTEIINLFSSDFISKEELSSLIKKSYSIFREKEVVKISNIGELKLLELFHGPTLAFKDIAMQFIGNLYEYYLSKNDKKLNIVVATSGDTGSAAIDAIKG

SEQ ID NO: 152888 - protein, 266 aa, Unknown
  Bacterial polypetide isolated from the Sargasso Sea
LKKAYSNFNTKEVVEIKKIGNINLLELYHGPTLAFKDIAMQVIGLMYNNLDLDQKKINVIVATSGDTGAAAISALKDKKNINIFVLHPHEKISSIQRKIMTSCESKNIFNIAVKGNFDDCQRIVKQMFNDEKFRKQINMSGVNSINWARIICQIVYYFYAYFKFSSSINFSVPTGNFGDIYAGFIAKKMGLPIDKLIIATNENDILYRVFRSGEYRPLQVKTSLSPSMDIQVASNFERLLFDIMEENDEKVKLSMTKLLSEGYLNS

SEQ ID NO: 152889 - protein, 264 aa, Unknown
  Bacterial polypetide isolated from the Sargasso Sea
NTPLIELANLPAHYGIKARWFVKFEGLNPTGSFKDRGMTMAITKAKEEGAKVVICASTGNTSASAAAYAAKANMGCCVLIPEGKIALGKLSQAMMHGAIVLQIKGNFDDALNLVREISAEYPIKLVNSLNPYRIEGQKTGSFEIIDALGDAPDFHSMPVGNAGNITGYWKGYKEFLDLGKSTKLPQILGYQAAGSAPIVDGHPIKNPETIATAIRIGNPARWSQAEEARDESKGHIDKVTDEEITQAQKDLAKYDGVFCEPASA

SEQ ID NO: 152890 - protein, 269 aa, Unknown
  Bacterial polypetide isolated from the Sargasso Sea
KNFSSEEVIKLKKFKDLNLIELYHGPTLAFKDIAMQVLGNMYDEFNISSNKKINIVVATSGDTGSAAISALNDRKNINVFVLHPHNKISNIQRKIMTTIGSNNIYNIAIKGTFDDCQKLVKEMFSENTFREKINMSGVNSINWARIICQIVYYFYSYFKLQSKKVSFAVPTGNFGDVFAGYVAKKMGLPIEKLIVATNENDILERVINTGEYKPTEVKPSLSPSMDVQISSNFERLLFDVLNEDDKQVSILMNNLKSKGSFLLNKEPGS

SEQ ID NO: 152891 - protein, 291 aa, Unknown
  Bacterial polypetide isolated from the Sargasso Sea
RDNSKEYSFEEVFIKGLADDGGLYVPTSLKKFNLDELSKLKNLNYNDLSVEVINIFSSDFISKDDLSKLIKKSYSTFREKEVVKISNLGDLKLLELFHGPTLAFKDVAMQFIGNLYEYYLSKNDKKINIVVATSGDTGAAAIDAIRGKSNLNIFVLHPNDRISPVQRKLMTTVENKNVFNIAIDGNFDDCQNIVKQMFSDLDFSNSINMSGVNSINWARIIAQAVYYFYTYFKIDSDKPISFSVPTGNFGDVFAGYLAKKMGLPIDKLIVATNENDILHRAISKGDYIQKK

SEQ ID NO: 152892 - protein, 302 aa, Unknown
  Bacterial polypetide isolated from the Sargasso Sea
KVARPLVYACSLSETLECEVWLKFEGANPTGSFKDRGMTMAISKAAEDGARAVICASTGNTSASASAYAVKAGMVSAVLVPQGKIAMGKLAQAIVHGATLLQVDGNFDDCLTVAREVSDSYPVALVNSVNPVRIEGQKTASFEIVDQLGRAPDIHALPVGNAGNITAYWRGYTEYTADGVSDSCPRLWGFQAAGAAPLVQGSPVTSPETIATAIRIGNPASWDAAIAARDESDGLIDSVTDDEILSAYRLLASTEGLFCEPSSAAGVAGLLKVKSQGGLDSGQVIVATLTGNGLKDPQWALE

SEQ ID NO: 152893 - protein, 326 aa, Unknown
  Bacterial polypetide isolated from the Sargasso Sea
SYSDLAFELMKPYIGDSLSLGELSEIIKKSYASFSHEEITPLSQITKEEYLLELYHGPTLAFKDCAMQLLGHLFEHFLKKREKKITIICATSGDTGAAAVEAMKNKDLIDLVVLFPKDKISQVQQKQMTTSASDNIHCLAVEGTFDDCQAIVKDLLNDKQFKKKYNLSAVNSINWVRVMAQVVYYFYAGLKLGSPNKKINFSVPTGNFGDIFAGFVAYKMGLPVDVLCIATNSNDALERFLRHGEYLVENVKATISPSMDIQVASNLERLLYESSGRNSKMIREMMVDLGANKRFTLDQLTLNFIKDLFIAKSVDEEINKNTIESL

SEQ ID NO: 152894 - protein, 149 aa, Unknown
  Bacterial polypetide isolated from the Sargasso Sea
MRYVSTRDTSKTFEFKDVFIKGLADDGGLFIPETLVRYGENEIRDLKKLSYSELAKKIVYPFIGNFMPESEMSKIIDKSYSTFRKDNVVDFIKIGDKTILELFHGPTLAFKDVAMQLLGNFYEYYLNNENQKINIVVATSGDTGAAAID

SEQ ID NO: 152895 - protein, 278 aa, Unknown
  Bacterial polypetide isolated from the Sargasso Sea
MKYVSTRDNSKEYSFEDVFIKGLADDGGLYVPTSLKKYSSKELQGLKKLNYNELSAEIINLFSSDFISKDELSSLIEKSYSTFREKEVVKLSNVGEIKLLELFHGPTLAFKDVAMQFIGNLYEYYLSKNDKKINIVVATSGDTGAAAIDAIKGKPNLNIFVLHPNNRISSIQRKIMTTVEDKNVFNIAIDGNFDDCQNIVKSMFSDLEFAKSINMSGVNSINWARIIAQTVYYFYSYFKLDKETVSFSVPTGNFGDVFAGYLAKKMGLPIDKLIVATN

SEQ ID NO: 152896 - protein, 250 aa, Unknown
  Bacterial polypetide isolated from the Sargasso Sea
MKYLSTRGKKADSFKEVLFSGLADDGGLFVPEEWPKIEIDQIDPNISYIDLALKIISPFVGDDIPKEDLKKIISNAYHNSFSVNDLVSFKKLNKNETIVELFNGPTLAFKDFAMQLLIPIFDYFLLMENKKINLIVATSGDTGSAAINAVKNSKNINIFCLYPKDRVSDFQRRQMSTVIENNIVLCEIDGTFDDCQKIVKSILSDKNFSDKFSVSAVNSINWARIIIQSVYYFFTFLRLNNNRLDKINFS

SEQ ID NO: 152897 - protein, 227 aa, Unknown
  Bacterial polypetide isolated from the Sargasso Sea
MKLLELFHGPTLAFKDVAMQFIGNLYDYYLSKNDKKINIVVATSGDTGAAAIDAIKGKSNLNIFVLHPNNKISSVQRKIMTTVDNKNVFNIAIDGNFDDCQNIVKQMFSDLEFSKSINMSGVNSINWARIIAQAVYYFYSYFKLGKETISFSVPTGNFGDVFAGYLAKKMGLPIDKLIVATNENDILHRAISKGDYVSKEVKETLSPSMDIQLASNFERLIYYVNNS

SEQ ID NO: 152898 - protein, 182 aa, Unknown
  Bacterial polypetide isolated from the Sargasso Sea
MEYISTRSDNKKFSFSEVFLKGLADDGGLFIPLNIKKFDEGKMNSLKKLSYVDLATEIIYLYTGDFLSKKELNEIVKKSYSNFREKEVVKIVELNQLKILELFHGPTLAFKDIAMQLIGNMYEHLLKSNNKTINIVVATSGDTGAAAIDAIKGKSNLNIFVLHPNNRISSVQRKIMTTVEEK

SEQ ID NO: 152899 - protein, 280 aa, Unknown
  Bacterial polypetide isolated from the Sargasso Sea
MRYKSTRGGISGLTFCETLLMGLAPDGGLLLPESIPNISNNLESWSSLSFVELAQEVIAIFADDIPKDDLDTIIEQAYSNFEHEDVVGLEKLGDIHVLELFHGPTLAFKDVALQLLGGLFDYVLSKNNQHLNILGATSGDTGSAAIAGIRGRANMDIFIMYPDEKVSPLQELQMTTNLEPNVHCIAIDGSFDDCQNLMKNIFGDLAFKKDFRLGAINSVNWARIMAQIVYYAYATLRVGGRPSFAVPTGNFGNVFAAYIAHKMGFPIGKLVVATNENDIL

SEQ ID NO: 152900 - protein, 188 aa, Unknown
  Bacterial polypetide isolated from the Sargasso Sea
MKYISTRSKEKEYSFGEVFLKGLADDGGLYVPKSLKTYSKEELLKLKNLNYNELSTEIISQFSADFISRDELSSLIKKSYSTFREKEVVKISNVGDMKLLELFHGPTLAFKDIAMQFIGNLYEYYLKKNDKKINIVVATSGDTGAAAIDAIKGKSNLNIFVLHPNNKISSVQRKIMTTVEENNVFNIA

SEQ ID NO: 152901 - protein, 259 aa, Unknown
  Bacterial polypetide isolated from the Sargasso Sea
MFGKIKLLELFHGPTLAFKDVAMQFIGNLYEYYLTKNNKTINIVVATSGDTGAAAIDAIKGKSNLNIFVLHPNNRISSVQRKIMTTVEEKNVFNIAIEGNFDDCQNIVKSMFSDLEFSKSINMSGVNSINWARIIAQAVYYFYSYFKLDKETISFSVPTGNFGDVFAGYLAKQMGLPINKLIVATNENDILHRAISKGDYISKEVKETLSPSMDIQLASNFERLIYYVNNSDSSKTAEIMKKIKQNSYKIEKNNLDIIQ

SEQ ID NO: 152902 - protein, 219 aa, Unknown
  Bacterial polypetide isolated from the Sargasso Sea
MVNLKDSSDTANFAEAVKRGLGKNQGLYFPEHIPTLDNIDGLLEKPFVERSIDVLRALIGDELNNGELEEIVQTAFAFGAPVEQVNDNVYCLELFHGPTLAFKDFGGRFMAQTLSRISEGKPVTILTATSGDTGAAVAHAFHGIDNINVVILFPKGKISALQEKLFTTLGGNIHTVAVESDFDACQSLVKTAFDDPDVREGLHLNSANSINISRLLAQV

SEQ ID NO: 152903 - protein, 262 aa, Unknown
  Bacterial polypetide isolated from the Sargasso Sea
DSYKSFRSDFVTPLTEVDDSLSILELFHGPTLAFKDLAMQLLSRMIEEVLSRTNSKASIICATSGDTGGAAVTSFANKKNIKLFVLYPRGRISEVQRRFMSTVKAQNIKVISINGNFDDCQNIVKTLFNDRYFAKNVSLTAVNSINWARIMIQIVYYFSALSQYQRLEKNVNFIVPTGNFGDIFAGYMAKKMGLPIQKLVIATNINNILERCLKTGKYEAIDSIQTNSPSMDIQISSNFERLLFDLLDMSPGLVGEKMSELK

SEQ ID NO: 152904 - protein, 281 aa, Unknown
  Bacterial polypetide isolated from the Sargasso Sea
MKGLAEDKGLYMPEVWPKFSMNEISGLSNFSYPDLAFELMRPFIGDSLSLEEFSEIINKSYDSFSHKDTTPLNQITKNEYLLELFHGPTLAFKDCAMQLLGSLFEHFLKKQGKKINIICATSGDTGAAAVEAFKNKDLINLVVLFPKNKISRVQQKQMTTSDSDNIHCLAVEGTFDDCQAIVKNLLNNKQFKNKYNLSAVNSINWVRVMAQVVYYFYAGLKLGSPKEKVNFSVPTGNFGDIFAGFSAHKMGLPIDVLCIATNSNDALERFLKNGEYIVENV

SEQ ID NO: 152905 - protein, 272 aa, Unknown
  Bacterial polypetide isolated from the Sargasso Sea
YISTRNKNQSYFFKDIFLRGLAPDGGLFVPKNIKIYNEDEIKKLSELSYIELATEIIFNFCSSDITKTNLKNLVQKSYKSFSSEEVIKTNKIGDINLVELYHGPTLAFKDIAMQVLGNLYDELKVSANKTVNIIVATSGDTGSAAIAALNDRKNINVFVLHPDNKISKIQRKIMTTIGSDNIYNVAIKGSFDDCQKIVKDMFSENSFREKINMSGVNSINWARIVCQIVYYFYSAFKFKNKKINFSVPTGNFGDVFAGYMAKKMGLPIEKLI

SEQ ID NO: 152906 - protein, 238 aa, Unknown
  Bacterial polypetide isolated from the Sargasso Sea
MNYFSTRDKSLKFSFKDIFLRGLAPGGGLFLPSEIKEYNKEDLKKLSQLNYKDLATEIIFNFCSNAISKDELNSLIEKSYNSFIDSEVVKLKKIGEINLLELYHGPTLAFKDIAMQIIGNMYDHLQVAKNKTVNVVVATSGDTGSAAIAALSNRKNINLFVLHPHNKISDTQRKIMTTIGGTNIYNVAIEGSFDDCQKIVKDLFNEDNFRVKINMSGVNSINWARIICQIVYYFLLIF

SEQ ID NO: 152907 - protein, 148 aa, Unknown
  Bacterial polypetide isolated from the Sargasso Sea
MNYISTRNNQKNFAFKDVFLKGLADDGGLFVPQSIKPFKKEELENLKNLNYNNLASEIIYPFIGDFMSKDDLITLISKSYLNFRCNDVVKISDLGNLKVLELFHGPTLAFKDIAMQLIGNFYQYYLERDQKKINIIVATSGDTGAAAI

SEQ ID NO: 152908 - protein, 165 aa, Unknown
  Bacterial polypetide isolated from the Sargasso Sea
MRYVSTRDTSKTFEFKDVFIKGLADDGGLFIPETVVKYDENEIRDLKKLSYSELAKKIVYPFIGNFMSQAELSKIIDKSYSTFRKDNVVDFIKLGDRIVLELFHGPTLAFKDIAMQLLGNFYEYYLNNENQKINIVVATSGDTGAAAIDAIRGKKNVNIFVLHPR

SEQ ID NO: 152909 - protein, 306 aa, Unknown
  Bacterial polypetide isolated from the Sargasso Sea
KTFEFKDVFIKGLADDGGLFIPEKFMKYNINEVKDFKKLSYQELAKKIVYPFIGNFMSESDMGKIIDKSYSTFRKDNVVDFIKIGDKTILELFHGPTLAFKDVAMQLLGNFYEYYLNNENQKINIVVATSGDTGAAAIDAIKGKKNVNIFVLHPDNRVSPVQRKLMTTGKHENVFNIAIKGNFDDCQNLVKSMFADKQFSNDIKMSGVNSINWARIIAQSVYYFYSYSLVENTSELTNFSVPTGNFGDVYAGYLAKKMGLPINKLIVATNQNDILHRAISKGSYEAEKVSETISPSMDIQIASNSR

SEQ ID NO: 152910 - protein, 253 aa, Unknown
  Bacterial polypetide isolated from the Sargasso Sea
MRYISTRGQAPALNFEDVLLAGLATDGGLYVPENLPRFTQEEIASWAGLPYHELAFRVMRPFVTGSIPDADFKKILEETYGVFSHNAIAPLRQLNGNEWVLELFHGPTLAFKDFALQLLGRLLDYVLEKRGERVVIIGATSGDTGSAAIEGCKHCENVDIFILHPHKRVSEVQRRQMTTIFGENIHNIAIEGNFDDCQEMVKNSFADQSFLKGTRLVAVNSINWARIMAQIVYYFHASLQLGGPARSVSFSVP

SEQ ID NO: 152911 - protein, 167 aa, Unknown
  Bacterial polypetide isolated from the Sargasso Sea
MNYISTRNNQKYFTFKDVFLKGLADDGGLFVPKSITPFNEEELDNLKNLSYNDLAAEIIYPFMGDFISKDDLISMISKSYSNFRSDDVIKISNLGDLKVLELFHGPTLAFKDIAMQLIGNFYQYHLDRDQKKINIIVATSGDTGAAAIDALKGKNNLNVFVLHPNNK

SEQ ID NO: 152912 - protein, 283 aa, Unknown
  Bacterial polypetide isolated from the Sargasso Sea
MKYFSTRNKNLNHSFKEVFLRGLAPDGGLFIPQKIKIYNSSELKELSKLKYTDLATEIISNFCVPDIEKTKLKELIERAYKRFNLEDVVAIKKVGNLNLLELYHGPTLAFKDIAMQVIGNIYNEFNSTDKKIINIIVATSGDTGSAAISALSSKPNINVFVLHPHNKISHIQRKIMTVVDSKNIHNIALKGNFDDCQKIVKEMFTDNKFREDINMSGVNSINWARIACQIVYYFYSSFKFPNKKINFSVPTGNFGDVYAGYVAKKMGLPINKLIVATNKNDIL

SEQ ID NO: 152913 - protein, 311 aa, Unknown
  Bacterial polypetide isolated from the Sargasso Sea
MFHGPTLAFKDIAMQLIGNMYEHLLKSNNETINIVVATSGDTGAAAIDAIKGKSNLNIFVLHPNNRISSVQRKIMTTVEEKNVFNIAIDGNFDDCQNIVKQMFSDLEFSKSINMSGVNSINWARIIAQAVYYFYAHFKLEKDNISFSVPTGNFGDVFAGYLAKKMGLPIDKLIVATNENDILHRAITEGDYISKEVRETLSPSMDIQLASNFERLIYYVNNSNSEKTAEIMKKVKKNSYKIEKRDLDIIQKDFLSESCNEKETLGIIKKNYEENGVVLDPHTAIGVGAAQKVSLNDCVVLSTAHPVNSRRH

SEQ ID NO: 152914 - protein, 153 aa, Unknown
  Bacterial polypetide isolated from the Sargasso Sea
MEYISTRGDNKKFSFSEVFLKGLADDGGLFIPLNIKKFDESKMNSLKKLNYIDLATEIIYLYTGDFLSKKELNEIVKKSYSNFREEDVVKIVELNQLKIMELFHGPTLAFKDIAMQLIGNMYEHLLKSNNETINIVVATSGDTGAAAIDAIKG

SEQ ID NO: 152915 - protein, 289 aa, Unknown
  Bacterial polypetide isolated from the Sargasso Sea
KIRDLKTLSYSELAKKIVYPFIGNFMSEAELGKIIDKSYSTFRKDNVVDFIKLGDKTILELFHGPTLAFKDVAMQLLGNFYEYYLNNENQKINIVVATSGDTGAAAIDAIKGKKNVNIFVLHPDNRVSPVQRKLMTTGKYENVFNIAIKGNFDDCQNLVKSMFADKQFSNDIKMSGVNSINWARIIAQSVYYFYSYSFVENTGEPTNFSVPTGNFGDVYAGYLAKKMGLPINKLIVATNQNDILHRAISKGSYEAEKVSETISPSMDIQIASNFERLIFDLNNENDKQT

SEQ ID NO: 152916 - protein, 263 aa, Unknown
  Bacterial polypetide isolated from the Sargasso Sea
MEYISTRGDNKKFSFSEVFLKGLADDGGLFIPLNIKKFDETKMNSLKKLNYIDLATEIIYLYTGDFLSKKELNEIVKKSYSNFREKDVVKIVELNQLKILELFHGPTLAFKDIAMQLIGNMYEHFLKSNNKTINIVVATSGDTGAAAIDAIKGKSNLNIFVLHPNNRISSVQRKIMTTVEEKNVFNIAIDGNFDDCQNIVKQMFSDLEFSKSINMSGVNSINWARIIAQAVYYFYAHFKLGKNNISFSVPTGNFGDVFAGYLA

SEQ ID NO: 152917 - protein, 286 aa, Unknown
  Bacterial polypetide isolated from the Sargasso Sea
AEIISPFIGDFMSKEELISIVSKSYSNFRAEDVVKISDLGNLKVLELYHGPTLAFKDIAMQLIGNFYQYHLGNEQKKINIIVATSGDTGAAAIDALKGKKNLNVFVLHPNNRISPVQRRLMTIHEEKNVFNIAIEGNFDDCQNLVKAMFNDEKFSSSINMSGVNSINWARIVAQAVYYFYSYFKIGNGQSLSFSVPTGNFGDIYAGYLAKKLGLPIDKLIVATNKNDILHRAISGGDYTQKKVEETNTPSMDIQIASNFERLLYDVKDCNSEVTKDVMSKIKNNTY

SEQ ID NO: 152918 - protein, 308 aa, Unknown
  Bacterial polypetide isolated from the Sargasso Sea
IISKSYSIFRSNDVVEISDLGNLKVLELFHGPTLAFKDIAMQLIGNFYQYYLGHGHDQKKINIIVATSGDTGAAAIDALKGKKNLNVFVLHPNNKISPVQRRLMTTHEESNVFNIAVEGNFDDCQNLVKSMFKDKKFSRAINMSGVNSINWARIIAQSVYYFYAYFKVGDGQPLSFSVPTGNFGDIYAGYLAKKLGLPIDKLIVATNKNDILHRAISGGDYTQKKVEETNTPSMDIQIASNFERLLYDIKDSNSEVTKDVMAEIRNNTYKINKSDLDKIKKNFISEMLNENETVEMIKTISDEHQTSG

SEQ ID NO: 152919 - protein, 150 aa, Unknown
  Bacterial polypetide isolated from the Sargasso Sea
MKYVSTRDNSKEYSFEDVFIKGLADDGGLYVPTSLKKYSSKELQGLKKLNYNELSAEIINLFSSDFISKDELSSLIEKSYSTFREKEVVKLSNVGEIKLLELFHGPTLAFKDVAMQFIGNLYEYYLSKNDKKINIVVATSGDTGAAAIDA

SEQ ID NO: 152920 - protein, 173 aa, Unknown
  Bacterial polypetide isolated from the Sargasso Sea
MQLSNIKVPAEQVSFLQAVRQGLGQQQGLFFPTSWPKLDIEALLAMPMVERSAAILKALIGDELSAAEVGEMVAKAFTFAAPLAPVTDDISCLELFHGPTLAFKDFGGRFMAQALAKAQGGRKTTIVTATSGDTGAAVAHAFYKQPGVQVVILFPKGKISPLQEKLFTTLGET

SEQ ID NO: 152921 - protein, 267 aa, Unknown
  Bacterial polypetide isolated from the Sargasso Sea
TFREKEVIKISSLGKLKLLELFHGPTLAFKDVAMQFIGNLYEYYLSKNNKKINIVVATSGDTGAAAIDAIKGKSNLNIFVLHPNNRISPVQRKLMTTVEEKNVYNIAIDGNFDDCQNIVKQMFSDLEFSKSINMSGVNSINWARIIAQTVYYFYSYFKLGKENVSFSVPTGNFGDVFAGYLAKKMGLPIDKLIVATNENDILHRAISKGDYVSKEVKETLSPSMDIQLASNFERLIYYVNNSDSEKTANIMKKIKQNTYQIDKPSLE

SEQ ID NO: 152922 - protein, 263 aa, Unknown
  Bacterial polypetide isolated from the Sargasso Sea
FYLSEIIKFNQAELNDLSKLSYKELATEIIFNFCKDEVSKNELKSLIQKSYNNFKNEEVVNLKKLGDINLLELYNGPTLAFKDIAMQVIGNLYEHLKVAKEKSVNIVVATSGDTGSAAIAALNNRENINLFVLHPHNKISSTQRKIMTTIGGSNIYNIAVKGSFDDCQKIVKELFNDDNFRLKINMSGVNSINWSRIVCQIVYYFYSYFRLKKNNISFSVPTGNFGDIYAGYIAKKMGLPINKLIVATNENDILERVISTGEY

SEQ ID NO: 152923 - protein, 267 aa, Unknown
  Bacterial polypetide isolated from the Sargasso Sea
VNINKIGNINLLELYHGPTLAFKDIAMQVIGNMYDYLEVAKDKTVNVVVATSGDTGSAAIAALSNRKNINLFVLHPHNKISNTQRKIMTTIGGSNIFNIAIEGSFDDCQKIVKELFNADSFRAKINMSGVNSINWARIVCQIVYYFYSFFKLKKNNISFSVPTGNFGDIYAGYVAKKMGLPINKLIIATNKNDILQRVINTGEYKPDSVKATITPSMDIQVASNFERLLYYILDESDIKVGSLMNDLSSKSFFNLEKKEIDKIKKDL

SEQ ID NO: 152924 - protein, 303 aa, Unknown
  Bacterial polypetide isolated from the Sargasso Sea
FEGVLLAGLARDGGLYLPQSLPSFSAAELQAMRGMSYSELATTVIAPFVEGSIDRDTLSQLVESSYRDFRHQAVAPVKQLDRDQWLLELFHGPTLAFKDFALQLLGRLLDHVLTRRNEKVVIMGATSGDTGSAAIEGCRHSDHVDIFILYPDGRVSDVQRRQMTTVSGDNIHNLAIRGNFDDCQALVKASFVAEPFLPEGRSLVAVNSINWARIMAQIVYYFYAAFAVGGPDRPVNFSVPTGNFGDIYAGYLAHRMGLPVNNLVIATNRNDVLHRMLTTGTYARQPIEASLSPQYGYFCILGI

SEQ ID NO: 152925 - protein, 294 aa, Unknown
  Bacterial polypetide isolated from the Sargasso Sea
DVVKISDLGNLKVLELYHGPTLAFKDIAMQLIGNFYQYHLGNEQKKINIIVATSGDTGAAAIDALKGKKNLNVFVLHPNNRISPVQRRLMTIHEEKNVFNIAIEGNFDDCQNLVKAMFNDEKFSSSINMSGVNSINWARIVAQSVYYFYAYFKIGNGQPLSFSVPTGNFGDIYAGYLAKKLGLPVDKLIVATNKNDILHRAISGGDYSQKKVEETNTPSMDIQIASNFERLLYDVKGCNSDVTKDVMSKIKNNTYQIDNSDLDEIKKNFTSEMLDENETIQMIKDINKEYKVVV

SEQ ID NO: 152926 - protein, 181 aa, Unknown
  Bacterial polypetide isolated from the Sargasso Sea
MKFYSTNNNKIRVSFKEALMVGMPLDKGLYMPEYIPNHSRLLEGIDSLSFQDISYAIASSFLSEDFKNSQIEDIISGSISFDTPIVNIFDNVNILELFHGPTLAFKDFGARFMARTMENVVLGYNKEVNILVATSGDTGSAVAHGFYNVEGVNVIILYPSQKVSYIQEKQLTTLDKNIYAL

SEQ ID NO: 152927 - protein, 192 aa, Unknown
  Bacterial polypetide isolated from the Sargasso Sea
MRYLSTRDTSKTFKFKDVFIKGLADDGGLFIPETVVKYDENEIRDLKKLSYSELAKKIVYPFIGNFMSEGELSKIIDKSYSTFRKDNVVDLMKLGDKTVLELFHGPTLAFKDVAMQLLGNFYEYYLNNENQKINIVVATSGDTGAAAIDAIKGKKNVNIFVLHPENRVSPVQRKLMTTGKHENVFNIAIKGK

SEQ ID NO: 152928 - protein, 271 aa, Unknown
  Bacterial polypetide isolated from the Sargasso Sea
SYNDLATEIIFNFCSDEIKKKELNSLIQKSYSSFKEKEVVNIKKIGNINLLELYHGPTLAFKDIAMQVIGNMYDHLEVAKDKTVNVVVATSGDTGSAAIAALSNRKNINLFVLHPHNKISNIQRKIMTTIGGANIYNIAIEGSFDDCQKIVKELFNENSFRSKINMSGVNSINWARIVCQIVYYFYSFFKLKKNNISFSVPTGNFGDIYAGYVAKKMGLPINKLIVATNKNDILQRVINTGEYKPDTVKATITPSMDIPSCPVILRGFFII

SEQ ID NO: 152929 - protein, 179 aa, Unknown
  Bacterial polypetide isolated from the Sargasso Sea
MKYISTRSKEKEYSFGEVFLKGLADDGGLYVPKSLKKYSSAELLKLKNLNYNELSTEIISQFSADFISREELSSLIKKSYSTFREKEVVKISDVGEMKLLELFHGPTLAFKDVAMQFIGNLYDYYLSKNDKKINIVVATSGDTGAAAIDAIKGKSNFNIFVLHPNNKISSVQRKIMTTV

SEQ ID NO: 152930 - protein, 271 aa, Unknown
  Bacterial polypetide isolated from the Sargasso Sea
AWPSLTIENITANSSSERGYVDVAVEVLKPFTSGSLDQLELKELATRAYESFAHPEIIPLKELGSNTWLMELFHGPTLAFKDVALQLVGQMFDHELAKRKERITIVGATSGDTGSAAIDACRDRPTIDIVILHPHERTSEVQRRQMTTVQSPNVHNVAIEGTFDDCQDLVKAMFLDVKFRNEQNLSAINSINWARVMAQTVYYWWAAITLSPSDNQIDFSVPSGNFGNIFAGYSSHLMGLEVSRFIVGTNQNEVLNRFFQSGSMTAAAVVP

SEQ ID NO: 152931 - protein, 271 aa, Unknown
  Bacterial polypetide isolated from the Sargasso Sea
LEKSNLKNLIKKSYRTFSSEEVIKIKKFGDLHLIELYHGPTLAFKDIAMQVLGNMYDEFNISSDNKVNIIVATSGDTGSAAIAALNDRKNINVFVLHPHNKISNIQRKIMTTIGSNNVYNIAIKGTFDDCQKIVKEMFSENTFREKINMSGVNSINWARIICQIVYYFYSYYKFKNKKVSFAVPTGNFGDVFAGYVAKKMGLPIKKLIVATNENDILERVINTGEYKPSKVKPSLSPSMDVQISSNFERLLFDVAKEDDKQVSIFMNDLKS

SEQ ID NO: 152932 - protein, 271 aa, Unknown
  Bacterial polypetide isolated from the Sargasso Sea
ELKKLNYNELSTEIINLFSSDFISKDELSSLIEKSYSTFREKEVVKLSNVGEIKLLELFHGPTLAFKDIAMQFIGNLYEYYLSKNEKKINIVVATSGDTGAAAIDAIKGKSNLNIFVLHPNDRISPIQRKIMTTVEDKNVFNIAIDGNFDDCQNIVKSMFSDLEFAKSINMSGVNSINWARIIAQTVYYFYSYFKLDKETVSFSVPTGNFGDVFAGYLAKKMGLPIDKLIVATNENDILHRAISKGDYVSREVKETSSPSMDIQLASNLKD

SEQ ID NO: 152933 - protein, 220 aa, Unknown
  Bacterial polypetide isolated from the Sargasso Sea
MDRLARFSSKDVDVQYVSTRGAAPELAFEDALLSGLARDGGLYVPAEWPSMAPDAIRALDGLGYAEIVARVIRPFIETSLVSDDELAEITRETYGVFRHPAVAPLTQIDHDTWLLELFHGPTLAFKDFALQLLGRLFEHVLARRGERITIIGATSGDTGSAAIEACRGRNNLDIFMLHPAGRVSEVQRRQMTTVVADNVFNIALGGTFDDCQDLVKALFA

SEQ ID NO: 152934 - protein, 263 aa, Unknown
  Bacterial polypetide isolated from the Sargasso Sea
SLIKKSYSTFREKEVVKISNIGDLKLLELYHGPTLAFKDIAMQFIGNLYEYYLSKNDKKINIVVATSGDTGAAAIDAIRGKSNLNIFVLHPNNRISSVQRKLMTTVEDKNVFNIAIDGNFDDCQNIVKQMFSDLDFSKSINMSGVNSINWARIIAQAVYYFYTYFKLDSNKPISFSVPTGNFGDVFAGYLAKQMGLPIDKLIVATNENDILHRAISNGDYVSKKVKETSSPSMDIQLASNFERLIYYVNSSNSEITSNIMKKV

SEQ ID NO: 152935 - protein, 150 aa, Unknown
  Bacterial polypetide isolated from the Sargasso Sea
MKYISTRSKEKEYSFGEVFLKGLADDGGLYVPKSIKKYNSAELSELKKLNYNKLSTEIINQFLGDFISKEELLSLIIKSYSTFREKEVVKISNVGGIKLLELFHGPTLAFKDIANAFIGNLYEYYLGKNDQKINIIVATSGDTGAAAIDA

SEQ ID NO: 152936 - protein, 273 aa, Unknown
  Bacterial polypetide isolated from the Sargasso Sea
GLFIPNQIKKYNEAEIKKLSILNYVDLATEIIFNFCSSSLEKNKLKNIIKKSYKNFSSDEVVQLKKFGNLNLIELYHGPTLAFKDIAMQVLGNMYDEFNISSNKKVNIIVATSGDTGSAAIAALNDRKNINLFVLHPHEKISNIQRKIMTTIGSSNVYNIAIKGTFDDCQKLVKEMFSENNFREKINMSGVNSINWARIICQIVYYFYSYFKFQNKKVSFAVPTGNFGDVFAGYVAKKMGLPIEKLIVATNENDILERVINTGEYKPTTVKPS

SEQ ID NO: 152937 - protein, 228 aa, Unknown
  Bacterial polypetide isolated from the Sargasso Sea
MKYISTRSNEKEYSFGEVFLKGLADDGGLYVPKSLKKYSKEELLKLKNFNYNELSSEIISQFSADFISIEELSSLIKKSYSTFREKEVVKISNVGEMKLLELFHGPTLAFKDVAMQFIGNLYEYYLKKNDKKINIVVATSGDTGAAAIDAIKGKANLNIFVLHPNNRISSVQRKIMTTVEDNNVFNIAIDGNFDDCQNIVKGMFSDLEFSKSINMSGVNSINWARIIA

SEQ ID NO: 152938 - protein, 223 aa, Unknown
  Bacterial polypetide isolated from the Sargasso Sea
MRYVSTRDTSKTFEFKDVFIKGLADDGGLFIPEKVVKYHESEIRDLKKLSYSELAKKIVYPFIGNFMSEAELSNIIDKSYSTFRKDNVVDLMKLEDKKVLELFHGPTLAFKDVAMQLLGNFYEYYLKDGNQKINIVVATSGDTGAAAIDAIKGKKNVNIFVLHPENRVSPVQRKLMTTGKHENVFNIAVKGNFDDCQNLVKSMFADKQFFNDIKMSGVNSINW

SEQ ID NO: 152939 - protein, 262 aa, Unknown
  Bacterial polypetide isolated from the Sargasso Sea
STRNNQKNFTFKDVFLKGLADDGGLFVPKSIKKFKKEELDNLKNLNYNDLAAEIIYPFIGDFMSKDDLISMISKSYSNFRSDDVVKISDLGNLKVLELFHGPTLAFKDIAMQLIGNFYQYHLGRDQKKINIIVATSGDTGAAAIDALKGKINLNVFVLHPNNKISPVQRKLMTIHDDSNVFNIAVKGNFDDCQNLVKAMFNDEKFSKAINMSGVNSINWARIIAQSVYYFYAYFKVGNGQPLSFSVPTGNFGDIYAGYLAKK

SEQ ID NO: 152940 - protein, 272 aa, Unknown
  Bacterial polypetide isolated from the Sargasso Sea
PKTLKKFSAEELIKLKNLNYNALSAEIISLFSEDFISKEELSSLINKSYSTFREKEVVKISNVGEIKLLELFHGPTLAFKDVAMQLIGNLYEYYLSKNDKKINIVVATSGDTGAAAIDAIKGKSNLNIFVLHPNKRISSVQRKLMTTVEEKNVFNIAIDGNFDDCQNIVKQMFSDLKFSKSINMSGVNSINWARIIAQSVYYFYTYFKLNKESVSFSVPTGNFGDVFAGYISKKMGLPIDKFIVATNENDILYRAISKGEYISKKVKETISP

SEQ ID NO: 152941 - protein, 236 aa, Unknown
  Bacterial polypetide isolated from the Sargasso Sea
MRYVSTRDNTKEHTFEDVFIKGLADDGGLYVPTSLKKFSSDELSELKNLNYNDLSTEIINQFSSDFISKDDLSSLIKKSYSTFRLKEVVKISNIGDLKLLELFHGPTLAFKDVAMQFIGNLYEYYLSKNDKKINIVVATSGDTGAAAIDAIKGKSNLNIFVLHPNNRISPVQRKLMTTVEDENVFNIAIDGNFDDCQNIVKQMFSDLNFSESINMSGVNSINWARIIAQASLLFLH

SEQ ID NO: 152942 - protein, 288 aa, Unknown
  Bacterial polypetide isolated from the Sargasso Sea
HGPTLAFKDIAMQFIGNLYEYYLSKNNKKINIVVATSGDTGAAAIDAIKGKSNLNIFVLHPNNRISSVQRKIMTTVEEKNVFNIAIEGNFDDCQNIVKSMFADLEFSKSINMSGVNSINWARIIAQAVYYFYSYFRLDKENISFSVPTGNFGDVFAGYLAKQMGLPIDKLIVATNENDILHRAISKGDYVSKEVKETLSPSMDIQLASNFERLIYYVNNSDSSKTAEIMKKVKQNSYQIEKNNLDIIQKDFLSESCSEQETLDIIKKNYEENNIILDPAYCCWIRGYK

SEQ ID NO: 152943 - protein, 265 aa, Unknown
  Bacterial polypetide isolated from the Sargasso Sea
MRYVSTRNTTKTYEFKDVFIKGLADDGGLFIPSSLPKYSEKEIQELKSLNYSDLAKKIIFPFIGNFMDKNELSKIIDKSYSVFRKENVIDFIKIGDRSVLELFHGPTLAFKDVAMQLLGNFYEFYLSKQNEKINIVVATSGDTGAAAIDAIKGKENLNIFVLHPDNRVSSVQRKIMTAGKYKNVFNIAIKGNFDDCQNLVKSMFSDSKFSQDINMSGVNSINWARIIAQCVYYFYSYYLIEDQSEPTNFSVPTGNFGDVYAGYLA

SEQ ID NO: 152944 - protein, 167 aa, Unknown
  Bacterial polypetide isolated from the Sargasso Sea
MCIPVGNAGNITAYWKGFKEYNEKFGFKLPKMYGFQAEGASPIVKNEIVENPETIATAIRIGNPASWDKANEAVTDSIGAIKAVSDEEIINSYVNLARQDGIFCEPASAAGIAGLIKYSKNYDFKGQKIVCVVTGNGLKDPSTSEKHASSNIFEVDSSLDDVLKIIH

SEQ ID NO: 152945 - protein, 185 aa, Unknown
  Bacterial polypetide isolated from the Sargasso Sea
MKYVSTRNNSKEFNFSEVFIKGLADDGGLYVPKLIKKYSSAEISKLKNLNYNELSTEIISQFSGDFISREELSSLIKKSYSTFREKEVVKLSNAGEIKLLELFHGPTLAFKDVAMQFIGNLYEYYLSKNDKKINIVVATSGDTGAAAIDAIKGKSNLNIFVLHPNNRISSVQRKIMTTVEEKNVF

SEQ ID NO: 152946 - protein, 297 aa, Unknown
  Bacterial polypetide isolated from the Sargasso Sea
FHGPTLAFKDVAMQFIGNLYEYYLSKNDKKINIVVATSGDTGAAAIDSIKGKSNLNIFVLHPNNRISSVQRKIMTTVEEKNVFNIAIDGNFDDCQNIVKQMFSDLEFSKSINMSGVNSINWARIIAQTVYYFYAYFKLDKDTVSFSVPTGNFGDVFAGYLAKKMGLPVDKLIVATNENDILHRAISKGDYVSREVKETLSPSMDIQLASNFERLIYYINNSDSIKTAGIMKKIKQNTYKIEKDNLEIIQKDFLSESCNEKETLGIIKKTYEENNIILDPHTAVGVGAANKLSFNDCV

SEQ ID NO: 152947 - protein, 148 aa, Unknown
  Bacterial polypetide isolated from the Sargasso Sea
MNYISTRNNQKNFTFKDVFLKGLADDGGLFVPKSIKQFKKEELDNLKSLSYKNLAAEIIYPFIGDFMSKDDLISMISKSYSNFRSNDVVKISDLGTLKVLELFHGPTLAFKDIAMQLIGNFYQYHLSRDQKKINIIVATSGDTGAAAI

SEQ ID NO: 152948 - protein, 247 aa, Unknown
  Bacterial polypetide isolated from the Sargasso Sea
MLYNSTRGESPIVPFSEVLLGGLAPDGGLYMPQTFPKFSIEEIESWSSLPFHQLASKILYPYVETEIDKSIFLKLLEEAYTSFDEEDVVKLKEIEENHWVLELFHGPTLAFKDVAMQLLGVLLNHFAKEKGEKIVVLGATSGDTGAAAISACARHENVEVYILYPHEKVTEFQRKQMTTTQSQNVYPLAIETDFDGCQNIVKKMFLDEDFQHTKVRFIAANSINWARCMTPSVYFFWSYLKLKEIKE

SEQ ID NO: 152949 - protein, 309 aa, Unknown
  Bacterial polypetide isolated from the Sargasso Sea
ADADFKKILEETYGVFEHNAVAPLRQLNGNEWVLELFHGPTLAFKDFALQLLGRLLDHVLAKRGERVVIMGATSGDTGSAAIEGCKACDNVDIFIMHPHNRVSEVQRRQMTTILGDNIHNIAIEGNFDDCQEMVKASFADQGFLKGTRLVAVNSINWARIMAQIVYYFHAALQLGAPARSIAFSVPTGNFGDIFAGYLARNMGLPVSQLIVATNRNDILHRFMSGNQYVKETLHPTLSPSMDIMVSSNFERLLFDLHGRNGAAIASLMDSFKQGGGFSVDEDRWTEARKLFDSLAVNDEQTCETITEVY

SEQ ID NO: 152950 - protein, 217 aa, Unknown
  Bacterial polypetide isolated from the Sargasso Sea
MNYISTRNNKKKVSFEHVFLKGLSEEGGLFVPDKLKKFDHNELIELENLDYKNLAFNIIKFFTGDFIKETDLKYLIDKSYSSFREENVIKLNKIEQNYLLELYHGPTLAFKDVAMQLIGNFYEYYLKKNNKRINIIVATSGDTGAAAIDAIGGKKNINIFVLHPNNKISSVQRKLMTTTEHKNVFNLAINGNFDDCQNLVKSMFSDNSFANQLICQE

SEQ ID NO: 152951 - protein, 225 aa, Unknown
  Bacterial polypetide isolated from the Sargasso Sea
MKYVSTRDNSKEYNFEEVFIKGLADDGGLYVPTFLKKYTHQDLLELKNLSYNELSTKIISQFLSDFISKEDLSSLVKKSYSTFREKDVVKISSIGKLKLLELFHGPTLAFKDVAMQFIGNLYEYYLSKNDKKINIVVATSGDTGAAAINAIKGKSNLNIFVLHPNNRISSVQRKLMTTVEEKNVFNIAIDGNFDDCQNIVKSMFSDLEFSKSINMSGVNSINWAR

SEQ ID NO: 152952 - protein, 310 aa, Unknown
  Bacterial polypetide isolated from the Sargasso Sea
QFLGDFISREELSSLIKKSYSTFREKEVVKLSNVGVTKLLELYHGPTLAFKDVAMQFIGNLYDYHLSKNDKKINIVVATSGDTGAAAIDAIKGKSNLNIFVLHPNNKISSVQRKIMTTVDDKNVFNIAIDGNFDDCQNIVKQMFSDLEFSKSINMSGVNSINWARIIAQAVYYFYSYFKLGKETISFSVPTGNFGDVFAGYLAKKMGLPIDKLIVATNENDILHRAISKGDYVSKEVKETLSPSMDIQLASNFERLIYYVNNSDSEKTAEIMKKVKQNSYQIEKKDLDIIQKDFLSESCNEQETLDIIKK

SEQ ID NO: 152953 - protein, 224 aa, Unknown
  Bacterial polypetide isolated from the Sargasso Sea
MKYISTRSNKKEYSFGEVFLKGLADDGGLYVPKSLKNYSKEELSNLKNLTYNELSTEIISQFSGDFILREELSSLINKSYSAFREKEVVKISNVGEIKLLELFHGPTLAFKDVAMQFIGNLYEYYLKKNDKKINIVVATSGDTGAAAIDAIKGKSNLNIFVLHPNNRISSVQRKIMTTVEDNNVFNIAIDGNFDDCQNIVKQMFSDLEFSKSINMSGVNSINWA

SEQ ID NO: 152954 - protein, 301 aa, Unknown
  Bacterial polypetide isolated from the Sargasso Sea
DDVLLEGLASDGGLYVPEKWPKLSKSEFANLKDLSYPEMALEIMCPYIEDAIPREILKNILIEAYANFSNSQIAPIKQIDDSTWLLELFHGPTLAFKDYALQVVGKLFNYVLEQKQKTVTIIGATSGDTGSAAIEACKNQAAITLFMLHPRGRVSEVQRRQMTTVESSNIHNIALEGTFDDCQDMVKLLFSDQKMREKYNLSAVNSINWARILSQIVYYFWAGISIQDINKKLIFIVPTGNFGNIFAGYAAHKMGLPVQKFIVASNENNILTRYLNTGNMTALDVKPTIAPSMDIQISSNF

SEQ ID NO: 152955 - protein, 232 aa, Unknown
  Bacterial polypetide isolated from the Sargasso Sea
EILFAGLANDGGLFIPENWPNINHKDINRNVSYEDLTEIILSPFIGDEIESDQLKRIIKEAYSNNFTESGRVSFKELNTNEIIVELFNGPTLAFKDFAMQLLIPLFDHFLEKEKKRINLIVATSGDTGSAAINAVKKSKNINIFCLYPKGRISEFQRRQMSTFNQENIFLCEVEGTFDDCQKIVKDILKDTDYSMHNNISAVNSINWARIIIQSVYYFYTFINFTERASNKV

SEQ ID NO: 152956 - protein, 295 aa, Unknown
  Bacterial polypetide isolated from the Sargasso Sea
MKYISTRSKEKEYSFGEVFLKGLADDGGLYVPKSIKKYNSAELSKLKNLNYNELSTEIVSQFSGDFISREELSSLIKKSYSTFREKEVVKLSNVGETKLLELYHGPTLAFKDVAMQFIGNLYDYYLSKNDKKINIVVATSGDTGAAAIDAIKGKSNLNIFVLHPNNKISSVQRKIMTTVDDKNVFNIAIDGNFDDCQNIVKQMFSDLEFSKSINMSGVNSINWARIIAQAVYYFYSYFKLGKETISFSVPTGNFGDVFAGYLAKKMGLPIDKLIVATNENDILHRAISKGDYVQK

SEQ ID NO: 152957 - protein, 295 aa, Unknown
  Bacterial polypetide isolated from the Sargasso Sea
MNYISTRNKYNISDNNFSKITMEGLAPDGGLYVPDNFPFLTSKEIYKMANLSYSELFTEIIYKFCGSCVNKSEIYEIARDSYKDFEGKDLAPLNDYNDNIKILELYHGPTLAFKDFALQFLSRIFNLFLERGNKNINIIGATSGDTGSAAIEAFKNNPRANIIILHPKDKVSEFQRRQMTTIKANNVFNIALDGNFDDCQAIVKKLLVDSEFNEKYKLASINSINWGRVLAQVVYYFYSALKVLKHNNLESINFSVPTGNFGDAYAGYIAKKMGLPINKIIIATNSNDILSKFFQ

SEQ ID NO: 152958 - protein, 217 aa, Unknown
  Bacterial polypetide isolated from the Sargasso Sea
MEYISTRNNSDHFSFKNVFLKGLADDGGLFVPKSIKPFSKDELSKLSGLNYNKLAAEIIFPFIGDFMTKEELISTVSKSYSKFRADDVVKISDLGNLKVLELYHGPTLAFKDIAMQLIGNFYQYHLGNDQAKINIIVATSGDTGAAAIDALKGKKNLNVFVLHPNNRISPVQRRLMTIHEEKNVFNIAIEGNFDDCQNLVKAMFNDEKFSSSINMSG

SEQ ID NO: 152959 - protein, 251 aa, Unknown
  Bacterial polypetide isolated from the Sargasso Sea
MEYISTRNNSDHFSFKKVFLKGLADDGGLFVPKSINPFSKDELNKLGDLNYNELAAEIIFPFIGDFMTKEELISTVSKSYSNFRAEDVVKISDLGNLKVLELYHGPTLAFKDIAMQLIGNFYQFHLANEQKKINIIVATSGDTGAAAIDALKGKKNLNVFVLHPNNRISPVQRRLMTIHEEKNVFNIAIEGNFDDCQNLVKAMFNDEKFSSSINMSGVNSINWARIVAQAVYYFYAYFKIGNGQPLSFSVP

SEQ ID NO: 152960 - protein, 277 aa, Unknown
  Bacterial polypetide isolated from the Sargasso Sea
YSTFREKEVVKLSNAGEIKLLELFHGPTLAFKDVAMQFIGNLYEYYLNKNDKKINIIVATSGDTGAAAIDAIKGKSNLNIFVLHPNNKISSVQRKIMTTVKEKNVFNIAIDGNFDDCQNIVKKMFSDLEFSKSINMSGVNSINWARIIAQAVYYFYSYFKLDKETISFSVPTGNFGDVFAGYLAKKMGLPIDKLIVATNENDILHRAISKGDYISKEVKETSSPSMDIQLASNFERLIYYVNNSDSKITADIMKKVKQNSYQIEKNNLDIIQKGFFI

SEQ ID NO: 152961 - protein, 244 aa, Unknown
  Bacterial polypetide isolated from the Sargasso Sea
MNYISTRNNRKNFTFKDVFLKGLADDGGLFVPKSIKQFKKEKFDNLKSLSYNDLAAEIIYPFIGDFMSKDELIAMISKSYSNFRANDVVKISDLGNLKVLELFHGPTLAFKDIAMQLIGNFYQHHLGSDQKKINIIVATSGDTGAAAIDALKGKSNLNVFVLHPNNKISPVQRKLMTIHEESNVFNIAVEGNFDDCQNLVKSMFNDEKFSKAINMSGVNSINWARIIAQSVYYFYAYFKVGNGQ

SEQ ID NO: 152962 - protein, 263 aa, Unknown
  Bacterial polypetide isolated from the Sargasso Sea
MNYLSTRGAGAGERHTFSEILLGGLAKDGGLYLPAEYPRVTADELTRWRTLPYADLAFEILSKFCDDIPAEDLRALTRKTYTAQTYCNVRDDESAAQITPLKTLGVENGAPLSLLELSNGPTLAFKDMAMQLIGNLFEYALARHGETLNILGATSGDTGSAAEYAMRGKKGISVFMLSPHKKMSAFQTAQMYSLQDPNIFNIAVEGVFDDAQDIVKAVSNDHAFKAKYKIGTVNSINWARVVAQVVYYFKGYFAATKSNDERV

SEQ ID NO: 152963 - protein, 375 aa, Unknown
  Bacterial polypetide isolated from the Sargasso Sea
MNYFSTRNKSLKFSFKDIFLRGLAPDGGLFLPEKLKIYNSDELDELSGMSYNSLATEIIYNFCSDHFKKDQLSELIKKSYKNFEVDDVVHLNKITKNNCNNVLELFHGPTLAFKDIAMQVIGNMYDELEVAKDNKVNVVVATSGDTGSAAISALNDRKNINVFVLHPNNKISKNQRKIMTTIGSNNIYNIAIDGSFDDCQNMVKSMFNDNQFREKINMSGVNSINWARIMCQIVYYFYAALRLNRTKFAPIEKPRSQITFSVPTGNFGDVYAGYIAKKMGLNIDKLIVATNENDILKRVIETGEYKPEKVKTSVTPSMDIQVASNFERLLFDLVKEDDKKVSNYMEQLSSKGRFKLNIEELKILQENFIAESISG

SEQ ID NO: 152964 - protein, 455 aa, Unknown
  Bacterial polypetide isolated from the Sargasso Sea
MKYISTRSKEKEYSFGEVFLKGLADDGGLYVPKFIKKYNSAELSKLKNLNYNELSAEIISQFSGDFISREELSSLIKKSYSTFREKEVVKLSNVGETKLLELFHGPTLAFKDVAMQFIGNLYNYYLSKNDKKINIVVATSGDTGAAAIDAIKGKANLNIFVLHPNNRISSVQRKIMTTVDDKNVFNIAIDGNFDDCQNIVKQIFSDLEFSKSINMSGVNSINWARIIAQAVYYFYSYFKIGKETISFSVPTGNFGDVFAGYLAKKMGLPIDKLIVATNENDILHRAISKGDYVSKEVKETLSPSMDIQLASNFERLIYYVNNSDSEKTAEIMKKVKQNSYQIEKSNLDIIQKDFLSESCNEQETLDIIKNNHEENNIILDPHTAVGVGAAKKLSFNDCVVLSTAHPCKFPDATNNAINKHEKLPKELQHVLDKKENFQVLKNNTNDVKNFIKSKV

SEQ ID NO: 152965 - protein, 382 aa, Unknown
  Bacterial polypetide isolated from the Sargasso Sea
MKYVSTRDNSKEYNFEQVFIKGLADDGGLYVPMTLKKYSPQELNELKKLNYNELSTEIINLFSSDFISKDELSTLIKKSYSTFREKEVVKLSNVGEIKLLELFHGPTLAFKDVAMQFIGNLYEYYLTKNNKKINIVVATSGDTGAAAIDAIKGKSNLNIFVLHPNNKISSVQRKIMTTVEEKNVFNIAIEGNFDDCQNIVKSMFSDLEFSKSINMSGVNSINWARIIAQAVYYFYSYFRLDKKTISFSVPTGNFGDVFAGYLAKQMGLPINKLIVATNENDILHRAISKGDYVSKEVKETLSPSMDIQLASNFERLIYYVNNLDSSKTAEIMKKVKQNSYQIEKNNLDIIQKDFLSESCNAKETLDIIKKKYEENNIILDPH

SEQ ID NO: 152966 - protein, 238 aa, Unknown
  Bacterial polypetide isolated from the Sargasso Sea
MNYVSTRNSKNELNFKDVFIKGLADDGGLFVPKNVKLLNSEDLDKLRNLSYNDLACEILNLFCSDFINKKDLKTIITKSYSTFREKEVVKISNLGSIKLLELYHGPTLAFKDIAMQFIGNLYDYYLSKNNDFLNVVVATSGDTGAAAIDAIKGKNNMNIFVLHPNNKISKVQRKLMTTGNEKNVYNIAIDGNFDDCQNLVKAMFSDLEFSKSIKMTGVNSINWARIIAQAVYYFYTCF

SEQ ID NO: 152967 - protein, 457 aa, Unknown
  Bacterial polypetide isolated from the Sargasso Sea
MNYVSTRNNLKNFTFRDVFLKGLADDGGLFVPKSIKKFKKEELDNLKSLSYNNLAAEIIYPFIGDFMSKNELISIISKSYSNFRSSDVVKISHLGNLKVLELFHGPTLAFKDIAMQLIGNLYQYHLKRDQKKINIIVATSGDTGAAAIDALKGKSNLNVFVLHPNNKISPVQRKLMTIHEESNVFNIAVKGNFDDCQNLVKAMFNDKKFSKEINMSGVNSINWARIIAQTVYYFYAYFKIGNGQPLSFSVPTGNFGDIYAGYLAKKLGLPIDKLIVATNKNDILHRAISGGDYSQKKVEETNTPSMDIQIASNFERLLYDVKDCNSEVTKDVMGEIKNNTYKIDKNDLDKIKKNFISEMLDENETVEMIKTINDEHQMVVDPHTAVGIGAARKLGLEKNCVVLSTAHPCKFPKAIEDAILKTENLPESLKYVNDRKEKFELLSNDIEKVKKYVMNSI

SEQ ID NO: 152968 - protein, 349 aa, Unknown
  Bacterial polypetide isolated from the Sargasso Sea
MLYKSTRGESPLVPFSEVLLGGLAPDGGLYMPENFPKFSLQEIKSWSELPFYQLAHKVLYPFVEEEIDETVFSDLLREAYETFDEKDVVNLHKLEENRWVLELFHGPTLAFKDVAMQLLGVLLNHFAKEKGEKIVVLGATSGDTGAAAISACSRHQNVEVYILYPHEKVTEFQRKQMTTTQSKNVFPLAVESDFDGCQNIVKQMFLDKELHNDNVRFIAANSINWARCMTQSVYFFWTYLKLPKLKRNITFSIPSGNFGHAYAGWTAKEMGLPIEKLLIATNTNDVLHQTFSTNNYAKTNVVQTLAPSMDISVASNFERLLYNLYDDDSSLQAKNMRSFPEKIYRYTRR

SEQ ID NO: 152969 - protein, 265 aa, Unknown
  Bacterial polypetide isolated from the Sargasso Sea
MKYLSTRNSKLQEGFIDILSQGLSKDGGLFLPRNWPSIDINKLRNKSYEEVAFNIINPFVGGEISEDELYKVIFSTYKNFSHNKIAPLVKIDTNKHILELFYGPTLAFKDYAMQFLGNIFSNVMQHKNNKITILGATSGDTGSAAIEAFRGKEKINVFILHPHKKVSEVQRRQMTTVLDKNIFNIAIEGNFDDCQRIVKDLFLDQETQNKTSFTAINSINWARLMAQIVYYFWGYLQLEEKKVSFIVPSGNFGNIFSAHIAQKMG

SEQ ID NO: 152970 - protein, 376 aa, Unknown
  Bacterial polypetide isolated from the Sargasso Sea
QKNVVNLKKIGKISLVELFHGPTLAFKDIAMQPIGNIYEKFIKVDNKKINIIVATSGDTGSAAIAGLNGKSNINVFVLHPDNKISNVQRRLMTTVDSKNIFNIAVKGNFDDCQRLVKDMFADKNFKETINMSGVNSINWARIAFQIVYYFFVGLKFLNKPISFSVPTGNFGDVYAGYIAKKMGLPIKKLIVATNENDILSRVINSGKYKPSTTKPSISPSMDIQVASNFERLLYDVVGKDDLKVKSLMEKLKNEGGYSLSEKEISHIKSDFSASTISDRSTKETLKRVYKENQVLIDPHTATAFKSAEIHSTGEEMLVLGTAHPCKFPESVKEATGVEPKIPESIKNILNKKESYAKLDDNIDVIKSHILERINES

SEQ ID NO: 152971 - protein, 213 aa, Unknown
  Bacterial polypetide isolated from the Sargasso Sea
MKYVSTRNNLKEYSFKDVFIKGLADDGGLYVPKSLKKYGTQELSKLKNLNYNELSTEIINQFSSEFITKNELSSLVSKSYSTFREKEVVKITEVGELKLLELFHGPTLAFKDVAMQFIGNLYEYYLSKNDKKINIVVATSGDTGAAAINAIKGKSNLNIFVLHPNNRISSVQRKLMTTIEEKNVFNIAINGNFDDCQNIVKSMFSDLEFSKSI

SEQ ID NO: 152972 - protein, 338 aa, Unknown
  Bacterial polypetide isolated from the Sargasso Sea
MKYVSTRNNSKEYNFEQVFIKGLADDGGLYVPTSLKKYSTQELQELKKLSYNELSTEIINLFSSDFISKEELSSLIKNSYSTFREKEVVKLSNVGEIKLLELFHGPTLAFKDVAMQFIGNLYEYYLSKNNKKINIVVATSGDTGAAAIDAIKGKSNLNIFVLHPNNKISSVQRKIMTTVEEKNVFNIAIEGNFDDCQNIVKSMFADLEFSKSINMSGVNSINWARIIAQAVYYFYSYFKLDKETVSFSVPTGNFGDVFAGYLAKQMGLPIDKLIVATNENDILHRAISEGDYVSKEVKETLSPSMDIQLASNFERLIYYINNSDSKITADIMQKIKQN

SEQ ID NO: 152973 - protein, 294 aa, Unknown
  Bacterial polypetide isolated from the Sargasso Sea
MLYKSTRGQSPEVSFSEVLLGGLAPDGGLYMPTNVPKFSIQEINSFKDLQFHELATEILFPFVEGDIEKSDFSRLVEETYKVFEVDDVVELIELENNRQVLELFHGPTLAFKDVAMQLLGSLLNHFAKEQGKKIAVLGATSGDTGAAAISACARHANVEVFILYPHNKVTDIQRRQMTTTGSTNVYPLAIQSDFDGCQSIVKEIFLDKDFRIDSTKFIAANSINWARCMTQSVYFFWAYLKLRHLEQDLIFSVPSGNFGHAYAGWTAKEMGLPIKKLMIATNSNDVLHKCFRKS

SEQ ID NO: 152974 - protein, 267 aa, Unknown
  Bacterial polypetide isolated from the Sargasso Sea
MRYVSTRDTSKTFEFKDVFIKGLADDGGLFIPETLVKYGEKEIRDLKKLSYSELAKKIVYPFIGNFMSEGELSKIIDKSYSTFRKDNVVDFIKLGDKTVLELFHGPTLAFKDVAMQLLGNFYEYYLNNENQKINIVVATSGDTGAAAIDAIKGKKKVNIFVLHPDNRISPVQRKLMTTSKYENVFNIAIKGNFDDCQNLVKSMFADKQFSNDIKMSGVNSINWARIIAQSVYYFYSYLSVENTGEPTNFSVPTGNFGDVYAGYLAKK

SEQ ID NO: 152975 - protein, 392 aa, Unknown
  Bacterial polypetide isolated from the Sargasso Sea
MLYFSTRDTQKKFTFEEIILNGLAEDGGLYIPEQTPIFTKNDINRLLCSDYETIAYEIIKQFTGETFTTDLLKRMIHDSYKSFRSDFVTPLKEVDGSLSILELFHGPTLAFKDLAMQLLSRMIEEVLSRTNSKASIICATSGDTGGAAVTSFANKKNIKLFVLYPKGRISEVQRRFMSTVKAENIKVISINGNFDDCQNIVKTLFSDRYFAKNVSLTAVNSINWARIMIQIVYYFSAFSQYKRLEKNINFIVPTGNFGDIFAGYIAKKMGLPIQKLVIATNVNNILERCLKTGKYEAFDSIQTNSPSMDIQISSNFERLLFDLLDMSPRVVEKKMSELKESGKFELSKSELESFKNNFDAGSLDQDETVKIIKDIYNRTHQIIDPHTAIAVG

SEQ ID NO: 152976 - protein, 257 aa, Unknown
  Bacterial polypetide isolated from the Sargasso Sea
MRYVSTRDTSKTFEFKDVFIKGLADDGGLFIPETVVKYNENEIRDLKKLSYSELAKKIVYPFIGSFMPETEMSKIIDKSYSTFRKDNVVDFIKIGDKTILELFHGPTLAFKDVAMQLLGNFYEYYLNNENQKINIVVATSGDTGAAAIDAIKGKKNVNIFVLHPDNRISPVQRKLMTTGKHENVFNIAIKGNFDDCQNLVKSMFADKQFSNDIKMSGVNSINWARIIAQSVYYFYSYLLVENTGEPTNFSVPTGNFG

SEQ ID NO: 152977 - protein, 439 aa, Unknown
  Bacterial polypetide isolated from the Sargasso Sea
MKYTSTRNNSKEFTFGEVFIKGLAEDGGLYVPKSLKKYNEKELLELKNLNYNELSTEIINLFLEDFISREELSSLIKKSYSTFREKEVVKISNIRELKLLELFYGPTLAFKDIAMQFIGNLYEYYLSKNDKKINIVVATSGDTGAAAIDAIKGKSNLNIFVLHPNNKISPVQRKLMTTVEEKNVYNIAIDGNFDDCQYVVKQMFSDLEFSKSINMSGVNSINWARIIAQCVYYFYSYFQLDKKIISFSVPTGNFGDIFAGYLSKKMGLPIDKLIVATNENDILHRAISKGDYVSKEVKETISPSMDIQLASNFERLIYYVNNSDSEKTAEIMKKIKLNNYQIDSQSLKIIQKDFLSESCNEEETLKIIKQNYEENNIILDPHTAVGVGAAKKLSFNDCVVLSTAHPSKFPDATKKAIKKHENLPKELQNVLDKDENFQV

SEQ ID NO: 152978 - protein, 425 aa, Unknown
  Bacterial polypetide isolated from the Sargasso Sea
MKYISTRDKSKNFEFKDVFIKGLADDGGLFIPETLHKYSESEISDFKKLSYSDLAKKIIHPFIGNFTSEGELSKIIEKSYSVFRKDNVIDLIKVGDRSVLELFHGPTLAFKDVAMQLLGNFYEYYLNNENEKINIVVATSGDTGAAAIDAIKGKKNLNIFVLHPHNRISPVQRKLMTTGKDENVFNIAVKGNFDDCQNLVKSMFSDKEFSNKINMSGVNSINWARIIAQSVYYFYCYFLAEDDNQPINFSVPTGNFGDVYAGYLAKKLGLPINKLIVATNQNDILHRAISKGKYEAEHVSETISPSMDIQIASNFERLIYDLNSHDSSQTLDDMKNIKENGKYTIDEEKLKKINKDFLSARMSEQETLDVIKNIYEKFNIVLDPHTAIGYGAFDKHDLKGNNIVLATAHPCKFPRCNFKGYKFEI

SEQ ID NO: 152979 - protein, 357 aa, Unknown
  Bacterial polypetide isolated from the Sargasso Sea
MKYISTRGKAPVLNFEEAMLTGLARDGGLYVPQSIPNFSPDDISSMSDLSYEEIAFKVILPFVGDCFSDDELIKIINKAYTEFGHIERAPLVELESNHFLLELFHGPTLAFKDFAMQLIGQFFQVALERKKSRVTIVGATSGDTGSAAIEAFRGLDAVDVFILYPDGRVSDVQRRQMTTPSENNVHAIAINGHFDDCQARLKDMFNDFEFRDGVNLAGVNSINWARVLAQVVYYFSSAVKLGAPNKKISFSVPTGNFGDIFAGFIAKKMGLSIDRLVIATNQNDILHRCLSSGVYKTDRVLPSISPSMDIQVSSNFERALFYATDCNASEVSNLMGQLKSTGQFTISGSVLEILREN

SEQ ID NO: 152980 - protein, 483 aa, Unknown
  Bacterial polypetide isolated from the Sargasso Sea
MNYISTRGAGIGERHTFSDILLGGLAKDGGLYLPAEYPKVSTDELARWRALPYADLAFEILSKFCDDVPADDLRALTRRTYTADVYRNTRHGENASDITPLKTLGTENGAPISLLELSNGPTLAFKDMAMQLLGNLFEYTLAKHGQTLNILGATSGDTGSAAEYAMRGKAGVRVFMLSPHKKMSAFQTAQMFSLQDPNIFNLAVEGVFDDCQDIVKAVSNDHAFKAQQKIGTVNSINWARVVAQVVYYFKGYFAATRSNDERVSFTVPSGNFGNVCAGHIARMMGLPIAKLVVATNENDVLDEFFRTGAYRVRSAENTYHTSSPSMDISKASNFERFVFDLLGRDPARVMQLFRDVEEKGGFDLAASGDFARVAEFGFVSGRSSHTDRIATIRDVFSRYDTMIDTHTADGVKVAREHLDAGVPMVVLETAQPIKFGETIREALDREAERPAAFDGLEALPQRFEVVKADAQQVKDFIAAHTGA

SEQ ID NO: 152981 - protein, 247 aa, Unknown
  Bacterial polypetide isolated from the Sargasso Sea
MKYVSTRNSNIKYSFEEIFFKGLADDGGLFIPENFYKLSKDEILKFSKLSFQEISEFIFSKYTGETFKKDELNQIINNAYKNFRCQKIVDVKKYKNINLVQLFHGPTLAFKDIAMQVLGQMYNNLLIKNKKKINIITATSGDTGAAAINAFKDNEKINIFVLHPNNKISDVQRKLMTTTASKNVFNIAINGNFDDCQNLVKEMFVDSIFSKKINMSGVNSINWARIVAQTTYYFFVYAHFAKSNKMI

SEQ ID NO: 152982 - protein, 228 aa, Unknown
  Bacterial polypetide isolated from the Sargasso Sea
MEYISTRNNQKNFTFKDVFLKGLADDGGLFVPKSIKLFSKEELNHLNSLSYNDLAAEIIYPFIGDFMSKDELISTISKSYSNFRSKDVVKISNLENLKVLELFHGPTLAFKDIAMQLIGNFYQYHLGHDQKKINIIVATSGDTGAAAIDALKGKDNLNVFVLHPNNRISPVQRRLMTIHEESNVFNIAIDGNFDDCQNLVKAMFNDEKFSKTINMSRVNSINWARIIA

SEQ ID NO: 152983 - protein, 461 aa, Unknown
  Bacterial polypetide isolated from the Sargasso Sea
MRYRSTRGSDYFGFREVLFAGLANDGGLFIPENWPNINHKDINRNVSYEDLTEIILSPFIGDEIESDQLKRIIKEAYSNNFTESGCVSFKELNTNEIIVELFNGPTLAFKDFAMQLLIPLFDHFLEKEKKRINLIVATSGDTGSAAINAVKKSKNINIFCLYPKGRISEFQRRQMSTVNQENIFLCEVEGTFDDCQKIVKDILKDTDYSMHNNISAVNSINWARIIIQSVYYFYTFINFTERASNKVNFSVPTGNFGDIYAGYVSYKMGLPINKLIVATNENDILNRFMKSGVYESKTVIKTSSPSMDIQVASNFERLLFDILNQSNTETKVSMENFEESGKISISEENLEKVREVFSSNSSSMDIVQNTIKSVKDNFSYVIDPHTATGLDASRFEKDMDRLNFVLATAHPVKFSEVVEKSIGEGLNLMSKYNYLFDAEEKMYKMENNTIRIKEFIREQIS

SEQ ID NO: 152984 - protein, 371 aa, Unknown
  Bacterial polypetide isolated from the Sargasso Sea
MKEVEKGNYLLELFHGPTLAFKDFAMLLLAQFFETSLSKKNKSITILGATSGDTGSAAIEAFKNNKHCTVFILFPKGRVSEIQRKQMTTVDSASIYAIEIDGTFDDCQNLVKHLFQNLEFKEEVSLGAINSINWARVAAQIVYYFSTFQQLQSNRVSFSVPTGNFGDVLAGWVAKKMGLPIDKLIVATNDNDILDRAISTGDYFQEEVKATTSPSMDIQISSNFERLLFESLDRDPEKLRNLFKELKENNGFRIGNDTLTYIRNDFKSGKASEEKVKDTISRIHKSSNIILDPHTAVGFYASASELNFDVPMVNLGTAHPAKFSKAVINAIGFEPEIPDRLKNIINKKEKFTQLDNNSESLISFIRKHSNV

SEQ ID NO: 152985 - protein, 377 aa, Unknown
  Bacterial polypetide isolated from the Sargasso Sea
SYSTFREKEVVKTSNVGEIKLLELFHGPTLAFKDVAMQFIGNLYEYYLNKNDKKINIVVATSGDTGAAAIDAIKGKSNLKIFVLHPNNRISSVQRKLMTTVEEKNVFNIAIDGNFDDCQNIVKQMFSDLGFSKSINMSGVNSINWVRIIAQAVYYFYSYFKLGKETISFSVPTGNFGDVFAGYLAKKMGLPIDKLIVATNENDILHRAISKGDYVSKEVKETLSPSMDIQLASNFERLIYYVNNSNSEKTAEIMKKVKQNSYQIEKKNLDIIQKDFLSESCNEQETLDIIKKNYEENNIILDPHTAVGVGAAKKLSFNDCVVLSTAHPCKFPDATSNAINKHEKLPKELQHVLDKEENFQVLKNNTEDVKRFVKSKV

SEQ ID NO: 152986 - protein, 196 aa, Unknown
  Bacterial polypetide isolated from the Sargasso Sea
MKYVSTRDNSKEYSFEDVFIKGLADDGGLYVPTSLKKYSSKELQELKKLNYNELSTEIINLFSSDFISKDELSSLIEKSYSTFREKEVVKLSNVGEIKLLELFHGPTLAFKDVAMQFIGNLYEYYLSKNKKKINIIVATSGDTGAAAIDAVKGKSNLNIFVLHPNNKISSVQRKIMTTVKDKNVFNIAIDGNFDDC

SEQ ID NO: 152987 - protein, 414 aa, Unknown
  Bacterial polypetide isolated from the Sargasso Sea
MNYVSTRNNKNELNFKDVFIKGLADDGGLFVPKNIKLLKSEDLDKLKNLSYNDLACEILNPFCSDFINKEDLKNIITKSYSSFREKEVVKISNLGSLKLLELYHGPTLAFKDIAMQFIGNLYDYYLSKKNDFLNVVVATSGDTGAAAIDAIKGKNNMNIFVLHPNNKISKVQRKLMTTGNEKNVFNIAIDGNFDDCQNLVKAMFSDLEFSKSIKMTGVNSINWARIIAQAVYYFYTYFKLTSSKPLSFSVPTGNFGDVFAGYLAKKMGLPIDKLIVATNQNDILHRAISKGKYISKKVEQTISPSMDIQLASNFERLIYYINNSNSEITAEIMKKIKENVYQIEKINLESIQKDFVSESCDEKETLDIIKKYYEKNNVILDPHTAVGVGVANKLSLNDCVVLSTAHPCKFPDAT

SEQ ID NO: 152988 - protein, 462 aa, Unknown
  Bacterial polypetide isolated from the Sargasso Sea
MKYISTRGRCSPQNFEQVLLTGLAPDGGLFVPKKLPTVSVEQIRAMGSLSYADLALDLVTPFVDGEIPTADLKTIIDRSYEAFDHPEVAPMTQLSEREYLLELYHGPTLAFKDFALQVLGRLLDYVLERNDQRVVILGATSGDTGSAALEGCRHSERVEIYILHPYQRVSDVQRKQMTTVSGKNVFNLAIEGNFDDCQRIVKAAFADQSFLPNDKSLVAVNSINWARILMQIVYYFYSALKLGAPDKRVSFSVPTGNFGDIYAGYLAKCMGLPIDRLIVATNKNDILHRFISANEYAKSQLTKTFSPSMDILVSSNFERYLYDLFAKDPSAVSEFMQHSGEKPLSVTSQQWAQMNECFDSSSVDDNTTCQVINELFNKDSVLVDPHTAVGVQSGRDCFENSRSPIVTLATAHPAKFSEAIQAAGLNKPKLPEHLKDLFSREERYTILHNDLLAVTDFIRKHS

SEQ ID NO: 152989 - protein, 195 aa, Unknown
  Bacterial polypetide isolated from the Sargasso Sea
MRYVSTRNNSKEYNFENVFLKGLADDGGLYVPKSLKKYSTKELSELKNLNFNELSTEIISQFSSDFISKDKLKSLVKKSYLTFREKEVVKISSAGELKILELFHGPTLAFKDIAMQFIGNLYEYYLSKNDKKINIVVATSGDTGAAAIDAIKGKSNLNIFVLHPNNKISSVQRKIMTTVEEKNVFNIAIDGNFDD

SEQ ID NO: 152990 - protein, 365 aa, Unknown
  Bacterial polypetide isolated from the Sargasso Sea
DRFVLGLFHGPTLAFKDIAMQLLGNFYEYYLNNQNEKINIVVATSGDTGAAAIDAIRGKKNLNIFVLHPHNRISPVQRKLMTTGKNENVFNIAIKGNFDDCQNLVKSMFSDKEFSNQINMSGVNSINWARIIAQSVYYFYCYFSVDDNNKQINFSVPTGNFGDVYAGYLAKKLGLPINKLIVATNQNDILHRAISKGKYKAEHVSETISPSMDIQIASNFERLIYDLNNHDSSQTLDDMKHIKHNGKYIIDDDKLKKINQDFLSARMSEQETLDVIKNTYKKYNMVLDPHTAIGYGAFDKQNLKGNNIVLATAHPCKFPDAILKAINLKSDLPDELKFVLDEKEKYSIIDNNLKKIKQYILGKIL

SEQ ID NO: 152991 - protein, 208 aa, Unknown
  Bacterial polypetide isolated from the Sargasso Sea
MRYVSTRDNSKEYSFEDVFIKGLADDGGLYVPTSLKNLSSGELSELKNLNYNDLSTEIINQFSSDFISKDDLSSLIKKSYSTFREKEVVKISNIGYLKLLELFHGPTLAFKDVAMQFIGNLYEYYLSKNDKKINIVVATSGDTGAAAIDAIKGKSNLNIFVLHPNNRISPVQRKLMTTVEDENVFNIAIDGNFDDCQNIVKQMFSDFN

SEQ ID NO: 152992 - protein, 460 aa, Unknown
  Bacterial polypetide isolated from the Sargasso Sea
MRYVSTRDTSKTFEFKDVFIKGLADDGGLFIPEKLTKYTENEIKDFKKLSYSELAKKIVYPFVGNFMSQAELSKIIDKSYSAFRRDNVVDFIKLGDRTVLELFHGPTLAFKDIAMQLLGNFYEYYLNNENQKINIVVATSGDTGAAAIDAIRGKKNVNIFVLHPDNRVSPVQRKLMTTGKDENVFNIAIKGNFDDCQNLVKSMFADKKFSSDIKMSGVNSINWARIIAQSVYYFYSYLSVEDASEPTNFSVPTGNFGDVYAGYLAKKMGLPIDKLIVATNQNDILHRAISKGSYDVEKVSETISPSMDIQIASNFERLIFDLNNEDDKQTTLDMKNIKENGKYLIGDHKLNKIRENFLSASLSENETLEVIKKVYEKFSVVLDPHTAIGYGAFDKQNLRGNNIVLATAHPCKFPDAVSKAINLKSDLPKELEFILNEKEDYDILENNLEKIKNYIIGKTK

SEQ ID NO: 152993 - protein, 463 aa, Unknown
  Bacterial polypetide isolated from the Sargasso Sea
MRYKSTRGESPEVTFSEVLLGGLAPDGGLYMPEAFPQFSIQEIQSWSELSFDQLASKILYPFVKEEIDEDTFLDLLKDAYSTFDEKDVVKLEKLEDNRWVLELFHGPTLAFKDVAMQLLGVLLNHFAKERGQKIVVLGATSGDTGAAAISACSRHENVEVYILYPHGKVTDFQRKQMTTTQSQNVHPIAVKSDFDGCQDIVKKMFLDENFKDDKVRFIAANSINWARCMTQSVYFFWSYLKMIELKEDITFSIPSGNFGHAYAGWTAKQMGLPIKRLLIATNKNDVLHQTFSTNNYSKTGVVQTLAPSMDISVASNFERLLYNLYDDNSSILAENMRSFPAKSIDIPQAKKELVASFFNSFRSDDEEIIQEIKETFTRHDYLLDPHTATGVRASNGIVNKEELVITMGTAHPAKFTEAIEKALPSYTSELPNKVAKAFEQEEIFTILPDDYLEIKQFILSKAL

SEQ ID NO: 152994 - protein, 458 aa, Unknown
  Bacterial polypetide isolated from the Sargasso Sea
MNYFSTRDKSLKFSFKDIFLRGLAPGGGLFLPAEIKKYNQEELNNLSQLNYNELATEIIFNFCSGEIKKEELSSLIQKSYSRFKDKEVVNLKKIGEIDLLELYHGPTLAFKDIAMQVIGNLYDYLEVAKDKTVNVVVATSGDTGSAAIAALSNRKNINLFVLHPHNKISNIQRKIMTTIGGANIYNIAIEGSFDDCQKIVKELFNDDSFRSKINMSGVNSINWARIVCQIVYYFYSFFKLKKNNISFSVPTGNFGDIYAGYVAKKMGLPINKLIVATNKNDILQRVINTGEYKPDTVKATITPSMDIQVASNFERLLYYILDENDSKVGSLMNDLSSKSLFNLEKKEIDRIKKDFEAVKVTDEETVSIIDEIYKEHKFIIDPHTATGVGAAKSFKNLGDIVVLGTAHPYKFNDTIKRAIGKNLDLPEHLKLNIDKKETFDIIGNSNSEVKNYILGKIQ

SEQ ID NO: 152995 - protein, 159 aa, Unknown
  Bacterial polypetide isolated from the Sargasso Sea
MRYVSTRDNSKEYSFEDVFIKGLADDGGLYVPKSLNKYNTDELSKFKNLNYNELSTEIINQFSSDFISKEKLSSLINKSYSTFREKEVVKLSNVGEIKLLELFHGPTLAFKDVAMQFIGNLYEYYLSKNDKKINIVVATSGDTGAAAIDAIKGKSNLNI

SEQ ID NO: 152996 - protein, 437 aa, Unknown
  Bacterial polypetide isolated from the Sargasso Sea
MKYISTRNNQKIFTFKDVFLKGLADDGGLFVPKSIKQFKKEQLDNLKSLSYNHLAAEIIYPFIGDFMSKNELISMISKSYSNFRSNDVIKISDLGNLKVLELFHGPTLAFKDIAMQLIGNFYQYHLERDQKKINIIVATSGDTGAAAIDALKGKRNLNVFVLHPNNKISPVQRRLMTIHEESNVFNIAVEGNFDDCQNLVKAMFNDEKFSKAINMSGVNSINWARIIAQSVYYFYAYFKVGNVQPLSFSVPTGNFGDIYAGYFAKKLGLPIDKLIVATNKNDILHRAISGGDYSQKKVEETNTPSMDIQIASNFERLLYDVKDCNSEITKNIMAEIKNNTYKIDKNDLDKIKKNFISETLNENETVEMIKKINDEHQMVVDPHTAVAIGAVRKLGLEKNCVVLSTAHPSKFPKAIEDAILKNENLPDSLKYVYDRKE

SEQ ID NO: 152997 - protein, 407 aa, Unknown
  Bacterial polypetide isolated from the Sargasso Sea
MKYISTRGIAPELDFDDVLITGLARDGGLYVPKEWPKFSKNEIESMRELSYADLSIQVMKPFIGNGISSDDFDALVRDTYDKFGHPAVAPLKQLENNLWLLELFHGPTLAFKDYAMQILGGLFDEALQRRKKRTTIVGATSGDTGSAAIEACRNREAIDIFILFPKGRVSNIQQRQMTTVDALNVHAIALEGTFDDCQDMVKSLFNDLEYRDKYNLSAVNSINWARLLPQIIYYFWAALALGVPNRKVSFSVPSGNFGNVFSAYAAKALGLPIENLVVATNTNDILSRFFNSGKMEIKQVRPSLSPSMDIQVSSNFERLLFDLCERDGSLTNEIIENFRTNGYFDIETELIARRANIFSALSVDDDTTLARIEKTHKDTGEIIDPHSAVGLEAAHHIRSSGLVSPGN

SEQ ID NO: 152998 - protein, 358 aa, Unknown
  Bacterial polypetide isolated from the Sargasso Sea
MTLHGPTLAFKDIAMQVIGNMYDHLGVAKDKTVNIVVATSGDTGSAAIAALSNRKNINLFVLHPHNKISNIQRKIMTTIGGDNIYNIAIEGSFDDCQKIVKELFNEDGFRAKINMSGVNSINWARIICQIVYYFYSFFKLKNNKVSFSVPTGNFGDIYAGYVAKKMGLPINKLIVATNKNDILQRVINTGEYKPDTVKPTITPSMDIQIASNFERLLYYILDEKDSRVGSLMNELSSKSLFNLEKKEIDKIKKDFEAVKVTDEETVNIIDEIYKEHKFVIDPHTATGVGAAKNFKNLGDIVVLGTAHPYKFSDTIKKAIGKNLNSPDHLKLNIDKKESFDIIGNSNLEVKNYILGKIQ

SEQ ID NO: 152999 - protein, 358 aa, Unknown
  Bacterial polypetide isolated from the Sargasso Sea
LLELFHGPTLAFKDVAMQFIGNLYEYYLSKNEKKINIVVATSGDTGAAAIDAIRGKSNLNIFVLHPNNRISPVQRKLMTTVEDENVFNIAIDGNFDDCQNIVKQMFSDLDFSKSINMSGVNSINWARIIAQAVYYFYTYFKLDSDKPISFSVPTGNFGDVFAGYLAKKMGLPIDKLIVATNENDILHRAISNGDYISKKVKETLSPSMDIQLASNFERLIYYVNNSNSEITSNIMKKIKQNEYKIDKSNLGIIQKDFVSESCNENETLEIIKKNFEKNNIILDPHTAVGVGAAHKLSFNDCVVLSTAHPCKFPAATDNAINKHEELPKELQYVHDKEEKFQLLKNDKEAVKNFVKSKL

SEQ ID NO: 153000 - protein, 435 aa, Unknown
  Bacterial polypetide isolated from the Sargasso Sea
MRYISLNHNSQPVDFKTAVMNGLAPDKGLYFPEEVISLPKKIIDNIKSIDDHELCYEVIKGYIGEDFSKDELIQIIKKTIDFKIPLNKIGDNPIYSLELFHGPTLAFKDIGAKFLALCMDKIKNDFNSKGITVLVATSGDTGGAVAKGFEGLDGINVCILYPKGRISEVQEKQITTNDKNIIAFEVNGDFDDCQKMVKDAFNDLEIKSKITLTSANSINIARWLPQMFYYFLAIKKMDNENDNIFSVPSGNFGNICAGILSKEIGLNIKLFLASTNINKTVPEYLESGIYSPEKTKPTISNAMDVSDPSNFVRIQKIFNNDIQKIKKIIKAFSFNDNQTREAIKDVYNRNNYLMDPHSAIGYLGIKSYLSNNSTNSSGIFLSTAHPIKFKEQVEKSIGKEIPMPSRLKGIMGKSKRSIEIKSYNDLKDQLLSKVN

SEQ ID NO: 153001 - protein, 342 aa, Unknown
  Bacterial polypetide isolated from the Sargasso Sea
MKYRSTRGTNEETFKKVLFAGLAEDGGLYVPMNWPQIDVNKIDKNISYKDLTKLILYPFVKDFISIIELENIINISYSKQFSSENLVSFKDLSDNEILVELFNGPTLAFKDFAMQLLIPLFDHFLEKEKKKINLIVATSGDTGSAAINAVKQSKNISIFCLYPSKRISDFQRRQMSTVTESNIFLCEIDGTFDDCQKIVKDILKDTQYSSENNISAVNSINWARILIQCVYYYYTYINYFDASRPTVNFSVPTGNFGDIYAGYVAYKMGLPINKLIIATNENDILHRFINTGIYQTESVKKTTSPSMDIQIASNFERLLFDIMSQSNEKTASAMYLLKKREN

SEQ ID NO: 153002 - protein, 386 aa, Unknown
  Bacterial polypetide isolated from the Sargasso Sea
EELSSLINKSYATFREKEVVKISNIGELKLLELFHGPTLAFKDISMQFIGNLYEYYLSKNKKKINIVVATSGDTGAAAIDAIKGKSNLNIFVLHPNNKISSVQRRIMTTVEEKNVFNIAIDGNFDDCQNIVKQMFSDLEFSKSINMSGVNSINWARIIAQAVYYFYSYFKLGKETISFSVPTGNFGDVFAGYLAKKMGLPIDKLIVATNENDILHRAISKGDYVSKKVKETLSPSMDIQLASNFERLLYYVNNSDSEKTAEIMKKVKQNSYQIEKNDLDVIQKDFLSESCNEQETLDIIKKNYEENNIILDPHTAVGVGAAKKLSFNDCVVLSTAHPCKFPDATKNAINKHEKLPEELQHVLDKKENFQVLKNNTEDVKNFVKSKV

SEQ ID NO: 153003 - protein, 148 aa, Unknown
  Bacterial polypetide isolated from the Sargasso Sea
MRYVSTRDNSKEYSFEDVFIKGLADDGGLYVPTSLKKFSPEELSELKRLNYNDLSTEIINQFSSDFISKNDLSSLIKKSYSTFREKDVVKISNIGDLKLLELFHGPTLAFKDIAMQFIGNLYEYYLSKNDKKINIVVATSGDTGGAAI

SEQ ID NO: 153004 - protein, 280 aa, Unknown
  Bacterial polypetide isolated from the Sargasso Sea
MFSGLSVSIESGIRVKYVSTRGSAPEKTFSEALLTGLADDGGLYVPDVWPSLEISGDGDYLETAFEVMSLFTAESLDQITFKKIIDEAYKSFDVQEIVPLIELDEQIFLMELFHGPTLAFKDIALQLVGGLFDYELNSRGEHLTIVGATSGDTGSAAIEACKGRQNLDIVILHPSNRVSEVQRRQMTTVDSFNVHNVAIEGTFDDCQDLVKAMFNDLEYRKKLKLGAVNSINWARVMAQIVYYVVASERLGSHDKPVIFSVPTGNFGNVFAGHAARNCGL

SEQ ID NO: 153005 - protein, 460 aa, Unknown
  Bacterial polypetide isolated from the Sargasso Sea
MKYISTRDKSKNFEFKDVFLKGLADDGGLFIPESLHKYSESEIGDFKKLSYSDLAKKIIYPFIGNFTSQGELSKIIEKSYSVFRKDNVIDLIKVGDRSVLELFHGPTLAFKDVAMQLLGNFYEFYLNNENEKINIVVATSGDTGAAAIDAIKGKKNLNIFVLHPHNRISPVQRKLMTTGKDENVFNIAVKGNFDDCQNLVKSMFSDKEFSNQINMSGVNSINWARIIAQSVYYFYCYFLAEDDNQPINFSVPTGNFGDVYAGYLAKKLGLPINKLIVATNQNDILHRAISKGKYEAEHVSETISPSMDIQIASNFERLIYDLNNHDSSQTLDDMKNIKQNGKYTIDVEKLKKINQDFLSARISEQETLDVIKNIYEKFNMVLDPHTAIGYGAFDKHDLKGNNIVLATAHPCKFPDAILKAINLKSDLPDELKFILDEKENYGIIENNLKEIKQYILGKIK

SEQ ID NO: 153006 - protein, 458 aa, Unknown
  Bacterial polypetide isolated from the Sargasso Sea
MKYISTRGKAPELGFEDVLLSGLANDGGLYIPKEWPKLDFKSLPTTSYSEQAAYVIYPFVSEFLKYEELQGITDKAYSQFPNKEAIGLKEVEKGNYLLELFHGPTLAFKDFAMLLLAQFFETSLRRKNQSITILGATSGDTGSAAIEAFKNNKHCTVFILFPKGRVSEIQRKQMTTAESSTIFPIEIDGTFDDCQNLVKSLFQDLRFKEEMSLGAINSINWARVAAQIVYYFSTFQKLKADKVSFSVPTGNFGDVLAGWIAKKMGLPIDKLIVATNDNDILDRAISNGDYFQEKVKATTSPSMDIQISSNFERLLFESLNRDANKLNILFNKLKNDNGFNIDDSALSYIRNDFESGKANENQVKDTISRIYNSSDIILDPHTAVGFCASSDLSDDDTPMVNLGTAHPAKFSKAVFEAIKVEPEIPNRLKKVINKKEKFVELENNEELLINFIRENTNV

SEQ ID NO: 153007 - protein, 165 aa, Unknown
  Bacterial polypetide isolated from the Sargasso Sea
MKYISTRNNKKEFDFKTVFLKGLADDGGLFIPKSLKKYSNEDLQELKKLNYNQLSIEIINQFSSDFITKDELSSLIDKSYSTFREKEVVKISNIGSLKLLELFHGPTLAFKDIAMQFIGNLYEYYLSKNDEKINIVVATSGDTGAAAIDAIKGKNNLNIFVLHPK

SEQ ID NO: 153008 - protein, 335 aa, Unknown
  Bacterial polypetide isolated from the Sargasso Sea
MRYVSTRDTSKTFEFKDVFIKGLADDGGLFIPKAFVKYGENEIRDLKKLSYSELAKKIVYPFIGNFMSESEMSKIIDKSYSTFRKDNVVDFIKIGDKTILELFHGPTLAFKDVAMQLLGNFYEYYLNNENQKINIVVATSGDTGAAAIDAIKGKKNVNIFVLHPDNRVSPVQRKLMTTGKYENVFNIAIKGNFDDCQNLVKSMFADKKFSNDIKMSGVNSINWARIIAQSVYYFYSYLLVENTGEPTNFSVPTGNFGDVYAGYLAKKMGLPINKLIVATNQNDILHRAISKGSYEAEKVSETISPSMDIQIASNFERLIFDLNNEDDKQTSLDMK

SEQ ID NO: 153009 - protein, 169 aa, Unknown
  Bacterial polypetide isolated from the Sargasso Sea
MRYRSTRGSDYFGFREILFAGLANDGGLFIPENWPNINHKDINRNVSYEDLTEIILSPFIGDEIESDQLKRIIKEAYSNNFTESGCVSFKELNTNEIIVELFNGPTLAFKDFAMQLLIPLFDHFLEKEKKRINLIVATSGDTGSAAINAVKKSKNINIFCLYPKGRISE

SEQ ID NO: 153010 - protein, 457 aa, Unknown
  Bacterial polypetide isolated from the Sargasso Sea
MEYISTRNNQKIFTFKDIFLKGLADDGGLFIPKSVKPFSKEEINNFKNLSYNDLAAEIINPFIGDFMSKDDLISLISKSYSNFRTKNVVNINKLGNLKVLELFHGPTLAFKDIAMQLIGNFYEHHLNFEQKKINIVVATSGDTGAAAIDALKGKKNLNVFVFHPNNRISPVQRKLMTTCEASNVFNIAIQGNFDDCQNLVKAMFNDEKFSKSINMSGVNSINWARIIAQAVYYFYAYFKVGNGQPLSFSVPTGNFGDIYAGYLAKKLGLPIDKLVVATNKNDILHRAISGGDYSQKKVMETNTPSMDIQIASNFERLLYDVKDCNSEVTKDLMIKIKNNTYKIDTEDLGKIQKNFISEMLDENETIEMIKKINDEHQTVVDPHTAVGIGAVKKLGIEKNCVVLSTAHPCKFPKAIEDAISKTENLPNSLKYVNERKEKFELLSNDIQKVKKYVMNSI

SEQ ID NO: 153011 - protein, 372 aa, Unknown
  Bacterial polypetide isolated from the Sargasso Sea
NLKKNEKIIELFNGPTLAFKDFAMQLIIPIFDYYLSSKKEKLNLIVATSGDTGSAAINAVQKSSKINIFCLFPKNRISDFQKKQMTTVHGNNIFPIEIDGTFDDCQNIVKSILIDKSFSNEFSIAAVNSINWSRVMAQIIYYFYSLIKNDISEKDLINFSVPTGNFGDIYAGYVAIKMGLPANKLVIATNENDILDRFIKSGNYSINEVAKTSSPSMDIAIASNFERLLFELNNKSAEKTSKYMDDLRTNNGFDVSEDQVNLVKKLFASKRINQDEVENLIKNTYDEFNYVIDPHTAIGLGASREINNEDEYNFILGTAHPLKFSKTVEKAIEKNIYSSDKTNGDFKEEEKFFSFENSESKVREIIKNNVNK

SEQ ID NO: 153012 - protein, 435 aa, Unknown
  Bacterial polypetide isolated from the Sargasso Sea
MNYFSTRDKSLEFSFKDIFLRGLAPGGGLFLPAEIKKYSQEELNNLSQLNYNELATEIIFNFCSGEIKKEELSSLIQKSYSSFKDKEVVNIKKIGNINLLELYHGPTLAFKDIAMQVIGNMYDHLEVAKDKTVNVIVATSGDTGSAAIAALSNRKNINLFVLHPHNKISNIQRKIMTTIGGANIYNIAIEGSFDDCQKIVKELFNENSFRSKINMSGVNSINWARIVCQIVYYFYSFFRLKKNNISFSVPTGNFGDIYAGYVAKKMGLPINKLIVATNKNDILQRVINTGEYKPDKVKATITPSMDIQVASNFERLLYYILDESDSKVGSLMNDLSSKSLFNLEKKEIDKIKKDFEAVKVTDEETVSIINEIYKEHQFIIDPHTATGVGAAKSFKNLGEIVVLGTAHPYKFNDTIKKAIGKKLDSPKHLKLNVDK

SEQ ID NO: 153013 - protein, 224 aa, Unknown
  Bacterial polypetide isolated from the Sargasso Sea
MKYISTRGKAPELGFEDVLLSGLANDGGLYIPKEWPKLDYKELPTTSYSEQAAYVIYPFVKGFLSYEELNDIASQAYNHFPSKEAIRLKEVEKGNYLLELFHGPTLAFKDFAMLLLAQFFETSLSKKNKSITILGATSGDTGSAAIEAFKNNKHCTVFILFPKGRVSEIQRKQMTTVDSTSIYPIEIDGTFDDCQNLVKHLFQNLEFKEEVRLGAINSINWARV

SEQ ID NO: 153014 - protein, 227 aa, Unknown
  Bacterial polypetide isolated from the Sargasso Sea
MEYISTRNNSDHFSFKNVFLKGLADDGGLFVPKSIKPFSKDELNKLSSLNYNELAAEIIFPFIGDFMTKEELISIVSKSYSNFRAEDVVKISNLGNLKILELYHGPTLAFKDIAMQLIGNFYQYHLGNEQEKINIIVATSGDTGAAAIDALKGKKNLNVFVLHPNNRISPVQRRLMTIHEEKNVFNIAIEGNFDDCQNLVKAMFNDEKFSSSINMSGVNSINWARIV

SEQ ID NO: 153015 - protein, 149 aa, Unknown
  Bacterial polypetide isolated from the Sargasso Sea
MRYISLNHNSQPVDFKTAVMNGLAPDKGLYFPQEIISLPKKITDNIKSIDDHELCYEVIKEYIGDDFSKDELNQIIEKTIDFKIPLNKIGDNPIYSLELFHGPTLAFKDIGAKFLALCMDKIKNDFNSKGITVLVATSGDTGGAVAKRV

SEQ ID NO: 153016 - protein, 457 aa, Unknown
  Bacterial polypetide isolated from the Sargasso Sea
MNYISTRNNQKNFTFKDVFLKGLADDGGLFVPRLIKPFKKEELDNFKNLSYNDLATEIIYPFIGDFMSKDDLISLISKSYSNFRCDDVVKISDLGNLKVLELFHGPTLAFKDIAMQLIGNFYQYHLGRDQKKINIIVATSGDTGAAAIDALKGKNNLNVFVLHPNNKISPVQRRLMTIHEESNVFNIAVEGNFDDCQNLVKAMFNDEKFSKAINMSGVNSINWARIVAQSVYYFYAYFKVGNGQPLSFSVPTGNFGDIYAGYLAKKLGLPINKLIVATNKNDILHRAISGGDYSQKKVEETNTPSMDIQIASNFERLLYDIKDCNSEVTKDVMAEIKNNTYKIDKNDLDKIKRNFISEMLNENETVEMIKTINDEHQMVVDPHTAVGIGAVRKLGLEKNCVVLSTAHPCKFPKAIEDAISKTENLPESLKYVNDRKEKFELLSNDIEKVKKYVMNSI

SEQ ID NO: 153017 - protein, 410 aa, Unknown
  Bacterial polypetide isolated from the Sargasso Sea
MRYVSTRDNSKEYSFEDVFIKGLADDGGLYVPTSLKKFSSDELSELKNLNYNDLSTEIINQFSSDFISKDDLSSLIKKSYSTFREKEVVKISNIGDLKLLELFHGPTLAFKDVAMQFIGNLYEYYLNKNDKKINIVVATSGDTGAAAIDAIKGKSNLNIFVLHPNNRISPVQRKLMTTVEDENVFNIAIDGNFDDCQNIVKQMFSDLDFSKSINMSGVNSINWARIIAQAVYYFYTYFKLNEDKPISFSVPTGNFGDVFAGYLAKQMGLPINKLIVATNENDILYRAISNGDYVSKKVKETLSPSMDIQLASNFERLIYYVNSSNSEITSDIMKKIKQNEYQIDKSNLDIIQKDFVSESCNENETLEIIKKIFEKNNIILDPHTAVGVGAAQKLSFNDCVVLSTAHPVNS

SEQ ID NO: 153018 - protein, 455 aa, Unknown
  Bacterial polypetide isolated from the Sargasso Sea
MKYISTRNNEKEYSFGEVFLKGLADDGGLYVPKSLKKYSSADLLKLKNLNYNELSTEIISQFSGDFISREELSLLIKKSYSKFREKEVVKISNVGETKLLELFHGPTLAFKDIAMQFIGNLYEYYLKKNDKKINIVVATSGDTGAAAIDAIKGKSNLNIFVLHPNNRISSVQRKIMTTVQDNNVFNIAIDGNFDDCQNIVKSMFSDLEFSKSINMSGVNSINWARIIAQAVYYFFSYFKLGKEIISFSVPTGNFGDVFAGYIAKKMGLPIDKLIVATNENDILHRAISKGDYVSKEVKETFSPSMDIQLASNFERLIYYVNNSDSEKTAEIMKQVKQNSYQIEKNNLNIIQKDFLSESCNEQETLDIIKKNYEENNIILDPHTAVGVGAVKKLSFNDCLVLSTAHPCKFPDAISNAINKHEKLPKELQHVLDKDENFQVLKNNTEDVKKFIKSKI

SEQ ID NO: 153019 - protein, 432 aa, Unknown
  Bacterial polypetide isolated from the Sargasso Sea
MLFHSTRGKDKDKTFEQVLMQGLAKDGGLYMPNNWPRVDIHKLKDFDNFIDVAKEIVPLFTDSSFHRAEVETLLDDTWHDFDKKDLIDIFEVDDSISILELFHGPTSAFKDFGLQLAAAFFNKTLQMQNKTAVVFGATSGDTGSAAIDACKEFELIKSFILIPEGNMSEIQRKQMTTVNKENVFPILASGTFDDCQDIVKKGFRERTFLRDDQYLLAVNSINWVRIIGQICYYFYASLKMNKLSEPLNFSVPTGNFGNVFACYAASKMGMPLSKIVVAVNSNDILDRFFRNNDYSKLKVNETISPSMDISVASNFERLLYDFYLDCNSDLCSRLYSKFPEESIQINKSIWNKTSDLFISYSSDDASTYKCMQFYYKNFNYIMDPHTAVAADAVKRFKEKLQGNTIILSTAHPAKFPLALENAGILIKNLPKK

SEQ ID NO: 153020 - protein, 462 aa, Unknown
  Bacterial polypetide isolated from the Sargasso Sea
MLYNSTRGESPIVPFSEVLLGGLAPDGGLYMPQTFPKFSIEEIESWSNLPFYQLAAKILHPYVESEIDESSFLKLLEEAYTSFDEEDVVKLKEIEENHWVLELFHGPTLAFKDVAMQLLGVLLNHFAKEKGEKIVVLGATSGDTGAAAISACARHENVEVYILYPHEKVTEFQRKQMTTTQSQNVYPLAIETDFDGCQNIVKKMFLDEDFLHTKVRFIAANSINWARCMTQSVYFFWSYLRLKGKGDLTFSIPSGNFGHAYAGWTAKEMGLPIKRLIIATNENDVLHQTFSNNLYAKTNVVQTLAPSMDISVASNFERLLYNLYDNDSSLLAKNMRAFPEKSIDIPDSKIDAVSNFFKSHCSNDQEIIKQIINTHQKIGYLIDPHTATGVRASNEISPSNEPVITMGTAHPAKFSEAIEQAIPDYHSSLPKKVEKTFQQEEQFNILEENYEEIKSFVLSKAL

SEQ ID NO: 153021 - protein, 328 aa, Unknown
  Bacterial polypetide isolated from the Sargasso Sea
MNYISTRDNQKNFSFKDVFLKGLADDGGLFVPKSIKPFKEEELDNLKNLSYNHLAAEIIYPFIGDFMSKDDLISLISKSYSNFRSDDVVKISVLGDLKVLELFHGPTLAFKDIAMQLIGNFYQYHLGRDQKKINIIVATSGDTGAAAIDALKGKNNLNVFVLHPNNKISPVQRRLMTIHEESNVFNIAVEGNFDDCQNLVKAMFNDEKFSKAINMSGVNSINWARIIAQSVYYFYAYFKIGSGQPLSFSVPTGNFGDIYAGYLAKKLGLPIDKLIVATNKNDILHRAISGGDYSQKKVEETNTPSMDIQIASNFERLLYDVKDCNSEV

SEQ ID NO: 153022 - protein, 461 aa, Unknown
  Bacterial polypetide isolated from the Sargasso Sea
MKYISTRNSSKSLPFESVFIKGLADDGGLFLPEKDFKFDEKDLSKLQSMSYHELATEIVHKFTGDFIEKDNLYKLVKKSYSSFRSEEVVKLRKVGNFNILELFHGPTLAFKDIAMQLIGNFYEYYLSKNENFINIIVATSGDTGAAAIDAIKGKKNLNIFVLHPHNRISSVQRRIMCTVKEKNVFNIAIKGNFDDCQNLVKAMFVDQNFSKKINMSGVNSINWARIVAQTVYYFFCFFSLKSKKLNFSVPTGNFGDIYAGYLAKKMGLPIDKLIVATNQNDILHRAISKGDYTSKKVSETFSPSMDIQLASNFERLIFEIQGCNSDKTKNIMDKIKENNYKLDETSLNKINKDFLSEKLSEDETINEIKEVFKNHNIVLDPHTAIGYGVAKKLKQDNSCIILSTAHPSKFPEAIKNALGKNEELPPELRNVLKEKEKFEILENSLDQVKNYILKKIDEIKN

SEQ ID NO: 153023 - protein, 423 aa, Unknown
  Bacterial polypetide isolated from the Sargasso Sea
MEKEFSNLKALSYVDLATEIIYKFIGDFCSKEKLHEIVKKSYSSFSEKEVVKIRKVEDFQILELFHGPTLAFKDVAMQLIGNFYEYYLSKTSEKINIIVATSGDTGAAAIDAVKGKKNINIFVLHPNNRISPVQRMLMTTNPSKNVFNIAVEGNFDDCQKLVKQMFSDHEFSKSINMSGVNSINWARIVAQSVYYFFCYFKLDKKEKVSFSVPTGNFGDVYAGYLAKKMGLPIDKLLVATNENDILHRAISKGDYKTNKVQETISPSMDIQVASNFERLLFDIYNNDSKKVIETMNDIKNNKFNLDQFSLKKIQKDFISGSLNEKEILETIKHIYKNNRIVIDPHTAIGVGAVKKYNEKNYIVLATAHPCKFPNAILKAIDKKEELPNHLKGILNQKEEYEVFQNNIENLKSYIKKIVNEIKD

SEQ ID NO: 153024 - protein, 335 aa, Unknown
  Bacterial polypetide isolated from the Sargasso Sea
MRYVSTRDTSKNFEFKDVFIKGLADDGGLFIPEAVVKYNENEIRDLKKLSYSELAKKIVYPFIGNFMSEAELSNIIDKSYSTFRKDNVVDLMKLGNKTVLELFHGPTLAFKDVAMQLLGNFYEYYLNNENRKINIVVATSGDTGAAAIDAIKGKKNVNIFVLHPDNRVSPVQRKLMTTGKNENVFNIAIKGNFDDCQNLVKSMFADKQFSNDIKMSGVNSINWARIIAQSVYYFYSYLLVENSGEPTNFSVPTGNFGDVYAGYLAKKMGLPINKLIVATNQNDILHRAISKGSYEAEKVSETISPSMDIQIASNFERLIFDLNNKDDKQTSLDMK

SEQ ID NO: 153025 - protein, 374 aa, Unknown
  Bacterial polypetide isolated from the Sargasso Sea
MNYISTRNNQKNFTFKDVFLKGLADDGGLFVPKSIKQFKKEELNNLKNLSYNDLAAEIIYPFIGDFMSKDDLISMISKSYSNFRSNDVVKISDLGDLKVLELFHGPTLAFKDIAMQLIGNFYQYHLGRDQKKINIIVATSGDTGAAAIDALKGKSNLNVFVLHPNNKISPVQRRLMTIHEESNVFNIAVEGNFDDCQNLVKAMFNDEKFSKAINMSGVNSINWARIIAQSVYYFYAYFKVGNGQPLSFSVPTGNFGDIYAGYLAKKLGLPIDKLIVATNKNDILHRAISGGDYTQKKVEETNTPSMDIQIASNFERLLYDIKDSNSEVTKDVMAKIRNNTYKIDKSDLDKIKKNFISEMLDEKETVEMIKIINN

SEQ ID NO: 153026 - protein, 148 aa, Unknown
  Bacterial polypetide isolated from the Sargasso Sea
MKYISTRSKEKEYSFGEVFLKGLADDGGLYVPKSIKKNSKEELLKLKNLNYNELSAEIISQFSGDFISREELSSLIKKSYSTFREKEVVKISNVGEIKLLELFHGPTLAFKDIAMQFIGNLYEYYLKKNDKKMNIVVATSGDTGAAAI

SEQ ID NO: 153027 - protein, 455 aa, Unknown
  Bacterial polypetide isolated from the Sargasso Sea
MKYVSTRGEAKEASFEDILASGTASDGGLFVPSVIPKLESTVIDDMKNLSYIEIAEIVISPFIGDFLKKDELQKIISDAYKNFETNDVVQIKDYEFGHVLELFHGPTLAFKDVAMQLLGRFLNAASEKLGKKIVILGATSGDTGSAAIAACQNFENLHSFIFFPDGKISEVQRKQMTTWNKDNVEAVSVTGNFDDCQDFVKNMFADTSENKDILFASINSINWTRILAQTVYFFYLSSRIDKKEINVSIPSGNFGHAYAGWYAKKMGLNLNKINIATNRNNVLDVFFKNNIYRKLNTLESLAPSMDISSASNFERLVFDSLGGNGIETQKLMKQFKKDGFSIANKLYKDLCNVFESHSVADEEILEEIELLYEMTGDIFDPHTAIGIKNIREGGAENYVCFATAHPSKFIDTIKKVIPDFSDTPKRLQKFLDSEEKYETMNYNFSDLKEFIFDKI

SEQ ID NO: 153028 - protein, 164 aa, Unknown
  Bacterial polypetide isolated from the Sargasso Sea
IKRFIAATNLNDTVPRYLKTGEWEPKATVATMSNAMDVSQPNNWPRIEALIERGYIDKACLKGEMVDEEYTQLAMRQLAQQGYTSEPHAAIAYRAVSHDLEDGEIGLFLGTAHPAKFRETVENVLGNPISLPKALADVAGEDSLAVDLPASYDALKQHMMDLLK

SEQ ID NO: 153029 - protein, 438 aa, Unknown
  Bacterial polypetide isolated from the Sargasso Sea
MNYISTRNNQKNFSFKDVFLKGLADDGGLFVPKSIKQFQKGELDNLKNLSYNDLAAEIIYPFIGDFMSKDDLMSMISKSYSNFRSDDVVKISSLGDLKVLELFHGPTLAFKDIAMQLIGNFYQYHLDRDQKKINIIVATSGDTGAAAIDALKGKNNLNVFVLHPNNKISPVQRRLMTIHEENNVFNIAVEGNFDDCQNLVKAMFNDEKFSKSINMSGVNSINWARIIAQSVYYFYAFFKVGNGQPLSFSVPTGNFGDIYAGYLAKKLGLPIDKLIVATNRNDILHRAISGGDYSQKKVEETNTPSMDIQIASNFERLLYDVKDCNSEVTKGVMAEIKNNTYKIDKNDLDKIKKNFVSEMLDENETVKMIKTINDEHQMVVDPHTAVGIGAVRKLGLEKNCVVLSTAHPCKFPKAIEDAISKTENLPESLKYVYDRKEK

SEQ ID NO: 153030 - protein, 456 aa, Unknown
  Bacterial polypetide isolated from the Sargasso Sea
MEYISTRGDNKKFSFSEVFLKGLADDGGLFIPLNIKKFDESKMNSLKKLNYIDLATEIIYLYTGDFLSKKELNEIVKKSYSNFREEDVVKIVELNQLKILELFHGPTLAFKDIAMQLIGNMYEHLLKSNNETINIVVATSGDTGAAAIDAIKGKSNLNIFVLHPNNRISSVQRKIMTTVEEKNVFNIAIDGNFDDCQNIVKQMFSDLEFSKSINMSGVNSINWARIIAQAVYYFYAHFKLEKDNISFSVPTGNFGDVFAGYLAKKMGLPIDKLIVATNENDILHRAITEGDYISKEVRETLSPSMDIQLASNFERLIYYVNNSNSEKTAEIMKKVKKNSYKIEKRDLDIIQKDFLSESCNEKETLGIIKKNYEENGVVLDPHTAIGVGAAQKLSLNDCVVLSTAHPCKFPDATNNAINKHEKLPKELQHVLNKNENFQVLKNSTDEVKKFIKSKIL

SEQ ID NO: 153031 - protein, 435 aa, Unknown
  Bacterial polypetide isolated from the Sargasso Sea
MADDGGLFVPKSIKPFKKEELNNLKNLSYNDLAAEIIYPFIGDFMSKDDLISLISKSYSNFRSDDVVKISDLGDVKVLELFHGPTLAFKDIAMQLIGNFYQYHLGRDQKKINIIVATSGDTGAAAIDALKGKNNLNVFVLHPNNKISPVQRRLMTIHEESNVFNIAVEGNFDDCQNLVKAMFNDEKFSKAINMSGVNSINWARIIAQSVYYFYAYFKIGNGQPLSFSVPTGNFGDIYAGYLAKKLGLPIDKLIVATNKNDILHRAISGGDYSQKKVEETNTPSMDIQIASNFERLLYDVKDCNSEVTKDVMAEIKNNTYKIDKNDLDKIKKNFISEMLDENETVEMIKTINDEHQMVVDPHTAVGIGAVRKLGLEKNCVVLSTAHPCKFPKAIEDAISKTENLPESLKYVNDRKEKFELLSNDIEKVKKYVMNSI

SEQ ID NO: 153032 - protein, 450 aa, Unknown
  Bacterial polypetide isolated from the Sargasso Sea
MKYISTRDDKKEYSAEQVLNFGLAPDGGLFIPNEIPKFSSNQINALKAKNYFEIANFILTPFLSDLFEAPTIKKIIEEAYSKFDKEIVTISNIGDNDLLNLFHGPTLAFKDYAMCLLAKIYEYYLKKLDRKLVVIGATSGDTGSAAIQAFKDIENISIFIFHPHNSTSLFQRKQMTTSGGNNVFNIALNGSFDDCQNLVKKLFRDRDINNKYSFTAVNSINWFRVLPQSIYYAWSCLNHNIDNFVVPSGNFGNIYSAHLLKSMGFPINKLIVATNENNILHRIISNNDLHLYNVVKTNSPSMDITISSNFERLLAEHLGPGATNELFQNIQNNEHNKKLESSIHKSLSEKFLSESATSKEVENQIKITYENYKILLDPHTAVGIVCAEKLNLKKAMCLACAHPVKFQETVQKALGNNVKYDKNIEFLNDEKFAILDNNYKELGDYIEAHA

SEQ ID NO: 153033 - protein, 455 aa, Unknown
  Bacterial polypetide isolated from the Sargasso Sea
MKYISTRSNEKEYSFGEVFLKGLADDGGLYVPKSLKKYSKEELLNLKNLNYNELSVEIISQFSADFISREELSSLIKKSYSKFREKEVVKFSNVEEIKLLELFHGPTLAFKDVAMQFIGNLYEYYLSKNDKKINIVVATSGDTGAAAIDAIKGKSNLNIFVLHPNNKISSVQRKIMTTVEDNNVFNIAIDGNFDDCQNIVKQMFSDLEFSKSINMSGVNSINWARIIAQAVYYFYSYFKLGKETISYSVPTGNFGDVFAGYLAKKMGLPIDKLIVATNENDILHRAISKGDYVSKEVKETLSPSMDIQLASNFERLIYYVNNSDSEKTSEIMKNIKLNSYQIEKNNLDIIQKDFLSESCNEQETLDIIKKNYEENNIILDPHTAVGVGAAKKLSFNNCVVLSTAHPCKFPDATNNAINKSEKLPQELQHVLDKVETYQVLKNNTEDVKNFVKSKL

SEQ ID NO: 153034 - protein, 298 aa, Unknown
  Bacterial polypetide isolated from the Sargasso Sea
MKYVSTRDNSKEYSFEEVFIKGLADDGGLYVPTSLKKFSSDELSEHKNLNYKDLSIEIINLFSSDFISKEDLSQLIKKSYLTFREKEVVKISNLGDLKLLELFHGPTLAFKDVAMQFIGNLYEYYLTKNDKKINIVVATSGDTGAAAIDAIRGKSNLNIFVLHPNNRISPVQRKLMTTVEDENVFNIAIDGNFDDCQNIVKQMFSDLDFSKSINMSGVNSINWARIIAQAVYYFYTYFKLNVDKPISFSVPTGNFGDVFAGYLAKKMGLPIDKLIVATNENDILHRAISKGDLCSKKV

SEQ ID NO: 153035 - protein, 372 aa, Unknown
  Bacterial polypetide isolated from the Sargasso Sea
IDLIKVGDRSVLELFHGPTLAFKDVAMQLLGNFYEYYLNNENEKINIIVATSGDTGAAAIDAIKGKKNLNIFVLHPHNRISPVQRKLMTTGKNENVFNIAVKGNFDDCQNLVKSMFSDKEFSNQINMSGVNSINWARIIAQSVYYFYCYFLAEDENQPINFSVPTGNFGDVYAGYLAKKLGLPINKLIVATNQNDILHRAISKGKYETEHVSETISPSMDIQIASNFERLIYDLNNHDNSQTLDDMKNIKQNGKYTIDDDKLKKINQDFLSARMSEQETLDVIKNIYEKFNMVLDPHTAIGYGAFDKHDLKGNNIVLATAHPCKFPDAILKAINLKSDLPDELKFILDEKENYGIIEYNLKEIKQYILGKIK

SEQ ID NO: 153036 - protein, 437 aa, Unknown
  Bacterial polypetide isolated from the Sargasso Sea
FIKGLADDGGLYVPKSLKKYSKEELLKLKNLNYNQLSTEIISQFSADFIAREELSSLIEKSYSTFREKDVVKISNLGEIKLLELFHGPTLAFKDIAMQFIGNLYEYYLNKNNKKINIVVATSGDTGAAAIDAIKGKSNLNIFVLHPNNRISSVQRKLMTTVEEKNVFNIAIDGNFDDCQNIVKQMFSDLEFSKSINMSGVNSINWARIIAQAVYYFYSYFKLGKENISFSVPTGNFGDVFAGYLAKKMGLPIDKLIVATNENDILHRAISKGDYVSKEVKETLSPSMDIQLASNFERLIYYVNNSDSEKTAEIMKKIKQNSYQIEKSNLDIIQKDFLSESCNKQETLDIIKKNHEENNIILDPHTAVGVGAAKKLSFNDCVVLSTAHPCKFPDATNNAINKNEKLPEELQHVLDKKENFQVLKNNTEDVKNFVKSKV

SEQ ID NO: 153037 - protein, 289 aa, Unknown
  Bacterial polypetide isolated from the Sargasso Sea
MKNRGLIDRYKHFLPVNDSTPIISMGEGNTPLVTSQSLYKDIGCKNLCFKLEGSNPTGSFKDRGMVFAVSKAIEEGKKRIICASTGNTSASAAAYGARYGLETFVFIPDGKIAMGKLSQAMIYGAKIISIKGNFDEALKAVISISEEFNIGLVNSLNPYRIEGQKTGSFEIVDEINDSPDYLFIPVGNAGNITAYWKGFKEYKNHNKIKKLPKMMGFQAAGAAPIVIGKPVKNPETIATAIRIGNPASWENAEKARDESGGTIGMVEDKEILSAYMKLSNEEGIFCEPS

SEQ ID NO: 153038 - protein, 457 aa, Unknown
  Bacterial polypetide isolated from the Sargasso Sea
MEYISTRNNQRNFTFKDVFLKGLADDGGLFVPKSIIPFSKEDLNHLKNLSYNDLAAEIIYPFIGDFMSKNELISIISKSYSNFRSNDVVKISNLGNLKVLELFHGPTLAFKDIAMQLIGNFYQYHLGHDQKKINIIVATSGDTGAAAIDALKGKDNLNVFVLHPNNKISPVQRRLMTIHEEGNVFNIAIEGNFDDCQNLVKAMFNDEKFSKTINMSGVNSINWARIIAQTVYYFYAFFKIGNGQPLSFSVPTGNFGDIYAGYLAKKLGLPIDKLIVATNKNDILHRAISGGDYTQKKVEETNTPSMDIQIASNFERLLYDVKDCNSEVTKDVMSKIKNNNYKIDKNDLDKIKKNFISEMLDENETLEIIKIINDEYQIAVDPHTAVGIGAVRKLGLENNCVVLSTAHPCKFPKAIEDAISKTENLPDSLKYVNDRKEKFEVLSNDIAKVKKYIMNSI

SEQ ID NO: 153039 - protein, 205 aa, Unknown
  Bacterial polypetide isolated from the Sargasso Sea
MEYISTRNNKKNFTFKDVFLKGLADDGGLFVPKSIKPFSKEDLNHLKSLSYNDLAAEIIYPFIGDFMSKDELISTISKSYSNFRSNDVVKISNLGNLKVLELFHGPTLAFKDIAMQLIGNFYQYYLGHDQKKINIIVATSGDTGAAAIDALKGKNNLNVFVLHPNNRISPVQRKLMTTHEDSNVFNIAIDGNFDDCQNLVKAMFN

SEQ ID NO: 153040 - protein, 87 aa, Unknown
  Bacterial polypetide isolated from the Sargasso Sea
MELTTRTLPERKHIALVAHDHCKQMLLNWVRRHQSLLEKHALSATGTTGNLIQRETGLEVNAMLSGPMGGDQQVGAQISEGKIDVLI

SEQ ID NO: 153041 - protein, 83 aa, Unknown
  Bacterial polypetide isolated from the Sargasso Sea
MKTIALVAHDGKKAELLAWVKQHADFFQDKQLVATGTTGRLLNEALNKEVLCLASGPLGGDQQIGALIAEQKIDWLVFFWDPL

SEQ ID NO: 153042 - protein, 168 aa, Unknown
  Bacterial polypetide isolated from the Sargasso Sea
MATGVDETANHDGATGTAINLLQAEALFQESPQLATILRVAGIYGPERGYLYRQFLKDEAVITQGGSRWINMIHRDDVVSALVTALNIPPGIYNTSDDEPLTQRAFFEWLAKELDKTVPPEGEVQKRKRAVTNKRVCNAKLKATDWQLKYPNFREGYGALISEEQGGH

SEQ ID NO: 153043 - protein, 141 aa, Unknown
  Bacterial polypetide isolated from the Sargasso Sea
MKTIALVAHDGKKAELLAWVKQHADFFQDKQLVATGTTGRLLNEALNKEVLCLASGPLGGDQQIGALIAEQKIDWLVFFWDPLSSQPHDPDVKALIRLAVVWNIPVACNKATADFIVTSALVGQDYQRTVPDFSAHNNRLP

SEQ ID NO: 153044 - protein, 141 aa, Unknown
  Bacterial polypetide isolated from the Sargasso Sea
MKTIALVAHDGKKAELLEWVRTHADFFQDKQLVATGTTGRLLNEALNKEVLCLASGPLGGDQQIGALIAEQKIDWLVFFWDPLSSQPHDPDVKALIRLAVVWNIPVACNKATADFIVTSKLVGQDYQRTVPDFSIHNNRLS

SEQ ID NO: 153045 - protein, 120 aa, Unknown
  Bacterial polypetide isolated from the Sargasso Sea
MTIALIAHDGKKAEMVQFLLDNKDYLEHSNLLATGTTGSHIERAKLSVKKLLSGPLGGDAQIAALAAEKQVDMVIFFRDPLDKHPHEPDVQMLMRLCDVHNIPLATNPATARLLLQASGA

SEQ ID NO: 153046 - protein, 248 aa, Unknown
  Bacterial polypetide isolated from the Sargasso Sea
TGAQGATGAQGATGAQGATGTTGAQGATGAQGATGAQGATGTTGAQGATGAQGAQGSTGYGFTNTAQTIDGEKTFTSKTHMQKLSATDVSGINIQFTGKLYNSTGQDVMQIITGATGSFTGEQGPQGEDGFRGTQGKTGAQGEQGDPGLGATGVTGAQGATGTTGATGAQGATGTTGATGAQGATGAQGATGAQGATGAQGATGAQGATGAQGATGAQGATGAQGATGAQGTTGTTGATGAQGATDFK

SEQ ID NO: 153047 - protein, 290 aa, Unknown
  Bacterial polypetide isolated from the Sargasso Sea
MSTTSKLAEHFSPSEIAGLSEQLNFESYEAGTVLMKEGEPACSLLLLISGEIRLTHDQIELRLLQPGEFFGESLFTEEGSRFANATSTSPVTIARLSLNHFYKLVEQAPVAARKFKQFFAAHHLNEVHEKEGLSFVDHRNYLGLVAHNEMKDSLMEFARTHTEKLKRFHLVATGTTGIKLYQETGLMLSRKVASGPLGGDQAIGKMISENNILGLVFFRDPLSAHPHHADIEALGRLCDVYQVPMATNPGGAAALLNYLLVDHPEEPVIPNRVLEKYKNAQKKVVEKSVA

SEQ ID NO: 153048 - protein, 130 aa, Unknown
  Bacterial polypetide isolated from the Sargasso Sea
MSKPRIALIAHDAKKDEIVALAGEFRATLAQCRLVATGTTGGRIADAHGLEVERKLSGPLGGDLQIGAELADGRIDIVVFLRDPMTAQPHDPDITALVRACDVHDVPVATNVATARMLLDDLARNMQDIC

SEQ ID NO: 153049 - protein, 255 aa, Unknown
  Bacterial polypetide isolated from the Sargasso Sea
LGLHAVGRTHDAIVAAGMLQGYRPLVRYPYGRDGGLMKVVAEVVGMGEGRTLDGAIYLTDPVDPSSIFPEALALKRQCVIHGKPFLSTVASARDWIEMERIHAGLAPDPQADRFHDHGNQTLALIAHDACKQAMLDFADRNFDVLSQFRHRVATGTTGQRLNALAWSKGWPQGKPWVQRFNSGPLGGDAQIADLVLERRCHRAVFFEDPHVARQHEADIQLLERAVTTATHDAVCVTVPGVAQRWCDAVRLRAGR

SEQ ID NO: 153050 - protein, 129 aa, Unknown
  Bacterial polypetide isolated from the Sargasso Sea
MTTRIALIAHDHKKDDIVKLAGEYVDTLRRCDIIATGTTGTRISDAHGLTVERMLSGPHGGDLQIGAQLAEGRVDMVIFLRDPMTPQPHEPDINALVRACDVHNIPCATNISTARMILDVLTLRLTQQV

SEQ ID NO: 153051 - protein, 271 aa, Unknown
  Bacterial polypetide isolated from the Sargasso Sea
MKKFWEIMHSNSVTRSTNVICIGGGVLCDVVGFATSTYKRGANLLLIPTTLLAMVDASHGGKNGVNNNYGKNQIGTFYLPNEVLVCVEFLNSLNKEDINTGLIEAIKAGFIGNKKILDLVYGDAPIFHDKDLIQLAIDVKTKITKEDLKESDKRMYLNFGHTIGHLIESDSNYVISHGQAVGIGILIALEISEKEYNLDQSYRKNYMTFLNNSSLKSHYKFQKSRSELITILSNDKKVNNAKINFVLLEEIEKPVLKEVDIEQAMELIINE

SEQ ID NO: 153052 - protein, 319 aa, Unknown
  Bacterial polypetide isolated from the Sargasso Sea
QVAVLVPTTLLAQQHYDNFRDRFANWPVRVRVLSRFRSAKEQTAVMKELAEGKVDIIIGTHKLLGAELTFKDLGLLIVDEEHRFGVRQKEKIKALRADVDILTLTATPIPRTLNMAMSGMRDLSIIATPPAKRLAIKTFVRQQEPAVTREAVLRELKRGGQVYYLHNDVESIEKCAADLAELVPEARIGIAHGQMRERELERVMSDFYHQRFNLLVCTTIIETGIDVPSANTIIMDRADHLGLAQLHQLRGRVGRSHHQAYAYLLTPHPKLMTKDAAKRLEAIASLEDLGAGFALATHDLEIRGAGELLGDDQSGQIES

SEQ ID NO: 153053 - protein, 317 aa, Unknown
  Bacterial polypetide isolated from the Sargasso Sea
GIHVDFIECEFNYNDLLLLPIDRISLIQKYVGSSDTKKLDTLRTKAWSGKVKKARKVAQTTAREILSLYAQRKSVKGHSFKINYKELSEFEDTFQFEETIDQKNAILDTYNDMQSISPMDRLICGDVGFGKTEIALRAAFLCSMNIKQTVIIAPTTLLAQQHLETFRNRFQNFPIRVEGITRFTKKIELDKIVKDFSKDKVDIIIGTHKIFSKQSYLKNIGLIIVDEEHKFGVTHKEKIKQLKKGIDSLSISATPIPRTLQLSLSGLREISLLATPPKERLSIETYIEEFDLSLIKDVVEFELKRDGRVFFVHNEIL

SEQ ID NO: 153054 - protein, 166 aa, Unknown
  Bacterial polypetide isolated from the Sargasso Sea
FCWLEENAYKLFNLNKFILEKAIYNSIMIKLFYVKKDEKELLSNNNSRAMLNFGHTIGHAIESHYYYKKYNHGEAISIGMITEAKISNYLGILSTSELERIIKHFKKCKLKIYDKILIDKILIERLIKDKKNFLNNINFSLIDKIGSSIFYKKLDKRKVYKILQNI

SEQ ID NO: 153055 - protein, 223 aa, Unknown
  Bacterial polypetide isolated from the Sargasso Sea
WEFQINFGKNMLGSFYQPDLVISDTSLLKSLPRREIICGYAEILKHSLIKNKKFFLFLDKNLINILELKKNFIEKAIMESCKIKKQVVEKDEKEMNFRKTLNLGHTFGHAYEATLNYSKKLNHGEAVLYGIFSATKFSNKINLLKGYDYKLIMSHLSKLGFINLNKFFKKKDINKIVGFMMSDKKNDDKKINLITLKKIGAINILGQFNVIKVKRFINSQLVK

SEQ ID NO: 153056 - protein, 218 aa, Unknown
  Bacterial polypetide isolated from the Sargasso Sea
WKNLIGSFYQPKLVISDVSFLKSLPKREVVCGYAEILKHSLILKTNLFAWLNLNSNKILNERNSDFLKIAIYKSCKIKLHFVKKDTKEKNQRMILNFGHTFAHAIEAKNKFSKKINHGEAVLMGMMLAAKLSLLKKITSEKNVNNLMHIYKKNNLNYKLDKFFKKKDFNKIINFMLNDKKNNDEKINLILLKNIGKTTNPGQYKLNLREMKKIFPRII

SEQ ID NO: 153057 - protein, 227 aa, Unknown
  Bacterial polypetide isolated from the Sargasso Sea
TTLLSMVDASIGSKTGINLNSIKNQIGLFSDPLSVIVDTEYLKTLSKREINSGYAEIFKHSIISNSNFKKLVENPNLAFDEDIIASSIELKNKVVKKDKFENDVRKHLNFGHTIGHAVESLFMNKKNKLLHGEAIAIGMICESYISSKIYGLEIDRANEIKNHLNKFFNKVSFSKKDIDEICSLIKYDKKNHLNIPKFVLLKNLGLVETDVNVDLNLIADSFDYYTV

SEQ ID NO: 153058 - protein, 207 aa, Unknown
  Bacterial polypetide isolated from the Sargasso Sea
MKKILFKEMQEEVLLISSESIDNLFDSIPTDTKCCVLADKKVLDMHDSLRKEIENKNFLIYEISNPEEEKSINSYTEIVDFLSSKSFKRNDRIVGLGGGAITDLAGFVSSTYMRGLDYIQIPTSLLAQVDASIGGKTAINYGKIKNFIGTFYNPSKIIICSKFLKTLNEQEFLNGLAEVLKHALITSDVAVDKLIKRHAQISNRETA

SEQ ID NO: 153059 - protein, 169 aa, Unknown
  Bacterial polypetide isolated from the Sargasso Sea
IKPFFNFLNNNYKKIYKLDEDYIIKVVTTCATTKAKIVKDDELEGGIRALLNFGHTFGHAIEASKNYKGILHGEAVSIGMNIASAISADQELISHEDYCEIEDMILRLGLPTQIPKKISSVSIMKHLGHDKKKVSGKNRFILLNNIGSAFISDQLDNKYLEDLSKNFIS

SEQ ID NO: 153060 - protein, 85 aa, Unknown
  Bacterial polypetide isolated from the Sargasso Sea
PMDRLVCGDVGFGKTEVAMRAAFASVCSGTQVCVLVPTTLLAQQHFESFRDRFADWPVTIEVLSRFKSAKETKAIIERANNGRVK

SEQ ID NO: 153061 - protein, 134 aa, Unknown
  Bacterial polypetide isolated from the Sargasso Sea
MEAILVVKRLQVKSNLKNYYVDLNVNFKKKLLSEFKRNDFLIIDKFIFFKYKLDITLKKNKKNILLVTAQEKSKEYSNLSKVIEFLIKNGFKKNSKIIAVGGGITQDIASFVSSIIFRGVEWIFFPTTLLAQAD

SEQ ID NO: 153062 - protein, 122 aa, Unknown
  Bacterial polypetide isolated from the Sargasso Sea
KEVGIRAILNFGHTFGHAIEAHNNFKNITHGAAITLGMIIAAKVSFYEGHLKDYQLDNLINMIQSLGLKTDYKKYKYSSLRKFMGSDKKVQDGKLNLILIDKNFNAFKTSNFDKKNIKKALT

SEQ ID NO: 153063 - protein, 170 aa, Unknown
  Bacterial polypetide isolated from the Sargasso Sea
INDLNFFKWLDKNYMKIFNLENKTIIYAIYKSIKIKSRFVTSDTAEVLTNNNSRAMLNFGHTFGHALENFYKYDKLTHGEAISIGMIVASKLSNKIGTLNSDDLNKIIKHFNKVGLPIFDVNVKNKKIINIVTKDKKNISEKINLILIKKIGQAYYLRNQNINNIFKLLD

SEQ ID NO: 153064 - protein, 108 aa, Unknown
  Bacterial polypetide isolated from the Sargasso Sea
VETLCGYGTWLHGEAVAIGMVAVGELAALRGSWSHDDAERQRRLIDSAGLPTAWPDLSADAVLNSLQGDKKVRDGRLRFVMPTNIGTVEIRDDVSRDEILSCLERLKG

SEQ ID NO: 153065 - protein, 214 aa, Unknown
  Bacterial polypetide isolated from the Sargasso Sea
FLSLKNQIGVFNMPIDVILDSVYLKTLSKEEYLNGYAEIFKHSFLTDSSDLSFNSLIKLDFFNDVDFIINKYSDIKNQIVKFDKYESNSRKVLNLGHTIGHALESYSYLSNSLDKLKHGEAIIIGLITELYISNKLNDFSLDTVDKLKEVSLNYFSKINLTDNDLKSIYDLMIFDKKNDKGSVNFVLLDKAGKPKIDQKVDYDIFIEAFTYYNN

SEQ ID NO: 153066 - protein, 210 aa, Unknown
  Bacterial polypetide isolated from the Sargasso Sea
MEVLPVHDFKIESSIHDYEVRFIADAPSVLKNEIQDGDVIIIDNIVRRLYPDLLNGLDDNTVVIGLDAREDKKSYKGLIPIIQGLINNGFRKNHRLIGIGGGIIQDITAFTASIMYRGVKWIFFPTTLLAQGDSCIGSKTSINFGEYKNQIGGFYPPNKIFINLNFLDTLSSADLQSGLGEMCHYFIVAGEKDFKEYKRHYEDALMDNKI

SEQ ID NO: 153067 - protein, 216 aa, Unknown
  Bacterial polypetide isolated from the Sargasso Sea
MNTSILIKKNYVLTFVKKIAKKNEKVFCVIDSKIKNKFNFKKEKNIKIITIHCGEKIKTINSYKDLAEKLIKSNVNRKSVLIAIGGGSLGDLAGFISSTVLRGLDFFLIPTTLLSQVDSSIGGKNGINTTYGKNMLGTFYQPKEVLIDISVLNTLPNKEIKSGYAEIIKHALINDYNFFCWLEKNIDKLLNLNKSILEKAIYKSIMIKLFYVRKDE

SEQ ID NO: 153068 - protein, 191 aa, Unknown
  Bacterial polypetide isolated from the Sargasso Sea
REFLSGYSEIVKYALLGDRVFFDWLQKNKKKLLMRHQSTLNEAIKRSCLAKSKLVTLDERENGQRALLNLGHTFGHALEAATNFSDRLIHGEAVSIGCVLAFELSVDMGFCSKEDCDEVKAHFRDLGLKTDIEQIEGPLPRADRLLELMLNDKKVKRGNLNLILVEQIGAAFVSENINIPILMTFLQKKFG

SEQ ID NO: 153069 - protein, 231 aa, Unknown
  Bacterial polypetide isolated from the Sargasso Sea
MLSMVDASIGGKNGIDLGVLKNQIGVFKNPNLILIDELYLDSLPLNEFKSGFSEMLKHALISDINYWEKLKYFDFYKKKEILTLIKKSIEIKKDIVLKDPLERNLRKTLNFGHTIGHAIESYFMESSKNEILLHGEAIGIGMIIESYLSHKYCNLNMTEVDDIKKVFNKIFQKVNFNNSIIESIYDLLIYDKKNSYGKINFVLIKRIGEPTIDLEVSKKAIIEGFDFYMEK

SEQ ID NO: 153070 - protein, 174 aa, Unknown
  Bacterial polypetide isolated from the Sargasso Sea
MCLIKNKSFFKFIDNNYSKIIQQNTDCLLRTIFTCASIKAQVVKEDELESGIRAILNFGHTFGHAIEASKNYKGILHGEAISVGMNIASAISADQGYLTHDEYCNIEDMLLNMQMPTMIPKKITSASIMKHIGYDKKKISGKNRFILLDKIGNAFINDKLDNKYLKEISKNFIR

SEQ ID NO: 153071 - protein, 227 aa, Unknown
  Bacterial polypetide isolated from the Sargasso Sea
NTTINAIGNYHHPSKIIIDTDLIKNLPDRELKSGLGEVIKYSVLGNSEITKMLNSLKYDEIIKLNNLKKLIELCLKQKAEFVTGDIREQNKRLLLNLGHTIGHALEVNSIVDGNEQLRHGEGVALGIIAISKVAVEVGYLDTQDLEKISALVNKFGLPTLVSPELFACNRDLLIEKCVVSAFKDKKRTTSGLRLILPTSSSGECKIFPTDSKDLLQKGIEFVIENSQ

SEQ ID NO: 153072 - protein, 138 aa, Unknown
  Bacterial polypetide isolated from the Sargasso Sea
IKLFYVKKDEKESLLNSSSRAMLNFGHTIGHAIESYYNYKKFNHGEAISIGMITEAKISNYLGLLSSNELDRIILHFKKCRLKIFDKILKEKKLIKIITKDKKNFKDNINFSLINKIGSSIFYKKLDNKKVYKILQNI

SEQ ID NO: 153073 - protein, 147 aa, Unknown
  Bacterial polypetide isolated from the Sargasso Sea
ILKSCKIKRSIVEEDEFEKGNRALLNLGHTFGHAIEGYLNYDGTILHGEAVSIGIIMAFKLSLKMGYCSENDYKRVLEHFNVVGLPTSIKLHKCKIFDPLKLWKIMQNDKKMYKNHLNFILPDKIGKCTIRKEIKKSEVLSLLNEEL

SEQ ID NO: 153074 - protein, 108 aa, Unknown
  Bacterial polypetide isolated from the Sargasso Sea
MRLTQTKTTHVLVLCDQVVHGLYQNQIQTLLDDTAVAGRSFYVHVIPNGEPVKHISFKAEIEEKMLSLHFPRGTSALVALGGGVIGDLGGFVAATYARGIPVIQVPTT

SEQ ID NO: 153075 - protein, 161 aa, Unknown
  Bacterial polypetide isolated from the Sargasso Sea
DKNSKLIFNLDYTIISKAIHKSITIKRKFILKDEKEKLKNKYSRAILNYGHTFGHALETYYKYNKKLTHGEAISVGMIIAATLSNKLNYLSLKDLQIIKNHFRSTKLPIKDEKMFCTEIYKIIKKDKKNIDGKTNLILLNAIGSAFLNNRLNIDNIRKLVK

SEQ ID NO: 153076 - protein, 142 aa, Unknown
  Bacterial polypetide isolated from the Sargasso Sea
MAEISAGKASSKYQIHIAGKNLPKSVLNKHIGKKNKVLIISDEGVPKKHIDSIKSIINNKNKHVLILEQGEKSKSFSSFQEIMNKLFELNFDRSDCLIGLGGGVVGDITGFCAATFLRGIDYIQIPTTLLSQVDSSVGGKTA

SEQ ID NO: 153077 - protein, 136 aa, Unknown
  Bacterial polypetide isolated from the Sargasso Sea
KAKIVKDDELEGGIRALLNFGHTFGHAIEASKNYKGILHGEAVSIGMNIASAISADQELISHEDYCEIEDMILRLGLPTQIPKKISSVSIMKHLGHDKKKVSGKNRFILLNNIGSAFISDQLDNKYLEDLSKNFIS

SEQ ID NO: 153078 - protein, 175 aa, Unknown
  Bacterial polypetide isolated from the Sargasso Sea
IKSKKFFLFLDKNLKKILKLEKKIIEKAILESCKIKKQIVEKDEREKNIRKSLNLGHTFGHAYEATLNYSKKLNHGEAVLYGIYSSINLSKRLKTISNKDYQLISSHLAKLHFDDLNKFFNKKDLNKILSFMVTDKKNTSKKINFITLKKIGVVNINNQLNTDYVKKFINLFLLN

SEQ ID NO: 153079 - protein, 136 aa, Unknown
  Bacterial polypetide isolated from the Sargasso Sea
MVKIKINLKYDSYYIFLKHNIFDHIIKFHKKHYTDCKAIIITDHNVKKLYLKDLTNRFYIKNITVNSYSVLNGEKSKSFKTLESLAEKIIKKGINRNDIIYAFGGGVIGDLTGFLSSILLRRDKVHSNTNYSFIPS

SEQ ID NO: 153080 - protein, 218 aa, Unknown
  Bacterial polypetide isolated from the Sargasso Sea
INTKYGKNLLGTFYQPKEVLIDISVLNSLSKKEIKSGYAEIIKHALINDYIFFCWLERNTNKLFNLNKSILEKAIYKSIMIKLYYVKKDEKEALLNSNSRAMLNFGHTIGHAIESHYNYKKFNHGEAISIGMITEAKISNYLGLLSFNELERIIVHFKKNKLKIFDDILKEKKIIKIILKDKKNFNNNINFSLIDKIGSSIFYKKLDKNKVYKILQNI

SEQ ID NO: 153081 - protein, 213 aa, Unknown
  Bacterial polypetide isolated from the Sargasso Sea
GSFYQPKLVVSDISFLKSLPKREILCGYAEIFKHSIISDKIFFYFLDKNIKKILHLKSPFIEKSIYKSCIIKKNVVEKDFKEKNLRKILNFGHTFGHAYESALGYSSKLNHGEAVILGISSAAKFSQQIKMLNKNDYNLISEHIKKINSQLKLKNFFKNSNIKKIASFMSNDKKNSDEKINLILIKKVGKVNIHHKFNLKKIESFFSNYFNVI

SEQ ID NO: 153082 - protein, 26 aa, Unknown
  Bacterial polypetide isolated from the Sargasso Sea
MDEFDKNLRLKLNYGHTFGHAIEKLT

SEQ ID NO: 153083 - protein, 155 aa, Unknown
  Bacterial polypetide isolated from the Sargasso Sea
DFFNDVDFIINKYSNIKNQIVKIDKYESNSRKVLNLGHTIGHALESYSHLSNSLDELKHGEAIIVGLITELYISNRLNDFPLDTVDKLKEVSLKYFRRISLTGSDLKGIYDLMIYDKKNNKGSVNFVLLDKSGKPIIDQKVDNDIFIEAFAYYNQ

SEQ ID NO: 153084 - protein, 116 aa, Unknown
  Bacterial polypetide isolated from the Sargasso Sea
IETHMGYGVWLHGEAVAAGTVMALDMSQRLGWISAQERDRGIRLFQRAGLPVVPPTEMTEADFLEHMAIDKKVIDGRLRLVLLRHIGDAVVTDDYPKEILQATLGADYRALAQLKG

SEQ ID NO: 153085 - protein, 219 aa, Unknown
  Bacterial polypetide isolated from the Sargasso Sea
DLSSEKATDRLICGDVGFGKTEVALRAALVAVQNRKQIAVLVPTTLLAQQHFDTFKNRFANWPVSIASVSRMNSNKDNAIVAEECKSGKLDIVIGTHKLLGPEFIFKNLGLVIIDEEHRFGVKQKESIRALRAEVDILAMTATPIPRTLNMSLSGIRDLSIISTPPENRLPVKTFVKPFREHLVQEAIRREILRGGQVFLIHNDVKTIELSAEIVRKLV

SEQ ID NO: 153086 - protein, 300 aa, Unknown
  Bacterial polypetide isolated from the Sargasso Sea
TLNDLSSEKATDRLICGDVGFGKTEVALRAALVAIQNRKQIAVLVPTTLLAQQHFDTFKNRFANWPVSIASVSRMNSNKENAIAAEGCKSGKLDIVIGTHKLLGPEFIFKNLGLVIIDEEHRFGVKQKESIRALRAEVDILAMTATPIPRTLNMSLSGIRDLSIISTPPDNRLPVKTFVKPFREHLVQEAIRREILRGGQVFLIHNDVKTIELSAEVVRKLVPEARIGIAHGQMRKTQLETIMSDFHHRRSNVLICSTIVENGLDIPNANTIIIQRADKLGLSQLHQLRGRVGRSNRPSV

SEQ ID NO: 153087 - protein, 149 aa, Unknown
  Bacterial polypetide isolated from the Sargasso Sea
KAILESCKIKKQIVEKDEKESDLRKALNLGHTFGHAYEATLNYSKKLNHGEAVLYGILSAAKLSKKLKMLKKNEFQLIISHLSKLNFTDLSRFFSKKHLNKIVNFMLTDKKNFSKSINIITLNKIGRANTKKQFKSFKIKKFISSELLK

SEQ ID NO: 153088 - protein, 270 aa, Unknown
  Bacterial polypetide isolated from the Sargasso Sea
IFQTNNHDLADIGESERKVVVVDKNVYELYKDDLNSYFKNNKISNKLLVVDSSESTKTFDNADNVIKFFEDIKILRRSEPVIAIGGGVLLDLVGFCCGIYRRGIPYVKIPTTLLALVDASVGAKVAVNHLNRRNRIGMYYPASLTLLDKSFIKTQNDRDIINGIAEIFKLAIIKSEELFKLLEQNAEQLIKDKFQYGAIPVRVINLAISDMIDELSPNLWEKKLDRCVDFGHSFSPFVEMKNIPDLQHGEAVALDCIFSSCISFNRGYIS

SEQ ID NO: 153089 - protein, 187 aa, Unknown
  Bacterial polypetide isolated from the Sargasso Sea
DTLPFNEKVSGLGEIIKYAAINDRSFINKLHEWVKDIESFPYTEAIERCCRIKAEIVTKDEKEIDLRRLLNFGHTIGHALESYFGFRKLRHGEAVSFGMMCSAWISLKKGFIDTEEYNLLIEIINQLPLPKLSKVDPDKIMHYINFDKKNENGKLNFVLLDGLGKAKVSQDVSSLEILESLKVLSEC

SEQ ID NO: 153090 - protein, 295 aa, Unknown
  Bacterial polypetide isolated from the Sargasso Sea
LLKQIRDVSSVRGNQLVVAASGDGSAQRVASTLRSENIEVDVSEDEILESLEKDVVVTASLEYGFIAPEIGLAVLTERDITGRRRTHRVARTRNSAQRTFEDLQTGDFVVHHHHGVAKYSGMEHRRLMGSERDYLVLDFKGSDKLYLPSDQVALIRPYVGGELPSLSRMGGIEFAKQKQRVRSAVSEIAQELVLLYQSRIQSPGHSFPSETPWMRELSDSFVFEETPDQMTAIQEVLNDMESSHPMDRLICGDVGFGKTEVAMRAAFSAVADGKQVAVLVPTTLLAQQHHQTFEE

SEQ ID NO: 153091 - protein, 163 aa, Unknown
  Bacterial polypetide isolated from the Sargasso Sea
MTIQSHKGPYDVYFQEDALRELNNQPADSRHFIIDQTVADLYSDALDNVMKSHSVLTLEATEETKTLDKFTGYVEHLVSKGIRRNHTLVAIGGGIIQDTTCFLAATLLRGVRWTLYPTTLLSQADSCIGSKSSINVGRTKNIVGTFTPPNKVVVTTRFLDTWQ

SEQ ID NO: 153092 - protein, 162 aa, Unknown
  Bacterial polypetide isolated from the Sargasso Sea
LENNYNKILSLNKSAIEYAIYKSIRIKSKYVTEDRNELLINNKSRAILNFGHTFGHALESIYAYSKKINHGEAISIGMTVACKISNQLNFLDQNDLKKIIKHFKNVGLPTHDKQIKNKRIISIIQKDKKNKNGKINLILLTKIGSSFYLQNVNPTKILKILN

SEQ ID NO: 153093 - protein, 152 aa, Unknown
  Bacterial polypetide isolated from the Sargasso Sea
MKAILKSCKIKRSIVEEDEFEKGNRALLNLGHTFGHAIEGYLNYDGSILHGEAVSIGLIMAFKLSLKMGYCSKNDYERVLEHFNVVGLPTSMKLHLDKIFDPLKLWKIMQNDKKVHKNHLNFILPDRIGKCRIRKEIKKSEVLSLLNEELKT

SEQ ID NO: 153094 - protein, 179 aa, Unknown
  Bacterial polypetide isolated from the Sargasso Sea
EFKSGIAEIIKYGLIYNKKIFNIFDKQHQQILKRNHRVIEELIHESVKTKAKIVTEDERELGIRAILNFGHTYGHAIEAINNYKNILHGEAVAMGMRMASKMSMLEGHLNEKAYKKIINVFEALNFPKNTSNNYSDLKKFILSDKKVKGGNINLILLKGIGLSFQTQKFNFENFKKSFS

SEQ ID NO: 153095 - protein, 184 aa, Unknown
  Bacterial polypetide isolated from the Sargasso Sea
ILKHSLIHNRKFFFWLTSNAKKMIALKNKKLLNLAIIKSCRIKSEIVNKDEKEKNLRMILNFGHTFGHGFEAVKKFSNKLTHGEAVLLGMIIACKLSFEKKLLPKKDLILIEKHYKDLGLPMNIKNFLKKNEVNKLLNFISKDKKNFNENINLILCRKIGKTSKPNDYSFSKIFLKKFLFSLYN

SEQ ID NO: 153096 - protein, 163 aa, Unknown
  Bacterial polypetide isolated from the Sargasso Sea
LEKNAKKLLDLDQSILEKAVYKSILIKLFYVKKDEKEFLLDNNSRAMLNFGHTIGHAIESYYNYKKFNHGEAISIGMITEAKMSNYLDLLSSNELERIISHFKKCKLKVNDIILKDKLLIKKIIKDKKNFQKNIVFSLIDKIGSSIFYKKLDKNKVYKILQNI

SEQ ID NO: 153097 - protein, 144 aa, Unknown
  Bacterial polypetide isolated from the Sargasso Sea
MKPIKLKIETKTQKYPIIIGSNLITNFSKIIKNNSLIFNQCLLVVDKNVPKKFITKIKNSLKKNKIYICFFNASEANKSFGIINKILEILLNKNFSRDDCLISIGGGITGDVSGFASSIFKRGMKFINIPTTLLSQVDSSIGGK

SEQ ID NO: 153098 - protein, 117 aa, Unknown
  Bacterial polypetide isolated from the Sargasso Sea
GHTFGHALETIGNNKLYTHGEAVALGMLAATKLSESISDLDPKVFDRVHSTIKNTGIKVKLKKKIFPKKLIKLMQSDKKKNNSQLKFILLEKIGKAKIKSVSNEVTIENAIKNSLFY

SEQ ID NO: 153099 - protein, 165 aa, Unknown
  Bacterial polypetide isolated from the Sargasso Sea
NNYSKILNLKSPFIEKAISESCKIKKNIVEKDEKEKNLRKILNLGHTFAHAYEAKLSYSKKLNHGEAVILGIISSAKFSFENGILKKRDYEEIVKHITNLKIPLNLNNYFKKKDINSIIKYMKLDKKNNSSNINLILIKKIGHIILNSTFNQSKIRKYFNKELIN

SEQ ID NO: 153100 - protein, 110 aa, Unknown
  Bacterial polypetide isolated from the Sargasso Sea
HVVETLCGYGTWLHGEAVAIGMVAVGQLAVNRGSWTADEAGRQKQLIQRCGLPTAWPDLDPDAVLRTLQGDKKVKDGRLRFVLPTAIGRVEIRDDISRDEILHCLDQLRG

SEQ ID NO: 153101 - protein, 174 aa, Unknown
  Bacterial polypetide isolated from the Sargasso Sea
MISVNLGNRSYPIIVKNGVINSLSSYLNNSGEKWILISQDSIMQYYGNKLYDHLLGHGFKITKVSIKDGESSKDLAIYTDIISTMLEKNFDRSSVVLSLGGGVVGDIAGFVSATYMRGVRYHQIPTTLLAMVDSSIGGKTGLNFSKTKNIIGSIYQPSSVIIDPEILMTLPREE

SEQ ID NO: 153102 - protein, 134 aa, Unknown
  Bacterial polypetide isolated from the Sargasso Sea
IKTKAKIVTKDERESGIRAILNFGHTFGHAIEAYKKYKNITHGAAIILGMIIASKLSLYEGYIKDDQLKKVLDIIDSLELESDYSKYNYAKLKPFMAKDKKVSNGKLNLVMIDKNFNGFLTSKYNLKNIKKILG

SEQ ID NO: 153103 - protein, 160 aa, Unknown
  Bacterial polypetide isolated from the Sargasso Sea
GELVKYHFLGGGQLDSLPLDERVAACVRIKAEVVASDEREGGGRALLNYGHTLAHALEIEGSFDLRHGEAVAIGIEYAAMLAHEMGRISDASLEEHRRVLHAYGLPRGLPAGSNPDRIVKLFGRDKKAKNGFTFVLDGPEGLEVVEGIPENLLRKILERM

SEQ ID NO: 153104 - protein, 286 aa, Unknown
  Bacterial polypetide isolated from the Sargasso Sea
KTSKAEPCIESGSWRKDFLSMFPYELTNAQSRVKSEINKDLIKSEPMMRLVQGDVGSGKTAVAVLAATKALDSNFQAAFMAPTTLLAQQHFENIKNFFPNHIDEIELLTSGLTKSVRKKTLEKIKSGKIKFIVGTHAIFQADVVYCNLALAIIDEQHRFGVNQRLALLKKTENQNIHPHQLTLTATPIPRTLSMSIYANMDVSVIDEMPPGRQPIITSMLSMKSKENLISRTSEAISKDSLIYWICPLVEESETLDLSSVTQTHEILCDEFGVDKVGLVHGKLSKD

SEQ ID NO: 153105 - protein, 287 aa, Unknown
  Bacterial polypetide isolated from the Sargasso Sea
SFELTQDQQLAIEAVLNDLKSDKATDRLVCGDVGFGKTEVAMRAAFVAVKSGKQVVILVPTTLLAQQHYDTLKDRFAQWPFIIELVSRLRSKSEMDKIALGCASGKVDIVVGTHKLFGEEFKFKDLGLVVIDEEHRFGVRQKELMRAFRAQADVLTLTATPIPRTLNMSLGGIRDLSIIATPPAKRLSIKTFVQEKRSDLIKEAINRELMRGGQVFFVHNEVKTIELIAQTLSEQVTEARIGVGHGQMPKKQLEQVMGDFYQRKLNVLVCTTIIENGIDIPNANTII

SEQ ID NO: 153106 - protein, 142 aa, Unknown
  Bacterial polypetide isolated from the Sargasso Sea
MKKIIINNQNLNSKIFIEKNSIKKYLKLELKKNNKIFIIIDKKVYSSCKFLFKKRNNFFIIKIASNEKIKSFNYYKKINNYLLKNNINRSSTLVAIGGGTIGDLCGFIASTILRGVRFVSIPTTLLSQVDSSIGGKNGINTS

SEQ ID NO: 153107 - protein, 261 aa, Unknown
  Bacterial polypetide isolated from the Sargasso Sea
TTAPLDQGMLARNENLAVITESQLFGKRVTQRRMRRKASENVELILKNLAELKVNDAVVHFEHGVGRYRGLETITTDDQATEFLVLEYAKATKLFIPVTSLHLISRYSGGEQKSVILDTLGNESWRKSKKKAAEKIHDVATELLEVYAKREARSGFKYKLDQAEYSKFSSAFTFEETPDQANAIESVITDMQSDRPMDRLICGDVGFGKTEVAMRAAFLAVKNSKQVVILVPTTLLAQQHYESFRDRFSGWPIIVEQVSRF

SEQ ID NO: 153108 - protein, 223 aa, Unknown
  Bacterial polypetide isolated from the Sargasso Sea
VNSPQGKNLIGTFYQPDFVVTDVSTLEKLPNREMVCGYGEILKHSFILDKSFFNWLDNNGRKIIIKKDKNIIKKAIVHSCKIKSKIVEKDEKEKNLRKVLNFGHTFAHGFEAAQNFSKKLNHGEAVLLGMAIASKFSYEKKILSYIELTKIINHYRYLNLPLSLGKIFKKKEINKIIYFMQKDKKNLNEKINLILIKKIGKINKPIGNAYSSNDIKNFLYSQI

SEQ ID NO: 153109 - protein, 227 aa, Unknown
  Bacterial polypetide isolated from the Sargasso Sea
MLNGRLHKAGGDDGHGCGWKFKGAFHQPWYDCILENWGISKRASVNKELIDELVSKGTPRNQIFMSGLSCGGIDTLRHKGLYPEDFNATIAFMPNCWDRRPDTPLRKMQIDELKSFERIDALVFHSPVDGEGDWRSNSIWMKKDLGNIPGILWVDTPGHTGKDIVINGKKCGIKDKMKGGWEEAWPEGKEKLTSEKKFIKVDKKLYKEMKKKGAGHYLVSYSCFNYY

SEQ ID NO: 153110 - protein, 753 aa, Unknown
  Bacterial polypetide isolated from the Sargasso Sea
MHPNDLFLQSEKEIQKIKDRCSVLIQPEKLPDSDKSIRLNFNTEAINLRMAGKNLSDREKLLQYTKENSMEKVLISAPTKNKGSMINDFLKSEGIRVNKIEEWGEFLNNGKGIYITPKILSNGFSINDKNTAIIGETDLFGQRSKRHVGTRKRQNPEAIIENLKDLRIGTLVVHRDYGIGKYDGLTKLTVDEVESEYICINYARGDLLQLPITQMEKISRYIGDGNDESLLSYLGSDQWKKICSKAKIKAQDVAAELLELYAKRNLTIGKNQSINQHEYQQFCSGFHYILTKDQALAISQVLDDMSSSKKMDRLVCGDVGFGKTEVALRAGFCSVMNGNQVVIMVPTTLLAQQHYETFQERFSDWPVNIELLSRTQTLKKREKIIGTIRSGETDIIIGTHAVLSEKMAYPNIGLVIVDEEHRFGVRHKEQLKKMKHSVDYLAMTATPIPRTLNMAIGELKDISMISTPPESRLAVRTYINRWEDALIKEACQREINRGGQILFVHNKIEDIEKIVDRLKAFLPGISVEIAHGKMREKRLEEIMMKYYNNEFSLLVATTIIESGLDIPNANTIIINNADRFGLAQLHQLRGRVGRSERQSYAYLLTPPKQQLSADGIKRLEAIEAIEDLGVGFILATHDLEIRGAGEILGDEQSGQIQKIGFSLYKDLLEEAINTYRKDDKEEQSSFMTDINLGIPNLITEDYMPDVHLRLMFYKRISAAKDGAQITTIKKELKDRFGNLPEFTLNLLQITKLK

SEQ ID NO: 153111 - protein, 1164 aa, Unknown
  Bacterial polypetide isolated from the Sargasso Sea
MTHISALTPPVVKNGTQMQTLSCITGVGQVVTLASLIRQHPGTTLIVTSDTPTALSLELELNYLLANTTIKVRLFPDRETLPYDSFSPHQDLISQRLETLSQISHAEHSVVIVPVTTLMMRLPPKSYLSSNVFVLKKGDKYQLHDVRQQLTDTGYHLVEQVYEHGEFAIRGSILDIFPTGVNMPLRIELFDDEVETIRHFDPETQRSSTPVDAVRLLPAKEFPTDSSAIEGFRQRYRRRFEVIVKEPESVYQLVSRNLMPAGIENYLPLFFDEVATLFDYLPKDTQLVTLGDIEKSARAHLHEVETRYEDRRVDPLRPLLAPKELYLLIEELFAAFKPLPRYQFVAPNPDTNGAAAQIDARALPEVSANHKLKQPLIALQDYAEQAPRMLFSAESEGRREALLELLGKIQLKPTVFSHFDEFIKTDTKLGLIVSPLSRGCVLGLGAQTAVSIICETELFGQRISQQRRREKQRQISNDTLIKNLAELKVGQPIVHLEHGVALYQGLVTLDTGGIVAEYLQLEYSGGDKLYVPVSNLHLISRYSVGTDGETHLNKLGNDTWAKAKNKAIEKIRDVAAELLDVYARRQARPGESCEINDEEYAQFAQGFPFEETVDQESAIHAVLADMQSPTAMDRLVCGDVGFGKTEVAMRAAFVAVNAGKQVVVLVPTTLLAQQHYENFKDRFADWPVVIEVMSRFRTAKEQTQVLKQLEEGKVDIVIGTHKLLQSEAKFENLGLLIIDEEHRFGVRQKEKIKALRANVDILTLTATPIPRTLNMAMSGMRDLSIIATPPAKRLAVKTFVRESDPATVREAILREILRGGQVYYLHNNVETIEKCAQDISTLLPEARVVVAHGQMRERDLERVMSDFYHQRFNVLVCTTIIETGIDVPSANTIIIERADTFGLAQLHQLRGRVGRSHHQAYAYLMTPHPKRMTSDARKRLEAIDALEDLGAGFMLATQDLEIRGAGELLGDEQSGHISKIGFSLYMEMLESAVKALKQGKEPSLAQMLNQQCEMELRIPALLPEDYVGDVNIRLSLYKRIASCDSEEALDELKVELIDRFGLLPEATKNLMEMTLYKHQATRLGATKIEVHAKGGSIEFSQDHNIDPGFIIGLLQSQPQIYRMDGPNKLKFMLSAETAKERLALVKLLLEQLSQHQSQHRLGDK

SEQ ID NO: 153112 - protein, 282 aa, Unknown
  Bacterial polypetide isolated from the Sargasso Sea
MVNEETKNITTVDKIWEIMHSNSVTRSTNVICIGGGVLCDVVGFATSTYKRGANLLLIPTTLLAMVDASHGGKNGVNNNYGKNQIGTFYLPNEVLVCVEFLNSLNKEEINTGLIEVIKAGFIGNNKILELVYGDDSVYSDKSLLQLAIDVKTKITKEDLKESNTRMYLNFGHTIGHLIESDSNYQISHGQAVGIGILIALEISEKEYNLDQSYRKNYMTFLNNSGLKTYYKFRKTRSELITILSNDKKVNNEKINFVLLEEIEKPILKEIDIEQAMELIINE

SEQ ID NO: 153113 - protein, 168 aa, Unknown
  Bacterial polypetide isolated from the Sargasso Sea
WLEKNGKNILNKDKKDLEYAIYICCKSKADIVKQDEKEKAQRALLNLGHTFGHSFERIANFKRFSHGEAIALGIILAFKFSFELKLCKVEDFNRVYNHFIDVKLPSEINHLFKMKIKANDVIESMKLDKKTIDRAIKLILVRGIGSAFISNRVNEKKLSLFLKNNGFD

SEQ ID NO: 153114 - protein, 202 aa, Unknown
  Bacterial polypetide isolated from the Sargasso Sea
GAFYNPSLVIVSTYFLNTLSDEEFKSGLGEVVKYALIGNKKLRSIIERNSQQIISREESVLKSIIEESIKTKSKIVTKDEKENGIRAILNFGHTFGHAIEAYKNYKGITHGAAITLGMVIASRISFYEGYIKNYQLDNVINLISSIGLRTDYSKYNYIQLKKYIKSDKKIKNGKLNLVLIDKNFNAFTTSKFNNKNILRAFN

SEQ ID NO: 153115 - protein, 148 aa, Unknown
  Bacterial polypetide isolated from the Sargasso Sea
MEKAIYKSIMIKLFYVRKDEKESLLNSHSRAMLNFGHTIGHAIENHYNYKKYNHGEAISIGMITEAKISNYLGLLSATELDRIIIHFKKYKFKIFDRILKEKKLIKIISKDKKNFKDNINFSLINKIGSSIFYEKLNKDKVYKILQKI

SEQ ID NO: 153116 - protein, 201 aa, Unknown
  Bacterial polypetide isolated from the Sargasso Sea
IFFKSLPKREFIFVDFGEILKYSLIKDQKFFNFIKKNSKQILKGNDLNILKYLVLRSSRNKVHFVVADEKESNKRMILNFGHTFAHGIESSNNFSKKINHGEAVLIGMLLATKLSFYKNICSLKTMQEIEKIYILNKLPSKLNKYLNNKQINNISKLMVNDKKNDDEKISLILLKRIGKTTTPGKIKMSVDKVGNFLKKIS

SEQ ID NO: 153117 - protein, 117 aa, Unknown
  Bacterial polypetide isolated from the Sargasso Sea
MILNFGHTIGHAIESFTKYEELLHGEAIFYGMKCALYLSNKFGDLNNDDYKKSCQLLSKFDLPRLNIDNKDIFINFVKNDKKFRGENIRFILLDEIGKSRISEDISFDQIEESLSVL

SEQ ID NO: 153118 - protein, 186 aa, Unknown
  Bacterial polypetide isolated from the Sargasso Sea
KTLSDKEYKSGLGEIVKYSLIGNKKLKKIIEDRSQLIVDKDESTLKVLIEESIKTKSKIVTKDEKESGIRAILNFGHTFGHAIEAYNNYKNITHGAAITLGMVIASKLSFYEGHIKDYQLDNIINMIESLGLNTDHSNYSYSKLKKYMASDKKVKDGKLNLILIDKKFNAFKTSKYNIKNITSALN

SEQ ID NO: 153119 - protein, 559 aa, Unknown
  Bacterial polypetide isolated from the Sargasso Sea
EEFSFELTQDQQLAIEAVLNDLQSDKAMDRLVCGDVGFGKTEVAMRAALVAVKAGKQVVILVPTTLLAQQHYDTLKDRFAQWPFIIELVSRLRSKSEIDEVALGCASGKVDIVVGTHKLFGEEFKFKDLGLVVIDEEHRFGVRQKELMRAFRAQADVLTLTATPIPRTLNMSLGGIRDLSIIATPPAKRLSIKTFVQEKRSHLIKEAINRELMRGGQVFFVHNEVKTIELIAQTLSEQVTEARIGVGHGQMPKKQLEQVMGDFYQRKLNVLVCTTIIENGIDIPNANTIIIDRADKFGLAQLHQLRGRVGRSSRQAYAYLLTPEPEALTPDATKRLDAIEAAGELGIGFTLATQDMEIRGAGQLLGEEQSGQMESIGFSLYMQMLNKAVEDINQGKIPDLDNPLNEVAKEINLHCSAIIPDTYLPDVHHRLMFYKRLANAKTENELDALQIEMIDRFGILPEALKRLFVISALKLLCESHGMQTVEIGQEKGKLVFADTTTIDPLAIVQLVQEDSNTYQFEGTSTLVTNHQLDSFEDRTRFLEELINKLTNSSSEAVNA

SEQ ID NO: 153120 - protein, 70 aa, Unknown
  Bacterial polypetide isolated from the Sargasso Sea
MSTLTVELGERSYPIQIEAGLLSQPGLFSAYIKGPLAVIVTNETVAPLYLETAKAACGNVQVETIILPDG

SEQ ID NO: 153121 - protein, 155 aa, Unknown
  Bacterial polypetide isolated from the Sargasso Sea
NTNRILALEPEIMTHLIERCCQIKAEIVSEDEREGSIRAILNYGHTFGHAIESLTDYSVYTHGEAVSIGMVMAASMAERMGMLSQDDKTDITRLLESVNLPTKKPDLNSNDFLESMKRDKKVQDGEIRLILLESIGRAIISNNYPNEILMETILE

SEQ ID NO: 153122 - protein, 805 aa, Unknown
  Bacterial polypetide isolated from the Sargasso Sea
MSFGLVNNTNAQDGAFAIEEITVTARKKEESIFETPLAITAVDAAEIKAAGFKNILDVQKTAPGLFIESMNNENGRVVVMPRFRGVTFDATSPLQRTSSVFVDGLIVTSGLHSLPITQVERVEIIKGPQSALFGRNTYSGAINIVTAKPGDEFKGSIEYDYANKSGASATGFFEGPIGDMVGARLNWSYTDKDGHYMNDNALLEAPQRLGDEQSLALGALIDINPSDDLNITLRASRYEDLDGPGAYAVAGGLDEHNFCAQPTSNVTGWTCFTENGLESIYQGNLQIPTSLGASTSLYNWNRAMSHLQPGGSRSGYYPIGDHTFTDLKFNGYGLIRDGERMSVTISYDISDSMNLNVAYGSNDDDYLLFHDFDADAGFGFHTAAARVTEDETFEVRLSGTNDQFDWSIGATQVDLMTKTHGGFFDGRSPFFSYWFADIGNPDGATSILTADTFGVFASIDYRLNDSMTLVAEIRRQEDEVADNKINASAGKNISPATFKSTLPRLVLKNDLSDNSMIYVSYSEGTLPGGFNPEVAAKLNTPEQIATFNSDVPGIGETYGEEELTNMEFGWKKTSDDGRFAMTLAMFSMERKDQVYSGFGVIPADLNCDPTGNVPTCTVAFSGNGTSSDIEGLEFDFTWAASENTTVQGGVGYTRAKIASFPAGADCGDYDDVFGNSNCVGQSAARYPEWQGSLVVTNEREMSFGNLYMRGEMYYTGNYYDEVTNMSVIPNATEVNLRAGVRMDNISIEAYVANLTDEDAPLGGNNIADTSNFVRTNTFSYNFAVESTHIHLRDKREYGLRVTYNF

SEQ ID NO: 153123 - protein, 327 aa, Unknown
  Bacterial polypetide isolated from the Sargasso Sea
MALVSENELFGHKVTQRRKRKHSQQISGDTIIRNLAELSVGQPVVHLQHGIGRYQGLQVLDAAGISAEFVTIEYAGGSKLYVPVSSLHLISRYTGSDQDNAPLHKLGNDSWEKARRKAAEKVRDVAAELLDVYAQRAAQTGYGFKIEAEQYEIFADGFPYQETVDQLDAIAAVLADMQAERAMDRLVCGDVGFGKTEVAMRAAFVAVNDNKQVAVLVPTTLLAQQHFENFRDRFANWPVKVAVLSRFISAKEQKAILEEAEQGKVDILIGTHKLLQDDIRFKDLGLLIVDEEHRFGVRQKDKIKALRANIDILTLTATPIPRTLNMS

SEQ ID NO: 153124 - protein, 127 aa, Unknown
  Bacterial polypetide isolated from the Sargasso Sea
MRTLPVELPGKEYKIEIGAGNLRDSLLSAIRQFDPERVVNVTNYTLEQFYPAQIKKLLEPEGYQNDTCILPDGEAYKNLETLQRIYDFLMEKKANRGTVMVAFGGGVIGDMAGFAAATFMRGIKMIQ

SEQ ID NO: 153125 - protein, 1160 aa, Unknown
  Bacterial polypetide isolated from the Sargasso Sea
MTQISALTPPVVKNGTQMQTLSCLAGVGQAVTLASLVRQHKGTTLIVTSDTPTALSIELELNYLLAKSAIKVRLFPDRETLPYDSFSPHQDLISQRLETLSQITQAEHRVVIVPVTTLMMRLPPKSYLSSNVFVLKKGDKYQLHDVRQQLTDTGYHLVEQVYEHGEFAIRGSILDIFPTGVNMPLRIELFDDEVETIRHFDPETQRSSTPVDAVRLLPAKEFPTDSSAIEGFRQRYRRRFEVVVKEPESVYQLVSRNLMPAGIENYLPLFFDEVATLFDYLPKDTQLVTLGDIEKSARAHLQEVETRYEDRRVDPLRPLLAPKELYLLIEELFAAFKPLPRYQFIAPQPDAAAGAVQIDASVLPEVSANHKLKQPLIALQEYAEHAPRMLFSAESEGRREALLELLSKIQLKPALFGHFDEFIQSDASLGLIVSPLSRGCLLGLGKQTAVSIICETELFGHRISQQRRREKQRQISNDTLIKNLAELKVGQPIVHLEHGVALYQGLVTLDTGGLVAEYLQLEYSGGDKLYVPVSNLHMISRYSVGADGEAHLNKLGNDTWAKAKNKAIEKIRDVAAELLDVYARRQARPGESCDINDEEYAQFAQGFPFEETVDQESAIHAVLADMQSPVAMDRLVCGDVGFGKTEVAMRAAFVAVNAGKQVVVLVPTTLLAQQHYENFKDRFADWPVVIEVMSRFRTAKEQTQVLKQLEEGKVDIVIGTHKLLQSEAKFENLGLLIIDEEHRFGVRQKEKIKALRANVDILTLTATPIPRTLNMAMSGMRDLSIIATPPAKRLAVKTFVRESDPATVREAILREILRGGQVYYLHNNVETIEKCAQDISTLLPEARVVVAHGQMRERDLERVMSDFYHQRFNVLVCTTIIETGIDVPSANTIIIERADTFGLAQLHQLRGRVGRSHHQAYAYLMTPHPKRMTSDARKRLEAIDALEDLGAGFMLATQDLEIRGAGELLGDEQSGHISKIGFSLYMEMLESAVKALKQGKEPSLAQMLNQQCEMELRIPALLPEDYVGDVNIRLSLYKRIASCDSEEALDELKVELIDRFGLLPDATKNLMEMTLYKHQATRLGATKIEVHAKGGSIEFSDDHVIDPGFIIGLLQSQPQIYRMDGPNKLKFILNAETAKDRLALVKLLLEQLSQHRLGDK

SEQ ID NO: 153126 - protein, 354 aa, Unknown
  Bacterial polypetide isolated from the Sargasso Sea
MKKIIFKNQEQEVEILYQKEISKISENFPEHGKMFFVCDERVLEKNPQMNKLLDENVYLVKSPEKEKDLQSTIRILKFLKDNGCNRNDHLIAIGGGATTDLGGFASSIYMRGINLIIIPTSLLGQVDASVGGKTGVNFESYKNLVGSFFNPKKIIVCTNFLESLDEQEYLNGLAEILKHAIITSDNDVDTLLKNIEKITSRDNDFLEEQTKRSIEIKTKIVTEDFLEAEQRKFLNFGHTFAHGIESINQNNPILHGHAVIIGMKMALEFSYQEKFLDEEGFTKSKNLLNSFKYNLSDIELDADKILSAMELDKKNDGNGINLVLLKKIGVPFLSKSNEPNKILKFLINFIDNFE

SEQ ID NO: 153127 - protein, 78 aa, Unknown
  Bacterial polypetide isolated from the Sargasso Sea
NFGHTFGHVIEQTNSYKTNINHGEAVAMGMIMASKLSSAMNLISINELNKIINHFKSLNLPTEIPRSLKQKSFNKKIY

SEQ ID NO: 153128 - protein, 184 aa, Unknown
  Bacterial polypetide isolated from the Sargasso Sea
MKKILFEATQEEVLLISSESIDNLFDSIPTDTKCCVLADKKVLDTHDSLRKQIENKNFIIYEISNPEEEKSINSYTEIINFLSSKSFKRNDRIVGLGGGAITDLAGFVSSTYMRGLDYIQIPTSLLAQVDASIGGKTAINYGKIKNFIGTFYNPSKIIICSKFLKTLNEQEFLNGLAEVLKHAL

SEQ ID NO: 153129 - protein, 119 aa, Unknown
  Bacterial polypetide isolated from the Sargasso Sea
LGIRAILNFGHTYGHAIEAINNYKNVLHGEAVAMGMRMASKMSMLEGHLNEKTYNRIINVFDALNFPKDTSSNYSDLKKFILSDKKVKGGNISLVLLKGIGLSFQTQKFNFENFKKSFT

SEQ ID NO: 153130 - protein, 144 aa, Unknown
  Bacterial polypetide isolated from the Sargasso Sea
MNKKIIVNTKEKKYTIEINNNFILNRLKKISNNKSKLFIIIDTSVNYLLDNLNLSKNVCIIKIKGSEKIKDFKSYIYITKKILNNKVNRNSTIIAIGGGTIGDLSGFIASTILRGINYILVPTTLLSQVDSSIGGKNGINSIYG

SEQ ID NO: 153131 - protein, 145 aa, Unknown
  Bacterial polypetide isolated from the Sargasso Sea
AIFRSCENKAQVVADDETEQGNRALLNLGHTFGHAIETATGYSQWLHGEAVAVGMLMAIRMSAELGWVPAELESKVATLLSAWGLPVAVPEGMTPEQFMDLMALDKKVHNGQLRLVLLRELGKAVVTADYDGAALQKTLEAFCGA

SEQ ID NO: 153132 - protein, 152 aa, Unknown
  Bacterial polypetide isolated from the Sargasso Sea
MSNTKIIVSTKSKSYPIYFGNNILSKVGSLLNKNLPNVKKVTIIADKKVPTILLRKLKKNLKKYKVKIYFFNVSEKIKNFNTAHKLIENLLKDNLNRSDCIIAFGGGVIGDLVGFVSSLTKRGIKFVNIPTTLLSQVDASIGGKTAVNSITR

SEQ ID NO: 153133 - protein, 165 aa, Unknown
  Bacterial polypetide isolated from the Sargasso Sea
MNRIFVKNKNTNYTIIIGKGSLGKLKVQVNKLCPKTKKIGLILDKNIPNNFKIKIKKQLRKYSVYVYEFIPNEKLKSFKKANDLLERLIKNNLSRNDTIITVGGGIIGDFGSFVASIYKRGINLINIPSTLLAQVDSSIGGKTAVNSEGGKNLIGTFYQPKIGFE

SEQ ID NO: 153134 - protein, 177 aa, Unknown
  Bacterial polypetide isolated from the Sargasso Sea
MKNQEIKFNSLKHNYSVFIGKNVIKLLPKKIKNICPKARKIALIVDTKIPKKLKKTIKDKLSNYEIVNLPFSASEKNKSFKKVDFYLNKILSKNFNRSDIIIGVGGGITGDVAGFVASIFKRGINFINVPTTLLSQVDSAIGGKTGVNSQKGKNLIGSFYQPRLVISDTSFLNSLPN

SEQ ID NO: 153135 - protein, 157 aa, Unknown
  Bacterial polypetide isolated from the Sargasso Sea
GLNSELLCETVHICCKAKAEVVSADEKESGKRALLNLGHTFGHAIETATGYGKLLHGEAVAIGMVMAADLSRRLGMLDSSTATEIRNALENEFGFSVIPPASITANDYIGLMRSDKKAEQGKVKFILLEAIGSAVITQDVSEQALKETLTCGNRLCM

SEQ ID NO: 153136 - protein, 254 aa, Unknown
  Bacterial polypetide isolated from the Sargasso Sea
FSGFVGSILKRGVNFISIPTTLLSQVDAAVGGKTGVNSKYGKNLIGAFSQPKLVISDTSFLKSLSRKEMVCGYAEILKHAVIKDKKFFDWLKLNSKYIFSHHPNKLIYAIKKSCNIKLFFVNKDVNEKNLRMILNFGHTFAHAIEVKNNYSKNITHGEAVLAGMILATKLSVIKKVSNINTLRNLLEIYTSNNLEYSFNKYKKIKEINKLIPYLKNDKKNNDEKINFILLNKIGKTTMPNKYKISIKELKRHIR

SEQ ID NO: 153137 - protein, 201 aa, Unknown
  Bacterial polypetide isolated from the Sargasso Sea
MTKISKIKVNLGNRSYPIYIGNDLFSSFDKLIEGFSEYSKVVIVSDNNVKKSINNFFFLLKKKSNKNIVTFSLPPGEKSKSFKYLELLCEKILEKRIDRKTLLVCVGGGVIGDLVGLTASILLRGIDFVQMPTTLLSQVDSSVGGKTAINSKLGKNLIGTFYQPKAVLISLNTLQSLPYRQIISGYAEILKYSLIKDNTFF

SEQ ID NO: 153138 - protein, 222 aa, Unknown
  Bacterial polypetide isolated from the Sargasso Sea
TLLIGGKTGINLKDGKNLVGRIYQPIAVEIDTNFLSTLPDRELQAALAEVVKYGFIYDREFFDFVVANSTEIQNKDIDVLQKIIIQCCEIKSDIVSEDENENELRMILNFGHTVGHAIESFTDYKNLLHGEAIFYGMKCALYLSNKFGSLSDEEYDISTRLISKFELPKLDINNRKIFINFVKNDKKFREKKIRFILLDEIGKSRISEDITFDQIEESLGVL

SEQ ID NO: 153139 - protein, 229 aa, Unknown
  Bacterial polypetide isolated from the Sargasso Sea
KTGINTKFGKNLIGSFYQPSLVISDINFLNSLPKREIICGYGEILKHSIIGNKKFFYFLSKNIFKIIKLKKNYIQKSIYESCLIKKRIVEKDEKEKNLRKLLNFGHTFAHAYEAALNYSKKLNHGEAVILGIISACEFSYKKKILNKKEYRLILNHINKINKSLRLNNFFSKKDINKIIKFMIIDKKNISEKINLVLLKKIGLAHYKNFYKVTDVQKFTKNQFKNISIE

SEQ ID NO: 153140 - protein, 161 aa, Unknown
  Bacterial polypetide isolated from the Sargasso Sea
MIGLGAIKSLKKQIDLVCPDTKKVALIFDKKIPSKLKNTVKKQVKNYEVYVYQYSVNEKLKSFKKVNQLNESLLKKNFNRSDLIIAVGGGVIGDFSGFVASILKRGINFINLPSTLLSQVDASIGGKTGINSKQGKNLIGTFYQPKLVISETEFLKSLPRR

SEQ ID NO: 153141 - protein, 180 aa, Unknown
  Bacterial polypetide isolated from the Sargasso Sea
MKKININTNLGSYKIYIGNKILNKVDFILKKNNIISNKFLIIIDSNVPKKYKKIFKSKYFKKKFIISIRFNEREKNYNSVEKILEILQKKNFNRNDSIICLGGGIAGDLCGFAASIFKRGLKFINIPTTLLSQVDSSIGGKTGFNTKFGKNLIGTFYQPSIVVSDTETLNSLSQRENICG

SEQ ID NO: 153142 - protein, 229 aa, Unknown
  Bacterial polypetide isolated from the Sargasso Sea
MKINRLKAKDYSIIIGKNSISNLTTEIKNHCPKCKKIAVIIDKKIPKKFVLKIKKKLNRYKVFIFFISSSEKIKNLNKTNFFINNLLKFNFNRSDLVIAVGGGIIGDMTGFVASIYKRGINFINLPSTLLAQVDSCIGGKTGVNSKYGKNLIGSFYNPKVVIVEIEFLKSLPKREVVCGFAEILKHSIIKDKRFFYFLRKNTHNILSLKNNILEKSILKSCKIKLNFTE

SEQ ID NO: 153143 - protein, 244 aa, Unknown
  Bacterial polypetide isolated from the Sargasso Sea
MNTNKIAVKTSSKNYSIVIGRGLIGKVDKILKANHLKFDKCLIVTDKNIPHKFKRLLYKNLKTNKLFKIAITASEKNKNYRTVEKIHKVLFEKRFNREDCIISFGGGIIGDIVGFASSTFKRGMKFVNIPTTLLSQVDSSIGGKTGVNNEFGKNLIGNFYQPDLVVSDMSILASLPEREIICGYAEIFKSSIIDNFNNFLYLDKNLKKILKLKSPFIERSIMKSCNLKKRIVEKDENEKNFRKV

SEQ ID NO: 153144 - protein, 171 aa, Unknown
  Bacterial polypetide isolated from the Sargasso Sea
FFNWLKENVGNLTKLNQDCLIYAIEKSCSMKANIVQKDEKEKGDRALLNFGHTFGHALEKHFTKNEVLLHGEAVAIGMAYASKFSSNIGVLKKDECDEIINLISDIGLPISINDIKGEITKEEILNLMKFDKKRLNQKNTLILLNRIGEAFINNNISDKEIIDFFNTENIQ

SEQ ID NO: 153145 - protein, 147 aa, Unknown
  Bacterial polypetide isolated from the Sargasso Sea
MKVQEIKINTKSKKYSIFIGSKLINKLDKILISQKISFPKVMVVIDKNIPSKFKTTLIRKLNSRFIKKYIFIANERNKNQKNVNLIQNILFKNRFNREDCIVAFGGGITGDVVGYCASIYKRGIKFINIPTTLLSQVDSSIGGKTGI

SEQ ID NO: 153146 - protein, 162 aa, Unknown
  Bacterial polypetide isolated from the Sargasso Sea
MNANKISIKTSTKDYSIIIGRDLIGKIDKILKANSLKFDKCLIVTDKNIPNKFKRLLYKKLKTNKLYKIEITASEKNKNYRTIEKIHTVLFENRFNREDCIISFGGGIIGDIVGFASSTFKRGMKFINIPSTLLSQVDSSIGGKTGVNNKFGKNLVGSFYQP

SEQ ID NO: 153147 - protein, 227 aa, Unknown
  Bacterial polypetide isolated from the Sargasso Sea
ISMVDSSVGGKPAVNHPKGKNLIGAFNQPKAVFIDPETLKSLPKREFSAGMAEVIKYGIIRDKKLFEFLEIGKNRNELINLKNESLIKIINSSITTKSHIVSHDEHEHGIRAILNYGHSFGHVIENICGYGEFLHGEAISIGMNIAGKIAIKKGLWSKEELERQQNLLESYDLPTEIPKINKEDVLTILMGDKKVRDGKMRFILPKEIGEVDIYDDVEDSLFLKFFS

SEQ ID NO: 153148 - protein, 150 aa, Unknown
  Bacterial polypetide isolated from the Sargasso Sea
MNTNKISIKTSTKNYSIIIGRDLIGKIDKILKANRLKFDKCLIVADKNIPYKFKRLLYKKLKTNKLFKIEITASEKNKSYRTIEKIHTVLFENRFNREDCVISFGGGIIGDIVGFASSTFKRGMRFVNIPSTLLAQVDSSIGGKTGVNNK

SEQ ID NO: 153149 - protein, 194 aa, Unknown
  Bacterial polypetide isolated from the Sargasso Sea
MKITRSIKIKTETTSYEINIGEEFLSSEHLKKFVKNKEVLLIFDPEIGETKIKDILNKVEKSEPLNFKSLEMSCSEKTKNFNSVTKIHDTLIDASFSRDCLLIGVGGGILSDITGFAASTYQRGVNFLLIPTTLLAQVDASVGGKTAINHKSAKNMVGAFHQPIEVIISADFLKSLPEREIRSGLVEMIKHGLI

SEQ ID NO: 153150 - protein, 180 aa, Unknown
  Bacterial polypetide isolated from the Sargasso Sea
GLLGNAKFFDWLEHYGDQVLALEPDALQHAVFTSCRSKARIVEADELEVGKRALLNLGHTFGHAFEAVAKFDGRLLHGEAVAAGMGLAFDLSVELGLCTEQVADRCKSHLQAAGLPFGQSSLPAGNAPADILLDHMKHDKKTRNGIMHFVLVRNIGDAFVHSDVQEDIVKKLLERGFNAV

SEQ ID NO: 153151 - protein, 276 aa, Unknown
  Bacterial polypetide isolated from the Sargasso Sea
FSLINLMMNKKFTKKSLLISLGGGVIGDVSALAASLYYRGVLYFYIPSTMTSIVDSCIGGKTGINYKNIINSIGNYYHANSVFIYHDILKNIPDREYYSGIPEIIKCGLLKKNKIINILLKSKDQIIKRDYKTLESLCTETLKTKIILFKNDIYENGIRLHLNFGHTFAHSFEMATEKLLNKELIRHGEAVGIGMLCEILLSSKKKNKVYNLLEKILKQYSLPTSLHQYDLNISKQKMIDQVYKAIFLDKKKINKLPRYIGLKQFINSYKEIEILE

SEQ ID NO: 153152 - protein, 242 aa, Unknown
  Bacterial polypetide isolated from the Sargasso Sea
MKISKINVKNKHTGYKIIIGNGVIGLLGKEIKKLCPKTKKIALVIDKNIPYNFKNQIKKNLKGYKIFIYDFLPNENLKSFKKANSLLENLIKENLSRSDTLITVGGGIIGDFGSFVASIYKRGINFINVPSTLLAQVDSSIGGKTAVNSTRGKNLIGTFYQPKLVISEIGLLKSLSKRNLVCGFAEILKHAIIKDNKFFEKLNKNSDKILNKFNVDILRNIITKSCQIKLFYVNKDENENNK

SEQ ID NO: 153153 - protein, 237 aa, Unknown
  Bacterial polypetide isolated from the Sargasso Sea
LIPTSTLAMNDAAIGGKTGIDLPQGKNLVGAFKQPSGVIVDVELLRTLPKRSYVEGFAEIIKHGLILDSELFEWLEENSAELLRESPDLNLLAKITARSVRLKSMIVSADPHESGLRAILNYGHTTGHAIETVTSYEQYMHGEAVSVGMMAAGYIGRDLGKTPQELLERQSDALRTYGLPVSAPGLNPTAVLEAMTRDKKVVRGDIRFVLIDKVGHAFLEDSIPIELIKDNLKRITK

SEQ ID NO: 153154 - protein, 278 aa, Unknown
  Bacterial polypetide isolated from the Sargasso Sea
KKIAKKNEKVFCIIDAKIKNKFNFRKENNVKIITIHCGEKIKTINSYKNLAEKLIKKDVNRKSVLVAIGGGTLGDLVGFISSTVLRGLDFFLIPTTLLSQVDSSIGGKNGINTNFGKNMLGTFYQPKEVLIDISVLNSLPNKEIKSGYAEIIKHALINDYNFFCWLEKNIDKLLNLNKSILEKAIYKSIMIKLFYVRKDEKESLLNSHSRAMLNFGHTIGHAIESNYNYKKFNHGEAISIGMITEARISNYLGLLSSNELYRILLHFKKCNLKIFDKI

SEQ ID NO: 153155 - protein, 258 aa, Unknown
  Bacterial polypetide isolated from the Sargasso Sea
SIYVLVDSNTNKECIPIFKKRISNSFSFIVIEIDEGEENKNINSCQKVWTILSDKGGDRKSLVINLGGGVITDIGGFIASTFKRGIDFINIPTTLLSMVDASIGGKTGIDFGNLKNQIGVINDPKLVVIDPFFLNTLSIKELRNGYSEMLKHGLITDKKYWDKVSAILLEKKEPGIDEIFTSIKIKNKIVLDDPFEKNKRKVLNFGHTVGHAIESFFMNSQTHNKLSHGKSIAIGMIIEAYISYDLCKLKISEAKEIK

SEQ ID NO: 153156 - protein, 224 aa, Unknown
  Bacterial polypetide isolated from the Sargasso Sea
MKISRLKAKDYSIVIGKNSILLLNSEIKNHCPKCKKVALIVDRKIPKKILIQIKKNLKRFNIFIFFVSSSEKIKNINQINLFIDKLLRLNFNRTDLIIGIGGGIIGDMAGFVSSIYKRGINFINLPSTLLAQVDSCIGGKTGVNSIHGKNLIGSFYNPKVVIIETELLKSLPSREVICGYAEILKHAIIQDKKFFNFLNKHTQNILSLNNKILAESIKRSCKIK

SEQ ID NO: 153157 - protein, 125 aa, Unknown
  Bacterial polypetide isolated from the Sargasso Sea
MKYKIIISGNAISKKNLGPILKEHNKALIISDNGVPLDITKKVKSICKNYSKVFSVVLTKGEQAKSIQNFQKILNFLAENNFDRTDIIISVGGGVVGDISGYVASSYLRGIQFIQIPTTLLAQVD

SEQ ID NO: 153158 - protein, 252 aa, Unknown
  Bacterial polypetide isolated from the Sargasso Sea
MNQSNKIVYNINNNKHDIIYSNNILSTLSKKIKELESDQKIFFLFDENIDKKITKEIFLGLKLTGCKIYQKKIKSLKKNKNLKNLTNLINIFSDLSLTKKSIVLVCGGGVVGDLAGLASSLYRRGLIYINIPSTMTAMVDSCLGGKTGINHLNQINLIGTYYHPSSIIIYDKIIKSIPSREYISGLSEVVKTYILSNNSNLKNIENNVKKILIKDRSLVKKLILNSLKIKLKYFLNDIYEGNNRLFLNFGHT

SEQ ID NO: 153159 - protein, 151 aa, Unknown
  Bacterial polypetide isolated from the Sargasso Sea
KLIDLKFSRDSLIISFGGGITTDLAGFVASVYLRGIEVMHIPTTLLAQVDASVGGKTGVNSKKYKNMIGAFKQPEAVLIDTFFLKSLSKRHIAAGYSEIIKHALIKDKSLFSKLDNFDQNIEKKANIAELSDLIRRSTRIKANMLSKTKER

SEQ ID NO: 153160 - protein, 154 aa, Unknown
  Bacterial polypetide isolated from the Sargasso Sea
MKNQQIKFKSKKQSYSVVIGKNTLQILPKKIKLLCPKTKKIALIFDKNVPTKFKKSLNKKLKNYSLLFIPFTANEKNKSMNMVNEILNILLVKNFNRTDLVISIGGGITGDVVGFIASIFKRGINFINIPTTLLAQVDSAIGGKTGVNSKHEKI

SEQ ID NO: 153161 - protein, 222 aa, Unknown
  Bacterial polypetide isolated from the Sargasso Sea
TGINNAYGKNLIGSFYQPDLVLSDINLLNTLPYRELVCGYAEIIKHALIRNKKNFFYLKKYHKEIFKLKSPFIEKAILESCKIKKNVVQKDESEKNLRKILNLGHTFAHAFESALGYSKRLNHGEAVIIGITVATKFSYLYNKLSKIDYININNHFKDLRLNLKFNNFFSAKDIKKICNFMKMDKKNNSKKINLVLLRKIGQTTIDKDFEVKKIEKFLRSQL

SEQ ID NO: 153162 - protein, 215 aa, Unknown
  Bacterial polypetide isolated from the Sargasso Sea
MNKSIKIRTKEKKYNIEIKYNFFNSKLKSIIKKNNKNKIFIIIDTKLKYLLKKFKLDKNVTMLEIKASEKIKNFDNYKNLLNKMLSKNIDRNSIIIAIGGGTIGDLSGFVASTVLRGVKLILIPSTLLSQVDSSIGGKNGINTRHGKNLIGSFYDPEEVFIDPSILKTLPKRELKSGYAEIIKHALIYDLNFFKWLENNYNKILNLNKSAIRICN

SEQ ID NO: 153163 - protein, 147 aa, Unknown
  Bacterial polypetide isolated from the Sargasso Sea
MKIVRIQVKNKYINYPIFVGNNSIKLLRQQIKKVCPTTKKVAIIFDKNIPIKFKKKIKKLLKGYKIFTREYLPNENLKSFSKANQLSEYLLENNFNRNDTIIAVGGGIIGDFSGFVASILKRGMNFINLPSTLLAQVDSSIGGKTGI

SEQ ID NO: 153164 - protein, 239 aa, Unknown
  Bacterial polypetide isolated from the Sargasso Sea
MKLKIKTNKNYYSVIIGKNICSKINQMILNEKIYSQKFLLVYDSKVPIKMIKSIVSRFNKKKIEKKKIIFNEKSKNFKTVSSIVKILEKKNFSRSDCLISVGGGICGDVCGFASSIFKRGLNFINVPTTLLSQVDSAIGGKTGINSLSGKNMIGSFYQPSLVISDINFLKSLPKKEMICGYAEILKHSLISDKIFFKFLKKNFNKILSHNHKFLEIAIYKSCLIKKQVVEKDEKEKNIR

SEQ ID NO: 153165 - protein, 211 aa, Unknown
  Bacterial polypetide isolated from the Sargasso Sea
SFYQPSLVLIDINFLTKLNDREMAAGYAEIVKYSLIFDIKFFNWLIINGKKVMNKNKEALIHAIFLSCKCKSKIVSLDEKEKNIRALLNFGHTFGHAIEQTNSYKKNINHGEAVAMGMIMASKLSSAMNLISINELNKIINHFKLLNLPTQIPRSLRKNLSIKMFIDVMNKDKKTKNNKINLILLKKIGKAYQTNKFDTQLLKIIIKDAIA

SEQ ID NO: 153166 - protein, 175 aa, Unknown
  Bacterial polypetide isolated from the Sargasso Sea
MKINRLKAKDYSIIIGKNSMTSLASEVKNLCPKCKKIAVIIDKKIPKKFLSKLRKNLKKYKLFVFFVSSSEKIKNLDKTNLLLNKLLKLNFNRSDLIVALGGGIIGDMTGFVASIFKRGINFINLPSTLLSQVDSCIGGKTGVNSKYGKNLIGSFYNPKVVISDTELLKSLPKRE

SEQ ID NO: 153167 - protein, 212 aa, Unknown
  Bacterial polypetide isolated from the Sargasso Sea
GTFYQPRLVISDVSLLKTLTNREILSGYAEIIKYGLIMDKKFLNWLINNELKLKKFDKRYLIEAVFHSCKNKAKIVSKDEKEKNIRAILNLGHTFGHTIEAINNYHKSLTHGEAVSIGIMMALDMSSVEGKISNINIDSIRNHFKRLKMKTSIPNKIKNMTTLSKFKEIMNSDKKVKKKDIYLILLKNLGEAYLTNRYSAKNLDSIIEKYIN

SEQ ID NO: 153168 - protein, 178 aa, Unknown
  Bacterial polypetide isolated from the Sargasso Sea
MSNKIKVDLGNNSYNISLIEGFKNSVVKFASSTKSQCMLITQKEIVSLYKDEINELSNLPNVNIFLIDQGEKAKSFESISLIVNEMAKKHFDRSSLVFAVGGGVVGDVAGFASSIFMRGIKYIQYPTTLLAMVDSAIGGKTGINLKDGKNLVGRIYQPIAVEIDTNFLSTLPARELQA

SEQ ID NO: 153169 - protein, 174 aa, Unknown
  Bacterial polypetide isolated from the Sargasso Sea
DTKIVKYLILQSLEIKINHFTTDVFEKNTRLLLNFGHTFGHAYEMATDELIKKDFLRHGEAVALGIISEIAMSFLETRSNSKKKKIYKSLVAVTNILNELSLPTKLSFPQNINSQELQKKIYFYVFKDKKRISEKPRYINFEDSGKLNAKEVNNFDNINKVIYYLINKVDINII

SEQ ID NO: 153170 - protein, 165 aa, Unknown
  Bacterial polypetide isolated from the Sargasso Sea
MNKKIKFNINKKKYFVEIEVNSIKKKIDKIIKSNNNIIFLIDKKVFNVFEKVKNYKKQKYITISCSEKIKSFQDFSKLSNKILSMGVDRKSTLIAIGGGTLGDLAGFISSTLLRGVDLVLIPTTLLSQVDSSIGGKNGINTKYGKNLIGTFYQPTKVIIDPSTLS

SEQ ID NO: 153171 - protein, 256 aa, Unknown
  Bacterial polypetide isolated from the Sargasso Sea
KRGLKFINIPTTLLAQSDASIGGKTAINSKQGKNLIGTFYQPEFVLIDVSVLNSLPKREIICGYGEILKHSLIMDKKFFLWLCNNAKKIIDEKDKILLNNAIVKSCKIKSKIITRDEKEKNLRMVLNFGHTFAHGFEGAKNYSKKLNHGEAVLLGMFVASQLSHKKKLLSLQNLILIKKHYLSLNLPMKIRQFFKKSEVNQIINFMKKDKKNVDEKINLILIKNIGKVTKPNNFAINANELKKFLVSQIYLITILF

SEQ ID NO: 153172 - protein, 249 aa, Unknown
  Bacterial polypetide isolated from the Sargasso Sea
RGINFINIPTTWLAQVDSAIGGKTGVNSIYGKNLIGSFYQPKLVISDTDFIKSLPQKEVTCGYAEILKHAIINDLKFFNWLKKNTKNIFLKKPKELIFAIKKSCQIKMFFVNRDVNEKGLRMILNFGHTFAHAIEVKNNYSKKFTHGEAVLSGMILATKLSVVKKVCKIKILKEIEQIYKKNNLSHILNKFTKSNEIKSLIPFLKIDKKNDDEKINFILLKKIGKTTKPNTCKISTGDLKKITKFIARY

SEQ ID NO: 153173 - protein, 191 aa, Unknown
  Bacterial polypetide isolated from the Sargasso Sea
MNKIKVETINNPYEVVVGSNLINQKDLKALEGKEVLLVIDENIPTKFKDLIVDALSSLSSNFQSLEIRASEENKSGRTLDSIHSKLIDARFSRDCVLVGFGGGITCDIAGFAAATYQRGVNFILFPSTLLSQVDASVGGKTAINHPQGKNMIGAFHQPIKVFADVDLLSSLPKIEISNGLSEVIKHALIRT

SEQ ID NO: 153174 - protein, 150 aa, Unknown
  Bacterial polypetide isolated from the Sargasso Sea
MKLKVKTNKNNYSIIIGKNLYSKIYKIILNERIYSQKFLLVYDSKVPAQMIKSIVSRFSKNEIEKKKIVFNEKSKNLKTVSSIVKILEKNNFSRNDSLISVGGGICGDVCGFASSIFKRGLNFINVPTTLLSQVDSAIGGKTGINSLSGK

SEQ ID NO: 153175 - protein, 219 aa, Unknown
  Bacterial polypetide isolated from the Sargasso Sea
MKSNKLIVKTKSKTYPIYFGNNFLNITGRLIKKKLPNVKKICIISDNKLPKILLKKLTNSLKNYDLKIYKLSVNEKTKTLSVANKITEQLLKENYNRTDCVISFGGGIVSDLSAFISSIIKRGIKFVNIPTTLLSQADSSIGGKTGVNTKQGKNLIGTFYQPEFVLNDTFMLNSLPIKEMISGYGEVLKHALIVDRKFFIFLSKHGKSIILKKNNFNLK

SEQ ID NO: 153176 - protein, 227 aa, Unknown
  Bacterial polypetide isolated from the Sargasso Sea
GGKTGVNTKEGKNLIGNFYQPKMVISDTEFLKSLSKREIICGYGEILKHSLIMNENFFNYLDNYSSEILNLKSPFIEKAIFESCKIKKTIVEKDEKEKKLRKILNFGHTFAHAFEAALGYSKRLNHGEAVILGIITALKFSLNLNLVKQKTYDQIIQHIQKMNLPSNLKNYFSTKDLNKILNFMMQDKKNISKKINLILLKRIGSTVINNRYDNLKIKKFLNKELTN

SEQ ID NO: 153177 - protein, 90 aa, Unknown
  Bacterial polypetide isolated from the Sargasso Sea
DAFDLKTLILPEGETEKNLETVGKAVEFLSDSGIDRDSSIIAFGGGVIGDITGFVASSYMRGIKFLQVPPTLLAQVDSSVGGKTGMNIST

SEQ ID NO: 153178 - protein, 208 aa, Unknown
  Bacterial polypetide isolated from the Sargasso Sea
PKLVVSDISVLGSLSERNWLSGYSEVIKYGLVGDKDFFMWLEKNSSNILNGDSEKIKYAVGRSCEIKASVVAQDETEKSSRTLLNLGHTFGHALEAFTGYSEKLIHGEAVCLGCVLAFRLSNRMALCTDEDVYRVENHYKKNGMKTEISDFDIKAINAKKILQLMSQDKKTKDGLLNLILVKGIGKAFIAKNFDKDILESFLVEQINC

SEQ ID NO: 153179 - protein, 132 aa, Unknown
  Bacterial polypetide isolated from the Sargasso Sea
KERGDRALLNFGHTFGHALEKHFTKNEVLLHGEAVAIGMAYASKFSVNTGILKKDECDEIINLISDIGLPISINDIKGEITKEEILNLMMFDKKRINQKNTLILLNRIGEAFINNDISDKEIIDFFNMENIQ

SEQ ID NO: 153180 - protein, 234 aa, Unknown
  Bacterial polypetide isolated from the Sargasso Sea
MIKGVHEVAYDTIEVAAASGGYQVFVGPSLLASVPAVVATYAPARRLAVISDDRVGPIHGETVAEALRDAGHDITFLTFPEGEASKTRKFWSILTDQMLEAGLQRDCAVVAVGGGVTTDLAGFVAATFLRGVPVIQVPTTTLSMVDASVGGKTGVNVRNGKNLVGAFHAPSAVVADTEVLGTLDPRFLAEGLVEAVKHGVILDEEHFLGIANRIQELILADPKESARCVTASVR

SEQ ID NO: 153181 - protein, 124 aa, Unknown
  Bacterial polypetide isolated from the Sargasso Sea
REGGVRAHLNFGHTFGHAIERIQGYGDWLHGEAVAAGMVLASRLSVLRGGLDAEVVDQLTAFNESVGLPVAPPADVTAQAMLEAMSSDKKVSGGKVRYIVLCRLGEAVMAENVTDDDVARVIEA

SEQ ID NO: 153182 - protein, 239 aa, Unknown
  Bacterial polypetide isolated from the Sargasso Sea
MKKIEVGIKGNHYQVVVGSNLVNQENLQILKDKEVLLVLDQNIPPKFKDMMTKDLSGLSSKFHTIEILPSEENKNGVTLDKIHSKLISKRYSRDCYLVGLGGGITCDITGFAAATYQRGVNFILFPSTLLSQVDASVGGKTAINHPQGKNMIGAFHQPKQVFTDVSLLSFLPDMEVSNGLSEVIKHALISDKEYFEWLETNMEDIISLEPKALERAITRSIEIKAEIVAKDEKEKGIRK

SEQ ID NO: 153183 - protein, 219 aa, Unknown
  Bacterial polypetide isolated from the Sargasso Sea
GGKTGVNHPKGKNLIGAFNQPKAVFIDPETLKSLPKREFSAGMAEVIKYGVIRDKELFEYLEIEKNKNELINLKNEYLIKIINSSIKTKSHVVSQDEHENGVRAILNYGHSFGHVIENLCGYGKFLHGEAISIGMNIAGKIAIEKGLWSKEELERQRILLESYDLPTEIPKINKEDVLTILMGDKKVRDGKMRFILPKEIGAVDIYDDVEDSLFLKFFS

SEQ ID NO: 153184 - protein, 138 aa, Unknown
  Bacterial polypetide isolated from the Sargasso Sea
MQNKFFINNRKLKTSILIKNNYISKFIIDIAKKNEKVFCVMDSKIKIDFKLTKQKNIKVISIKCGEKIKTFDGYKNLAEKLIKSNINRKSVLIAIGGGTLGDLTGFVASTVLRGLDFFLIPTTLLSQVDSSIGGKNGN

SEQ ID NO: 153185 - protein, 168 aa, Unknown
  Bacterial polypetide isolated from the Sargasso Sea
MKLKVKTNKNNYSIIIGKNLCSKIYKIIFNERMYSQKFLLVYDSKVPAQMIKSIISKFNKDKIEKKKIVFNEKSKNLKTVSSIVKILEKNNFSRNDSLISVGGGICGDVCGFASSIFKRGLNFINVPTTLLSQVDSAIGGKTGINSLSGKNMIGSFYQPSLVISDIDF

SEQ ID NO: 153186 - protein, 163 aa, Unknown
  Bacterial polypetide isolated from the Sargasso Sea
WLERNMAALRALDASLVTYAIERSCSIKAEVVAADEREGGVRAILNLGHTFGHAIEAHQGYGSWLHGEAVGAGMAMALDLSCRLGWITGAERNRGVALISAAGLPTVPPSGMVAADFERLMSVDKKVLDGQLRLVLLRGMGEAVVTAEFTADALRQCLVGFEQ

SEQ ID NO: 153187 - protein, 263 aa, Unknown
  Bacterial polypetide isolated from the Sargasso Sea
MIIDNYSNINQIIAENSYSSVFLLLDTNTDDHCLDLFIKKSNIKDFKKVVVKDGEESKSIDTCEYVWEYLNSNNGDRKSLLINIGGGVVTDLGGFIASTYLRGVDFINVPTTVLCMVDAAFGGKTGINFKSIKNQIGVINKPKGVLIDIDYLETLSKEEYINGFAEIYKHSLITDNVELQFKNLIQFDFKNDIKDIIYKYSSIKNKVVELDLHESNYRKVLNLGHTIGHAVESYSIISKDMDKLKHGQAIAVGLITELYFHIR

SEQ ID NO: 153188 - protein, 246 aa, Unknown
  Bacterial polypetide isolated from the Sargasso Sea
MISSKILFVNNIKSALADFFSSNNYSKIAILVDENTEKICLPSIMNKNELNNFLILKIRSGEKNKNINSCIKIWDKLTNNKFDRNSLIINLGGGVITDMGGFIAATYKRGIDFINIPTTLLAQVDASVGGKLGIDFNNYKNQIGLFKESKFTFIDTKFLLTLSRRELNSGYAEIIKHCIIKDKSKFDEIYNQKIDKNNWENLIKHSLDIKSMIVESDLKENGLRKILNFGHTIGHAIESTYRQKKK

SEQ ID NO: 153189 - protein, 357 aa, Unknown
  Bacterial polypetide isolated from the Sargasso Sea
MKKILFKATQEEVLLISSESIDNLFDSIPTDAKCCVLADKKVLDMHDSLRKQIENKNFIIYEISNPEEEKSINSYTEIVDFLSSKSFKRNDRIVGLGGGAITDLAGFVSSTYMRGLDYIQIPTSLLAQVDASIGGKTAINYGKIKNFIGTFYNPSKIIICSKFLKTLNEQEFLNGLAEVLKHALITSDNAVDELINRHEQISSRETATLLEIIEESIQIKANIVTEDFTETGKRKFLNFGHTFAHGIESANLSNPILHGHAVIIGMMMALDYAKHIESIDVDAHEKSMKLLKSFNFDFSNIRFSANEIIEAMKSDKKNTNTINLVLLKDIGSPYILEEVNEERLANFITNFIENFEK

SEQ ID NO: 153190 - protein, 342 aa, Unknown
  Bacterial polypetide isolated from the Sargasso Sea
MKTDLYLSIAEKISSDKFSSIFILVDENTEQFCLEVFIKKSGIKSFNKIVIASGEENKNIDTCVSIWGQLNSYKADRKSLLINLGGGVLTDIGGFAASTYLRGIEFINVPTTLLGMVDAAHGGKTGIDFKLLKNQIGVFNQPLEVLLDDEYLKTLSKEEFINGYAEVVKHSLLTDKPNLTFNSLVKLDLFKDLDFIINSYSLVKNEIVKSDKYESSIRKVLNLGHTIGHAVESYSHISDKVDDLKHGQAIVIGIITELYISYKKFKFPLKDVLAVKEHLKKYFNLIQLQEDDIINIYDLMVYDKKNEGSKINFVLLKEIGKPVIDQIVNKDLFKESFEFYIE

SEQ ID NO: 153191 - protein, 297 aa, Unknown
  Bacterial polypetide isolated from the Sargasso Sea
MKDDQYSLLKEKIKSNDFNSVFVVVDENTDKYCLEIFINKSEINNFNKIVIKSGEENKNIDTCINIWKELNSQKADRKSLIINLGGGVLTDIGGFVASTYLRGIEFINVPTTLLGMVDAAHGGKTGIDFLSLKNQIGVFSMPMDVILDSVYLKTLSKEEYLNGYAEIFKHSFITDISDLSFHSLIKLDFFNDVDFIISKYSDIKNQIVRIDKYESNSRKVLNLGHTIGHALESYSHLSNSLDNLKHGEAIIIGLITELYISNKLNDFSLDTVDKLKEVSLNYFSKISLIDSDLKEYL

SEQ ID NO: 153192 - protein, 216 aa, Unknown
  Bacterial polypetide isolated from the Sargasso Sea
MPKSFSVGKDTSKYKVVISKNSLSKKNLDPVINKSNKVMIVTDSGIPKKYLKELRSILKNKTLYIHILEKGENSKSSLNFFKIHGKLSDLKFDRTDCLLALGGGMVGDITGFCAATYLRGIPYIQIPTTLLSQVDSSVGGKTAINIKQGKNLVGAFNNPALVLISTNYLSTLPKKEFKSGLGEIVKYAFIKNKKLYKLLELNGNKVLKKEPKILEE

SEQ ID NO: 153193 - protein, 204 aa, Unknown
  Bacterial polypetide isolated from the Sargasso Sea
MNTNKISIKTSTKNYSIIIGRDLIGKIDKILKANLLKFDKCLIVTDKNIPHNYKKLLYKKLKKNSLFKMEIMASEKNKNYRTIEKIHTVLFENRFNREDCVIAFGGGIIGDIVGFASSTFKRGIKFVNIPSTLLSQVDSSIGGKTGVNNKFGKNLIGSFYQPNLVVSDMNILTSLPEREIICGYAEILKSSIIDNFNNFLYLDK

SEQ ID NO: 153194 - protein, 304 aa, Unknown
  Bacterial polypetide isolated from the Sargasso Sea
NKKNFIAIFVNCGENIKNINTYNQLSNKLLSENIDRESILVAIGGGTLGDLSGFIASTILRGIDFKLIPTTLLSQVDSSIGGKNGINSSFGKNLIGTFYHPSEVIIDTNILKTLPKREIKSGYAEIIKHSLIKDLKFFNWLEKNFNELIKLNVRILEKAILKSLMIKLWYVKKDQYEKLSNENSRAMLNFGHTIGHSLETYYKYNSKLNHGEAISIGMITESIISNKLGYLNDNNLNLIINHFKKAKLKIYDKNISKHEIFRNIVKDKKNTFNSINIVLIKRIGKPFFKRNLKIEQIKNILKKI

SEQ ID NO: 153195 - protein, 368 aa, Unknown
  Bacterial polypetide isolated from the Sargasso Sea
MNQIKLNIETKTQKYPIYIGKKLSANISKITKSNSINFNKSLLVVDSNVPKKFVSIIKKSLKNKMSYIHYFKANELNKNMNSINKILEILLNKNFSRDDCLISVGGGITGDISGFAASLFKRGLKFINIPTTLLSQVDSSIGGKTGVNTKYGKNLVGSFYQPNLVISDTEFLKTLPNREIVCGYGEILKHSIIGNKKFYNFLNNHKNKILNLTSPFLEKAIYESCKIKKAVVEKDEKEKGLRKILNFGHSFAHAYEATLGFSKKLNHGEAVILGMKTALNFSLKTKFMNKREYYSIIDHIDNSDLPSSVSKFFSPKDVNKILSFMAKDKKNRSNNINLVLLKKIGAPMINKEYSKKKIGLFLKIFLQN

SEQ ID NO: 153196 - protein, 216 aa, Unknown
  Bacterial polypetide isolated from the Sargasso Sea
EGKNLIGTFYQPKLVISDVSLLKTLPKREILSGYAEIIKYGLIMDKKFLNWLLDNESKLQKFNKKYFVQAVFHSCKNKAIIVRKDEKEKNIRAILNLGHTFGHAIEAINNYQKSLTHGEAVSIGIMMALDMSSLQGNSLNINKIKDHFQKLKIKTKIPNNIKRKISLKKFKETMNSDKKVKNNHINLILLRNLGKAYLANRYSTKKLDSVINNYIN

SEQ ID NO: 153197 - protein, 240 aa, Unknown
  Bacterial polypetide isolated from the Sargasso Sea
MPFIQVPTTLAAMTDASIGGKVAYNLEHGKNLVGAFYQPKLVFEELNFLSSLPEREKISGWAEAIKHSIILDKNLFEDFKLNRDKIYNLDNVYSAEILKRSVKIKGDIVSQDEFETGEERIKLNYGHTVGHAIEKVSNFNSYLHGEAVSIGMMVAIKISEKIGMIDKSSEIEQKAILENYNLPTFAKNLDKSKIFEAIKMDKKNVDGKVKWVLLNSIGKAQIVRGVDESIVKEAISEVIL

SEQ ID NO: 153198 - protein, 149 aa, Unknown
  Bacterial polypetide isolated from the Sargasso Sea
MNLKKIIVNSQNQKYSIFIGQNIISEFSSILKKSSIRFNNCLLVVDRNVPKKMILSIKKNLKNKNTFIHYIKANELNKNLKNTNNIIKTLLDKNFSRDDCLISIGGGIVGDISGFAASLFKRGIKFINIPTTLLSQVDSSIGGKTGVNT

SEQ ID NO: 153199 - protein, 209 aa, Unknown
  Bacterial polypetide isolated from the Sargasso Sea
MKIRKIIDRHIHEIEFLKIAQLEKKLINNISISDILIFDRNIVKIRLIKKLLKKFPNRCFVIKGHEKIKNIQNYSSLIEKIIKSGVQRKTIIYSFGGGTLGDLSGFLASTILRGVEHVMIPTSLLAMVDSSIGGKTGVNSKFGKNLIGTFYLPKKVFICSDFLKSLPKREIACGYAEIIKYSLIESKQLHKLLTKRSNGDINKIINLSI

SEQ ID NO: 153200 - protein, 146 aa, Unknown
  Bacterial polypetide isolated from the Sargasso Sea
MKNKSVIKVNLFDRSYPIEIGSSLLNEFNFSDLILGNDCLIVTNEIVASIYLDTLKNNIKTNNIETLILEDGESTKTEKTWSTIIDKLVDMKANRDTTILALGGGVIGDIVGFAAATYMRGLPLIQIPTSLLAQVDSSVEAKQELI

SEQ ID NO: 153201 - protein, 353 aa, Unknown
  Bacterial polypetide isolated from the Sargasso Sea
MFKATQEEVLLISSENIDNLFDSIPTDAKCCVLADKKVLDMHDSLRKQIENKNFLIYEISNPEEEKSINSYTEIVDFLSSKSFKRNDRIVGLGGGAITDLAGFVSSTYMRGLDYIQIPTSLLAQVDASIGGKTAINYGKIKNFIGTFYNASKIIICSKFLKTLNEQEFLNGLAEVLKHALITSDNAVDELIKRHEQISSRETATLLEIIEESIQIKANIVTEDFTETGKRKFLNFGHTFAHGIESANLSNPILHGHAVIIGMMMALDYAKHIESIDVDAHEKSMKLLKSFNFDFSNIRLSANEIIEAMKSDKKNTNTINLVLLKDIGSPYILEEVNEERLANFITNFIENFEK

SEQ ID NO: 153202 - protein, 291 aa, Unknown
  Bacterial polypetide isolated from the Sargasso Sea
AGEQSKNQNSANEIYRWLVDRKAERRHLIIAVGGGVVGDLAGYVAATFLRGVPFIQIPTSMASMVDASIGGKVAVNLPQGKNLIGAFYQPKAVIADVSALQSLGKRELSEGWAEAIKHGFIVDKELVDLFEENAQALMDLEPELSTDIIRRSMAIKANIVSQDEKETLGLRILLNYGHTVGHALEASTEYGRFMHGEGVSVGMVAASKIAQHMGLIDEDLVQRHIDILNQYNLPIKADNINMNAFNSAMALDKKSLSGRNQWVLLDSIGNAIVRHDVPPEIVENVVSELIN

SEQ ID NO: 153203 - protein, 215 aa, Unknown
  Bacterial polypetide isolated from the Sargasso Sea
GVNHPKGKNLIGAFNQPKAVFIDPETLKSLPKREFNAGMAEVIKYGAIRDKELFEYLEIEKNKNELINLKNEYLIKIINSSIKTKSHIVSQDEHENGVRAILNYGHSFGHVIENLCGYGKFLHGEAISIGMNIAGKIAIEKGLWSKEELERQRILLESYDLPTEIPKINKEEVLTILMGDKKVRDGKMRFILPKEIGAADIYDDVEDSLFLKFFS

SEQ ID NO: 153204 - protein, 131 aa, Unknown
  Bacterial polypetide isolated from the Sargasso Sea
MQDGRGSEVHDPIHYNESARTEPTLGFIRPTNNAGGLEAGITNGQPLVIRAAMKPISTLRKPLESVNLRTKQPESAAYERSDVCAVSACSVIVENVVAFSMAAALIDKFGGDSIEEMRARWKLYQQLVASR

SEQ ID NO: 153205 - protein, 113 aa, Unknown
  Bacterial polypetide isolated from the Sargasso Sea
LGGFEGGMTNGENIELTAYLKPISTTLSPIKSVNLAEKEETETVYERSDTCAVPRAVPIFESAMALEILNAVLNKTGGDNKKEIIKNFENIPNLNIDEFDLDNKVWKFGYESE

SEQ ID NO: 153206 - protein, 57 aa, Unknown
  Bacterial polypetide isolated from the Sargasso Sea
MSGNTFGKIFKITTFGESHGTAMGCILDGCPPQIDLKKEDIQYELDRRKPGQSDVTT

SEQ ID NO: 153207 - protein, 38 aa, Unknown
  Bacterial polypetide isolated from the Sargasso Sea
GVRATPIAEAMTALVIMDHFLRNRAQNADVVTEIPDIS

SEQ ID NO: 153208 - protein, 68 aa, Unknown
  Bacterial polypetide isolated from the Sargasso Sea
KYQAVGAVIQLGILGGDINKWKDKTISSNPFFCPDKSVIKLWEKYLLGIRKAGSSCGAIIEKRARGVP

SEQ ID NO: 153209 - protein, 43 aa, Unknown
  Bacterial polypetide isolated from the Sargasso Sea
MFRFLTAGESHGPGLTILVEGLPAGLPVSEDDIKIDLQRRQKG

SEQ ID NO: 153210 - protein, 101 aa, Unknown
  Bacterial polypetide isolated from the Sargasso Sea
MNGNSIGRRLVLTSFGESHGKCIGAVLDGCPAGLELEENDIQKMLDLRKPGQSLVSTQRKEGDIVEILTGTYRGYTTGAPITMIIWNKDQKSIAYEKLRTE

SEQ ID NO: 153211 - protein, 33 aa, Unknown
  Bacterial polypetide isolated from the Sargasso Sea
MSFNTFGKIFRFTTWGESHGPAIGCVVDGCPPN

SEQ ID NO: 153212 - protein, 41 aa, Unknown
  Bacterial polypetide isolated from the Sargasso Sea
KWNDETIRKNPFFCPDKSIVKLWGEISIKCKKIWLIMWSNY

SEQ ID NO: 153213 - protein, 47 aa, Unknown
  Bacterial polypetide isolated from the Sargasso Sea
MGCDTSKWDEKFISKNPFFCPDKSMIKLWGKIFTGYKKIGLFMRGNY

SEQ ID NO: 153214 - protein, 79 aa, Unknown
  Bacterial polypetide isolated from the Sargasso Sea
MSFNTFGKIFRFTTWGESHGPAIGCVVDGCPPNIKITEKDIQIELNKRKPGQSKFTTQRKEDDKVNILSGVLKEKQLVL

SEQ ID NO: 153215 - protein, 107 aa, Unknown
  Bacterial polypetide isolated from the Sargasso Sea
MSHNTFGSIFKFTTWGESHGKAIGCVVDGTPPMIELLEKDIQLWLDKRRPGQNQYTSPRNEPDQVEILSGVYEKEGIQYTTGTPISMVIYNKDQKSSDYDDTKEKFR

SEQ ID NO: 153216 - protein, 65 aa, Unknown
  Bacterial polypetide isolated from the Sargasso Sea
EVRAKGIPIGLGAPIYSKLDMDLAAAMMSINAVKGVNIGSGMNSAQLTGEQNSDEIIQKRKKNQF

SEQ ID NO: 153217 - protein, 60 aa, Unknown
  Bacterial polypetide isolated from the Sargasso Sea
VAAGAIGKKVLEKKIGKKYNVKGAVTQLGIIGCDIKKWDDRFISKNPFFCPDKSILKLWE

SEQ ID NO: 153218 - protein, 67 aa, Unknown
  Bacterial polypetide isolated from the Sargasso Sea
LGCNKNNWNEKEIRKNPFFCPDKKAVKLWEKYLLAIRKNGSSCGAVIELKASGVPAGLGAPIYSKLD

SEQ ID NO: 153219 - protein, 39 aa, Unknown
  Bacterial polypetide isolated from the Sargasso Sea
SVKRRHDPCVGIRAVPIGEAMMHCVLLDHYLMNIAQCKN

SEQ ID NO: 153220 - protein, 63 aa, Unknown
  Bacterial polypetide isolated from the Sargasso Sea
MSFNTFGKIFRFTTWGESHGPAIGCIIDGCPPNITLSEKDIQKDMNRRRPGNSKFVSQRKESD

SEQ ID NO: 153221 - protein, 150 aa, Unknown
  Bacterial polypetide isolated from the Sargasso Sea
MSIQAVKGVDLGMGFEAASRPGSEVHDPIVLAEDQTRSGGIGRASNRAGGLEGGVTTGQPILVRGAMKPISTLRKRLPSVDLRDGSEGDAAVERSDVCAVPAAGVVGEAMVALVIADAVLEKFGGDSVGELRRNFDGYVTHLKERGFGER

SEQ ID NO: 153222 - protein, 31 aa, Unknown
  Bacterial polypetide isolated from the Sargasso Sea
EEDNQARETAARVAAGAVAKKILENKLEKKI

SEQ ID NO: 153223 - protein, 40 aa, Unknown
  Bacterial polypetide isolated from the Sargasso Sea
MSGNSFGKLFSVTTFGESHGKAIGCIVDGCPPGYKVSEKD

SEQ ID NO: 153224 - protein, 71 aa, Unknown
  Bacterial polypetide isolated from the Sargasso Sea
MSFNTFGKFFRFTTWGESHGPAIGCVVDGCPPNIKLNVRDIQLELNKRKPGQSKFTTQRKEDDKVEILSGT

SEQ ID NO: 153225 - protein, 183 aa, Unknown
  Bacterial polypetide isolated from the Sargasso Sea
MNGNSIGRRLVLTSFGESHGKCIGAVLDGCPAGLELEENDIQKMLDLRKPGQSLVSTQRKEGDVVEILTGVFRGYTTGAPITMIIWNKDQKSVAYEKLRTEMRPGHSDYPAYMKYKKFNDHRGGGRFSGRLTATHVMGGAIARKLLKDTIGVETNSYTSQVGKVKMKREATKKEFKSIYTNDV

SEQ ID NO: 153226 - protein, 274 aa, Unknown
  Bacterial polypetide isolated from the Sargasso Sea
DLAGMMKYDFDDIRNVFERSSARETAMRVAIGAICRKLLDEVGITIGSRVYQIHDVVDTEEVDHSLTMSQLNDLADKSSVRCLNEDAEERMINVIDEAKSNGDSVGGSFEVIAKGMPYGLGSYINADGKLQARISQAMMSVNAFKGVEVGAGFASSAAFGSELHDEILFENDKITRSRNNAGGIEGGMSNAQPIHVKVSMKPISTLIKPLRSIDLNTMEPKLAHKERTDSCAVPAASIIGESMLAIVLADALLEKFGGDSIKQLKKHIESSGKY

SEQ ID NO: 153227 - protein, 43 aa, Unknown
  Bacterial polypetide isolated from the Sargasso Sea
MSFNTFGKFFRFTTWGESHGPALGCVVDGCPPNIPLKESDIQG

SEQ ID NO: 153228 - protein, 43 aa, Unknown
  Bacterial polypetide isolated from the Sargasso Sea
MASTFGKIFKITSFGESHGKAIGGVIDGCPSNFDTIISVYILI

SEQ ID NO: 153229 - protein, 35 aa, Unknown
  Bacterial polypetide isolated from the Sargasso Sea
MSGNTFGKIFKLTTFGESHGIALGGVIDGCPPILR

SEQ ID NO: 153230 - protein, 209 aa, Unknown
  Bacterial polypetide isolated from the Sargasso Sea
MRDLRKDYRGGGEITINDPHNPLGLLADWVQEAKEDDVTEPNAMCLATVDDAGKPHNRMVLLKYLEGEDIGFFTNLESDKSLEIQVCQSVAATLWWPEMERQVRIEGNASPMDRSLVEDYYSSRPRKSRIAAWASDQSRPLESREQLLQKYEEHEAKYPGDEIPLPPFWGGYTIRADRVEYWAGRPSRLHDRVVLSRKDASWTQQKLCP

SEQ ID NO: 153231 - protein, 35 aa, Unknown
  Bacterial polypetide isolated from the Sargasso Sea
MSFNTFGKFFRFTTWGESHGPAIGCIIDGCPPLFS

SEQ ID NO: 153232 - protein, 38 aa, Unknown
  Bacterial polypetide isolated from the Sargasso Sea
MSFNTFGKMFRFTTWGESHGPAIGCVVDGCPPNIALSE

SEQ ID NO: 153233 - protein, 65 aa, Unknown
  Bacterial polypetide isolated from the Sargasso Sea
MTAGESHGKGLIGIIEGIPAGLQLTEEYIAIDLLRRMPGHGRGKRMKIEKDFAEIFSGVRHEHTL

SEQ ID NO: 153234 - protein, 32 aa, Unknown
  Bacterial polypetide isolated from the Sargasso Sea
MSFNTFGKIFRFTKWGESHGPAIGCVVDGCPP

SEQ ID NO: 153235 - protein, 56 aa, Unknown
  Bacterial polypetide isolated from the Sargasso Sea
QKGNKTVFKSNNAGGILGGISSGQQIKVSFAVKPTSSILNSRKTIDKFENCFIPFL

SEQ ID NO: 153236 - protein, 63 aa, Unknown
  Bacterial polypetide isolated from the Sargasso Sea
GVNIGSGINSALLTGEQNSDEISQKGKKINFKSNNAGGILGGISSGQDIIVSFAVKPTSSILT

SEQ ID NO: 153237 - protein, 52 aa, Unknown
  Bacterial polypetide isolated from the Sargasso Sea
MSNTFGNLFTLTTFGESHGDSIGGIIDGCPSGKEIDVDLVQNDLNRRKPGQS

SEQ ID NO: 153238 - protein, 25 aa, Unknown
  Bacterial polypetide isolated from the Sargasso Sea
RETAARVAAGAIAKKVLEKKIWKKI

SEQ ID NO: 153239 - protein, 38 aa, Unknown
  Bacterial polypetide isolated from the Sargasso Sea
RHDPCVLPRAVPMVDAMVALVLADHCFLNHAQCGLMNN

SEQ ID NO: 153240 - protein, 87 aa, Unknown
  Bacterial polypetide isolated from the Sargasso Sea
MPGNSFGEIFKFSTWGESHGPAIGCTLDGVPSKILIKEKEIQFFLNQRKPGSSKFVTQRKESDKVKILSGVFNNYTTGAPIVFYYYN

SEQ ID NO: 153241 - protein, 307 aa, Unknown
  Bacterial polypetide isolated from the Sargasso Sea
RMAIAIGFGGVLLLGSYWVLEDKGVLTVGELVLFSMLIQRMLWPLTRMGITLDELERAKASARRTFGLLETPSRIVNPSNPLSLPRPVKGEIRFNQVHFTYRRGKPVFNGLNFSVSSGETLGIAGSTGAGKSTLIKMLLRFYDPGSGWISIDGIDLTKIRFREIRRNVALVSQDVYLFHGSIAENIAYANPQAEMEQIQAVSRSAQFHEFVEGLPAGYETVIGERGIRLSGGQRQRLSIARAVLKDAPVMVFDEATSSVDSETERAIQESLIPITQGKTALIIAHRLSTIRHADRILVLDQGLVAEE

SEQ ID NO: 153242 - protein, 51 aa, Unknown
  Bacterial polypetide isolated from the Sargasso Sea
SLGILGCDTTKWNDKIIYKNPFFCPDKSMLKILGKVFIKYSKSRIFLWSGN

SEQ ID NO: 153243 - protein, 246 aa, Unknown
  Bacterial polypetide isolated from the Sargasso Sea
MLGSDIDGEAADDDSGYSVYLNAVGDRVAVGAPFNSGTGSSAGHTRVYEYVNNSWSQLQNDMDGEAADDSFGRSVALNSDGDRVAVGATSNDGNGINSGHARVYDLKEAADGTAPLMNIVLVNSAGNVINNGSTTQDTALTVIFTSGEPTTNFAATDVTVSGGAISNFSATSSTVYTATFTPTGGTTTNFGDVPGFYESGDRQYVAIANNEGVSQVNFSDLINAAAYLSDVTDCSYAAGVYGLRLT

SEQ ID NO: 153244 - protein, 43 aa, Unknown
  Bacterial polypetide isolated from the Sargasso Sea
MSFNTFGKIFRFTTWGESHGPAIGCVVDGCPPNIPLSEKEIQV

SEQ ID NO: 153245 - protein, 59 aa, Unknown
  Bacterial polypetide isolated from the Sargasso Sea
RKAGSSCGAIIEVRARGVPLGLGAPIYSKLDMDLAAAMMSINAVKGVNIGSGMNSAMLT

SEQ ID NO: 153246 - protein, 290 aa, Unknown
  Bacterial polypetide isolated from the Sargasso Sea
GNKYKGKVTNMADYGAFVEVDGGLEGLVHVSEMSWVSKIQKPENYVSIGDEVDVMVLEIDTFKKRLSLGIKQCVDNPWENFAQKNPIGTVLKGNIQNITDFGIFVQVDEGLDGLVHLSDIDWKVPGDIAIKDYSVGQEIEAQILDFEIDKERISLGIKQLNDDPIGDVELKKGSVVTCTVINTDKGGVDVEIGDGFPAFIKRNDLSMDKTEQDPSRFEVGQKVDAKIMSFDKRSRRVTLSIKSLQISDEKEAIKQYGSKDSGASLGDILGEAFDKSSEKQDDESVEKNEE

SEQ ID NO: 153247 - protein, 582 aa, Unknown
  Bacterial polypetide isolated from the Sargasso Sea
MSNITETQQDSSAQDSATKEFAKLLEESFEINQLNEGKIVKGTVVSIESDLVIVDVGLKTEGRISLSEFSSHDGSHNLEIGGQVDVYLERIENALGDAVLSRDKAKREENWVKLEEDQKNNVIVEGVINGKVRGGFTVDIDGTQAFLPGSQVDVRPIKDIRPFMNKPQSFHILKMDKKRGNIVVSRKSVLSDNNSIDKSELLNNLNEGQEIEGIVKNITDYGAFVDLGGVDGLLHVTDISWKRINKPSEAISIGDKVKVKIIKISKEDMKISLGMKQLLEDPWVNSESKYIIGNKYKGKVTNMADYGAFVEVDGGLEGLVHVSEMSWVSKIQKPENYVSIGDEVDVMVLEIDTDKKRLSLGIKQCVDNPWENFAQRNPVGTVLKGNIQNITEFGIFVQVDEGLDGLVHLSDLDWKVPGDIAIKEYSVGQEIEAQILDFEIDKERISLGIKQLNDDPIGDIDLKKGSVVTCTVINTDKGGIDVEIGDGFPAFIKRNDLSMDKTEQDPSRFEVGQKVDAKIMSFDKKSRKVNLSIKSLQISDEKEAIKQYGSKDSGASLGDILGEAFDKNSETQDDEIIEENKE

SEQ ID NO: 153248 - protein, 151 aa, Unknown
  Bacterial polypetide isolated from the Sargasso Sea
SVKAIEVGDGIESSKNYGTSVQDQYVLNEKEIKKESNNLGGFEGGMTNGENIELTAYLKPISTTLSPIKSVNLAEKEETETVYERSDTCAVPRAVPIFESAMALEILNAVLNKSGGDNKKEIIKNFENIPNLNIDEFDLDNKVWKFGYESE

SEQ ID NO: 153249 - protein, 34 aa, Unknown
  Bacterial polypetide isolated from the Sargasso Sea
MSFNTFGKFFRFTTWGESHGPAIGCVVDGCPPEY

SEQ ID NO: 153250 - protein, 94 aa, Unknown
  Bacterial polypetide isolated from the Sargasso Sea
MNGNSIGRRLVLTSFGESHGKCIGAVLDGCPAGLELEEKDIQKMLDLRKPGQSLVSTQRKEGDIVEILTGTFRGYTTGAPITMVIWNKDQKSIA

SEQ ID NO: 153251 - protein, 70 aa, Unknown
  Bacterial polypetide isolated from the Sargasso Sea
MIRFLTAGESHGPELTGIIEGLPAGFNVTKDYIDSFLKRRQKSQGSGGRMNIESDEVEITSGIINNLTTG

SEQ ID NO: 153252 - protein, 50 aa, Unknown
  Bacterial polypetide isolated from the Sargasso Sea
MSFNTFGKLFRFTTWGESHGPAIGCVVDGCPPNIPIKDSDIQKELNKRKP

SEQ ID NO: 153253 - protein, 260 aa, Unknown
  Bacterial polypetide isolated from the Sargasso Sea
GAIAIQILESMGISVYGYVSSIGKVDYRYSNDFSLDEMRKLTDDSPVSCPDADKSQQMEKEISNARKKKDTLGGSITTIATGVPPTLGSYVHWDKKLDAKLARILMSIQSVKAIEVGDGIESSKNYGTSVQDQYVLNKKEIKKESNNLGGFEGGMTNGENIELTAYLKPISTTLSPIKSVNLAEKEETETVYERSDTCAVPRAVPIFESAMALEILNAVLNKSGGDNKKEIIKNFENIPNLNIDEFDLDNKVWKFGYESE

SEQ ID NO: 153254 - protein, 68 aa, Unknown
  Bacterial polypetide isolated from the Sargasso Sea
IILSFAVKPTSSILTNRKTIDKFGKNTSISVKGRHDPCVGIRAVPIGEAMMNCVLLDHFLMHNAQCKN

SEQ ID NO: 153255 - protein, 43 aa, Unknown
  Bacterial polypetide isolated from the Sargasso Sea
MKAKGRHDPCVLPRAVPMVDAMVALVLADHLLLNHAQCDLINK

SEQ ID NO: 153256 - protein, 175 aa, Unknown
  Bacterial polypetide isolated from the Sargasso Sea
FQVIAFNVPLGLGSHTQWDNKLDGKIAQSMVSINAVKGVEIGNGFENTERWGREVQDVIEPNSSDVRNFSQISNNSGGIEGGMSNGNDIIVNVAIKPIATMTSPLPSVDIMTGEVVEAAYNRSDICQVSRACPVGEAMLALTLTEAVLEKFGGDSLQEIKRNYTSYIKTFKEYGK

SEQ ID NO: 153257 - protein, 191 aa, Unknown
  Bacterial polypetide isolated from the Sargasso Sea
NRDAKIEQMDDIERPRPGHADLPGAIKHLGGVRPVLERASARETAARVAAGALARQLLSLFGIEVAGWVTELGGVVLGGREGTLPELREIRNSSEIYSLHPEQDDHVKDLIDRVGKDGDTLGGIVEVRVDGLPIGLGTHTQWDRKLDGQLAHAVMAVQAIKGVEIGMGFETARRPRLGSARSDSLQRKRTN

SEQ ID NO: 153258 - protein, 173 aa, Unknown
  Bacterial polypetide isolated from the Sargasso Sea
MLTRINFLTAGESHGRGLLGIVEGIPSGLEISKEYIDVQLKRRQMGHGRGGRMKIENDAVEIWSGVRDGKTIASPIGLIVRNKDWENWKNKMSIEKMKKTPRKVTLPRPGHADLAGVEKYGFDDIRNVLERSSARETTMRVALASICRKLLGDIGIHVASRVVQIHNIVDFSP

SEQ ID NO: 153259 - protein, 105 aa, Unknown
  Bacterial polypetide isolated from the Sargasso Sea
MSFNTFGKLFRFTTWGESHGPAIGCIVDGCPPNINLKEQDIQIELDKRKPGQSKFTTQRKEDDKVQILSGVFEGKTTGTPISLIIYNKDMRSKDYSNIKDKFRPG

SEQ ID NO: 153260 - protein, 53 aa, Unknown
  Bacterial polypetide isolated from the Sargasso Sea
MSFNTFGKIFRFTTWGESHGPAIGCVVDGCPPNISISEKEIQKDMNMRRPGQS

SEQ ID NO: 153261 - protein, 63 aa, Unknown
  Bacterial polypetide isolated from the Sargasso Sea
AVKPTSSILTSRKTIDKFGKNTSISVKGRHDPCVGIRAVPIGEAMMHCVLLDHYLMNKAQCKS

SEQ ID NO: 153262 - protein, 187 aa, Unknown
  Bacterial polypetide isolated from the Sargasso Sea
IYTNEVRCPEKYTAQKMKSVILDARKKGDSLGGIIESITTNLPVGLGEPIFGSLESDISKAIFSIPAVKGIEFGSGFAGSEKFGSENNDAYVMKGGKVSTKTNNSGGILGGISNGMPITIRIAFKPASSISQIQQSVDIKKKKSIKLQVGGRHDPCVVPRAPPVVDSLVALTIADHALLSGTIKPTL

SEQ ID NO: 153263 - protein, 67 aa, Unknown
  Bacterial polypetide isolated from the Sargasso Sea
SSINKEGQTIDSEGQSKKIQVKGRHDPCVGVRATPIAEAMTALVIMDHFLRNRAQNADVVTEIPDIS

SEQ ID NO: 153264 - protein, 45 aa, Unknown
  Bacterial polypetide isolated from the Sargasso Sea
MSGNTFGKIFTVTTFGESHGVALGCIVDGCPPGMTLSEKDIQVDL

SEQ ID NO: 153265 - protein, 74 aa, Unknown
  Bacterial polypetide isolated from the Sargasso Sea
GISSGQDVIISFAVKPTSSILNQRKTIDKFGKNTSISVKGRHDPCVGIRAVPIGEAMMHCVILDHYLMNKAQCS

SEQ ID NO: 153266 - protein, 259 aa, Unknown
  Bacterial polypetide isolated from the Sargasso Sea
MLTKIKFLTAGESHGRGLLGILDGIPSGLKIDKDFIDTQLTRRQMGYGRGGRMKIEKDQVEIWSGVRFGETIASPIGLIVKNKDWDNWKEKMAVETKEKMPKKVTLPRPGHADLAGVEKYGFDDIRNVLERSSARETTMRVALASVCRKLLKDIGINVSSRVTQIHNIIDDSNVPDNMSAEELNEIVDKSPLRCLNNEKEQEMISVIDKAKANGDSVGGVFEVFATGLPYGLGSYTQWDRKLQSKITSLLMSVNAFKSI

SEQ ID NO: 153267 - protein, 76 aa, Unknown
  Bacterial polypetide isolated from the Sargasso Sea
RKAAVVLELEAYMDALRMGGDPIGARIDVVASGGLVGWGELVYDCLDADIAMGRRSINAVKGVEMGAGFDSVGQRG

SEQ ID NO: 153268 - protein, 80 aa, Unknown
  Bacterial polypetide isolated from the Sargasso Sea
SGGIQGGISNGMDIYFDVAFKPVATIMKNQDTINKDGDKVTMKGKGRHDPCVLPRAVPIVEAMAALTIADFVLLNRTIKF

SEQ ID NO: 153269 - protein, 113 aa, Unknown
  Bacterial polypetide isolated from the Sargasso Sea
MSFNTFGKLFRFTTWGESHGPAIGCIVDGCPPNINLKEQDIQKELDKRKPGQSKFTTQRKEDDKVQILSGLFEGKTTGTPISLIIYNKDMRSKDYSNIKDKFRPGHADFTYFK

SEQ ID NO: 153270 - protein, 31 aa, Unknown
  Bacterial polypetide isolated from the Sargasso Sea
GRHDPCVGIRAVPVGEAMVATTIADHCLRFL

SEQ ID NO: 153271 - protein, 93 aa, Unknown
  Bacterial polypetide isolated from the Sargasso Sea
KQNNSGGTLGGISSGQDIFASIALKPTSSIIKPAETIDKTGEKTEIVTKGRHDPCVGLRATPIGEAMLAIVLMDHFLRNRAQNADVSIEEKGE

SEQ ID NO: 153272 - protein, 81 aa, Unknown
  Bacterial polypetide isolated from the Sargasso Sea
MSSSFGKIFRVSTFGESHGGAVGVILDGCPPKLKIDINLIQNELDRRRPGQSDITTPRNEEDKIEILSGIKEGLTLGTPNS

SEQ ID NO: 153273 - protein, 43 aa, Unknown
  Bacterial polypetide isolated from the Sargasso Sea
VVKPTSSILNTRQTVNKKGKNTKISVRGRHDPCVGILAIPIGE

SEQ ID NO: 153274 - protein, 91 aa, Unknown
  Bacterial polypetide isolated from the Sargasso Sea
MSFNTFGKFFRFTTWGESHGPAIGCVVDGCPPNIKLNIRDIQLELNKRKPGQSKFTTQRKEDDKVEILSGTFEGKTTGTPISMIIFNKDMR

SEQ ID NO: 153275 - protein, 68 aa, Unknown
  Bacterial polypetide isolated from the Sargasso Sea
IIVSFAVKPTSSILKSRKTIDKFGKNTSISVKGRHDPCVGIRAVPIGEAMMHCVLLDHYLMNIAQCKS

SEQ ID NO: 153276 - protein, 298 aa, Unknown
  Bacterial polypetide isolated from the Sargasso Sea
SNWEHLEDIQQGAPITMIIWNKDQKSVAYEKLRTEMRPGHSDYPAYMKYKKYNDHRGGGRFSGRLTATHVMGGAIARKLLKDTIGVETNSYTSQIGKVKMKKEATKKEFKSIYTNDVRCPDNSTAKKMKSVILDARKKGDSLGGIIESITTNLPVGLGEPIFGSLESDISKAIFSIPAVKGIEFGSGFAGSEKFGSENNDAYVMKGGKVSTKTNNSGGILGGISNGMPITLRIAFKPASSISKIQQSVDIKKKKPIKLQVGGRHDPCVVPRAPPVVDSLIALTIADHALLSGFIRPTL

SEQ ID NO: 153277 - protein, 72 aa, Unknown
  Bacterial polypetide isolated from the Sargasso Sea
ISNGMDIYFNVAFKPVATIMKDQKSLDKEGNEIIVKGKGRHDPCVVPRAVPIVEAMTALVMADHLLRSKALH

SEQ ID NO: 153278 - protein, 60 aa, Unknown
  Bacterial polypetide isolated from the Sargasso Sea
MSSSFGKIFRVSTFGESHGGAVGVILDGCPPKLKIDINLIQNELDRRRPGQSDITTPRKK

SEQ ID NO: 153279 - protein, 271 aa, Unknown
  Bacterial polypetide isolated from the Sargasso Sea
KYLTAGESHGPELTAIIEGIPSNFEVSKNYIDEFLARRQKSLGSGGRMNIEKDEVLITSGVINNLSTGGPIAIKIINKDWKNWKDKEIEPFVVPRPGHADLVGTFKYQHDDIRLSLERASARETAIRCAIGAICHQILNQLGVEVVGYVSSIGEQKLENINLEDIGQIKKLVDESEVSCPDKETSELMINEILKARKKKDTLGGSITLIAKNFPAGCGSYVHFDRKLDAKLASSMMSVQSVKAVEVGSGIEASKNFGTAVQDQIVLNEQNV

SEQ ID NO: 153280 - protein, 115 aa, Unknown
  Bacterial polypetide isolated from the Sargasso Sea
MSANTFGKIFQLTSFGESHGPAIGGVITGCPSGINLNLEEIQSELDRRKPGQSNIVTQRKEEDIVIFHSGIFENKTTGSPIGFLIKNKDQKSQDYSHIKDNYRPSHADMVYDKKY

SEQ ID NO: 153281 - protein, 99 aa, Unknown
  Bacterial polypetide isolated from the Sargasso Sea
MSNNKFGKIFNFTTWGESHGEAIGCVVDGVPSKIPINEDDIQIWLNKRKPGQSKFTTQRKEDDKIKILSGVFDGFTTGAPISLIIFNKDQRSKDYKKIK

SEQ ID NO: 153282 - protein, 107 aa, Unknown
  Bacterial polypetide isolated from the Sargasso Sea
MAGNSFGNLFKITTWGESHGKALGVVIDGCPAGLSLSEKDIQLELNRRKPGQSRLTTQRKEDDKIEILSGVFKNKTTGTPISMIVRNVDAISKSYEDFKDIYRPRSC

SEQ ID NO: 153283 - protein, 62 aa, Unknown
  Bacterial polypetide isolated from the Sargasso Sea
VCRFVVKPTSSISAERKTIDINLQETTISTKGRHDPCVGIRAVPVGEAMLATTIADHCLRYF

SEQ ID NO: 153284 - protein, 168 aa, Unknown
  Bacterial polypetide isolated from the Sargasso Sea
MLTKIKFLTAGESHGRGLLGILDGIPSGLKIEKEFIDIQLARRQMGYGRGGRMKIEKDQVEIWSGIRLGETIASPIGLIVKNKDWENWKDKMAIEKRGKMPKKVTLPRPGHADLAGVEKFDFDDIRNVLERSSARETTMRVAIASICRKLLKDIGISVASRVTQIHNI

SEQ ID NO: 153285 - protein, 119 aa, Unknown
  Bacterial polypetide isolated from the Sargasso Sea
MATNSFGNIFRFTSYGESHGKSIGCVVDGVPPNILLKESDIQIDLDKRRPGQSKYVSQRKETDSVEILSGIFENKTTGHPIALNIKNVDQRSKDYSDISKKFRPGHADITYQEKYKIRD

SEQ ID NO: 153286 - protein, 33 aa, Unknown
  Bacterial polypetide isolated from the Sargasso Sea
MSFNTFGRLFRVTTWGESHGSAIGATIDGCPPG

SEQ ID NO: 153287 - protein, 102 aa, Unknown
  Bacterial polypetide isolated from the Sargasso Sea
MSFNTFGKFFRFTTWGESHGPAIGCVVDGCPPNIKISEKEIQAELNKRKPGQSKFTTQRKEDDKVNILSGVFEGKTTGTPISMIIFNKDMRSRDYETIKNKF

SEQ ID NO: 153288 - protein, 54 aa, Unknown
  Bacterial polypetide isolated from the Sargasso Sea
MTSRQTIDKKGKNTKISVKGRHDPCVGIRAVPIGEAMLSCVILDHLLMHRAQCG

SEQ ID NO: 153289 - protein, 74 aa, Unknown
  Bacterial polypetide isolated from the Sargasso Sea
GISSGQEIIVSFAVKPTSSILKSRKTINKFGKNTTISVKGRHDPCVGIRAVPVGEAMLSCVLLDHYLMNKAQCE

SEQ ID NO: 153290 - protein, 66 aa, Unknown
  Bacterial polypetide isolated from the Sargasso Sea
YQNKRARQLTRKAKEVDIEVSGRHDPCVGIRAVPIAEAMVSLVLVDHLLINKAQCADVKQELPFSE

SEQ ID NO: 153291 - protein, 64 aa, Unknown
  Bacterial polypetide isolated from the Sargasso Sea
MHKIAIVAGNKFGNLFSLTTFGESHGLAIGGIIDGCPSGVKIDQKLIQLDLDRRKPGQSKIVRK

SEQ ID NO: 153292 - protein, 88 aa, Unknown
  Bacterial polypetide isolated from the Sargasso Sea
MSFNTFGKIFRFTTWGESHGPAIGCVVDGCPPNIKISEKDIQSELNKRRPGQSKFTTQRKEDDKVNILSGIFEGKTTGTPISMIIYNK

SEQ ID NO: 153293 - protein, 33 aa, Unknown
  Bacterial polypetide isolated from the Sargasso Sea
MSGNTFGKLFQVTTYGESHGKALGCIIDGCPPS

SEQ ID NO: 153294 - protein, 54 aa, Unknown
  Bacterial polypetide isolated from the Sargasso Sea
HEQKTVPRDGESTTLSAKGRHDPCVLPRAVPMVEAMINLVLADHYLRQQSSQLH

SEQ ID NO: 153295 - protein, 226 aa, Unknown
  Bacterial polypetide isolated from the Sargasso Sea
EGLPANLDINENYIENDMSRRQKGYGSGGRMKIEKDRAEIKSGVRHGKTLGSPISLWIENKDWKNWTVPMSVEEVNPSEDIKVQTRVVPGHADFAGSLKYNHKDSRNVLERASARETAARVAAASICRKFLSELGIEIKSRVKSVGWESSEINDIESIEWGFVEKSEVRASNQEEDLKFKKVIDKVKKERTTIGGVFQVIAFGVPLGLGSHTQWDKKIDGKIAQSM

SEQ ID NO: 153296 - protein, 299 aa, Unknown
  Bacterial polypetide isolated from the Sargasso Sea
VVPRPGHADLIGTAKYGLNDIRLVLERSSARETAMRCAIGAIALQILESMGISIYGYVSSIGKVDYRYLNDFSLDEMRKLTDDSPVSCPDAEKSKQMVKEISDARKKKDTLGGSITTIATGVPPTLGSYVHWDKKLDAKLARILMSIQSVKAVEVGDGIESSKNYGTSVQDQYVLDEKEIKKESNNLGGFEGGMTNGENIELTAYLKPISTTLSPIKSVNLAEKEETETVYERSDTCAVPRAVPIFESAMALEILNAVLHKAGGDNKKEIIKNFENIPNLNIDEFDLDNKVWKFGYESE

SEQ ID NO: 153297 - protein, 70 aa, Unknown
  Bacterial polypetide isolated from the Sargasso Sea
MSFNTFGKIFRFTTWGESHGPAIGCVIDGCPPNIPISEKDIQKDMDKRRPGQSKFTTQRKESDKVIILSG

SEQ ID NO: 153298 - protein, 266 aa, Unknown
  Bacterial polypetide isolated from the Sargasso Sea
IALRIKNKDWENWKDKDIEPYVVPRPGHADLIGTAKYDLNDIRLVLERSSARETAMRCAIGAIAIQILESMGISVYGYVSSIGKVDYRYSNDFSLDEMRKLTDDSPVSCPDADKSQQMEKEISNARKKKDTLGGSITTIATGVPPTLGSYVHWDKKLDAKLARILMSIQSVKAIEVGDGIESSKNYGTSVQDQYVLNKKEIKKESNNLGGFEGGMTNGENIELTAYLKPISTTLSPIKSVNLAEKEETETVYERSDTCAVPRAVPI

SEQ ID NO: 153299 - protein, 153 aa, Unknown
  Bacterial polypetide isolated from the Sargasso Sea
RTHNGNNKLQARISTMMMSINAFKGIEIGSGFKSASQFGSKVHDEIGYHDGKFTRYTNNAGGVEGGMSNAQPIVLWMSMKPISTLIKPLRSVDIITHEEKNAHKERTDSCAVPAASVVSESMLCITLVDALLEKFGGDSVNQLKSHMKSSAKY

SEQ ID NO: 153300 - protein, 94 aa, Unknown
  Bacterial polypetide isolated from the Sargasso Sea
MSFNTFGKLFRFTTWGESHGPAIGCVIDGCPPNIKITEKDIQSELNKRKPGQSKFTTQRKEDDRVTILSGMFDGKTTGTPISMIIYNKDMRSRD

SEQ ID NO: 153301 - protein, 189 aa, Unknown
  Bacterial polypetide isolated from the Sargasso Sea
FDANEIEQNPVRCADPNAAKDMVQLIESLANDGDSIGGAVSLLIQGLPVGLGDPVFDKFDAVLSHALMSIGTIKGIEFGEGFGAITMKGSEHNDAFVHSGGQISTETNNAGGILGGITNGQDLRCRLAIKPPSSITKTQSTVTKDGDATEVSVTGRHDPCICPRVVPVVESMAAIAVLDRLLIQKTISN

SEQ ID NO: 153302 - protein, 103 aa, Unknown
  Bacterial polypetide isolated from the Sargasso Sea
MSGNTFGKIFSVTTFGESHGEAMGCIIDGCPPNFEINNEDIQVELDRRKPGQSDVTTQRKEDDKVEIMSGVFEGKTLGTPIALLIRNEDQISKDYSNIKDTFR

SEQ ID NO: 153303 - protein, 212 aa, Unknown
  Bacterial polypetide isolated from the Sargasso Sea
MGSGGRMNIESDQVEISSGIINNLTTGGPITLKIKNNDWKNWKDKDIDPYVVPRPGHADLVGTAKYDAKDIRLILERSSARETAMRCAIGAIAAQILENFDIHICGYVSGIGSLEYLYKGTDGIKNLQNKVTESSVSCSDDKISKEMENEIKLARKKKDTLGGSITTIATGVCPTLGSFVHWDRKLDANMARIFMSIQSVKAVQIGSVIEVS

SEQ ID NO: 153304 - protein, 92 aa, Unknown
  Bacterial polypetide isolated from the Sargasso Sea
MSFNTFGKIFRFTTWGESHGPAIGCIIDGCPPNIEIKADDIQKELNKRKPGQSKFVTQRKEKDLVQIMSGVFEGKTTGTPISLIIYNEDQRS

SEQ ID NO: 153305 - protein, 45 aa, Unknown
  Bacterial polypetide isolated from the Sargasso Sea
KGKNTKISVKGRHDPCVGIRAVPIGEAMINCVLLDHYLMHRAQCG

SEQ ID NO: 153306 - protein, 76 aa, Unknown
  Bacterial polypetide isolated from the Sargasso Sea
LGGISSGQEIIVSFAVKPTSSIINSRETINKKGKNTKISVRGRHDPCVGIRAVPIGEAMLSCVLLDHYLMNRAQCG

SEQ ID NO: 153307 - protein, 76 aa, Unknown
  Bacterial polypetide isolated from the Sargasso Sea
MSLNSFGHMYKVTTWGESHGPSLGATIDGCPPGIDINQNKLQVWMDKRKPGQSKYTTQRNEPDSVEILSGVFEGVS

SEQ ID NO: 153308 - protein, 270 aa, Unknown
  Bacterial polypetide isolated from the Sargasso Sea
MIIWNKDQKSIAYEKLRTEMRPGHSDYPAYVKYKKYNDHRGGGRFSGRLTATHVMGGAIARKLLKDTIGVETNSYTSQIGKVKMKKEATKKEFKSIYTNDVRCPDNNTAKKMKNVILDARKKGDSLGGIIESITTNLPAGLGEPIFGSLESDISKAIFSIPAVKGIEFGSGFAGSEKFGSQNNDAYVMKGGKVSTKTNNSGGILGGISNGMPITLRIAFKPASSISKIQQSVDIKKKKPIKLQVGGRHDPCVVPRAPPVVDSLIALTIAD

SEQ ID NO: 153309 - protein, 39 aa, Unknown
  Bacterial polypetide isolated from the Sargasso Sea
MAGNSFGQVFRITTFGESHGVALGAIIDGCPPGLSLSEA

SEQ ID NO: 153310 - protein, 82 aa, Unknown
  Bacterial polypetide isolated from the Sargasso Sea
TIQAGYKGGISNGMDIYFNIAFKPVSTIMRDQDSIDSKGNKVKVQGKGRHDPCVVPRAVPIVEAMAALVLADYLLLSKLSKI

SEQ ID NO: 153311 - protein, 62 aa, Unknown
  Bacterial polypetide isolated from the Sargasso Sea
IARFVVKPTSSIISKRRTIDINFKETSISTKGRHDPCVGIRAVPVGEAMLATTIADHCLRYF

SEQ ID NO: 153312 - protein, 70 aa, Unknown
  Bacterial polypetide isolated from the Sargasso Sea
MSGNTFGKIFKVTTFGESHGKALGCIIDGCPPNLKIDESDIQRDLDRRKPGQSKYTTQRKEDDKIEILSG

SEQ ID NO: 153313 - protein, 67 aa, Unknown
  Bacterial polypetide isolated from the Sargasso Sea
IICSFAVKPTSSILSNRETIDRKGKNTKISVKGRHDPCVGIRAVPIGEAMISCVLLDHYLMNRGQCG

SEQ ID NO: 153314 - protein, 69 aa, Unknown
  Bacterial polypetide isolated from the Sargasso Sea
WHTIGKLFTVTTSGESHGPGLSAIIDGCPPGLAISETDIQKELNKRRPGQSRFTSQRKETDEVSIMSGV

SEQ ID NO: 153315 - protein, 49 aa, Unknown
  Bacterial polypetide isolated from the Sargasso Sea
EGKEVLMKAKGRHDPCVLPRAVPMVDAMVALVLADHLLLNHAQCGLTNN

SEQ ID NO: 153316 - protein, 293 aa, Unknown
  Bacterial polypetide isolated from the Sargasso Sea
KPKKEHKKVTMPRPGHADLAGMMKYDFDDIRNVLERSSARETAMRVAIGAICRKLLEEVGISIGSRVYQIHDVVDSDEVDLSLTMSKLNDLADKSSVRCLNKDAENRMINVIDEAKSNGDSVGGSFEVIAKGMPYGLGSYINADGKLQARITQAMMSVNAFKGVEVGAGFASSAVFGSELHDEILFENEKITRSRNNAGGIEGGMSNAQPIHVKVSMKPISTLIKPLRSIDLNTMEPKLAHKERTDSCAVPAASIIGESMLAIVLADALLEKFGGDSIKQLKKHIKSSENINQ

SEQ ID NO: 153317 - protein, 49 aa, Unknown
  Bacterial polypetide isolated from the Sargasso Sea
QLINFGKNTTISVTGRHDPCVGIRAVPVGEAMMNCVLLDHYLMNKAQCH

SEQ ID NO: 153318 - protein, 77 aa, Unknown
  Bacterial polypetide isolated from the Sargasso Sea
LGGISSGQQIKVSFAVKPTSSILNSRKTIDKFGKNTNISVRGRHDPCVGIRAVPIGEAMMHCVLLDHFLMHKAQCES

SEQ ID NO: 153319 - protein, 159 aa, Unknown
  Bacterial polypetide isolated from the Sargasso Sea
KIPIGAKILVRVEGLMPGIGSPVFSKLDAELAKSMMGVNAVKAVELGSGTRVVEMKGSENRDLLKKDGFETNNSGGILGGISNGDDIDIFVSLKPTSSISQNTKTIDTKNNEVDLQVKGRHDPCVGLRATPILEAMAAMCILDQILLDRGQCSNVDRDL

SEQ ID NO: 153320 - protein, 73 aa, Unknown
  Bacterial polypetide isolated from the Sargasso Sea
ISSGQDIQLSVAIKPTSSILKSQKTINDKYKNTTISTRGRHDPCVGIRAVPIVEAMTACVLADHLMRNKAQCG

SEQ ID NO: 153321 - protein, 103 aa, Unknown
  Bacterial polypetide isolated from the Sargasso Sea
MSFNTFGKIFRFTTWGESHGPAIGCIVDGCPPNINVKEQDIQSELNKRRPGQSKFTSQRKEDDRVKILSGIFEGKTTGTPISLIIYNKDMRSRDYETIKNKFR

SEQ ID NO: 153322 - protein, 70 aa, Unknown
  Bacterial polypetide isolated from the Sargasso Sea
GISTGQEINVSFAVKPTSSILSSRKTIDRFGKNTTISVKGRHDPCVGIRAVPLGEAVMPCVILDHYLMDA

SEQ ID NO: 153323 - protein, 53 aa, Unknown
  Bacterial polypetide isolated from the Sargasso Sea
MSGNSFGKSFVVTTFGESHGVALGCIVDGCPPGLELTAEDIQMDLNKRKPGSS

SEQ ID NO: 153324 - protein, 59 aa, Unknown
  Bacterial polypetide isolated from the Sargasso Sea
PTSSIINNRETVDKKGKNTKISVRGRHDPCVGIRAVPIGEAMLSCILLDHFLMHRAQCG

SEQ ID NO: 153325 - protein, 88 aa, Unknown
  Bacterial polypetide isolated from the Sargasso Sea
MSSSFGKIFRVSTFGESHGGAVGVILDGCPPKLKIDIKLIQNELDRRRPGQSDITTPRNEEDKIEILSGIKEGLTLGTPIAMLVRNKD

SEQ ID NO: 153326 - protein, 130 aa, Unknown
  Bacterial polypetide isolated from the Sargasso Sea
ELAKALMSVNAVKAIEVGTGVDSVTMRGSENRDIISVDGFETNNSGGILGGISNGDDINIFASLKPTSSISQKTTTTNIDNQKVDLEVKGRHDPCVGLRAAPILEAMVALTIIDHMLIDKAQCFDVERKT

SEQ ID NO: 153327 - protein, 92 aa, Unknown
  Bacterial polypetide isolated from the Sargasso Sea
VSGKPEFTSNNSGGILGGLSSGQDIIARFAVKPTSSILNTLQTVTVKGEETEVSTKGRHDPCVGIRAVPVGEAMVACSLADHFLRAKAIQES

SEQ ID NO: 153328 - protein, 72 aa, Unknown
  Bacterial polypetide isolated from the Sargasso Sea
SSGQDIIASFAVKPTSSILNTRETINKAGKNTKISVKGRHDPCVGIRAVPIGEAMMCCVILDHFLMNRAQCG

SEQ ID NO: 153329 - protein, 90 aa, Unknown
  Bacterial polypetide isolated from the Sargasso Sea
MSGNSFGHLFKFTTFGESHGVAIGCIIDGSPPNIPLQVEDIQYWLDRRKPGNSKYTSQRKETDQVEILSGIFDGKTTGAPIALLIRNVDA

SEQ ID NO: 153330 - protein, 84 aa, Unknown
  Bacterial polypetide isolated from the Sargasso Sea
MAGNTFGSLFKLTTFGESHGKGIGGIIDGCPSGLTIDISKIQNDLDRRKPGQSKIVTQRKEPDQVEVLSGIFNGITTGTPLAFV

SEQ ID NO: 153331 - protein, 76 aa, Unknown
  Bacterial polypetide isolated from the Sargasso Sea
ISSNPFFCPDKTVIKLWEKYLLGIRKAGSSCGAIIEVRARGVPLGLGAPIYSKLDMDLAAAMMSINAVKGVNMDQE

SEQ ID NO: 153332 - protein, 115 aa, Unknown
  Bacterial polypetide isolated from the Sargasso Sea
MICLRFHTAGESHGKALTALLEGVPSGLGLDVARDVDPELARRQRGYGRGRRMQIEKDHVELLSGVRLGETLGSPISMVIRNRDWENWTTAMAHEAPPKDVNLKSLKPHYLPRPG

SEQ ID NO: 153333 - protein, 194 aa, Unknown
  Bacterial polypetide isolated from the Sargasso Sea
RCLDTRAEKEMIDIIDKAKKAGDSVGGVFEVIATGVPYGLGSYTQWNNKLQARITTMMMSINAFKGIEIGSGFKSASQFGSKVHDEIGYHEGKFTRYTNNAGGIEGGMSNAQPIVLWMSMKPISTLIKPLRSVDIITHEEKNAHKERTDSCAVPAASVVSESMLCITLVDALLEKFGGDSVNQLKSHMESSAKY

SEQ ID NO: 153334 - protein, 99 aa, Unknown
  Bacterial polypetide isolated from the Sargasso Sea
MSFNTFGKNFRFTTWGESHGEAIGCVIDGCPPLIPLNEKDIQKYLDMRKPGKNRFVTQRREDDKVTILSGVFEGKTTGTPIMLLIWNKDQKSKDYNDIK

SEQ ID NO: 153335 - protein, 58 aa, Unknown
  Bacterial polypetide isolated from the Sargasso Sea
PQDTVDEQGQDAELIGRGRHDPCVLPRAVPIVEAMTALVLLEHRMRHHAQCRSFPFQQ

SEQ ID NO: 153336 - protein, 74 aa, Unknown
  Bacterial polypetide isolated from the Sargasso Sea
MSFNSFGHMFRISTWGESHGPAIGVFIDGCPSNIRLEEESIQTFLDRRKPGINKFTSQRKEPDKVKILSGVFEG

SEQ ID NO: 153337 - protein, 161 aa, Unknown
  Bacterial polypetide isolated from the Sargasso Sea
MSSSFGKIFRVSTFGESHGGAVGVILDGCPPQLKIDVDLIQHELNRRRPGQSKITTPRNEDDKLEILSGLKEGKTLGTPIAMLVRNNDQRPGDYNNLEQVFRPSHADGTYHLKYGIQAGSGGGRASARETIGRVASGAIAKQILKTFCNTEILSWVKRIHD

SEQ ID NO: 153338 - protein, 78 aa, Unknown
  Bacterial polypetide isolated from the Sargasso Sea
GILGGISSGQDIIASFAVKPTSSILNSRETINKKGKNTKISVGGRHDPCVGIRAVPIGEAMMACVLLDHYLLNRAQCG

SEQ ID NO: 153339 - protein, 49 aa, Unknown
  Bacterial polypetide isolated from the Sargasso Sea
TVNRDGKAIKLKAKGRHDPCVLPRAVPMVEAMINLVLADHYLRQQKNCL

SEQ ID NO: 153340 - protein, 298 aa, Unknown
  Bacterial polypetide isolated from the Sargasso Sea
PKKEHKKVTMPRPGHADLAGMMKYDFDDIRNVLERSSARETAMRVAIGAICRKLLEEVGISIGSRVYQIHDVVDSDEVDLSLDMSKLNDLADKSSVRCLNKDAEKRMINVIDEAKSNGDSVGGSFEVIAKGMPYGLGSYINADGKLQARITQAMMSVNAFKGVEVGAGFASSAVFGSELHDEILFENEKITRSRNNAGGIEGGMSNAQPIHVKVSMKPISTLIKPLRSIDLNTMEPKLAHKERTDSCAVPAASIIGESMLAIVLADALLEKFGGDSIKQLKKHIKSQWKNINQLYLIG

SEQ ID NO: 153341 - protein, 69 aa, Unknown
  Bacterial polypetide isolated from the Sargasso Sea
MSFNTFGKFFRFTTWGESHGPAIGCVVDGCPPNIPLNENDIQKDMNKRRPGQSKFTTQRKESDKVSILS

SEQ ID NO: 153342 - protein, 69 aa, Unknown
  Bacterial polypetide isolated from the Sargasso Sea
MGDSFGHLFRITTWGESHGGGVGVVIDGCPAGLEISESEIQYELDRRRPGQSKITTQRKESDSARILFG

SEQ ID NO: 153343 - protein, 52 aa, Unknown
  Bacterial polypetide isolated from the Sargasso Sea
ILKGKEVLMKAKGRHDPCVLPRAVPMVDAMVALVLADHLLLNHAQCGLMNNL

SEQ ID NO: 153344 - protein, 242 aa, Unknown
  Bacterial polypetide isolated from the Sargasso Sea
RETAARVAAAAVCKKFLNEIGIKIKSRAKSVGWEKSEIENIDEIDWDFVENSEVRASNANEDISFKKVIDKVKKERTTIGGIFQVIAFNVPLGLGSHTHWDNKLDGKIAQSMVSINAVKGVEIGNGFENTERWGREVQDVIEPNSSDIRNFSQISNNSGGIEGGMSNGNDIIVNVAIKPIATMTSPLPSVDIMTGEVVEAAYNRSDICQVSRACPVGEAMLALTLTESVLEKFGGDSIQEIK

SEQ ID NO: 153345 - protein, 56 aa, Unknown
  Bacterial polypetide isolated from the Sargasso Sea
ILTSRKTIDKFGKNTSISVKGRHDPCVGIRAVPIGEAMMHCVLLDHYLLNSAQCKS

SEQ ID NO: 153346 - protein, 57 aa, Unknown
  Bacterial polypetide isolated from the Sargasso Sea
SILNSRKTIDRFGKNTNISVKGRHDPCVGIRAVPIGEAMMHCVILDHYLMNKAQCQS

SEQ ID NO: 153347 - protein, 191 aa, Unknown
  Bacterial polypetide isolated from the Sargasso Sea
MNRLGNHLTYTTWGESHGSAIGVVIDGFPSGITLNEDAIAADMQRRAPGKAQTSPRVESDRVEILSGVYQGKTTGAPIHLMIANKNAHKNDYETIKNVFRPGHAQYTYAQKYGHFDPYGGGRASARETACRVAAAAIARQWIEPMGVQVRSYLQQVGPISIPMITQAHPLPSLALEHGRFPCPEPIVAKSM

SEQ ID NO: 153348 - protein, 71 aa, Unknown
  Bacterial polypetide isolated from the Sargasso Sea
EVFLLNLTGETNADEMRINNSGKVKFLSNHAGGILGGISSGQDIICRFVVKPTSSILKSRKTIDINHTETN

SEQ ID NO: 153349 - protein, 45 aa, Unknown
  Bacterial polypetide isolated from the Sargasso Sea
GRHDPCVGIRAVPIAEAMVSLVLVDHLLINKAQCADVKQELPFSE

SEQ ID NO: 153350 - protein, 281 aa, Unknown
  Bacterial polypetide isolated from the Sargasso Sea
MPRPGHADLAGMMKYDFDDIRNVLERSSARETAMRVAIGAVCRKLLDEVGITIGSRVYQIHDVVDTKEADHSLTMSQLNDLADKSSVRCLNKDAEERMIKVIDEAKSNGDSVGGSFEVIAKGMPYGLGSYINADGKLQARISQAMMSVNAFKGVEVGAGFASSAAFGSELHDEILFENDKITRSRNNAGGIEGGMTNAQPIHVKVSMKPISTLIKPLRSIDLNTMEPKLAHKERTDSCAVPAASIIGESMLAIVLADALLEKFGGDSINQLKKHIESSGKY

SEQ ID NO: 153351 - protein, 320 aa, Unknown
  Bacterial polypetide isolated from the Sargasso Sea
MSGNSIGRRLVLTSFGESHGKCIGAVLDGCPAGLELEEKDIQKMLDLRKPGQSLVSTQRKEGDVVEILTGTFRGYTTGAPITMVIWNKDQKSIAYEKLRTEMRPGHSDYPAYMKYKKFNDHRGGGRFSGRLTATHVMGGAIARKLLKDTIGVETNSYTTQIGKIKMKKAAAKKEFRSIYTNEVRCPEKNTAQKMKSVILDARKKGDSLGGIIESITTNLPVGLGEPIFGSLESDISKAIFSIPAVKGIEFGSGFAGSEKFGSENNDAYVMKGGKVSTKTNNSGGILGGISNGMPITIRIAFKPASSISQIQQSVDIKKKK

SEQ ID NO: 153352 - protein, 69 aa, Unknown
  Bacterial polypetide isolated from the Sargasso Sea
PTSSIRSKGQTINAAGDEVEVEVTGRHDPCVGIRAVPIAEAMVNLVLMDHFLRNQAQCGAINQSTPFKK

SEQ ID NO: 153353 - protein, 141 aa, Unknown
  Bacterial polypetide isolated from the Sargasso Sea
EKPIFGSLESDISKAIFSIPAVKGIEFGSGFAGSEKFGSQNNDAYVMKGGKVSTKTNNSGGILGGISNGMPITLRIAFKPASSISKIQQSVDIKKKKPIKLQVGGRHDPCVVPRAPPVVDSLIALTIADHALLSGFIKPTL

SEQ ID NO: 153354 - protein, 260 aa, Unknown
  Bacterial polypetide isolated from the Sargasso Sea
MIRFLTAGESHGPELTGIVEGVPAGFTISKEFIDSYLKRRQKDTGSGGRMNIESDEVFISSGVVNNISTGAPIALRIKNKDWENWKDKDIEPYVVPRPGHADLIGTAKYDLNDIRLVLERSSARETAMRCAIGAIAIQILESMGISIYGYVSSIGKVDYRYSNDFSLDEMRKLTDDSPVSCPDADKSEQMEKEISNARKKKDTLGGSITTIATGVPPTLGSYVHWDKKLDAKLARILMSIQSVKAIEVGDGIESSKNYGT

SEQ ID NO: 153355 - protein, 94 aa, Unknown
  Bacterial polypetide isolated from the Sargasso Sea
NDSFNEDGSTKTNYSGGVQGGISNGMDIYFNIAFKPVSTIMRDQDSIDSEGNKVKVQGKGRHDPCVVPRAVPIVEAMAALVLADYFLLNKLSKI

SEQ ID NO: 153356 - protein, 105 aa, Unknown
  Bacterial polypetide isolated from the Sargasso Sea
MSFNTFGKIFRFTTWGESHGPAIGCVVDGCPPNISIKEDDIQKELNKRKPGQSKFTTQRKEDDKINILSGIFEGKTTGTPISMIIYNKDMRSRDYETIKNKFRPG

SEQ ID NO: 153357 - protein, 302 aa, Unknown
  Bacterial polypetide isolated from the Sargasso Sea
EPFVVPRPGHADLIGTFKYQHDDIRLSLERASARETAIRCAIGAICHQILNQLGVEVVGYVSSIGEQRIENINLEDIGQIKKLVDESEVSCPDREASELMVNEILNARKKKDTLGGSITLVAKNFPAGCGSYVHFDRKLDAKLASSMMSVQSVKAVEVGNGIEASKDFGTAVQDQIVLNERNVERITNNLGGFEGGMSTGEQIMITSYLKPISTTLTPIKSIDLASQKETETTYERSDTCAVPRAVPIFESVISIELLNSLIENTGGDNKEVILKRVSEIKDINLDSFNLANKTWSMKYENE

SEQ ID NO: 153358 - protein, 362 aa, Unknown
  Bacterial polypetide isolated from the Sargasso Sea
MGLGDHLKVTLFGESHGKCVGALFEGIPPGTEIDLDALVNDLSLRKPGRRGMSARLETDECEILSGVHEGKATGWPLLMISRNSDARSSDYSFLPDHPRPGHADMVEEIRSSGSNDPRGGGSQSARLTLGLVAAGSQVRKMLDEAGWSCHAHLSRVGEISARPLIHLDTSKALEEGTEMFRLNCRDPEAAVRMGESIRKIRREKDSIGSVVELLILGLPIGVGEPWFDGLEPSLARALMAIPGARAIEFSNGTEASRMRGSENNDMWVPGDDMPELEGAKTGDADGALGGRSTGAPLRVLVHFKPPSSLPREQFTLHLPSNKKQSLKVGGRHDPVIGPRAAPVVEAVAMLVVADLGIAGGFL

SEQ ID NO: 153359 - protein, 52 aa, Unknown
  Bacterial polypetide isolated from the Sargasso Sea
SRKTIDKFGKNTTISVKGRHDPCVGIRAVPVGEAMLNCVLLDHYLMNKAQCG

SEQ ID NO: 153360 - protein, 38 aa, Unknown
  Bacterial polypetide isolated from the Sargasso Sea
SVKGRHDPCVGIRAVPVGEAMLSCVLLDHYLLHKAQCS

SEQ ID NO: 153361 - protein, 50 aa, Unknown
  Bacterial polypetide isolated from the Sargasso Sea
NAYGKEVLMKLKGRHDPCVLPRAVPMVDSMVALVLADHLLLHQAQCSIIK

SEQ ID NO: 153362 - protein, 117 aa, Unknown
  Bacterial polypetide isolated from the Sargasso Sea
MSFNTFGKLFRFTTWGESHGPAIGCIVDGCPPNINLKEQDIQIELDKRKPGQSKFTTQRKEDDKVQILSGIFEGKTTGTPISLIIYNKDMRSKDYSNIKDKFRPGHADFTYFKKYGN

SEQ ID NO: 153363 - protein, 100 aa, Unknown
  Bacterial polypetide isolated from the Sargasso Sea
MAGNSFGNIFKISSFGESHGKALGGVIDGCPAGVNIDLDFINSELNRRRPGQSEIVTQRKEDDSVEFLSGIFEGKSTGTPIGFIIVNQDQKSKDYSHIKD

SEQ ID NO: 153364 - protein, 76 aa, Unknown
  Bacterial polypetide isolated from the Sargasso Sea
AFQMRDDISLSFIIKPTSSIKSKGKTVNKDGEEVDIEVTGRHDPCVGIRAVSIAEAMVSLVLGRSFIDKSSTVCRS

SEQ ID NO: 153365 - protein, 234 aa, Unknown
  Bacterial polypetide isolated from the Sargasso Sea
YVQEKIIDLQDLQSKVTNSPVSCPDEKAGKDMENEILEARKKKDTLGGSITTIASGVPPTLGSFVHWDRKLDANLARIFMSIQSVKAVEIGNGIEASKNFGTNVQDQYVLQDGSIKKESNNLGGFEGGMTNGEEIIVKAYLKPISTTLTPIKSVNLSSKEETKTVYERSDTCAVPRAVPIFESAMAFEILRNLLLKTGGDSKKEIVKNFNSISKLNVDDFDMDNQTWKMNYETE

SEQ ID NO: 153366 - protein, 59 aa, Unknown
  Bacterial polypetide isolated from the Sargasso Sea
PTSSILTSRKTIDKKGKNTNISVKGRHDPCVGIRAVPIGEAMINCVLLDHFLMNRAQCG

SEQ ID NO: 153367 - protein, 46 aa, Unknown
  Bacterial polypetide isolated from the Sargasso Sea
HDPCVGIRATPIAEAMMALVLMDHFLRNRAQNADVVSETPDIPSKK

SEQ ID NO: 153368 - protein, 59 aa, Unknown
  Bacterial polypetide isolated from the Sargasso Sea
MSFNTFGKIFRFTTWGESHGPAIGCVIDGCPPNIPISEKDIQKDMDRRRPGQSKFTTHR

SEQ ID NO: 153369 - protein, 271 aa, Unknown
  Bacterial polypetide isolated from the Sargasso Sea
AYEKLRTEMRPGHSDYPAYMKYKKFNDHRGGGRFSGRLTATHVMGGAIARKLLKDTIGVETNSYTTQIGKIKMKKIATKKEFKSIYTNDVRCPEKNTAQKMKSIILDARKKGDSLGGIIESITTNLPVGLGEPIFGSLESDISKAIFSIPAVKGIEFGSGFAGSEKFGSENNDAYVMKGGKVSTKTNNSGGILGGISNGMPITIRVAFKPASSISQIQQSVDIKKKKSIKLQVGGRHDPCVVPRAPPVVDSLVALTIADHALLSGSIKPTL

SEQ ID NO: 153370 - protein, 95 aa, Unknown
  Bacterial polypetide isolated from the Sargasso Sea
MSFNTFGKIFRFTTWGESHGPAIGCVVDGCPPNIKITEKDIQIELNKRKPGQSKFTTQRKEDDKVNILSGVFEGKTTGTPISMIIYNKDMRSKRL

SEQ ID NO: 153371 - protein, 72 aa, Unknown
  Bacterial polypetide isolated from the Sargasso Sea
MAGNTFGSLFKLTTFGESHGKGIGGIIDGCPSGLTIDISKIQNDLDRRKPGQSKIVTQRKEPDQVEVLSGIF

SEQ ID NO: 153372 - protein, 69 aa, Unknown
  Bacterial polypetide isolated from the Sargasso Sea
ILKAAFKPTGTIIKQQNTVTNTGKEIEFGGRGRHDPCVLPRAVPMVESMVAIVLIDHALRHNAQNNFTG

SEQ ID NO: 153373 - protein, 341 aa, Unknown
  Bacterial polypetide isolated from the Sargasso Sea
EQDWAHIETGVRHGKTMESPIALTIKNKDWVNWLEAMSVEKVEHYKEEGRNQRVTRIRAGHADLPGVMKYNFDDVRPVLERSSARETASRVAAGALARRFLEEFGISIKSHVISVGKIKIPSTSDIDWDKVEQSDVRCTDENAAELMRREIDEAKEAGDTVGGTVEVIAENVPIGLGSHTQWDLKIDALVAQAFMSINAVKSVSIGPGEEIMDKWGSEVQDVILPVSNPDDPWKRNTNNAGGTEGGMSNGMPLVARFAIKPIATMRNPLPSVDLDTGEEVLAHFERSDVCQVPPAGVIGEAMMALVIAKCMLDKFGGDSLSETYRNYLGYLDTVKPRNTYK

SEQ ID NO: 153374 - protein, 1747 aa, Unknown
  Bacterial polypetide isolated from the Sargasso Sea
DVESPEGYVSVVGGGVLQETGTLDDSDVTTDTIILEETSTESIVFPQIILEGGAERDVFSGNGLTRTFNINNTSTLTDTLTLFIDGVKIEQTDKAGNAYWSVEDTPYLVLNGTDSSSTDAGDNILLEVDDAPQTGSVITLEQQTITFSELPIDRTPKVGVNIEVRGDNVNHLLLDGTTRRSFIILDGTDNSGGAFGNTRSNFEENLILNQTDSSGSDEGDNILLEDSGDTDFDNAGDFILSNGGEVLPDKFTTSSDLIVLEHGSFSSSEANSIRKAYVSNSGTGYTDLPTVTVTSTSGSSAKLLASTSDIGAIDEVSITDAGLSLSSSNPPDIVPRAHFIVKDVTGTFVAGNTLTTHEGTVKGWDSSTNVLDLEFENVVRIDGEQQSGSVNQGIAFEEGTRDLNTHQSGIVHIILEDAIDVADTSTDSIILDATAITESTLFDVNSYKTRLKVRVVENTLQTISVSTEDAALGTKIFSIDGSYNEKDFTAELLQLERGRVYYFDLSDTSLYNVDSTKNHELVFAELSNRLKGDGSTTTFTLKNSVIEKPVAFVTQNSTSFPANVRSHFDNVTASTGYTTSGNTITFTTAPSSGNHVLIFTKYTTGVTTSEDYIEIGGGIYDDTTEAGRAFIQLELDSEAPDLYYYCVNHGPRMGGRISSLTKADLIVDEGSKVTLDGESIGPSPQGILLENGSQDVAITYSLLLEAESGSILLNGTDSNGLNNGDNIILNEPTNRSDPFSIVFEDSFIRSAEELSNKILIDLNAEDRSNHGTAIALESGEGDSLILEDQFLNDSISKIIMNTSLSDYDSTLDNLVKLGKATKKSDGTLDFSVKLVLENGKEPIVLNGTDASGANADDSILFEDAINQEDRDFHTDNAIAHLLVNEEFSFINDTEDAGGTSVLMTEETDKTNNIFNIILNGTDDSSSNAGDNILTEIEGDELRQEEFYSLGMRVPTSKFELEAFKLEPIQHENENILLESNRTSDTEIFYVLLDGTDSSSTNAGSKLISEASSFSHDFATIEPRIILDGTDSDGSDSRGGLLFENEDVSFEEIVLNGSDSSSTDAGDNLVLETGIDFSNGNVTITDSGGASATIVKADIATVTSAVNTSSTSVTGYSGIRSLMGEDLNRIQDSYYYQDYSYEVQVGQSLSTYINELKKAVHPTGFLPFGKVSIASSISAAISTTAAGISDYTGDTDTFSPELASVLQTLFSQTVQSRLQVTPTTYGIGQSDDQIVLENGIAAGDNLVLDASAASTDEGSNILLEFRTSDLDTIMLETDEQVLLETGSFIILEEFSDVGIDLEDGALEAILYESGRVSSETTNYAYDGGGRVMAESSNAPSADADRFLVREITTKISTAPTSRASRNLLLHLAKYPFGTVDSIQLETSTANQTSFLALDGEIPLAQETTFIILESGENVFLEQPSDEGQRIVAEMDTWAFPIGFKVSENERIVLEYENEFVETIPLSEIGDFRFEDILAIDKIIMDENPVDQDNANAVENTGILMENFGQLLLNGTDSSSTNAESFLAQETTKNNRFTLEESGLLIVEENSTHSIIDNLISESALEETIVLEDFFNSRNTFGIRLEQDSYNEDVIILDGTDSNSTNAGIKLELEEYFQSGQETRPARILLEDFEHLMMETGDFVGMENETVTVFTGDFKTSAIQLETTNIISSKGQIPLGNWTLNSSTSPVGYQPVVHASEIKVRSTGEIALEDSTDTTHGFLVLNGTDSSSTNAGDNIDCEGATGITA

SEQ ID NO: 153375 - protein, 263 aa, Unknown
  Bacterial polypetide isolated from the Sargasso Sea
MTIDESKVFQLNGDALTGPEVVAIAREHLPVTIGDDAKQAIAHSRAIVESRFKSGIPTYGINTGFGALSTKVISKDECAALQFNLLRSHAASVGEPLEEEIVRGMMGLLAASLCRGKSGIREVVVTTLVSMLNNNVVPVIPSRGSVGASGDLSPLAHLALVLCGEGEAFVDGERMSGEEALETYGIEKIVPQEKEGLALINGTHLMCATAALALSDIASICEHAVIATAMSIDAAKATDTFLDDRIHAARGQSGQRTVAKQSQ

SEQ ID NO: 153376 - protein, 468 aa, Unknown
  Bacterial polypetide isolated from the Sargasso Sea
MTENGFRVEADLLGKRSIPSEAYYGVHTLRAKENFDISGRTIASLPFLVMALAAVKEAAADANCELGLLPRPLRDAIAAACVEIREGRLHDQFVVDIIQGGAGTSTNMNANEVICNRALEIMGHARGEYEYLHPNEHVNLAQSTNDVYPTAIRVATCFAVEHLLEAMARLRDAFAERADAFAGLLKLGRTQLQDAVPMTLGQEFSTYAVMLTEDIARLQEAGWLIREINLGATAIGTGITAHPQYAEKALAALRRITGLDLSTAPNLIEATQDCGAFVQVSGVLKRIAVKLSKICNDLRLLSSGPRAGFGEINLPPVQAGSSIMPGKVNPVIPEVVNQVAFEVFGNDLTVTFAAEAGQLQLNAFEPVIASALFRSFSHLTAACTTLAQRCVSGITANPERLRETMERSVALATALNPYIGYKRATAVAAEAHATGKSIREVVLEREWMTDAQLDEALQPEALIRPRVL

SEQ ID NO: 153377 - protein, 248 aa, Unknown
  Bacterial polypetide isolated from the Sargasso Sea
MKTRTTPVHTDFLGATQAARLVAQVGVAACLAGLADAIEQDFARWPDFEKSARLAHHSPGGVIELMPVSDALDYAFKYVNGHPDNADRDLPTVMAFGALADVATGLPVFLSDLTLATALRTAATSALAARRLARPGCRSMALIGAGSQSEFQALAFTHLLGVERLRIFDIDVQAMRKLVDNLGHAGIAAQRITCCTSSAQALEGADIVTTVTAAKRRACVIADADVRPGTHINAVGGDCPGKTELPVE

SEQ ID NO: 153378 - protein, 359 aa, Unknown
  Bacterial polypetide isolated from the Sargasso Sea
MTRFLDVPATARLIAKTGVTTFLSELVDTLRADYLQWADFDKSPRVACHSRDGVIELMPVANASLFAFKYVNGHPVNAARGMHTVMAFGALAEVDTGYPLLLAELTLTTALRTAATSVLAAQALARPDSRTMALIGNGAQSEFQAIAFHTLLGIDEIRVFDVDPRATDKLVQNLAAYPTLRVVRAASTADAVRGADIVTTVTADKAYATIVTADMIEPGMHLNAVGGDCPGKTELEAGVLQAGRVFVEFEPQSRIEGEIQQMPADFPVTELWRVLQGETTGRERADEVTVFDSVGFALEDYSALRYLYALAQQHNAGVEIALIPPAVDPKNLFALIDDPAAIALGHAAYATEAVAALAR

SEQ ID NO: 153379 - protein, 183 aa, Unknown
  Bacterial polypetide isolated from the Sargasso Sea
NRIWHVMQGCVRRGLESEQSFLPGGLHLRRRARNLFRELDQERDQGYREMMDWVSLYAIAVNEENAAGGRVVTAPTNGAAGVIPAVMHYCLDTRNDFNEAAVADFLLTATGIGILFKEGASISAAEVGCQGEIGVACSMAAAGLASVMGGTPKQVANAAEIGMEHNLGLTCDPVGGLVQIPCI

SEQ ID NO: 153380 - protein, 180 aa, Unknown
  Bacterial polypetide isolated from the Sargasso Sea
MHLGARIVTSPTNGASGIIPATLKYYVKFIKNSNDNGIINFLTTASAIAILFKNNASISGAEVGCQGEVGVACSMAAAGLTSALGGNINQIENAAEIAMEHNLGLTCDPVKGLVQIPCIERNSMGAIKAINASRLALSGSGVHNVSLDQVIKTMNETGKSMNTIFKETSLGGLAVNVIEC

SEQ ID NO: 153381 - protein, 265 aa, Unknown
  Bacterial polypetide isolated from the Sargasso Sea
ERTGMTCRELMWINEQTWRTESEIWDGLLDIWGVMQECTQRGMASAETILPGGLNVRRRAPALYKELIEKPDSSPSEVMDWVSLFAIAVNEENAAGGRMVTAPTNGGGGVIPAVMHYCNRFRTDFNEDKVISFLLTAGAIGILFKEGASISAAEVGCQGEVGVACSMAAAGLAAVMDCSPSQIANAAEIGMEHNLGLTCDPVGGLVQIPCIERNTMGAIKAINAARLAKRGDGNHIISLDRVIATMHKTGKDMLHSYKETSLGGL

SEQ ID NO: 153382 - protein, 240 aa, Unknown
  Bacterial polypetide isolated from the Sargasso Sea
HVMQGCVRRGLESEQSFLPGGLHLRRRARNLFRGLDQERDQGHREMMDWVSLYAIAVNEENAAGGRVVTAPTNGAAGVIPAVMHYCLDTRNDFNEAAVADFLLTATGIGILFKEGASISAAEVGCQGEIGVACSMAAAGLASVMGGTPKQVANAAEIGMEHNLGLTCDPVGGLVQIPCIERNTMGAVKAINAARLAMRGDGEHKISLDHVISTMQRTGADMLHQYKETSLGGLAVSTIEC

SEQ ID NO: 153383 - protein, 304 aa, Unknown
  Bacterial polypetide isolated from the Sargasso Sea
RGRLLLAQGQHEVDFPQNDGMRFHNGNLPLHENGMQIHAYNGETVIYSKTYYSIGGGFIVDEEHFGQDASGEVSVPYPFKSATEMLEYCNSTGLSLSGMAMQNELALHSKKEIEEYFGHVWQTMQACIDRGMNTEGVLPGPLRVPRRASALRRMLVSSDKLSNDPMNVIDWVNMFALAVNEENAAGGRVVTAPTNGACGIVPAVLAYYDHFIESVSPDIYTRYFLAAGAIGALYKMNASISGAEVGCQGEVGVACSMAAAGLAELLGASPEQVCVAAEIGMEHNLGLTCDPVAGQVQVPCIERN

SEQ ID NO: 153384 - protein, 280 aa, Unknown
  Bacterial polypetide isolated from the Sargasso Sea
FYSVGGGFVLEETEMENSSSENSIRVPYPFSSASELLQHCENQSMSIADLVLTNEKTWHHEDKIQEGINRIWHVMQGCVRRGLESEQSFLPGGLHLRRRARNLFRELDQERDHGHREMMDWVSLYAIAVNEENAAGGRVVTAPTNGAAGVIPAVMHYCLDTRNDFNESAVADFLLTATGIGILFKEGASISAAEVGCQGEIGVACSMAAAGLASVMGGTPKQVANAAEIGMEHNLGLTCDPVGGLVQIPCIERNTMGAVKAINAARLAMRGDGEHKISLD

SEQ ID NO: 153385 - protein, 279 aa, Unknown
  Bacterial polypetide isolated from the Sargasso Sea
ANNLIFHKDEQLPHHSNGMRFSLMGHPQKTLFSQVFYSVGGGFVLEETEMENCSSENSIRVPYPFSSASDLLQHCENHSMSIADLVLNNEKTWHHEDQIQEGINKIWHVMQGCVRRGLESEQKFLPGGLHLRRRARNLFRELDQERDQGHREMMDWVSLYAIAVNEENAAGGRVVTAPTNGAAGVIPAVMHYCLDTRNDFNESAVADFLLTATGIGILFKEGASISAAEVGCQGEIGVACSMAAAGLASVMGGTPKQVANAAEIGMEHNLGLTCDPVGG

SEQ ID NO: 153386 - protein, 458 aa, Unknown
  Bacterial polypetide isolated from the Sargasso Sea
MISVFDMFKIGIGPSSSHTVGPMKAGKIFMQHLADSGQIAQVDELRAELFGSLGQTGKGHGTGKAVILGLMGEDPETVDTDSIDGILEQVSKNETLTLSCGKVVKFTREDGITYHRRKTLPAHANAMTLYAYSKGECIFERTYYSVGGGFILDEDEINQRNASPASQIESAPYDFNSSAQLLELCTEHGLSISSLMMANELSLASEEEVKAKLWNIWQTMKTCIERGYQKEGILPGGLKLRRRAPALYRRLKAEGRNNVDPLTAMDWVDLFALSVNEQNAAGDRVVTAPTNGAAGIIPAVLCYYDTFVQEVDIDVCARYLLTAAAIGILYKKNASISGAEVGCQGEVGVACSMAAGALTEIMGGTVEHVENAAEIGMEHNLGLTCDPVGGLVQVPCIERNAMGAIKAINASRMALRGDGNHKVSLDKVIKTMMDTGKDMRSKYKETAKGGLAVNIVEC

SEQ ID NO: 153387 - protein, 401 aa, Unknown
  Bacterial polypetide isolated from the Sargasso Sea
MTGVGHGTDKAIIMGLEGETPEEVDPESVDLRFHQICRDEKINLLGNRMVPFSTANNLIFHKDEQLPHHSNGMRFSLMGHPQKSLFSQIFYSVGGGFVLEETEMENSSSKNSIRVPYPFSSASALLQHCENQSMSIADLVLTNEKTWHHEDKIQEGINKIWHVMQGCVRRGLESEQSFLPGGLHLRRRARNLFRELDQERDQGHREMMDWVSLYAIAVNEENAAGGRVVTAPTNGAAGVIPAVMHYCLDTRNDFNEAAVADFLLTATGIGILFKEGASISAAEVGCQGEIGVACSMAAAGLASVMGGTRKQVANAAEIGMEHNLGLTCDPVGGLVQIPCIERNTMGAVKAINAARLAMRGDGEHKISLDHVISTMQRTGADMLHHYKETSLGGLAVSTIEC

SEQ ID NO: 153388 - protein, 462 aa, Unknown
  Bacterial polypetide isolated from the Sargasso Sea
MAVSVFDLFKIGIGPSSSHTVGPMRAALMFVQGLERDGQLDATAHVKVELYGSLGATGKGHGTDRGVMLGLLGDAPDTVDPDTIDARLEDVRKSKQLALLGTHPVPFVLKENIAFYRQALPEHPNGMKLRASDASGNVLVERTYLSVGGGFVVTAGAPNTKVLSAAEQMTHPFRTGAELLALTESTGKSIAQLMWENERAWHTEEETRDGLLKIWAVMQSCVSRGCGIGNPDADGNLPGPFQVKRRAPQLYRTLTGSPERALQDPLSMIDWINLYAIAVNEENAAGGRVVTAPTNGAAGIIPAVLHYYTRFTPGANEQGVIDFLLTAAAIGILYKLNASISGAEVGCQGEVGVACSMAAGALAAVLGGTPQQVENAAEIGMEHNLGLTCDPVGGMVQIPCIERNAMASVKAVNAARMALRGDGSHYVSLDSVIKTMRETGADMKTKYKETSRGGLAVNIVEC

SEQ ID NO: 153389 - protein, 460 aa, Unknown
  Bacterial polypetide isolated from the Sargasso Sea
MISVFDLFSIGIGPSSSHTVGPMRASYAFVNALKQQGVLPSTERVEVECYGSLGQTGKGHGTGKAIILGLAGFEPESVDIEAIPAFLTEVERSQSLLLAGEQPSQFARSGAIIFNRRKTLPAHSNGMTLRAFAGEQLLFSQTYYSIGGGFIIEESHFANAKEEAARFDAAHPIPYPFESGAQLLAHCQESGLSISGVMLANEKVFRTEAEIKAGLRKIWQAMQGCVERGCRSEGVLPGGLKVKRRAPALYRQLSCETNFNKDPLMVMEWVDLFALAVNEENAAGGRVVTAPTNGAAGIIPAVLHYYDRFVRKVDDELLLSYFLAAAAIGILYKKNASLSGAEVGCQGEVGVACSMAAGALTEILGGSPAIVENAAEIGMEHNLGLTCDPVGGQVQVPCIERNAMGAVKAINAARLALRGTGEHKVSLDKVIKTMWETGNDMKTKYKETARGGLAVNITEC

SEQ ID NO: 153390 - protein, 458 aa, Unknown
  Bacterial polypetide isolated from the Sargasso Sea
MISVFDMFKIGIGPSSSHTVGPMKAGKIFMQHLADAGQIAQVDELRAELFGSLGQTGKGHGTGKAVILGLMGEDPETVDTDSIDGILEQVSKNETLTLSCGKVVKFTREDGITYHRRKTLPAHANAMTLYAYSKGECIFERTYYSVGGGFILDEDEIHQRNASPASQIESAPYDFNSSAQLLDLCTEHGLSISSLMMANELSLASEEEVKAKLWNIWQTMKTCIERGYQKEGILPGGLKLRRRAPALYRRLKAEGRNNVDPLTAMDWVDLFALSVNEQNAAGDRVVTAPTNGAAGIIPAVLCYYDTFVQEVDIDVCARYLLTAAAIGILYKKNASISGAEVGCQGEVGVACSMAAGALTEIMGGTVEHVENAAEIGMEHNLGLTCDPVGGLVQVPCIERNAMGAIKAINASRMALRGDGNHKVSLDKVIKTMMDTGKDMRSKYKETAKGGLAVNIVEC

SEQ ID NO: 153391 - protein, 458 aa, Unknown
  Bacterial polypetide isolated from the Sargasso Sea
MISVFDMFKIGIGPSSSHTVGPMKAGKIFMQHLADAGQIAQVDELRAELFGSLGQTGKGHGTGKAVILGLMGEDPETVDTDSIDGILEQVSKNETLTLSCGKVVKFTREDGITYHRRKTLPAHANAMTLYAYSKGECIFERTYYSVGGGFILDEDEIHQRNASPASQIESAPYDFNSSAQLLDLCTEYGLSISSLMMANELSLASEEEVKAKLWNIWQTMKTCIERGYQKEGILPGGLKLRRRAPALYRRLKAEGRNNVDPLTAMDWVDLFALSVNEQNAAGDRVVTAPTNGAAGIIPAVLCYYDTFVQEVDIDVCARYLLTAAAIGILYKKNASISGAEVGCQGEVGVACSMAAGALTEIMGGTVEHVENAAEIGMEHNLGLTCDPVGGLVQVPCIERNAMGAIKAINASRMALRGDGNHKVSLDKVIKTMMDTGKDMRSKYKETAKGGLAVNIVEC

SEQ ID NO: 153392 - protein, 456 aa, Unknown
  Bacterial polypetide isolated from the Sargasso Sea
MISVFDIFKIGVGPSSSHTVGPMKAAKQFVDELRAGGKIRDITRIQVDVYGSLSWTGKGHHTDTAIIMGLAGNLPENVDIDGIPEFISRVEQTGRLPIGLHCHTVSFPRDAMVFHDEALPLHENGMKLTAFIEDAAVYSKTYYSIGGGFIVDEENFGKADSGDMSVSYPFKSAAELIAHCSQTGLSISALMMENEKCFNTPEEIYKKLGKIWTTMREGIERGCRTEGVLAGPLRVPRRAAPLYRQLTTNENLSNDPMNIVDWVNMFALAVSEENAAGGRVVTAPTNGAAGIIPAVLAYYDKFIQPVGRDDYTRFYLAAAAVGMLYKMNASISGAEVGCQGEVGVSCSMAAAGLTELMGGSPEHVCEAAEIGMEHNLGLTCDPVAGQVQVPCIERNAIAAMKAVNASRMALRRTSKPRVSLDKVIETMYITGKDMDSKYRETSRGGLAIKVMQVACE

SEQ ID NO: 153393 - protein, 342 aa, Unknown
  Bacterial polypetide isolated from the Sargasso Sea
MPISGSIKARGGIYEVLKHAEDLALAAGLLSLEDDYACLDSDAMRAFFGGYQVAVGSTGNLGLSIGIISARLGFQATVHMSADARQWKKDKLRAHGVTVVEYASDYSVAVEQGRRQAEADPRCHFVDDENSRHLFLGYAVAGERLKQQLVAASVVVDAEHPLFVYLPCGVGGGPGGVAFGLKLAFGDAVHCLFAEPTHSPCMLLGVHTGRHEELAVQDFGIDNRTAADGLAVGRPSGFVGRAMQRLIDGYYTVSDEQMFRYLALLEQTEGQRLEPSALAGMPGVLRVLGEQQGYRQRMGLTPQRMAQATHLVWATGGSMVPQAEMDSYLARGRQLLQGSGED

SEQ ID NO: 153394 - protein, 302 aa, Unknown
  Bacterial polypetide isolated from the Sargasso Sea
MNDYFEKILQAEVYEVAKKTPLEKAHNLSNTLNNEVFLKREDLQDVFSFKVRGAYNKMSKLTNSQLSQGVITSSAGNHAQGVALSALKLNCQATILMPITTPLVKVNAVKKLKAKVILFGDNYDETYKEAIRISKERNLCFIHPFDDPDVIAGQGTIAIELEQQLKEKPYAIYIAVGGGGLISGISLYIKKIWPEVKIIGVEPEDADAMTKSLEESKIVELSSVGQFADGVAVKKIGKNTFDIGRKYIDKMITVNTDEICAAIKDVFEDTRSILEPAGALSIAGMKKDILNSNHSNRKMVAI

SEQ ID NO: 153395 - protein, 267 aa, Unknown
  Bacterial polypetide isolated from the Sargasso Sea
MRLKIKKTGNFKNSKKYLKLIPEASVVYDVAIDSPTTHAVNLSIKENNNIYLKREDLQPIFSFKNRGAYNKIVNLSDKKKSLGIIAASAGNHAQGVALACKKLNIKCNIVMPVTAPENKLNNVKRLGAKVTLHGENLAHALVKAAKMSKKNKYTFVHPFDDPFTIAGQGTIGKEILDDEIDYDVIFVPVGGGGLLAGISAWVKQHKKKIKIIGVEVNDSACLTEALKSNKRVMLERVGLFADGVAVSQVGKNNLDVIKECVDEVMTV

SEQ ID NO: 153396 - protein, 145 aa, Unknown
  Bacterial polypetide isolated from the Sargasso Sea
MEDYFKKVLEAQVYEVAKKTPLEKANNLSKTLNNNIYLKREDLQDVFSFKIRGAFNKMRKLAKSQLANGVITSSAGNHAQGVALSALKLNCSATILMPTTTPLVKIKAVKNLKAKVILFGDNYDETYKEALRISEEKNLCFIHPF

SEQ ID NO: 153397 - protein, 220 aa, Unknown
  Bacterial polypetide isolated from the Sargasso Sea
MNDYFEKILQAEVYEVAKKTPLDKAHNLSNKLKNEIYLKREDLQEVFSFKIRGAYNKMSKLNNSQLAQGVITSSAGNHAQGVALSALKLNCQATILMPITTPQVKINAVKNLKAKVILHGDNYDETYREAIRISQERNLCFIHPFDDPDVIAGQGTIAIELEQQLNEKPYAIYVAVGGGGLIAGISLYIKKIWPTVKIIGVEPEDANAMSKSWKNQKLWN

SEQ ID NO: 153398 - protein, 102 aa, Unknown
  Bacterial polypetide isolated from the Sargasso Sea
MRNILTADVYDVAIESPLELTPRLSERIGANIYLKREDLQPVFSFKLRGAYNKMKQLTEEERARGVITSSAGNHAQGVALSGQKLGCKAIIAMPVTTPAIKV

SEQ ID NO: 153399 - protein, 254 aa, Unknown
  Bacterial polypetide isolated from the Sargasso Sea
HNLSYTLNNEVFLKREDLQDVFSFKIRGAYNKMSKLTNSQLSQGVITSSAGNHAQGVALSALKLNCEATILMPITTPLVKVNAVKNLKAKVILYGDNYDETYKEAIRIGKERNLCFIHPFDDPEVIAGQGTIAIELEQQLKEKPYAIYIAVGGGGLISGISLYLKKVWPEVKIIGVEPEDADAMTKSLEEEKIVELSSVGQFADGVAVKKIGKNTFDIGRKYIDKMIRVNTDEICAAIKDVFEDTRSILEPAGA

SEQ ID NO: 153400 - protein, 107 aa, Unknown
  Bacterial polypetide isolated from the Sargasso Sea
MRLKIKKTGNYRNSKKYLKMINEASVYDVSINSPTTYAANLSMKEGNEIYLKREDLQPIFSFKNRGAFNKIVNLSEDKKSRGIIAASAGNHAQGVALACKKLRIKCT

SEQ ID NO: 153401 - protein, 243 aa, Unknown
  Bacterial polypetide isolated from the Sargasso Sea
MFEEYKKLIEEAGKRIYTVAKRTDLTHAPQLTQRFGNNIWLKREDQQPVFSYKLRGAYNMIASLTDDERQRGVITASAGNHAQGVAMAAQGLDMKAVIVMPKTTPDIKVSSAKRMNADVVLHGNTYDEAKDHVFKLSEETGMCYIPPFDHPLVIAGQATVAVELLEQHPNKPNVIFVPVGGGGLIAGIAVYIKENYPDIKIIGVEHDEAPSMHASFAANERVVLEQIGIFADGAAVIEVGEEN

SEQ ID NO: 153402 - protein, 305 aa, Unknown
  Bacterial polypetide isolated from the Sargasso Sea
IKKTGNFKNSKKYLKLILEASVVYDVAIDSPTTHAVNLSIKENNNIYLKREDLQPIFSFKNRGAYNKIVNLSDKKKSLGIIAASAGNHAQGVALACKKLNIKCNIVMPVTAPENKLNNVKRLGAKVTLHGENLAHALVKASKMSKQNKYTFVHPFDDPFTIAGQGTIGKEILDDEIDYDVIFVPVGGGGLLAGISAWVKQHKKKMKIIGVEVNDSACLMQALKSNKRVMLERVGLFADGVAVSQVGKNNLDVIKECVDEVMTVNIDEVCAAVKDIFEDTRVLSEPSGAVALAGLKKYSKRVKHKN

SEQ ID NO: 153403 - protein, 239 aa, Unknown
  Bacterial polypetide isolated from the Sargasso Sea
MSKLTKLQLAQGVITSSAGNHAQGVAMSALKLNCQATILMPITTPIVKVNAVKNLKAKVILFGDNYDETYKEAIRISQQKNLCFIHPFDDPDVIAGQGTIAIELEQQLKDKPYAIYIAVGGGGLISGISLYIKKIWPEVKIIGVEPEDADAMSKSLEESKIVELSSVGQFADGVAVKKVGNNTFEIGRKYIDKMIRVNTDEICAAIKDVFEDTRSILEPAGALSIAGMKKDILNSNHSK

SEQ ID NO: 153404 - protein, 269 aa, Unknown
  Bacterial polypetide isolated from the Sargasso Sea
VYEVAKKTPLEKAHNLSNTLNNEVFLKREDLQDVFSFKIRGAYNKMSKLTKSQLAKGVITSSAGNHAQGVALSALKLNCEATILMPITTPLVKVNAVKKLKGKVILYGDNYDETYKEAIRISQERNLCFIHPFDDPEVIAGQGTIAIELEQQLKEKPYAIYIAVGGGGLISGISLYLKKVWPEVKIIGVEPEDADAMTKSLEEEKIVELSSVGQFADGVAVKKIGKNTFDIGRKYIDKMIRVNTDEICAAIKDVFEDTRSILEPAGPYQ

SEQ ID NO: 153405 - protein, 276 aa, Unknown
  Bacterial polypetide isolated from the Sargasso Sea
MNDYFEKILQAEVYEVAKKTPLEKAHNLSNTLNNEVFLKREDLQDVFSFKIRGAYNKMSKLTNSQLAQGVITSSAGNHAQGVALSALKLNCQATILMPITTPLVKVNAVKKLKAKVILYGDNYDETYKEAIRISQERNLCFIHPFDDPEVIAGQGTIAIELQQQLKEKPYAIYIAVGGGGLISGISLYVKKIWPEVKIIGVEPEDADAMTKSLEKEKIVELSSVGQFADGVAVKKIGKNTFDIGRKYIDKMIRVNTDEICAAIKDVFEDTRSILEP

SEQ ID NO: 153406 - protein, 557 aa, Unknown
  Bacterial polypetide isolated from the Sargasso Sea
MLSLASSQTEQAEAQPSQVQASQVQSDKAQSATSALEKSQLAQSYLQKILLSSVYDVAKVTPLSSLNKLSARLGCQVFLKREDMQPVHSFKLRGAYNRIAQLSQAECQRGVVCASAGNHAQGVAMSAASRGVDAVIVMPETTPDIKVDAVRRLGGNVVLHGQAFDQANGFAMEMAEQEGRVYIAPFDDEAVIAGQGTIAQEMLQQQRDLEVVFVPVGGGGLIAGIAAYYKAVMPQVKIVGVEPEDAACLKAAMEAGEPVTLPQVGLFADGVAVKRIGTEPFRLAKLFVDEVVTVTSDEICAAVKDIFEDTRAIAEPAGALSLAGLKKYVSINATGESGKGEKVAAILSGANVNFHSLRYVSERCELGEQKEAVLAVKVPERPGSFLRFCELLEKRVMTEFNYRFSSRDMAVVFAGIRLTKGHGELEQIINTLEDNGFEVQDLSGDETAKLHVRYMVGGHPPEPLEERLFSFEFPEHPGALLKFLTTLQSKWNISLFHYRNHGAAFGRVLAGFEVPEGDALPFQQFLTELGFVYQEETQSPAYQLFLNAGKGKKSLPL

SEQ ID NO: 153407 - protein, 515 aa, Unknown
  Bacterial polypetide isolated from the Sargasso Sea
MRLKIKKSGSYKFSKKYLGLISKSKVYDVADKTPITFAGNLSSKLKNDVYLKREDMQPIFSFKIRGAYNKIANLSSQQQKMGVITASAGNHAQGVANACKKLKVPCLIVMPVTAPEIKVKSVKRFGSKVLLHGDNFDQASKKARQIAREQRFEFIEAFDDPLTIAGQGTIGKEILEENKDLDVIFVPVGGGGLLAGVGAWVAQNKKDIKIYGVEVEDSACLVEAIKSNKRVRLREVGLFADGVAVEQIGKNNFDVIRECVDGVITVSIDELCAAVKDIFEDTRVLSEPAGALALAGLKKYATKITNKRLLAISSGANVNFERLSYIVERSEVGENREKLLSIKIPERPGSFLKLCKVFGRSQITEFNYRFANKMDAHVLVGIKTENEDAFKKIKTMLTKNKFKFSDLTRNQISNDHLRHMVGGHKSIISERDSERLYRCQFPVRPGALMGFLKDFGSKWNISLFHYRNLGAAFANVLIGIEDKSKSANALEKHLKSLDYSFIEETDNKAYIDFLR

SEQ ID NO: 153408 - protein, 303 aa, Unknown
  Bacterial polypetide isolated from the Sargasso Sea
MRLKIKKTGKFKHSKKYIKLINNASVYDVAIDSPTTFASNLSAKGNNDIYLKREDLQPIFSFKNRGAYNKISNLSKKQRSLGIIAASAGNHAQGVALACKKLNIKCNIVMPVTAPENKLNSVKRLGAKITLHGENLAEALVKADEISKKYNYTFVHPFDDPYTIAGQGTIGKEILQDDIKYDAIFVPVGGGGLLAGISAWIRQNDKKIKIIGVEVDDSACLTEALKSNKRVLLKKVGLFADGVAVSQVGKHNLDVIKECVDEVMTVNIDEVCAAVKDIFEDTRVLSEPSGAVALAGLKIYQKK

SEQ ID NO: 153409 - protein, 495 aa, Unknown
  Bacterial polypetide isolated from the Sargasso Sea
MTDYLQRILRARVYDVARETPLDSAPNLSRRLGNEVLLKREDLQPVFSFKLRGAYNRMAQLTPEELSRGVIASSAGNHAQGVALSAKKLGCRAVIVMPATTPEVKVRAVRTLGGEVVLHGETYDECSAEARQRCADEGLTYIHPFDDPEVIAGQGTIGLEIMRQSPEPPDAIYVAVGGGGLIAGIAAYVKQLWPSTEIVGVEPLDADAMTQSLEQGERVELAQVGLFADGVAVRRVGEHTFALAQQFVDRMVRVDTDAICAAIKDVFEDTRSILEPAGALAVAGLKQDVADCQMADRRLVAVACGANMNFDRLRFIAERSELGEEREAMLAVEIPEQPGSLRTLCDLLRSRSLTEFSYRMSEGESAHIFIGVQVNGAQDRHHLVDGLQQEGFSCLDLSDNELSKVHLRHMVGGRLPSTSKDGCAGGCLELLYRFEFPERPGALMRFVSALNPGWSISIFHYRNHGADVGRIVVGVLIPVDEQPQWTAFLNELGYP

SEQ ID NO: 153410 - protein, 506 aa, Unknown
  Bacterial polypetide isolated from the Sargasso Sea
MFEEYKKLIKEASQRVYAVAKLTDLDYATQLSLRHNNKIWLKREDQQSVFSYKIRGAYNLIASLSKSERDRGVIAASAGNHAQGVALAAKHLNLKSIIVMPKTTPEIKIDSVKRMDAEVILFGNTYDDAKEHALELSSEKGMYYVSPYDHPLVISGQATVGVELLDQHPNKPDIIFVPVGGGGLVAGIAAYVKTIDPNIKIIGVEPDEAPCMHDALKSGELIELDHIGIFADGAAVKQAGEECYRIAKDLVDEILLVSVDEICAAVKDIFEDTRSIPEPAGALALAGLKQYVANNNIEDKELVTIFSGANVNFDRLRHIAELSALGENREALISIMIPERPGSFRKLCRDLGSRLITEFNYRYADDNEAHIFVGVQLKNGVDEKNILMKQLEEKGYNVVDLSDNAIAKMHIRYMVGGHAPQAENELIYRFEFPERSGALLHFLSEMGEDWNISLFHYRNHGAAYGRVLMGFQVHNEQKENFQNFINKLGIPYWDETKNPAYIKFLS

SEQ ID NO: 153411 - protein, 508 aa, Unknown
  Bacterial polypetide isolated from the Sargasso Sea
MSLKILKSIVNKIEKTCVYDIAIRTPLEKASNLSRKLDNNIFIKREDLQPIFSFKLRGAYVKIKNLIDKKKIKSIIAASAGNHAQGVAMSALKLGIKAIIVMPKTTPLIKVDAVKLLKAKVILHGDSYDDAYSYAVKKSKMDQLDFIHPYDDEDVISGQGTMAMEILQQVDNKPDYIFVPVGGGGLLAGIVTYFSVHSPKTKIITVEPEDSDCYNQAFIKRKRVVLKDVGIFADGVAVKQIGKLPFALTKKYVDSSLLVTTDEICASIKDLYDETRTIAEPAGALSLAGIKKYLSTHNISNKNIICIFCGANMNFDRLRHVSERADLGELNEMLVGVEIPEVPGSFKKFCSVIGKRSITEFNYRYSDTLKANVFAGIKISDGKDEKKNVLKKLKLNGYKVKDFTDNEMAKLHIRYMVGGSSNTSHTEFVFRFIFPEKPGELLNFLNSIGSAWNISLFHYRNHGADFGRVLIGFQVNRLEHAKLLKHLKSLNYNFHEESSNTAYKLFLQ

SEQ ID NO: 153412 - protein, 247 aa, Unknown
  Bacterial polypetide isolated from the Sargasso Sea
MRLKIKKTGNFKNSKKYLKLIPEASVVYDVAIDSPTTHAVNLSIKENNNIYLKREDLQPIFSFKNRGAYNKIVNLSDKKKSLGIIAASAGNHAQGVALACKKLNIKCNIVMPVTAPENKLNNVKRLGAKVTLHGENLAHALVKASKMSKQNKYTFVHPFDDPFTIAGQGTIGKEILDDEIDYDVIFVPVGGGGLLAGISAWVKQHKKKIKIIGVEVNDSACLTEALKSNKRVMLERVGLFADGVAVS

SEQ ID NO: 153413 - protein, 552 aa, Unknown
  Bacterial polypetide isolated from the Sargasso Sea
MLSLASSQTEQAETQASQVQPDKAQSVTSALEKSQLAQSYLQKILLSSVYDVAKVTPLSSLNKLSARLGCQVFLKREDMQPVHSFKLRGAYNRIAQLSQAECQRGVVCASAGNHAQGVAMSAASRGVDAVIVMPETTPDIKVDAVRRLGGNVVLHGQAFDQANGFAMALAKEEGRVYIAPFDDEAVIAGQGTIAQEMLQQQRDLEVVFVPVGGGGLIAGIAAYYKAVMPQVKIVGVEPEDAACLKAAMEAGEPVTLAQVGLFADGVAVKRIGTEPFRLAKWFVDEVVTVTSDEICAAVKDIFEDTRAIAEPAGALSLAGLKKYVSTNASGESGKGEKVAAILSGANVNFHSLRYVSERCELGEQKEAVLAVKVPERPGSFLRFCELLEKRVMTEFNYRFSSRDMAVVFAGIRLTKGQGELEQIINTLEDHGFEVQDLSGDETAKLHVRYMVGGHPPEPLEERLFSFEFPEHPGALLKFLTTLQSKWNISLFHYRNHGAAFGRVLAGFEVPEGDALPFQQFLTELGFVYQEETQSPAYQLFLNAGKGKNNLPL

SEQ ID NO: 153414 - protein, 382 aa, Unknown
  Bacterial polypetide isolated from the Sargasso Sea
MTDYLQRILRARVYDVARETPLDPAPNLSRRLNNTVWLKREDLQPVFSFKLRGAYNRMAQLSRDELTRGVIASSAGNHAQGVALSAQRLGCRAVIVMPSTTPEVKVRAVRALGGDVVLHGETYDECSAEAQRRCKAEGLTFIHPFDDPEVIAGQGTIGMEIMRQAEQPPNTIYVSVGGGGLIAGIAAYVKRLWPETEVIGVEPVDADALSRSLEQGQRVELEQVGLFADGVAVRKVGEHTFALAQQFVDRMVRVDTDAICAAIKDVFEDTRSILEPAGALAVAGLKQDVAERHLAGRNLVAVACGANMNFDRLRFIAERAELGEEREAMLAVEIPESPGSLRRLCELLRERSLTEFSYRMTDGASAQIFIGVQVNDENDRAS

SEQ ID NO: 153415 - protein, 513 aa, Unknown
  Bacterial polypetide isolated from the Sargasso Sea
MNDYFEKILQAEVYEVAKKTPLEKAHNLSNTLNNEVFLKREDLQDVFSFKVRGAYNKMSKLTNSQLSQGVITSSAGNHAQGVALSALKLHCQATILMPITTPLVKVNAVKKLKAKVILFGDNYDETYQEAIRISKESDLCFIHPFDDPDVIAGQGTIAIELEQQLKEKPYAIYIAVGGGGLISGISLYIKKIWPEVKIIGVEPEDADAMTKSLEESKIVELSSVGQFADGVAVKKIGKNTFDIGRKYIDKMITVNTDEICAAIKDVFEDTRSILEPAGALSIAGMKKDILNSNHSNRKMVAIACGANMNFERLRFVAERAELGECKEVMMAVQIPERAGSLIDFCKLLDNRNLTEFSYRMSNSKNAQIFVGVQVYGLNDKKNLLNVFRNSEYSFIDISDDELSKNHLRHMVGGRLPKNFKEMGNRNFVELLYRFEFPERPGALINFLNNMKSNWSISVFHYRNYGADVGKIVIGVLIDKNEILDWNKFVRILGYKFWDETQNDTYRLFLGASD

SEQ ID NO: 153416 - protein, 505 aa, Unknown
  Bacterial polypetide isolated from the Sargasso Sea
SVYDVAKVTPLSSLNKLSARLGCQVFLKREDMQPVHSFKLRGAYNRIAQLSQAECQRGVVCASAGNHAQGVAMSAASRGVDAVIVMPETTPDIKVDAVRRLGGNVVLHGQAFDQANGFAMEMAEQEGRVYIAPFDDEAVIAGQGTIAQEMLQQQRDLEVVFVPVGGGGLIAGIAAYYKAVMPQVKIVGVEPEDAACLKAAMEAGEPVTLPQVGLFADGVAVKRIGTEPFRLAKQFVDEVVTVTSDEICAAVKDIFEDTRAIAEPAGALSLAGLKKYVSTNAAGESGKGEKVAAILSGANVNFHSLRYVSERCELGEQKEAVLAVKVPERPGSFLRFCELLEKRVMTEFNYRFSSRDMAVVFAGIRLTKGHGELEQIINTLEDNGFEVQDLSGDETAKLHVRYMVGGHPPEPLEERLFSFEFPEHPGALLKFLTTLQSKWNISLFHYRNHGAAFGRVLAGFEVPEGDALPFQQFLTELGFVYQEETQSPAYQLFLNAGKGKKNLPL

SEQ ID NO: 153417 - protein, 507 aa, Unknown
  Bacterial polypetide isolated from the Sargasso Sea
MASHDYLKKILTARVYDVAIETELESARNLSARLRNAVYLKREDNQPVFSFKLRGAYNKMAHIPAEALARGVITASAGNHAQGVAFSAARMGVKAVIVVPVTTPQVKVDAVRAHGGPSVEVIQAGESYSDAYAHAVKVQEERGLTFVHPFDDPYVIAGQGTIAMEILRQHQGPIHAIFVPIGGGGLASGVAAYVKAVRPEIKVIGVQAEDSCAMAQSLEAGKRVELSEVGLFADGTAVKLVGEETFRLCSEYLDGVVTVNTDALCAAIKDVFQDTRSVLEPSGALAVAGAKLYAEREGIENQTLVAVTSGANMNFDRMRFVAERAEVGEAREAVFAVTIPEERGSFKRFCSLVGDRNVTEFNYRIADAQAAHIFVGVQIKRRGESAEIAANFESHGFQTVDLTHDELSKEHIRYMVGGRSPLALDERLFRFEFPERPGALMKFLSSMAPDWNISLFHYRNQGADYSSILVGLQVPQADHAEFERFLAALGYPYVEESANPAYRLFLS

SEQ ID NO: 153418 - protein, 436 aa, Unknown
  Bacterial polypetide isolated from the Sargasso Sea
MPQRYIKKILDARVYDVAIETPLTEARSLSKRFGNNIMLKREDLQPVFSFKIRGAYNRIAQLSEEQKAKGVICASAGNHAQGVALAAKKLGIKAVIVMPQTTPEIKVRSVRDHGARVVLKGDAFDEAAAHAQELIQKHGYTYIPPYDDPDVIAGQGTVAMEIMWQFSKPIHAIFICVGGGGLIAGMAAYIKYLRPEIKVIGVEPEDSNCLQAAMKAGERVVLDEVGIFADGVAVKQIGEYPWEICKDHVDEVITVSTDEICAAIKDVFEDTRSIAEPAGALGVAGIKKYIAREKIEDENLIATLSGANMNFDRLRYVSERTEVGERREAILAVTIPEKPGAFKTFINALHKRSITEFNYRYADAQNATIFVGIQIAAGGHGREELVQDLRESGYSVVDLTDSDLAKQHIRHMVGGHAPTITNEKVFQFEFPERPGA

SEQ ID NO: 153419 - protein, 516 aa, Unknown
  Bacterial polypetide isolated from the Sargasso Sea
MRLKIKKTGNYRNSKKYLKMINEASVYDVSINSPTTYAANLSMKEGNEIYLKREDLQPIFSFKNRGAFNKIVNLSEDKKSRGIIAASAGNHAQGVALACRKLKIKCTIVMPVTAPENKLNAVKRLGAKIILHGENLGDALAHTDKINKKHKYTFVHPFDDPFTIAGQGTVGREILEDEIDYDAVFVPVGGGGLLAGISAWIRQNKKKIKIIGVEVNDSACLTEALIQNKRVYLKKVGLFADGVAVSQVGKNNLDVIKECVDEVMTVNIDEVCAAVKDIFEDTRVLSEPSGAVALAGLKSYSKRMKNKNLLAVSSGANVNFQKLGFIVERSEIGENREKILSIKIPEEPGSFLKLAKAIGKLPVTEFNYRKSDNKDAYVLVGIRTQSENSFEKLKAKLKKLKYKFSDYTSNEISNDHLRHMVGGRGGQSNISEKNERIFNGEFPEKPGALLEFLESFGNHWNISLFHYRNIGSAYGNILIGIEDTHKNKSALLKHLHKCGTAFKEESNNKAYLDFLK

SEQ ID NO: 153420 - protein, 516 aa, Unknown
  Bacterial polypetide isolated from the Sargasso Sea
MRLKINKTGSFRYSKKYLKMIEEASVYDVAIDSPTTHAINLSLKENNNIYLKREDLQPIFSFKNRGAYNKIINLSDKQKSLGIIAASAGNHAQGVALACKKLKIKCNIVMPLTAPENKLNSVKRLGAKVTLFGENLAEALVKADEIGKKKKLTFVHPFDDPFTIAGQGTVGKEILEDENGYDAIFVPVGGGGLLAGIAAWVRQHDKKVKIIGVEVDDSACLTEALIQKKRIKLKKVGLFADGVAVSQVGKNNLEVIKECVDEVMTVNIDEVCAAVKDIFEDTRVLSEPSGAVALAGLKKRSKRLNNKNLLAVSSGANINFQKLGYIVERSELGENREKILSIKIPEKPGSFLKIAKVFGKLSVTEFNYRKADKKDAYVLVGIRTTSEDSFSKLKLKLKKLKYKFSDYTNNKISNDHLRHMVGGRASSSGSTNINERIFNGEFPEKPGALVNFLEKFGTKWNISLFHYRNIGSAYGNILIGIEDNKKDKSILIKHLDKCGTIFKEESNNKAYLDFLK

SEQ ID NO: 153421 - protein, 226 aa, Unknown
  Bacterial polypetide isolated from the Sargasso Sea
MADSQPLSGAPEGAEYLRAVLRAPVYEAAQVTPLQKMEKLSSRLDNVILVKREDRQPVHSFKLRGAYAMMAGLTEEQKAHGVITASAGNHAQGVAFSSARLGVKALIVMPTATADIKVDAVRGFGGEVLLHGANFDEAKAKAIELSQQQGFTWVPPFDHPMVIAGQGTLALELLQQDAHLDRVFVPVGGGGLAAGVAVLIKQLMPQIKVIAVEAEDSACLKAALDA

SEQ ID NO: 153422 - protein, 501 aa, Unknown
  Bacterial polypetide isolated from the Sargasso Sea
MKKILTARVYDVARETELERAPNLSARLSNPVYLKREDNQPVFSFKVRGAYNKMAHIPADALERGVITASAGNHAQGVALSAARMGVKAIIVVPVTTPQVKVDAVRAHGGATVEVVQFGESYSDAYGHAVKLQEERGLTFVHPFDDPYVIAGQGTVAMEILSQHQGPIHAIFVPIGGGGLAAGVAAYVKSVRPEIRVIGVQTDDSCAMAASLKAGERVTLNEVGLFSDGTAVKLVGDETFRLCRDYLDDVLLVNTDALCAAIKDVFQDTRSVLEPAGALAVAGAKQYAERAGLENQTLIAITSGANMNFDRMRFVAERAEVGEAREAVFAVTIPEERGSFRRFCELVGTRSVTEFNYRIADANSAHIFVGVQIRNRSESAQIAGAFEAHGFATVDLTFDELSKQHIRYMVGGRSPLAHDERLFRFEFPERPGALMKFLSSMAPNWNISLFHYRNQGADYSSILVGIQVPESENREFDRFLATLGYPYWEETQNPAYRFFLA

SEQ ID NO: 153423 - protein, 395 aa, Unknown
  Bacterial polypetide isolated from the Sargasso Sea
AHGGATVEVVQFGESYSDAYGHAVKLQEERALTFVHPFDDPYVIAGQGTVAMEILSQHQGPIHAIFVPIGGGGLAAGVAAYVKSVRPEIRVIGVQTDDSCAMAASLKAGERVTLNEVGLFSDGTAVKLVGEETFRLCRDYLDDVLLVNTDALCAAIKDVFQDTRSVLEPAGALAVAGAKQYAEREGLENQTLIAITSGANMNFDRMRFVAERAEVGEAREAVFAVTIPEERGSFRRFCELVGTRSVTEFNYRIADANSAHIFVGVQIRNRSESAQIAGAFEAHGFATVDLTFDELSKQHIRYMVGGRSPLAHDERLFRFEFPERPGALMKFLSSMAPNWNISLFHYRNQGADYSSILVGIQVPESENREFDRFLATLGYPYWEETQNPVYRLFLA

SEQ ID NO: 153424 - protein, 82 aa, Unknown
  Bacterial polypetide isolated from the Sargasso Sea
MKNLTLIPGQLSLAQLREVFQQPLTITLDEQAFAAINESVACVNAILAEGRTAYGINTGFGLLASTRISTDDLENLQRSLVL

SEQ ID NO: 153425 - protein, 134 aa, Unknown
  Bacterial polypetide isolated from the Sargasso Sea
QVWVDNEIFETAEILEKNNLKPLVLGPKEGLGLINGTQFILAHAIKGLEKFEYLLDLADLAAAMSLEAYRGSASPFKKELHEIRPFEGSKKVAARMLNFLKDSDNLKAHEGCERVQDPYSMRCVPQVHGASRNA

SEQ ID NO: 153426 - protein, 99 aa, Unknown
  Bacterial polypetide isolated from the Sargasso Sea
CGHVQDPYSLRCSPQVWEPAGPNAVCRTSAPRRSQRCDRQSPCFSRRGRDPLGRKLPCRAGGNDRRQSGPCHCGNRSTFGEADLAFDRSGIQQTPRVFK

SEQ ID NO: 153427 - protein, 270 aa, Unknown
  Bacterial polypetide isolated from the Sargasso Sea
VNELRNNLYQIWVAKELRRVFVGFDQTDQPPDIQNDYNIRCIPQILAAILAQIESSRAVLERELNAVTDNPLIVLNQEIKNKNGALKFTDKEGNVNKFKVLSCGNFHAGPIAAEHANLTVQITQLGHLLDAQAQYILDPKNNHGFPAYLTPNPGLNSGFMILQYTMASLLSLVQNPSLPFQSNQISGNGTENLTSLGWTQFLSLNETIDNIDQMMTIYTTILIQAWHLKDHASISKDHPIRIVMEKLTENLNEIFPIEYDKDMRLTKIYN

SEQ ID NO: 153428 - protein, 275 aa, Unknown
  Bacterial polypetide isolated from the Sargasso Sea
KAMVLKKFSYGEDKLTFELSMEILNGSLDCHIGEEALKKINNSRKNIESILKSGDKIYGVNTGIGTLCSTIISNEDSSLLQENLLKSHAVGVGKNIPLEISKLMLILKVHSLCKGFSGIRIDVIERICWHIEKDIIPAVPSQGSVGASGDLAPLAHLFLPLIGEGEVLYKGKQLSTKKVLDQENKLPLKLKEKEGLALINGTQFISAFTCFSLAKFKNCLINADIISAFTIEATKSSIKPFSNKIQNLRPYNGSSIVINRINELLLDSQNITISP

SEQ ID NO: 153429 - protein, 90 aa, Unknown
  Bacterial polypetide isolated from the Sargasso Sea
ATFAARRLQDMANNTQGVLAIEWLASVQGLEFRKPLSPCEKVLKAKNLLREYVTYYDKDRYFAPDIEQTNALLSEGKLCDFIDHNPLPSY

SEQ ID NO: 153430 - protein, 263 aa, Unknown
  Bacterial polypetide isolated from the Sargasso Sea
MEGYVISDKFTTWDDLEHLIAFPKPLRLSSLSRKSIKDSNQILSKILRSKKVVYGVNTGFGKLSHVKIDPSKLKQLQLNLIRSHATGVGKPFDHSITRLTMTLKLMTWSKGYSGVRPKLATLLLKMINKGILPIIPRQGSVGASGDLAPLSHIGCALIGEGTVYFQDRIMPSMKALKEANLKPIELEAKEGLSLINGTQVSTAIGVKALYKACRLLRTADIISALSVEASLSTRAVFKPAIHRLKKHKGQTVSAKNIYSILKQ

SEQ ID NO: 153431 - protein, 116 aa, Unknown
  Bacterial polypetide isolated from the Sargasso Sea
ENKVFCHPASVDSIPTSTDKEDHVSMGVTAGLKLWKVLENVKACLAIEILCNTQALEFQRPYKSTPALESVYNLVRETVPPIEEDRVFYNDIQNILNLVEKNNIITAVENNIGELK

SEQ ID NO: 153432 - protein, 497 aa, Unknown
  Bacterial polypetide isolated from the Sargasso Sea
MTVFRSARPLDWRQIAAVAAGAPLALTDESRGRVVAARELVDAIVARGIRAYGVNTGVGALCDVIVSPAQQGTLSRNILMSHAVGVGAPLGAAETRAIIAAAINNYAHGHSGVRADIVDQLVALLEHDCLPEVPAHGSVGYLTHMAHVALVCIGHGHARHRGERVRGDEALRRIGREPLALGAKEGLSLVNGTPCVTGLAALALARAERLLDWADWIAATSFENLGGQLAAFDPASLALRISPGIGHVGARLRAMLADSAMLAAANGRHTQDPLSLRTIPHVHGAARDVLAVTAEVVDRELASVTDNPIVAGTRDAPTVHSQAHAVGAGIALAMDSLAAAMAQVAAIAERRLDRLVNPLVSGLPAFLAAPGGTCSGFMIAQYTAVALVAQNQRLAAPASLDGGITSGLQEDHLCHATPAALKALDIIENTTRVLAIELLAAAQAYDLQENEASRAAPTDALRRYVRERVPAYHDDRPLADDIASAAAIVAGVPPSLV

SEQ ID NO: 153433 - protein, 378 aa, Unknown
  Bacterial polypetide isolated from the Sargasso Sea
LMESLLVSTKKYTFTDFRPLYLGPIKVSLSRESEKNIIRSHKYLFDNLDTDKLIYGVNTGFGNLSHIQIDSGDIDKLQVNLIRSHASGVGSPLRPGIVRAILFLKLLTFAKGYSGVSIDLVKKIIQFLNKDLLPVIPEKGSVGASGDLAPLGHMALALIGEGEVFFKGNREKTLTALKKARVKPLSLKPKEGISLINGTQVSTAIAIKALLDGHRLLISADIAGALSVENSFSSHKVFQKKIHDLKQHPGQKISARNIYKLLSKSEIVRSHSNCGKVQDPYSFRCIPHVHGASRDIFSNAANIINDEINSVSDNPLILDSKTIVSSGHFHAEHVAMALDSLAFSFSELGAISERRIHYFMKGVQDKIPPFVSKNPGLD

SEQ ID NO: 153434 - protein, 81 aa, Unknown
  Bacterial polypetide isolated from the Sargasso Sea
MTVPTCATSTGEPTIVKTVNLIPGQVTLDQLREIGKEPAKVSLPEDAWHQVRQSHNALNAVVQRGAPAYGINTGFGKLAKT

SEQ ID NO: 153435 - protein, 557 aa, Unknown
  Bacterial polypetide isolated from the Sargasso Sea
YTSSGVRLRLVSLRVLDVQPWSGPVGGATVVSVRAYGTWPGGLRCRFGESSASAGWSGGASRLRCLTPSSGGVSGWVGVQLSSFHGALSSGGSFYYHPLLTASVAAPALGPERGGTRVTVLGGGFRDAYTLRCGFGSAAAPVLARYVDESQLECSSPVHAAGSAAVLLSMNGQQYSPSGVSYTYQSAASVSYISPATVVSEGGTPVTVHGGGFSSASESLGVLTCRIGGSVRRAVWASESAIVCNATRAPAGEARLEVSNNAREYTSSGVRLRLVSLRVLDVQPWSGPVGGATVVSVRAYGTWPGGLRCRFGESSASAGWSGGASRLRCLTPSSGGVSGWVGVQLSSFHGALSSGGSFYYHPALTASVAAPALGPERGGTRVTVLGGGFRDAYTLRCGFGSAAAPVLARYVDESQLECSTPVHAAGSAAVLLSMNGQQYSPSGVSYTYQSAASVSYISPSTVLSEGGTPVTVHGGGFSSASESLGVLTCRIGGAVRRAVWASESAIVCNATRAAAGEARLEVSNNAREYTSSGVRLRLVSLRVLDVQPWSGPVGGAT

SEQ ID NO: 153436 - protein, 258 aa, Unknown
  Bacterial polypetide isolated from the Sargasso Sea
MSSIKLDGSTLSPTEVSLVSNGEKVEVASDSWISIKNSRAVVEGIIERGETVYGINTGFGALVNTRISPEDLESLQVNLIRSHACAIGEKMSKQDTRAMMCIRVNSLIKGFSGIQPIVIEQIISYLNEDVIPVIPRIGSLGASGDLAPLSHMALALIGEGSVWGDDGEICQTKQLLEQRGLIPVSLAAKDGLSLINGTAQMCAFLVNSEQKISNLLLMADLIACTSMEARECSINPMDKRVHDARPHPGQSLVAERIT

SEQ ID NO: 153437 - protein, 84 aa, Unknown
  Bacterial polypetide isolated from the Sargasso Sea
MIPGTVTLSTLEQIWRNGIPARLAASARAGVEAAAAMVAEAAAGEAPVYGINTGFGKLASTKIASEDTATLQRNLILSHSCGVG

SEQ ID NO: 153438 - protein, 136 aa, Unknown
  Bacterial polypetide isolated from the Sargasso Sea
GEGEVYYKGKKIRSSDMLNKEKMIPLNIKEKEGLALINGTQFICAFTCYALDRFRNCLENADIISAISVEGTMGSDIPFSKELNELRPYNGASIVSDKIRELLEDSEVIDSNKNSGKVQDPYSIRCIPQVHGASWD

SEQ ID NO: 153439 - protein, 91 aa, Unknown
  Bacterial polypetide isolated from the Sargasso Sea
MNVTALNLIPGQLSLAQLRAIYQQPVTLSLDDSASAQIEASVACVEQILAENRTAYGINTGFGLLASTRIASEDLENLQRSLVLSHAAGVG

SEQ ID NO: 153440 - protein, 137 aa, Unknown
  Bacterial polypetide isolated from the Sargasso Sea
MTFQLTPGSATLEQLERIWREGLAVSLGEDARTAIDAAAHAVKKAAAGDAAVYGVNTGFGKLASVRIKPADTAKLQRNLILSHCCGVGELLDVKTTRLMMVLKLLSVGRGASGIRWETIELLQNLFASGITPLIPTP

SEQ ID NO: 153441 - protein, 130 aa, Unknown
  Bacterial polypetide isolated from the Sargasso Sea
NSGFMIAEVTTAALMSENKHLANPCVTDSTPTSANQEDHVSMAAHGALRLAKMTANLSVILGVEMLCAAQGVEARAPLKTSARLQDLLTMLRGEIPSLGEDRYLAPEIEAASAMVRAGRVAQAAGVEVAV

SEQ ID NO: 153442 - protein, 235 aa, Unknown
  Bacterial polypetide isolated from the Sargasso Sea
MGNSKQNKELTLTGENLTIESLYEASLSPHTEVKIKISDLAKEKMARSRAYVHEVVKKGQPVYGINTGFGALSSKFIPEEDLATLQVNLIRSHCTGIGEPFSEKFVRAIMILRTNCLCSGFSGINPEIVNLLKDFINIGIVPIIPQKGSVGASGDLAPLAHLALALIGEGEVIYKGEKRQSIDVLKEVNLKPAVLGPKDGLALINGTAIMAALGAMAVYESKNLIKLSDIACALT

SEQ ID NO: 153443 - protein, 243 aa, Unknown
  Bacterial polypetide isolated from the Sargasso Sea
METVVIDGDNLTLEMVKAVSLGSMEASLSSDSRERMQASRKAVEDILDSGEVVYGINTGFGALSSVRIEDSQLEELQSNLVRSHACGIGEIMDPEIVLMMMTIRANSLAKGVSGIRPSVVDTLLGMVNSRIAPSIPRIGSLGASGDLAPLSHMTMGMMGEGECLVQVSGKWVSKDSRTALEEAGLEPVKLQAKEGLSLINGTSQMCAYLTQTVLNMEILCLTADASIACSVEAIRGSHKPFDR

SEQ ID NO: 153444 - protein, 109 aa, Unknown
  Bacterial polypetide isolated from the Sargasso Sea
HPASVDSIPTSANQEDHVSMATHAAYRLINMNENLSYILAIELLSASQGIEFHKPLKTSSILQKALAEVRTFSEPIEDDRSLANEIEALSGALIQGHVFGQSYKIFNVQ

SEQ ID NO: 153445 - protein, 508 aa, Unknown
  Bacterial polypetide isolated from the Sargasso Sea
METLRVSTKQLTYRDCEPFFEGPVRVSLTKEASTNIERSHNRLLSILEKKETIYGVNTGFGNLSHIAIEERDQKQLQVNLVRSHAAGSGEPLELGIVRTVLFLKLLTFARGYSGVSLSLAKKIIQFINKDIIPLIPEKGSVGASGDLAPLGHMALALIGEGKVFYKGKKYDSKIALKEAKVKPLVLGPKEGISLINGTQVSTALAIKGCLNGEILLKTADIAGALSVENSFSSRKVFRSEVHIIKKHKGQLACAKNVYKMLNGSDIVRSHSNCGRVQDPYSFRCIPHIHGACRDSFMNAAEMVNNEINSVSDNPLIMESGNVVSSGHFHAEHIAQAMDILAIAFSELGAVSERRTHFFMKGVGEKIPPFVASDPGIESGYMIAHVTATALASENKTLAHPASIDSLPTSGGQEDHVSMAPWAGLKLLSIQNNLSNILAIELMVAGAANKHISYDLRSGKGTAPVIKFLNKNCSYSDGDRYLSPEIKKVSDSILSGYILNIVLKNLTLE

SEQ ID NO: 153446 - protein, 507 aa, Unknown
  Bacterial polypetide isolated from the Sargasso Sea
MSALSISKKSSTLEYFLPCLNGPVKVRLDSNSSKSIQKSHKTFSHLLKNGEKIYGVTTGFGDLSSIPIDVNDQRKLQLNLIRSHATGVGKSFDPGITRIIMLLKLLNWSKGVSGVRTKLVQLLKNFLNHDILPEIPRQGSVGASGDLAPLAHMALPLIGEGLVNFQGRIMPAMLAMKEVGLEPITLEPKEGLSLINGTQVSTAIAIKACIDAENILKVADLSGAMSVEASLSSRSVFKSEIHKLKGHPGQRIVASNVWNLLDKSQIVLSHKNCDRLQDPYSFRCIPQVHGISRENYKCVKEIVENEANSVSDNPLIMPNGKILNSGHFHAESIAQAMDNLAIAIAEVGSIAERRIHYFMKGVDDYIPPFIASNPGLESGFMTAHVTAASLVSENKVLTHPASVDSISTSGGQEDFVSMAPWAGRKCLRVIDNVRNILSIELLASTTVNELFHAPLKVAKSFLPVIKLMKKYVHYSKTDRPLHGDIKSINDLIKSREILKCIKNYEIY

SEQ ID NO: 153447 - protein, 194 aa, Unknown
  Bacterial polypetide isolated from the Sargasso Sea
MVTITLKEGQLSLAEMRAALKTPLQVKLDPGCLSRIETSAKTVDSVLKQDQTVYGINTGFGSLAQTKIARDKLAELQQNLILSHASGTGPLLDDRVVRLILVLKLNSLIRGFSGIRMKTVEYLLALLETDAMPCIPAKGSVGASGDLAPLAHLSMVLLGEGEARINGEYITAWELLRKLRLEPLELQPKEGLAL

SEQ ID NO: 153448 - protein, 719 aa, Unknown
  Bacterial polypetide isolated from the Sargasso Sea
LGGGFRDAYTLRCAFGSVTAPVLARYVDESQLECSSPVHAPGIVDVLSSMNGQQYARSGASYTYQPAASVSYISPTSVLSEGGTPLTVYGAGFSSASESLGLLTCRIGVSVRRAVWASSSAIVCNATRAPVGESRIEVSNNAREYTSSGVRVRLVSVRIVDVQPWSGPVGGATVVSVRSYGVWPGGVRCRFGDSSLSVGWSGGASRLRCLTPASSGDASGWVGVQLSSFHGALSSGGSFYYHASLTASGATPSIGPERGGTRVSLLGGGFRDAYTLRCAFGSVTAPVLARYVDESQLECSSPVHAPGIVDVLLSMNGQQYARSGASYTYQPAASVSYISPTSVLSEGGTPLTVHGAGFSSASESLGLLTCRIGVSVRRAVWASSSAIVCNATRAPVGESRIEVSNNAREYTSSGVRVRLVSVRIVDVQPWSGPVGGATVVSVRSYGVWPGGVRCRFGDSSLSVGWSGGASRLRCLTPASGGDASGWVGVQLSSFHGALSSGGSFYYHASLTASATAPSLGPERGGTRVSLLGGGFRDAYTLRCAFGSVTAPVLARYVDESQLECSSPVHAPGIVDVLLSMNGQQYARSGASYTYQPAASVSYISPTSVLSEGGTPLTVHGAGFSSASESLGLLTCRIGVSVRRAVWASSSAIVCNATRAPVGESRIEVSNNAREYTSSGVRVRLVSVRIVDVQPWSGPVGGATVVSVRSYGVWPGGVRC

SEQ ID NO: 153449 - protein, 209 aa, Unknown
  Bacterial polypetide isolated from the Sargasso Sea
MIRETRRILEIEINSATDNPLVFVEDNGASIISGGNFHGQNLALASDAIAVACHELASISERRINQILDPNWSGQKAFLAGNEGLESGLMIVQYVAAAIISELHILSSPATISNVPVSMGKEDHVSMGATGAHRSLQSSILLSQVLANEFICSTEALEAIEELPGIGVRKLVSWVRSHVDRLDGDRSMTSECEQLSESILDGGLTEIFG

SEQ ID NO: 153450 - protein, 145 aa, Unknown
  Bacterial polypetide isolated from the Sargasso Sea
APVIGRLTTELRKDVQTVWIHKGYESFGGGNNNLLIYPEWSIINYERQGILEETLVHEGAHSSLDAYHANNPDWLLAQKLDCNFISDYAKQHPLREDIAESYLTYLAVRYRSDRISPELKTMIESAIPNRIKYFDSQKFNMYPIE

SEQ ID NO: 153451 - protein, 163 aa, Unknown
  Bacterial polypetide isolated from the Sargasso Sea
NPEFGTADDAKIQAEKFAPIIGRLTTELRKDVETVWIHKGMKPFGGGNNNLLIHTDYSSLHYEQQGILEETFVHEAAHTSLDAYHAINSDWIQAQEDDCRFISDYAQEHPTREDIAESYLPYFAVRYRSERITSGLRDSIESAIPNRIKYFDAQNFNMYPLER

SEQ ID NO: 153452 - protein, 226 aa, Unknown
  Bacterial polypetide isolated from the Sargasso Sea
LHSRPPYDGTIFYFKDAINSSDPTAFQAIVYVGQDNRTMFDRRKNDWIKNKAYLFKASYDDGLTIEIQVNSEFKDNKASEYASQYAKVIGQLPTVLRKDVQTVWIHKGDKPFGGGNQNLLIHIIQGEKYIADGILEETLVHEACHTSLDLDHGNAKGWRVAQKADDEFISTYAKDYPKREDIAESFLTWLVVRHLSDRVSESHVKKILKAIPNRIKYFDEQEFDMY

SEQ ID NO: 153453 - protein, 323 aa, Unknown
  Bacterial polypetide isolated from the Sargasso Sea
MGGFSLYAISTMLGKSVFYAYDRQVINQQIQRFRAAIPNRIKLHYAVKANPYWPVVQHMRPLVDGFDVASQKEMLLAIQSGMPVVDISFAGPGKTDTELAAAITAGVTLNVESASELQRICYLAEQHKVIPQVALRVNPAFELKASGMKMAGGAKPFGIDEEQVFELLTQIATMPVKLRGFHIFCGSQNLKTEALTEAHQLTFDLAAKLVAACPYRPDLINLGGGFGIPYFPGEKRLDLQPIGLSLTQLLQQHEQALAGIELVIELGRYLVAEAGVYACQVVDKKVSRGTTYLVCNGGLHHHLANSGNFGQVIRKNYPGGYWQ

SEQ ID NO: 153454 - protein, 212 aa, Unknown
  Bacterial polypetide isolated from the Sargasso Sea
TPEDPTTFVSLSYAGTGTRQMYDRRSGWITLEPYLFPAEYDDGLSIEIQVNPEFGTWENAQVYALKYAEVIGRLTTQLRKDVKTSWIHRGDEPFGGGNNNLLIHTDWSEKNYENQGILEETLVHEASHTSLDSYHAESEGWLSAQDKDCEFISTYARDNPIREDVAESYLPYLAIRYRSDRISDNLKKRIEEAIPNRIKYFDEQNFNMYPIQ

SEQ ID NO: 153455 - protein, 97 aa, Unknown
  Bacterial polypetide isolated from the Sargasso Sea
ILEETFVHESAHTSLDAYHATNTDWMQAQEDDCRFISDYAQEHPTREDIAESYLPYFAVRYRSERITSGLRDSIESAIPNRIKYFDAQNFNMYPLER

SEQ ID NO: 153456 - protein, 212 aa, Unknown
  Bacterial polypetide isolated from the Sargasso Sea
LNSSDISTFISLESISDNPRTMFDRRNNGSWITITPFLFEAKFSDGTQIEVQVNNEFENKTNAERVALTYLEAIGRLPELFRKDVETVWIHKGNENFGGGNNNILIHHDRGLEHEKYGLLEEIFLHEGAHTSLDYYHSSSSGWIEAQIADNGNFISDYAKEYPQREDVAETFPLCFALKYKRDRLDNGIIQKIEKAIPNRIKYCNNVFENMN

SEQ ID NO: 153457 - protein, 260 aa, Unknown
  Bacterial polypetide isolated from the Sargasso Sea
MICFGCENTSDNDQAQLSDSQNPENCNFETSNPPFSGTIFIDPDIITPNDPTTFTGLSYIGTGTRTMYDRRDGGGWLTLEPYLFRANYDDALEIEVQVNPEFGSIENAQIQADKYASVIGRLTTELRKDVETVWIHKGFESFGGGNNNLLIYPEWSLEYYERQGILEETLVHEASHSSLDSYYANDKDWLLAQKLDCNFISDYAKQHPIREDIAESYLTYLAVRYRSDRISSELKMKIESAIPNRIKYFDNKKFNMHPIR

SEQ ID NO: 153458 - protein, 547 aa, Unknown
  Bacterial polypetide isolated from the Sargasso Sea
MAVIRSDRPLDWVQVAAIAAGEPLELSAEARSRIAAARVLVEQIVERGIRAYGVNTGVGALCDVIVSPSEQRTLSRNILMSHAVGVGAPLGVAETRAIMAAAVNNFAHGHSGIRLEVADRLVALLNADCLPEVPAFGSVGYLSHMAHIALVCIGEGHVRYRGERLKGRDALQLLGLEPLVLDAKEGLCLVNGTPCVTGLAALALARAARLLDWTDVVAAMSFENLRGQIAAFDEDSLALRISPGLNLVGERMRTALADSGILAAVIGQRTQDPLSMRTIPHVHGAARDVLAATADVVNRELASITDNPIVAGTPEAPRVYSQAHAVGASIALAMDSLATAIAQVAAMAERRLDRLVNPLVSGLPAFLAEPGGTCSGFMIAQYTAASLVAQNRRLAMPASLDGGITSGLQEDHLCHATPAALKALEILDNAGRIVAIELLAAAQAYDLQSVDASRAPHTDALWHRVRGVVPTYRDDRPLADDMAIAFRMIADGMPPPLPNPGNIRPGSGALSGGASLAALASVTSVAAANRLGADPAANDGNAAAHAG

SEQ ID NO: 153459 - protein, 259 aa, Unknown
  Bacterial polypetide isolated from the Sargasso Sea
MIFLSCESSNDDQAQLPDSHNPKDCDFQTSTPPFSGTIFIDPDIITPNDPTTFTGLSYVGTGTRTMYDRRDGGGWVTLAPHLFRANYDDGLEIEVQVNPEFGSIENAQIQADKYAPVIGRLTTELRKDVETVWIHKGFESFGGGNNNLLIYPEWSLEYYERQGILEETLVHEASHSSLDAYHANDKDWLLAQKLDCNFISDYAKQHPIREDIAESYLTYLAVRYRSDRISSELKMKIESAIPNRIKYFDNKKFNMHPIQ

SEQ ID NO: 153460 - protein, 326 aa, Unknown
  Bacterial polypetide isolated from the Sargasso Sea
FGNLSHIAILPEDQKQLQINLIRSHAAGTGEPLDLGIVRSVLFLKLLTFAHGYSGVRLALANKVIQFINKDILPLIPEKGSVGASGDLAPLGHMALSLIGEGKVFYKGKKYDTRTALKKANVKPLVLGPKEGLSLINGTQVSTALAIKACLDGEILIRTADIAGALSVENSFSSRKVFKSEIHTIKKHPGQISSAKNVYKTLNGSEVVRSHDNCGRVQDPYSFRCIPHIHGACRDSFMNSAMIVNNEINSVSDNPLIMDKGNIVSSGHFHAEHLAQAMDTIGIAFSELGAISERRTHYFMKGVGDSIPPFVASDPGIESGYMIVHV

SEQ ID NO: 153461 - protein, 266 aa, Unknown
  Bacterial polypetide isolated from the Sargasso Sea
MTATVSDANGQTLTGATVTWASSNTSAATVSSSGLITAVANGSATITATSGSASTTASVTVSQVAASVALSGSNVALASVGDTTTLTATVSDANGQTITGATVTWASSNTSAATVSSSGLITAVANGSATVTATSGSASTTASVTVSQVAASVALSSSSVTFASLTDTTTLTATVSDANGQTLTGATVTWASSNTSAATVSSSGLITAVANGSATITATSGSASTTASVTVSQVAASVALSGSLTLASLGATSQLTATVSDANGQT

SEQ ID NO: 153462 - protein, 520 aa, Unknown
  Bacterial polypetide isolated from the Sargasso Sea
MNKSEKRRVTFGAKPLTIEDVVALAEGRATPALNPDPAFMARIQRGADFLDRLLAEEGVIYGVTTGYGDSVTRPVPTELVPELPLHLTRFHGCGLGADLELDAARAVLATRLCSLAQGVSGVSPALLERLCWLLEQDLVPRIPEEGSVGASGDLTPLSYVAAVLVGERELHHDGVLRPAAEVYRELGVTPLTLRPKEGLALMNGTSVMTALACLAYARTDYLMRLATRITALVSVAMGGNAFHFDERLFAAKPHPGMQGIAAWLREDLMAGELPRHSDRLQDRYSLRCAPHVIGVVADSLPWWRQLIENELNSANDNPLIDGEEEHVMHGGHFYGGHIAMAMDSMKAAVANLADLLDRQLAQLVDSKFNGGLPSNLSGAPEGRQMINHGFKAVQIGVSAWTAEALKQTMPASVFSRSTECHNQDKVSMGTIAARDALRVLTLTEQVAAACLLAAVQGVELRLARPTPFTRPLGTALAAMVAQVRAEFAPLLEDRGLEPELRALIARIRQRHYPLYGPNRN

SEQ ID NO: 153463 - protein, 265 aa, Unknown
  Bacterial polypetide isolated from the Sargasso Sea
MSEFLEKNPWNALRQFTNARIALGRAGNSLPTAPLLAFNLSHAQARDAVHHPLDTDVLHEQLRAQNFSTLDVHSAAPDREHYLRRPDLGRRLSDESRTALVQLKAESSDVVFVIADGLSAFAASKQSIPLLQAVCAKLADWKIGPVVVARQARVALGDEVGELLNTRLVVMLIGERPGLSSPDSLGIYLTYAPKVGCSDAQRNCISNVRPEGLNYESAAHKLHYLLTHARRLGLTGVGLKDDSDALLASAPVTPAVSSNPNEGVT

SEQ ID NO: 153464 - protein, 264 aa, Unknown
  Bacterial polypetide isolated from the Sargasso Sea
MSDAVEKNPWAQLKSFTNARIALGRAGNSLPTAPLLAFNLSHAQARDAVHQPLDVGALRREIEAAGLLPTLGVQSAAPDRDHYLRRPDLGRKLSDDSRGLLAGYGAALDDAPDVVFVVGDGLSAFAAAKQALPLLQAVRPRLDADGWRIGPVVVATQARVALGDEIGELLRAKVVAMLIGERPGLSSPDSLGVYLTWAPKVGCHDALRNCISNVRPEGLPYAGAAHKLHYLMTHARRLGLTGVGLKDDSDALLPQAQAERIGAD

SEQ ID NO: 153465 - protein, 139 aa, Unknown
  Bacterial polypetide isolated from the Sargasso Sea
MTSRTLDATVPGGSRRGRRRVRASTTRATASEEPKKLWGGRFSEAQDPLMEKFNESLSFDRRMWREDVDGSVGYAAALARAGVITGDERDAIVSGLRDVAKEWEADAFEAKAGDEDIHTEKERRLTELIGDVAGKCTRT

SEQ ID NO: 153466 - protein, 215 aa, Unknown
  Bacterial polypetide isolated from the Sargasso Sea
AKELLRKSKQNENLPMPGYTHLQRAMPSTWGLWFSSYVEAFLDDVELLDAILDWTNINPLGTAAGYGVNLPIKRELSTKKLGFRRPQVNALYVQNSRGKMDLEILGALKQPFLDLRKLSWDLSLFTSTEFNLIEIGKEFTTGSSIMPNKSNPDTVEIMRANYAKLAGYYAEIENLISLPSGYHRDLQISKGAIINAFNICESSFSLAPALIKSWK

SEQ ID NO: 153467 - protein, 142 aa, Unknown
  Bacterial polypetide isolated from the Sargasso Sea
EDKEPLFDSIDTLRDCLIALNGLIPNLIANKEQMREAAVAGYTTATDLADYLVRKQVPFRDAHELVGGAVQRAVELNQPLEALSLEQLNGAVDGPIEADVYDILSLDGSIAARDHFGGTAPTQVRAQAQAALLSLKKSNDPR

SEQ ID NO: 153468 - protein, 56 aa, Unknown
  Bacterial polypetide isolated from the Sargasso Sea
MHTGRSRNDQVATALGAFNFVLRDALGGGVTRSLALDAHGKSVSSALLAIEVPDPA

SEQ ID NO: 153469 - protein, 143 aa, Unknown
  Bacterial polypetide isolated from the Sargasso Sea
LSYFKDLQDDKEIIFKSYDVLFQSLKIFNEILKNVSPNKKRMIELAYSGYITATDLADYLVKNNSMSFRKAYQKTALLVNLAEKKKKKLNELSLEDLKKIEPTLTNDVLKVFDLKNSVNSKKSYGGTSFDNIKKMIKKYRKLK

SEQ ID NO: 153470 - protein, 116 aa, Unknown
  Bacterial polypetide isolated from the Sargasso Sea
MSKNKNQAIWKSRIKKKSSSLFQKVGSSINIDKELYKEDIKVSIVHAEMLFRQKIISFKIKNKIIYGLSKIEREISSNKFQFNEKFEDIHMNIEKRLFEIIGEDAGYLHTARSRND

SEQ ID NO: 153471 - protein, 306 aa, Unknown
  Bacterial polypetide isolated from the Sargasso Sea
MSSKSDVFLEEARLGPRSSILIECEEMPNLPRLIRRFKEYLLTDIAHAVMLTETGIISPQRGATLLSGLILMWESEGRGFPYLPNVGSFLVQTEHFLGEHIDKDIAGRLQTGRSRNDQSAEAERLYLRDLLLDVMKHLILLQEATLSQATSHADSLMPGYTHLQHAQPTTFGHHLMRYAAAFDRDLDRLAGAFKHVNLGSLGGAAMAGTSWPIDRKRTAKLLGHDGLAINSSDAGGFARDYIEGTVAALSILMGNLGRLAKDLYVWSSWEFGYIQVADELVGTSSIMPQKKNPHSLERIKALSGQA

SEQ ID NO: 153472 - protein, 265 aa, Unknown
  Bacterial polypetide isolated from the Sargasso Sea
NDQVLTALRLYYLDAIDEIVTSTEKLCEEIRVLEGKQGSIKLPGTTHMQHAMPSSVSLWCGAYIEAFEDNIEGMIQAKRRSNKNPLGSAAGYGTPGLPVDRTFTTKKLGFEVTHEPVTAPQLSRGKAESHLLFELSLLMQDLGRLSSDLLLYYTQEYSYIDLAFEVTTGSSIMPQKRNPDVLELIRASSATVLSCLNESMMVMSKLPSGFQRDLQKIKAPLFKAIDNTIESVDIMAYVISTMKFLPENIKLDDDLFAAEEAYKLV

SEQ ID NO: 153473 - protein, 139 aa, Unknown
  Bacterial polypetide isolated from the Sargasso Sea
ALIGDAGKRLHTGRSRNDQVATDIPPVAAWRDRPHRRAADGTAHGPARHGGEERLDHHAGLHALAGGAAGHLRPSPAGLRRNVFARRRTHDRLPQACESPAVGCGGARRHQLSDRPSCGGEDLGLRRHLRKLAGCGVRS

SEQ ID NO: 153474 - protein, 141 aa, Unknown
  Bacterial polypetide isolated from the Sargasso Sea
VTHEPVTAPQLSRGKAESHLLSELSLLMQDLGRLSSDVLLYYTQEYSYIDLAVEVTTGSSIMPQKRNLDVLELIRASSATVLSCLNESMMVMSKLPSGFQRDLQKIKAPLFKAIDNTIESVDIMAYVISTMKFLPENIKLD

SEQ ID NO: 153475 - protein, 205 aa, Unknown
  Bacterial polypetide isolated from the Sargasso Sea
ELSDDFTSPSSVMPQKKNPDILELTRGKTSQVIGYLTSILTTTKGLSSGYSRDLQQIKSSIWSTSKTSITALIIIKSMLSDLIVNQEKMQKATEEGFLVALDLAENLVLEKIPFRTAHNIVGNLVQLSHNSKKLLSDLDLDEIDCLDIKDIKTTKLFELIQKTTISSSLKQRKSKGSSGTSEQIRMIGQRTKKLSTLKKSVKIQK

SEQ ID NO: 153476 - protein, 279 aa, Unknown
  Bacterial polypetide isolated from the Sargasso Sea
NKYNKFPAKVYVDSFLKPDLYTYKTVFRDALFQINYAQCIMLKEQKLISEKEASEILTNLSEIENEFDFENLEYDSSFEDLFFLVEKILINKIGIDTAGKLHTGRSRNDMEHTMFRIKLREKIISTIKDYFILCDILLKRSEKGLSEIVLLNTHGQPAQVSTLAHFLSAVIEFSLRDISRLLQSLNLVNLSPMGSAAITTTGFPLSRERMAELLGFEGIVKNSYGAIAGCDYITTAYSSLKIGSINLGRFVQELITWTGFEVSQINVPDGFVQISSIMP

SEQ ID NO: 153477 - protein, 179 aa, Unknown
  Bacterial polypetide isolated from the Sargasso Sea
MPQKKNPDPLEYLRGKAGGTFGNLFSMLTILKGLPLSYFKDLQDDKEIVFRSFDTLNNSISILNEVLNNFKPNKIKMLKLASKGFVTATDLADHLVKHHGKTFRDAYQTTAMVVNYAEKNNKKLNELSLKELQKIEPCLKSNVLNIFDLKNSVNSKKSFGGTSFNNIKKMILKYKKIYK

SEQ ID NO: 153478 - protein, 116 aa, Unknown
  Bacterial polypetide isolated from the Sargasso Sea
IFDEILKNISPNKKKMYELANRGFVTATDLADYLVKNHAMSFRKAYQKTAEIVNFAEKKKKKLNELKIEELRKIEPKLTMDVLKIFDLKKSIISKKSYGGTSFENIKKMIIKYKKV

SEQ ID NO: 153479 - protein, 148 aa, Unknown
  Bacterial polypetide isolated from the Sargasso Sea
MDKKIWNTSGVKVSDEISSFLAGEDIELDNSIFIYDIDATIAHIKGLQSINILKKNEFNRLNKSLKELRKKFLEGSFKLTKKYEDCHSAIEFYLTKELGDLGKKVHTGRSRNDQVLVAMRLFAKNNLHDFKKLNQSIAKIFLQMANKY

SEQ ID NO: 153480 - protein, 79 aa, Unknown
  Bacterial polypetide isolated from the Sargasso Sea
MAGGVTGGAAGAWSNRFEQGLHPFIEAFNASIGFDLTLLQEDLDGSIAHARMLASCGVIAEEEAVQLVDGLELIRTEAA

SEQ ID NO: 153481 - protein, 158 aa, Unknown
  Bacterial polypetide isolated from the Sargasso Sea
GNLFSMLTILKGLPLSYFKDLQDDKEIVFKSNDTLVDCLKIFEEVVKNFRPNKEQMLKHAYNGYITATDLADYLVKNHSMSFRKAYQKTAAIVNLAEKKKKNLSELSLDELKKVEPKLQNDVLKVFDLKNSVNSKKSYGGTSFDNIKKMIMKYKKLND

SEQ ID NO: 153482 - protein, 169 aa, Unknown
  Bacterial polypetide isolated from the Sargasso Sea
MWGGRFKQELDDDAKQLSYSFSFDNRLFWYDIQTNKAYVNALLKSGVLTNEEAKTLRESLQGLIDNISELSFDYNSYEDVHSFVEALVVEQCGDLGKKMHTGKSRNDQVMTDIRLFLKDEIMDILSELEALLKEIFGLADKYKKLVFPGMTHFQPAQPILLGHHFLAYL

SEQ ID NO: 153483 - protein, 226 aa, Unknown
  Bacterial polypetide isolated from the Sargasso Sea
KMLGELGYLNNNEVNKLIKTLNQIIDVHKKGDFKINLSQEDCHTAIEDYLINELGELGKKVHMARSRNDQVLTALRLYYKNKLFDIKTLMKIWIKAISQLAKVNKNIQFPGYTHMQKAMPSSISLWASAYKEAMKNDMKILDSVFELVNQSPLGSAAGYGLPIKIDRQMTSKEMGFSSVQENPIHCQLSRGKDETILISGLSQILLTINRLSSDIIQFSMEELGYI

SEQ ID NO: 153484 - protein, 25 aa, Unknown
  Bacterial polypetide isolated from the Sargasso Sea
PISFAHYLLAYVEMLKEIKKDFKII

SEQ ID NO: 153485 - protein, 179 aa, Unknown
  Bacterial polypetide isolated from the Sargasso Sea
PQKKNPDVAELIRGGSSKTIANLMGLLSLMKNLPLSYNRDMQEDKAFVFDSLNYINDSLVLLSIVIRGMKVNIKKMEAECKLGQITATDLADYLVEKSIPFRKAHEIAGKIVAHAESNGMQIFELEISELRKFSKLISEDVYSYLDPVESINSRNLIGGTAPSQVKKEINVAKKNLSTR

SEQ ID NO: 153486 - protein, 258 aa, Unknown
  Bacterial polypetide isolated from the Sargasso Sea
MADEILLPFDIWTNRAHCIMLEQCGLIQSTYLTGILKGLRELEDSIEKGTFRLKPELEDVHTNVELFVSEAQGADAGGRMHIGRSRNDQSACDMRLYLRNRAIKLFGEVKSFAETLLGLAEEHTGTVMPGFTHYQPAMITSWGHWLCAYVQGLCRDLERLVFTLRLVNRNPLGAAAGFGSSWPLNRELTTELLGFDRVESNSLDCIVSRWENEAQLAHAFSMLMNRLSVISQDLIILSLPYLKMVRIDDGFVTGSSIM

SEQ ID NO: 153487 - protein, 140 aa, Unknown
  Bacterial polypetide isolated from the Sargasso Sea
VKIYQEDKEPTFDAYYSIDIILNVANEMIKSVKINKERMYLEANKGFTTATDLADWMVRKIGLSFRDAHYKTGKIVSLAEKEKKMLHQLTLDSLKKIEPKINKDVYDIILPEKSIFHKKSYGGTSLKTVVEAIKRAKKRI

SEQ ID NO: 153488 - protein, 273 aa, Unknown
  Bacterial polypetide isolated from the Sargasso Sea
AGHYYMAYYEMFMRDTERFIETRGRLNKNPLGSCAMAGTSFKIDRFLTTKKLGFDKPTNNSIDSVSDRDFVIDFLYSASTCAMHLSRIAEEIVLWSSNLVNFCEIKDDMMSSSSIMPQKKNPDAAELVRAKASLINSNLSSMLGIMKSLPLSYSKDLQEDKKLVFDSSSNLHISIKVITEILKSLKLNKKNLHLSAAQGFSNATELADWLVKNLKYSFRKAHTVTAKIVNFAEKNSLKLEDLTLDQFRKFDAKFSNKVFKDLNIKNAVLSKTS

SEQ ID NO: 153489 - protein, 84 aa, Unknown
  Bacterial polypetide isolated from the Sargasso Sea
MSKKLWGGRFSKSTDKKVEEFTSSIGVDKKLYKKDIDGSIAHVKMLRKQKIIKSSDATKIIKTLSKIETQIDKGNFVYEESLED

SEQ ID NO: 153490 - protein, 140 aa, Unknown
  Bacterial polypetide isolated from the Sargasso Sea
DFQEDKEPIFDTVETISSCLKAMTILINEGIEFNIKNLSDSVEKDFSNATDLADHLVGKGVPFRTAYQVVGEIVKYCLERKMLFKNLKIEEFKKFHPEFDENVFVDLKPLNVVKSRNSKGGTGFVQVAEEVNNWQKKLLL

SEQ ID NO: 153491 - protein, 226 aa, Unknown
  Bacterial polypetide isolated from the Sargasso Sea
LKLWMKKDNVLISKKIKRLKNSLVKSANKNIEILLPGLTHFQSAQPISAGHYFMAYYEMFSRDTTRFRDSLKRLDENPLGVGALAGTNFSINRNKTTKTLGFKKPTRNSLDTVSDRDFVIDFLSSASLLSMHLSRIAEEVALYSSDLINLFKIGDQLMSSSSIMPQKKNPDGAELIRAKASIAIGNLSSMLNLMKSLPLTYSKDLQEDKFLVTSTSETLHICLDCM

SEQ ID NO: 153492 - protein, 211 aa, Unknown
  Bacterial polypetide isolated from the Sargasso Sea
MADEILLPFDIWTNRAHCIMLEQCGLIQGTHLTSILNGLRELEDSIEKGTFRLKPELEDVHTNVEVFVSEAQGAEEGGRMHIGRSRNDQSACDMRLYLRNRAIKLFGEVKNFAETLLGLAEEHSGTVMPGFTHYQPAMITSWGHWLCAYVQGLCRDLERLGFTLRLVNRNPLGAAAGFGSSWPLNRELTTELLGFDRVESNSLDCIVSRWE

SEQ ID NO: 153493 - protein, 118 aa, Unknown
  Bacterial polypetide isolated from the Sargasso Sea
VSIMPQKKNPDVLELIRANYHIVNGYGVQVKSLSANLISGYNRDLQLAKKPVINSLNITKTSLDMMTYIIANLTASKENCLNDLTEDLFATDEVYNLVNEGIPFRDAYRTIAKKLSGK

SEQ ID NO: 153494 - protein, 160 aa, Unknown
  Bacterial polypetide isolated from the Sargasso Sea
MAKVWSKRFDNTLDPFIEKFNASIGFDRKLILEDLDCSIAHAKMLGKTKVLSPSETLQIINGLEKIKVEYLEGKFSPGPPSEDIHYCIEEKLITLIGDTGKKLHTGRSRNDQVGTDIRLWLRKEIDNLEILIIDLQKSFLNLAKSNIYTLIPGYTHSKEH

SEQ ID NO: 153495 - protein, 241 aa, Unknown
  Bacterial polypetide isolated from the Sargasso Sea
MADEILLPFDIWTNRAHCIMLEQCGLIQGTHLTGILNGLRELEDSIEKGTFRLKPELEDVHTNVEVFVSEVQGAEAGGRMHIGRSRNDQSACDMRLYLRNRAIGLFGEVKSFAETLLGLAEEHTGTVMPGFTHYQPAMITSWGHWLCAYVQGLCRDLERLDFTIRLVNRNPLGAAAGFGSSWPLNRELTTELLGFDRVESNSLDCIVSRWENEAQLAHAFSMLMNRLSVISQDLIILSLPY

SEQ ID NO: 153496 - protein, 180 aa, Unknown
  Bacterial polypetide isolated from the Sargasso Sea
MKLWDKGFNVDKAIENFTIGNDTELDMYLAPFDVLGNIAHITMLTEVGLLDQSELPTLKKELAKIYASTQDGSFQIEKGMEDVHSQVESILTDKLGDVGKKIHSARSRNDQVLVDLKLYGRNELIEIAALTKQLFDAFQEQSETNKDVLLPGYTHLQVAMPSSFGLWFGAHAESLADDMD

SEQ ID NO: 153497 - protein, 172 aa, Unknown
  Bacterial polypetide isolated from the Sargasso Sea
MNTSEEKYKQEIGKQQLWASRFKKSTAPVSKQYTDSTVIDRHMFYQNIWGSEAHTIMLADCGVITDDHAKNILSALQSVKEDFTNGDWDLKLSEEDVQMNVERYVIDKVGIENGGRMHTTRSRNDQVVLDTKLYTRDQLRNVQEKLAKLINTLLEQSKDHTETLAPRIHSYT

SEQ ID NO: 153498 - protein, 118 aa, Unknown
  Bacterial polypetide isolated from the Sargasso Sea
MAKNKNNQTIWSTRIKGNSSSIFQQVGSSIDIDKRLYKEDIAASIAHVEMLFKQKIISFKVKNKIIFGLNKIEKEIFYKKFEFNKKYEDIHMNIEKRLFQIIGEEAGYVHTGRSRNDQ

SEQ ID NO: 153499 - protein, 139 aa, Unknown
  Bacterial polypetide isolated from the Sargasso Sea
KDLQDDKEIIFKSYDVLFQNLKIFNEILKNINPNKKRMLELAYSGYITATDLADYLVKNNSMSFRKAYQKTALLVNLAEKKKKKLNELSLEDLKKIEPTLTKDVLKVFDLKNSVNSKKSYGGTSFDNIKKMIRKYRKLR

SEQ ID NO: 153500 - protein, 180 aa, Unknown
  Bacterial polypetide isolated from the Sargasso Sea
MAKVWSKRFENALDPFIEKFNASISFDRKLIIEDLDCSIAHAKMLGKTQVLSSSEALKIINGLESIKVAYLEGKFSPSPPSEDIHYCIEEKLISLIGETGKKLHTGRSRNDQVGTDIRMWLRKEIDNIEILITDLQKSFLNLAKSNIYTLIPGYTHMQRAQPLSLAHHLLGLYRNAPKRP

SEQ ID NO: 153501 - protein, 128 aa, Unknown
  Bacterial polypetide isolated from the Sargasso Sea
MAKLWDKGIQFDKKIESFTVGNDHQLDNILIPYDCKASIAHAKMLAKMGYINKKELVKISKILNEIIALHKKGKFLIKVSQEDCHTAIEEYLVNKIGDAGKKIHTARSRNDQALTALRLYYKEELLIV

SEQ ID NO: 153502 - protein, 151 aa, Unknown
  Bacterial polypetide isolated from the Sargasso Sea
MAKVWSKRFDNALDPFIEKFNASIGFDRKLILEDLDCSIAHAKMLGKTKVLSSSEALQIINGLELIKAEYLEGKFSPSPPSEDIHYCIEEKLISLIGETGKKLHTGRSRNDQVGTDIRLWLRKEIDNIEILITDLQKSFLNLAKSNVYTLI

SEQ ID NO: 153503 - protein, 100 aa, Unknown
  Bacterial polypetide isolated from the Sargasso Sea
MKKNPSRNVHFSEGPSDLLDTINTSIDIDQRLYKEDIMGSIAHAKMLGKQKIISKKEQAAIVSGLKAIQKDIEKNKVVFSKKLEDIHMNIESLLFKRLGK

SEQ ID NO: 153504 - protein, 143 aa, Unknown
  Bacterial polypetide isolated from the Sargasso Sea
MKKNNTDKAFSKKLVSDFSVSLDLDKRLYKEDIQLSIAYSKALRKIDILSYSEQKSIEKALKKIYQEIKKDKFEWRMDLEDIHMNIESRLHDMVGPFAGKIHSGKSRNDQVSTIERMYVKNAINESLIKIENLQKEIVLKAEK

SEQ ID NO: 153505 - protein, 149 aa, Unknown
  Bacterial polypetide isolated from the Sargasso Sea
ILKGLPLSYFKDLQDDKEIIFKSYDVLFESLKIFNEILKNISPNKKRMLDLAHSGYITATDLADYLVKNNSMSFRKAYQKTALLVNLAEKKKKKLNELSLGDLKKIEPTLTNDVLKVFDLKNSVNSKKSYGGTSFDNIKKMIKKYRKLK

SEQ ID NO: 153506 - protein, 95 aa, Unknown
  Bacterial polypetide isolated from the Sargasso Sea
MKKNPSRNTHLNRGPSKLLEAINSSIDVDQRMYKEDIEGSIAHAKMLGRQKIISKKDEVKIVNGLKVILTNIQKGKVKFKKELEDIHMNVESILF

SEQ ID NO: 153507 - protein, 182 aa, Unknown
  Bacterial polypetide isolated from the Sargasso Sea
IMPQKKNPDMCELLRGKVGIVNGNLMNLLTIMKAQPLAYNRDNQEDKHPMFSTVKTVIDSLEICNLVLKNMVLNKKNAMQAAASGYSNATDLADYLSKKGIPFRDAHKIVGEIVNLAEMKKTSLEKLDMREMKKVCNKISKEVYDILHIENSVNLKSTYGSTSKQSIKKQISLAHKLLKKRV

SEQ ID NO: 153508 - protein, 191 aa, Unknown
  Bacterial polypetide isolated from the Sargasso Sea
LRGKSGIIYGNLFSMLTILKSLPLSYYKDLQDDKEIVFKSNDTLQNCLKILDEILKNFTPNKKQMIELANTGYLTATDLADYLVKNHSMPFRKAYKVTANIVNFAEKKKKNLDQLTLAELKKIEPKLSNDVLKVFDLKNSVNSKKSYGGTSFDNIKKMILKYKKKNEKKDYFSNNCIFYIDRLWEKRRPSI

SEQ ID NO: 153509 - protein, 231 aa, Unknown
  Bacterial polypetide isolated from the Sargasso Sea
SAEFSFIELSDDFTSPSSVMPQKKNPDILELTRGKTSQVIGYLTSILTTTKGLPSGYGRDLQQIKSSIWSTSKTSITALIIIKSMLSDLTVNQEKMQKATEEGFLIALDLAENLVLEKIPFRTAHNIVGNLVQLAHNSKKLLTDLELNEIESLRIKEIKTNKLFELIQKTTISSSLKQRKSKGSAGTSEQTRMIGQRTRKLVSLKKSVKTQNDNVKKSLAVLEKRVKTLTK

SEQ ID NO: 153510 - protein, 183 aa, Unknown
  Bacterial polypetide isolated from the Sargasso Sea
MPQKKNPDVAELIRGKTGGVYGNLMGLLTLMKGLPLTYNRDMQEDKSLILDSIDTSLSCLCLLPRMIATMTLNKKKSAQIAASSFSTATDIAEYLSKKGMPFRTSHHVVGDIVKFCEKNDKQLVDLSIDELQAFSKLIDKDIFKILDPTTCIQSRTGKGETSSASVLRESKATLKRLKKYGFK

SEQ ID NO: 153511 - protein, 83 aa, Unknown
  Bacterial polypetide isolated from the Sargasso Sea
MKKNPSRNVHFSKGPSEILDAINTSIDIDQRLYKEDITGSIAHARMLGKQKIINKKEQSAIVSGLKAIERDIKKNKVVFSKNS

SEQ ID NO: 153512 - protein, 272 aa, Unknown
  Bacterial polypetide isolated from the Sargasso Sea
MWGGRFEEGMAREMVPFNLSLGVDKRLWREDIRGSVAWARAIGKAGVLTDKEVDDIVGGLDKVAQRIEERGLSDAAEEDIHSVIERMLGEEVGEVSGKLHTGRSRNDQSSTGVRLYGMTAADHVIDLLVEYATALHGFAESGREMIMPGYTHLQQAQPIRAAQWALSHLVPVLRDIERMKAARAAASVLPLGSGAIAGCPFSIDRESVRAELGFDQISKNSVDAVSDRDWICDFLYAGAMVGVHLSRLSEDLVLFSSVEFGFIRISDGFSTG

SEQ ID NO: 153513 - protein, 264 aa, Unknown
  Bacterial polypetide isolated from the Sargasso Sea
LGVAALAGTNFNIDRNYTSKKLKFKNPTNNSIDTVSDRDFVLDFLYSVSVCSIHISRLAEEFIIWNSDAFGMLKLNDKIVTGSSIMPQKKNPDPLEYLRGKTGYSFGNLFSMLTILKGLPLSYFKDLQDDKELVFKSFDQIKSSILILSEILKNFTPNKKRMYELANIGFTTSTDLADYLVKFYNLPFRKAYQITSKIVNYADSKKINLNELTFSELKKIEPMLNEDVLKVFNLENSIKSKKSYGGTSFENVKKMIKKYKRESK

SEQ ID NO: 153514 - protein, 143 aa, Unknown
  Bacterial polypetide isolated from the Sargasso Sea
NKDMQEDKEGAIDTVNQWHICLCIASEVLDSLQLNEERCRVAATQGFSNATELADYLVGKGVPFRTGHDIAGRVVLQAIDKGCAIEDLPLSDMQAICDKIEDDVYPVLQLEYGVNQRNILGGTSKETVTKALYQELEDLDKQG

SEQ ID NO: 153515 - protein, 281 aa, Unknown
  Bacterial polypetide isolated from the Sargasso Sea
FCSYLMSYIEMLNRDKKRFSNCLELLSENPLGVAALTGSSFNINREITTKKLGFKKPTENSIDTVGDRDFVLEFLYCVAMCSIHISRICEDLIIWNSDEFNFIKLSDNIVTGSSIMPQKKNPDALEFLRGKTGSAFGNLFAMMTILKGLPSSYFKDLQDDKELVFKSDELITNSLNILKEVFNNISANKAKMLKSADTGFILSTDLVDYIVKKNNLPFRTAYNITAKIVNYAEKRKKNIKDLSIEDLKKIEPRLTPEVFEYLNLKNSVKSKKTYGGTSFEI

SEQ ID NO: 153516 - protein, 272 aa, Unknown
  Bacterial polypetide isolated from the Sargasso Sea
NNFSSLEENPLGSGAISGTSFNIDRKFTTKKLGFENPTGNSIDTVADRDFVLDFLYASSVCAMHISRISEEFIIWNSDAFKLITLNDKIVTGSSIMPQKKNPDALEYLRGKVSNSYGNLFSMFTILKGLPLSYFKDLQDDKKIVFDTFDNLCNSIKVLNEVLKNFSVNKNEMLLLAGKGYITATDLADYFVKNLNYSFRKSYQLTAKIVNYCEKNKIAFSDISIEQIKKIEPKIKDDVIKVFDLKNSVNSKKSYGGTSFENVKKMIKKYKNA

SEQ ID NO: 153517 - protein, 277 aa, Unknown
  Bacterial polypetide isolated from the Sargasso Sea
MKNKTVWANRLKRKTSPSFQKIGSSIGVDKRLYEQDIAASIVHAKMLIKQKIINGKEGSKIINGLKKIKSQIDKGKFKFQEKFEDIHLNVEKKLFELIGPPAGSLHTARSRNDQVVTDFKLWIKKFSKETISNINSLMKILIKKAERNVDTVMPGLTHLKNAQPISFAHYLLSYFEMFKRDIKRFKNNINLLDECPLGSAALAGTSYKIDRNYTSRLLGFKKPTDNSIDSVADRDFAVDFLYASALCAMHLSRLAEDFIIFNSNAFNLISFDDSMLT

SEQ ID NO: 153518 - protein, 192 aa, Unknown
  Bacterial polypetide isolated from the Sargasso Sea
MGKNNNNQPIWNTRIKKEKTNLFKKVGGSIGIDKRLFKEDIEASIIHVEMLFRQKIINFKIKNKIVWGLNRIKNEIIKKKFIFDEKLEDIHMNIEHRLFELIGEDAGYIHTARSRNDQVITDFKIWLRKANKEIVKNLDVTIKNILKKAEKNVETIMPGFTHLKNAQPVSFAHYLMAYLEMFNRDKKRLKTI

SEQ ID NO: 153519 - protein, 224 aa, Unknown
  Bacterial polypetide isolated from the Sargasso Sea
MTKNKNNQAIWNTRIKQNVSSLFQKVGNSIDIDKRLFKEDIKGSIAHVEMLFKQKIISFKIKNKIIYGLNKIDKEITKNKFIFNKKYEDIHMNIEKRLFQIIGEEAGYVHTARSRNDQVITDFKIWIKEATKEINTNIDKIIKNTIKLAEKNVETIMPGFTHLKNAQAISFAHYLMSYVEMFNRDKKRFLNNLDNLDENPLGVAALAGTSFNIDRNYTTKKTWF

SEQ ID NO: 153520 - protein, 287 aa, Unknown
  Bacterial polypetide isolated from the Sargasso Sea
YYEMLKRDKKRFENNIDLLDECPLGSAALSGTSYKIDRKYTAKKLGFKKPTENSIDSVSDRDFAIDFLYSSAICAMHLSRLAEDFIIFNSDAFNLINFNDSMLTGSSIMPQKKNPDPAELIRGRVGVNYGKLNSMLTIMKGLPTSYFKDLQDDKILVFDGYDTLKDSLIMSEELINAVKPLKDKMLKMANKGFTTATDFADYLAKEKNLSFRESYSLSAKLVNLAEKNNKTLDQLSLVDIKKIYKDVDKNVLKILNVKNSMNSKKSYGGTASNNVAMMIKKYKKEIK

SEQ ID NO: 153521 - protein, 162 aa, Unknown
  Bacterial polypetide isolated from the Sargasso Sea
MSKNKNNKAIWSTRIRKNTISTFKKVGSSINIDKRLYKEDIQSSIVHTEMLFKQKIISFKIKNKIIWGLNKIQKEILKGKFKFRNDLEDIHMNIENRLHEIIGEDAGFVHTGRSRNDQVVTDLKIWMKNSTINLIKLLENLNKVFLKVAKKNIETIMPGFTH

SEQ ID NO: 153522 - protein, 211 aa, Unknown
  Bacterial polypetide isolated from the Sargasso Sea
MSQPTDRLWGARFKTGPSAALAALSRCPERYFRLTPYDLAGSCAHARELQRAGLLDESETLRTLEALDRIGEDFAAGRLHPTLDDEDVHTFIERVLTERLGALGGKLRAGRSRNDQTANDLRLFLRDHARTIANEVLGLQQALVEQAEQHVQSICPGFTHLQQAQPIVFAHHLLAHAQSMLRDVQRLVDWDARTALSPLGAAAMAGSAIAR

SEQ ID NO: 153523 - protein, 193 aa, Unknown
  Bacterial polypetide isolated from the Sargasso Sea
FINLPDELATGSSIMPQKKNPDGAELVRGKASGIISNLNSLLVILKGLPLAYSKDLQDDKRIVFAAFDDISLTLEVMTEIWSKISFNTDIMASAVKNSNATATDFANWLVQHLELSFREAYQLTGRIVAYANKNNKKLHQLSLQELQKFNKKITENARKTLSIHESIKNKKSFGGTSPQRVKQSIKYAIKKYL

SEQ ID NO: 153524 - protein, 195 aa, Unknown
  Bacterial polypetide isolated from the Sargasso Sea
FSFIEFKDKVLTGSSIMPQKKNPDPAELIRGRTAINYGNLNSMLTIMKGLPISYYKDLQDDKELVFDSYDTLKDSLMMAIELIQNLNTKKNNMRDMAQKGYTTATDFADFLSMKKNLPFRKGYSISSKLVNYAEKKKIRLDQLSRGEINKFVKEVNINIPKMFDVVNSMNSKTSFGGTSAKNVKRMIAKYKKELK

SEQ ID NO: 153525 - protein, 189 aa, Unknown
  Bacterial polypetide isolated from the Sargasso Sea
MDKKNTSWGGRFTQSVSALASRFSNSIDVDSVLAEKDIVGSIAYAESLQEAGVINKSELIKIKRGLNQIKRELETGKFKWNPSLEDVHMNIESALEKKIGDSAKKLHTGRSRNDQVVTDLKLFLKDETKAIEKKIKDLQKNILNKAQKHYADLMPGFTHLQIAQPVTIGHHLLAYFEMLQRDSIRLQTT

SEQ ID NO: 153526 - protein, 141 aa, Unknown
  Bacterial polypetide isolated from the Sargasso Sea
MGKNKNNYAVWSTRIKKQTSNNFKKVGSSINIDKRLYKEDIRGSMVHTDMLYKQKIISLKVKEKILWGLNRIKNEIDKKKFKFDISKEDIHMNIESRLFELIGDDAGFLHTARSRNDQVLTDLKIWMKSSVSEIDKLLTKI

SEQ ID NO: 153527 - protein, 200 aa, Unknown
  Bacterial polypetide isolated from the Sargasso Sea
WSNQQFNFINLPDDLSTGSSIMPQKKNPDGAELVRGKTSIIISNLNSMINIIRGLPLSYSKDLQDDKQITFNSYDNVFLCIKVINEILSKSTFNKTRMKELIENSNATATDLANWLVQSLRYSFRDAYNITGKIVSFCSKQNVNIDSLSLDELKKFDKNITADAKKVLSATNSVKSKSSFGGTAPEITNKMIKLAIKKYL

SEQ ID NO: 153528 - protein, 177 aa, Unknown
  Bacterial polypetide isolated from the Sargasso Sea
MSKNKNKQTIWNARIKGNTSKLFEKVGSSIDIDKKLYKEDIACSIVHVEMLFRQKIISFQIKNKIIYGLNKIEKEIIKNKFQYQKKYEDIHMNIEKRLFEIIGDDAGYVHTARSRNDQIITDFKKWLIKSTNETNKNLDNIIKTILKVAEKNIETIMPGFTHLKNAQAVSFAHYLMA

SEQ ID NO: 153529 - protein, 286 aa, Unknown
  Bacterial polypetide isolated from the Sargasso Sea
LTQKLGDLGKKIHTGRSRNDQVLVAMHLFVKKELSEIKTQVIELFELLLLLAEKHKEDLIPGYTHLQVAMPSSFGLWFSAYAESLIDDLYFWQSAFKIADQNPLGSAAGYGSSFPIDRNFTTNILQFAQLKVNSVAAQMSRGKLEKSTAMALSAIGSTLSKFSMDICLYMGQDFKFISFPDNLTTGSSIMPHKKNPDLFELVRGKCNVIQGLPNLLSLLTTNLPSGYHRELQLCKGPIIESIQEMKACLEILLFSLPSIKVSKNITDDKKYDYLFSVDTLNQDVLA

SEQ ID NO: 153530 - protein, 157 aa, Unknown
  Bacterial polypetide isolated from the Sargasso Sea
CSIAHAKMLAKTKVLSSAEALQIINGLELIKVEYLEGKFSPSLPSEDIHYCIEEKLISLIGETGKKLHTGRSRNDQVGTDIRLWLRKEIDNIEILIIELQKSFLNLAKSNIYTLIPGYTHMQRAQPLSLAHHLLAYIEMLKRDSERYKEVRSRVNIL

SEQ ID NO: 153531 - protein, 162 aa, Unknown
  Bacterial polypetide isolated from the Sargasso Sea
MSKNKNNLPIWNTRIKKNSNNLFKKVGGSLSIDKRLFKEDIEASIVHVDMLFRQKIINFKVKNKIVWGLNRIKNEIIKKKFIFNDKLEDIHMNIEHRLFELIGDDAGYIHTARSRNDQVVTDFKIWLKKANSEILKNIDVTIKNIIKKAEANIETIMPGFTH

SEQ ID NO: 153532 - protein, 124 aa, Unknown
  Bacterial polypetide isolated from the Sargasso Sea
SGCLKAMTILLNEGIEFNVDKLMDSVNNDFSNATDLADYLVDKQVPFRKAYQIVGDIVKYCLTKDILFKDLKLAEFQTFHSEFKEDIFENLNPVNVVKFRNSIGGTGFDQVKAELNKWKNKLLI

SEQ ID NO: 153533 - protein, 179 aa, Unknown
  Bacterial polypetide isolated from the Sargasso Sea
MRKNKNNYAVWSSRIKKQTSNNFKKIGSSINIDKRLYREDIKGSIVHTEMLYKQKIISLKVKAKILWGLNRIKNEIEKKKFKFDISKEDIHMNIESRLFELIGDDAGFLHTARSRNDQVLTDLKIWMKNSVNEIDKLVIRVIKSLINNAEKNIKTVLPGFTHLKNAQPISLAHYFMSCV

SEQ ID NO: 153534 - protein, 148 aa, Unknown
  Bacterial polypetide isolated from the Sargasso Sea
MAKNKNNQAIWTTRIKKNTSSLFQKVGNSIDIDKRLYKEDIQGSIAHVEMLFKQKIISFKVKNKIIYGLTKINKEITNNKFEFNKKYEDIHINIEKRLFQIIGEEAGYVHTARSRNDQVITDFKIWMKKSTNEINNNINKVIKSTIKL

SEQ ID NO: 153535 - protein, 204 aa, Unknown
  Bacterial polypetide isolated from the Sargasso Sea
DFIIFNSEAFNFLKFSDKVLTGSSIMPQKKNPDPAELIRGKTAINYGKLNSMLTIMKGLPISYYKDLQDDKALVFDSYDTLKDTLLMANELILNLNANKINMKQMAQKGYTTATDFADYLVKKNNFPFREAYVASSKLVNYAEKKKVRLDELSLKEINKFLKGVKVDNIKIFDVLSSMNSKTSYGGTATKNIKNMIRKYRKELK

SEQ ID NO: 153536 - protein, 186 aa, Unknown
  Bacterial polypetide isolated from the Sargasso Sea
MVKNKNNQAIWNIRIKKNASSLFQKVGNSIDIDKRLYKEDIQGSIAHVEMLFKQKIISFKIKNKIIYGLTKIDKEISKNKFQFNKKYEDIHMNIEKRLFQIIGEEAGYVHTARSRNDQVITDFKIWMKNSTNDINNNINKVIKSTIKIAEKNVETIMPGFTHLKNAQAISFAHYLMSYVEMFNRDK

SEQ ID NO: 153537 - protein, 149 aa, Unknown
  Bacterial polypetide isolated from the Sargasso Sea
RGYHSSYNKDFQEDKEPIFDTAETISSCLKAMTILINEGIEFNIKNLSHSVEKDFSNATDLADYLVGKNVPFRTAYQVVGEIVKYCLERKMLFKNLKIEEFKKFHPEFDEDVFVDLKPLNVVKSRNSEGGTGFVQVAEEVNNWQKKLLL

SEQ ID NO: 153538 - protein, 280 aa, Unknown
  Bacterial polypetide isolated from the Sargasso Sea
FAHYLLAYFEMFKRDKVRFANNLKSLNENPLGAAAFAGTNFNIDRFFTTKKLKFKYPTNNSIDTVSDRDFVLDFLYTVSTCSVHISRIAEEFIIWNSDAFKLIKLNDKIVTGSSIMPQKKNPDPLEFLRGNSGSSFGNLFSMLTILKGLPLSYFKDMQDDKKLVFNSYDLLKNSIQVLIDILNNFSPNKKRMLELANEGFILSTDLADYLVQKHNLPFRKAYMVTAKIVNLAETKNLKLYELPMKELKKIEPNLDDNVFKVLNLRNSIKSKKSYGGTSFE

SEQ ID NO: 153539 - protein, 162 aa, Unknown
  Bacterial polypetide isolated from the Sargasso Sea
RKAGRLLGNLTGFLATQKGLPLTYNKDLQEDKEPLFDSCDTIRLTTIALTGMIESLKFNGHSMSASADSQEIAATDLADFLVQRGLPFREAHSVIAGLVRESLDSDAELTDLVNNHPDLGPEAAQLLQPGVGWARRNSHGGGGPEAVTEQLAALKAHVESIS

SEQ ID NO: 153540 - protein, 127 aa, Unknown
  Bacterial polypetide isolated from the Sargasso Sea
MKNKNKAVWGSRFNNPTSKIFEKIGASIDVDKRLFEEDIFASIVHAQMLIKQKIIDKKKGRKIIKGLKKIRNEILKNKFQFNKKYEDIHLNIEKRLFEIIGEEAGYLHIARSRNDQVITDFKIWIKK

SEQ ID NO: 153541 - protein, 240 aa, Unknown
  Bacterial polypetide isolated from the Sargasso Sea
KKPTNNSIDSVSDRDFAIDFLSAAATCAMHLSRLAEDFIIFNSEAFGFLEFTDKVLTGSSIMPQKKNPDPAELIRGRTAINYGNLNSMLTIMKGLPISYYKDLQDDKELVFDSYDTLRDSLSMSIELMENLITKKNNMKDMAQKGYTTATDFADFLTKKKNMPFRKSYTISSKLVNYAERKRIRLDQLSKNEINKFVKKIEINIPKIFDVVNSMNSKTSFGGTSAKNVKKMIKKYKSELK

SEQ ID NO: 153542 - protein, 290 aa, Unknown
  Bacterial polypetide isolated from the Sargasso Sea
IFGKKIHTARSRNDQVLVSIQLYLIDELNFIKTEVKSLFDLLINLAKKNKNIIMPGYTHMRAAMPSSFGLWFSAYAEILIDDVISLNSSIEIINQNTLGSAAGYGTSFNIDRDFTTNDLNFKTLKYNSLACQISRNKIEKNTFDTLGNIAFTLSKISMDICLYSGDEFHFISFPENITTGSSIMPHKKNPDVFEIIRGKCNSIQNLSNSASLSSTNLPSGYHRDFQLNKGKIINAVNDIKECIQILSYCLSKVSVNKKILEKSNYENIFSVELINEMVLKVYLLEMHILN

SEQ ID NO: 153543 - protein, 150 aa, Unknown
  Bacterial polypetide isolated from the Sargasso Sea
MWGGRYAAGPAETMERINASIDFDRRFYAQDIAGSKAHCRMLIDCEIISAADGDAILTGLDSVLKDIETGNFEFKTSLEDIHMNVEAALAEKIGEPAGRLHTGRSRNDQVATDFRLWVRDAIDAFDRQLQDLQRALIEKAEENVDTVLPG

SEQ ID NO: 153544 - protein, 212 aa, Unknown
  Bacterial polypetide isolated from the Sargasso Sea
MHLSRLAEDFIIFNSEAFSFVEFRDKVLTGSSIMPQKKNPDPAELIRGRTAINYGNLNSMLTIMKGLPISYYKDLQDDKELVFDSYDTLKDSLMMAVELIQNLNTKKNNMKNMAQKGYTTATDFSDFLSMKKKLPFRKGYNISSKLVNYAEKKKIRLDQLSKSEINKFVKDVDINIPKMFDVVNSMNSKKSFGGTSAKNVKRMIVKHRKDLK

SEQ ID NO: 153545 - protein, 236 aa, Unknown
  Bacterial polypetide isolated from the Sargasso Sea
LNNIELINECPLGSAALAGTSYKIDRQFTARKLGFKKPTGNSIDAVCDRDFVIDFLSAAATCAMHMSRLAEDFIIFNSEAFNFLKFSDNVLTGSSIMPQKKNPDPAELIRGKTAINYGKLNSMLTIMKGLPISYYKDLQDDKSLVFDSYDTLKDTLLMANELILNLNANKINMKQMAQKGYTTATDFADYLVKKKNFAFREAYVTSSKLVNYAEKKKVRLDELSLEEINKFLKRVK

SEQ ID NO: 153546 - protein, 168 aa, Unknown
  Bacterial polypetide isolated from the Sargasso Sea
MGKNKNNKPIWNTRIKNESKNLFKKVGGSIEIDKRLFREDIEASIVHVEMLFRQKIINFKIKNKIVWGLNRIKNEIIKKKFIFDDKLEDIHMNIEHRLFELIGEDAGYIHTARSRNDQVVTDFKIWLRNANKEIVKNIDITINNILKKAEKNIETIMPGFTHLKNAQP

SEQ ID NO: 153547 - protein, 199 aa, Unknown
  Bacterial polypetide isolated from the Sargasso Sea
MTKLWEKGVGFDKKIESFTVGNDNDLDQILLPYDCEASIAHVKMLNKMKYLNDNESDKLIKELNFILEESKSGNFKIKKSHEDCHTAIEDHLVNTCGDSGKKIHTARSRNDQVLTALRLYYRESIDDVKKLLIDLIKSLELFSDKNGKIQFPGYTHMQKAMPSSVQLWSNAYIESMNDDLKLLQTAYALINQSPLGSGA

SEQ ID NO: 153548 - protein, 145 aa, Unknown
  Bacterial polypetide isolated from the Sargasso Sea
MSKNKNNQPIWGTRVKKSSTNLFKKIGGSLSIDKRLFNEDIEVSIIHVEMLFKQKIINFKIKNKIIWGLKRIKNEIIKKKFPFDEKLEDIHMNIENRLFDLIGEDAGFVHTARSRNDQVVTDFKIWLRKANNEITKNIDVIIKNI

SEQ ID NO: 153549 - protein, 230 aa, Unknown
  Bacterial polypetide isolated from the Sargasso Sea
KLDEIQSINLKVALAFLEKSEKHSSNPMPGYTHLQRAMPSSWGLWFGAFAESFLDNAELLSNTKTWINVNPLGTAAGYGVNLPIKRDISTKELNFKRKQLNSLYVQNSRGKFELELIGVLKQPMLDIRKFSWDMSLFLSQEFNLLSLPPIYSTGSSIMPNKSNPDVIEIMRANFSILSGHYSELENLISLPSGYHRDLQLTKRSLIHSIHCVLKTMNLLPKLVRSIMINT

SEQ ID NO: 153550 - protein, 266 aa, Unknown
  Bacterial polypetide isolated from the Sargasso Sea
IDLNTLDCIVSRWENEAQLAHSITLLMNHLSTIAQDLIFLSHPYVGAIKIDDKYVTGSSIMPQKKNPDFAEIIKSKTSMAQGMLSGLIGIQKGAMSGYNRDTQTSKYLIMDLVRECEKAPSILQGVFESLIVNNKKMKELSEKDFLNATDIADYLSRKLNMPFRESYQILAKSVKLSAPELKITKDALNKSLEEFGKSNEIANDLEDLQDTQKLLRHRNHRGSPSPEETRLQVKVFTKQLNSLSSPLLILEKKIGVAQNNCRNYEV

SEQ ID NO: 153551 - protein, 133 aa, Unknown
  Bacterial polypetide isolated from the Sargasso Sea
MKKNSINKQKKNKMWGGRFSSSTSELMEEFNSSIQFDQILYVEDIEGSIAHSEMLSKQNIISNKEFLSIKSGLEQIKREISNNEFNFSTKLEDIHMNVENRLVEIIGDDGKKLHTARSRNDQVATDIKLWLRK

SEQ ID NO: 153552 - protein, 255 aa, Unknown
  Bacterial polypetide isolated from the Sargasso Sea
SYNIDRNFTSKKLGFKRPTNNSIDSVSDRDFVLDFLSSASICAMHISRFAEELIIWNSDIFKLIKIDDKMLTGSSIMPQKKNPDPAELIRGRAGKNFGFLQAMLTTMKGLPLSYYKDMQEDKGLVFDSYDIILESIIISNELIKNIKPNKERMLSLSNEGYTTATDFADYLVRNKNLSFRQAYKISAQLVNYAENKRKKLNQLSFDEIKKVKNDLDKNVMKIFNVKNSINMKISYGGTSTKNIKKMISKLKKEFK

SEQ ID NO: 153553 - protein, 183 aa, Unknown
  Bacterial polypetide isolated from the Sargasso Sea
MGKNKNNQPIWNTRIKKESKNHFKKVGGSITIDKRLFKEDIEASIVHVEMLFRQKIINFKIKNKIVWGLNRIKNEIIKKKFIFDHKLEDIHMNVEHRLFELIGEDAGYIHTARSRNDQVVTDFKIWLRKANKEIVKNIDVTIKNILKKAEKNVETIMPGFTHLKNAQPVSFAHYLMSYLEMFN

SEQ ID NO: 153554 - protein, 248 aa, Unknown
  Bacterial polypetide isolated from the Sargasso Sea
LAHSISLLMNHLSIVAQDLIFLSHPYVGVIQIDDNYVTGSSIMPQKKNPDFAEVIKSKASLAHGMLSGLLSIQKGAMSGYNRDTQTSKYLIMDLIRECESAPLILQGVLESLTVNHKKMKELSETDFMNATDIADHLARKLDLPFRECYHLTAKSVKLSAPELKITNQALRKTLEEIGQPAEIADDMDNLQEPLKLIEQRLHHGSPSPEQTRLQVKEFTNQLDSLSAPLVNMVNKINDAQENCRNYEV

SEQ ID NO: 153555 - protein, 128 aa, Unknown
  Bacterial polypetide isolated from the Sargasso Sea
MAKNKNNQAIWGTRIKDNTSNLFQKLGSSINIDKRLYKEDIAVSIAHVEMLFKQKIITFKIKNKIIYGLNKIEKEISKNKLEFSKKYEDIHMNIEKRLFQIIGDEAGYMHTARSRNDQVLADFKIWIK

SEQ ID NO: 153556 - protein, 258 aa, Unknown
  Bacterial polypetide isolated from the Sargasso Sea
KKSSKETIANINSLMKMLIKKAEKNVDTVMPGLTHLKNAQPISFAHYLLSYFEMFKRDKKRFENNIKLLDECPLGSAALAGTSYKIDRNYTSRQLGFKKPTDNSIDSVADRDFAVDFLYASALCAMHLSRLAEDFIIFNSNAFNLISFDDSMLTGSSIMPQKKNPDPAELIRGRVGLNYGNLNSMLTIMKGLPMSYFKDLQDDKKLVFDGFDTLNDSLVLSLELVNSIKPNEKNMLKMASEGFTTATDFADYLVKEKK

SEQ ID NO: 153557 - protein, 144 aa, Unknown
  Bacterial polypetide isolated from the Sargasso Sea
SYNKDFQEDKEPIFDTAETISSCMKAMTILINEGIEFNIKNLSDSVENDFSNATDLADYLVGKNVPFRTAYQVVGEIVKYCLEKKILFKTLKIDEFKKFHPKFDEDVFLDLKPFNVVKSRNSEGGTGFVQVEKEVNSWQNKLLL

SEQ ID NO: 153558 - protein, 192 aa, Unknown
  Bacterial polypetide isolated from the Sargasso Sea
MVKNKNNQTIWNTRIKNNSSNLSQKIGSSIDVDKRLYKEDINGSIAHVEMLFKQKIISFRTKNKIIYGLNKIEKEISNKKFEFNKKYEDIHINIEKRLFQIIGEEAGYVHTARSRNDQVITDFKIWIKSANQKISVMLNNVIKNSINLAEKNIDTIMPGFTHLKNAQAVSFAHYLMAYVEMFKRDKDRFKNN

SEQ ID NO: 153559 - protein, 232 aa, Unknown
  Bacterial polypetide isolated from the Sargasso Sea
MKLWQKNTPANDKIIDFTVGKDRDFDLYLAAYDCQASIAHTQMLDKIGVLTEQESQAIVEVLEELKSKAENSKFVIEDSFEDMHSKIEFTLTEKLGDLGKKIHTARSRNDQVLVAMHLYLKEEIAAIKKLTYDLFKLLIKLSKQHKDKLLPGYTHFQVAMPSSFGLWFSAYAESLIDDVTLLNAARKIVDQNPLGSAAGFGSSFPIDRKATTESLNFMDLKYNVIAAQMSRG

SEQ ID NO: 153560 - protein, 42 aa, Unknown
  Bacterial polypetide isolated from the Sargasso Sea
LKDKVVTGSSIMPQKKNPDTLEYFKRQNRKYLRKFIFYAHNS

SEQ ID NO: 153561 - protein, 151 aa, Unknown
  Bacterial polypetide isolated from the Sargasso Sea
MEKKTKDIDRKNKEKGKSQVSSVWGGRFTGVPSDIMEKINPSIDFDKRFFVQDIEGSRVHAEMLGKQGIISAKESEEIIEGLNQIEKEIHEDNFQFRRDLEDIHMNVEARLTTLIGETGGRLHTARSRNDQVATDFKMWVRDKIDDLIEAL

SEQ ID NO: 153562 - protein, 153 aa, Unknown
  Bacterial polypetide isolated from the Sargasso Sea
MVKNKNNQTIWNTRIKNSSSNLSQKIGSSIDIDKRLYKEDINGSIAHVEMLFKQKIISFRTKNKIIYGLNKIEKEISNKKFQFNKKYEDIHINIENRLFQIIGEEAGYVHTARSRNDQVITDFKIWIKSANQKISVMLNNVIKNSINLAEKNV

SEQ ID NO: 153563 - protein, 165 aa, Unknown
  Bacterial polypetide isolated from the Sargasso Sea
MTNKNKTVWSSRFKSSTSKSFQRIGASINVDKRLYEQDIFASKIHTQMLIKKKIIPAKEGKKILKGLEKIRGQIKKGKFIFKEKFEDIHLNIEKKLYEIIGDSAGYMHTARSRNDQVVTDFKLWVKDSSVILIKELNSLMKNIVSKKNKNVNTVMPRFYPSQKCS

SEQ ID NO: 153564 - protein, 209 aa, Unknown
  Bacterial polypetide isolated from the Sargasso Sea
MYRSRLGKDLDDITLSYVSSIKDDSDIAFYDIIGSEAHVIMLYENKLLSKIETKKILTALEELKGGNISQPDFEPEDIHELIESLVIKKTGIENGGKMHTARSRNDQVALDIRLKIRDDINILLQCLIETISTLLKTAQENTKTIMPLYTHLQQAQVGVFSHYLLSYADSLLRDLDRFMSLYGRVNQSPLGAGPVGGTSLPIDRDQYCK

SEQ ID NO: 153565 - protein, 124 aa, Unknown
  Bacterial polypetide isolated from the Sargasso Sea
MSKNKNNKPVWGTRINQKTTSSFQKIGSSLKIDKRLFKEDISASIVHVEMLAKQKIINISIKNKIIWGLNKILNEILKKKFFFNDKNEDIHMSIEQRLFELIGEDAGFIHTARSRNDQVLTDLK

SEQ ID NO: 153566 - protein, 182 aa, Unknown
  Bacterial polypetide isolated from the Sargasso Sea
MVKNKNNKAIWTTRIKGKSSSLFQRVGSSINIDKRLYKEDIMVSIIHVEMLFKQKIISFKVKNKIIYGLDKIKKEISKKKFVFNEKYEDIHMNIEKRLFDIIGDEAGYIHTARSRNDQVLTDLKIWIRSASKEINYNLDKLIKTILKIAEKNIKTIMPGFTHLKNAQPVSFSHYLMAYVEIL

SEQ ID NO: 153567 - protein, 124 aa, Unknown
  Bacterial polypetide isolated from the Sargasso Sea
MSKNKNNQPIWNTRIKKSTKSLFNKVGGSLSVDKRLFKEDIEASMVHVEMLFKQKIVNFKIKNKIIWGLKRIKNEIIKKKFFFDRNLEDIHMNIEARLFELIGEEAGYIHTARSRNDQVVTDFK

SEQ ID NO: 153568 - protein, 264 aa, Unknown
  Bacterial polypetide isolated from the Sargasso Sea
MVKNKNNQTIWNTRIRNNSSNLLQKIGSSIDVDKRLYKEDINGSIAHVEMLFKQKIISFKIKNKIIYGLKKIEKEISNKKFEFNKKYEDIHINIEKRLFKIIGEEAGYIHTARSRNDQVITDFKIWIRSANYKISMMLNNVINSSVNLAEKNVDTIMPGFTHLKNAQAVSFAHYLMAYVEMFKRDKDRFRSNLFSLNENPLGVAALTGTSFNIDRNFTTKKLGFERPTNNSIDTVADRDFVLDFLYSVSVCSLHLSRIAEELII

SEQ ID NO: 153569 - protein, 246 aa, Unknown
  Bacterial polypetide isolated from the Sargasso Sea
IKIPGFKKPTDNSIDSVADRDFAVDFLYASALCAMHLSRLAEDFIIWNSNAFNLISFDDSMLTGSSIMPQKKNPDPAELIRGRVGLNYGNLNSMLTIMKGLPMSYFKDLQDDKKLVFDGFDTLNDSLVLGLELVNSTKPNKKNMLKMANEGYTTATDFADYLVKQKKLTFRDAYAIAAKLVNYAENKNKLLFELSLQEIMKIYKNLDKKVLKIFDVNNSMNSKRSHGGTSIANIKSMIKKYKKELK

SEQ ID NO: 153570 - protein, 179 aa, Unknown
  Bacterial polypetide isolated from the Sargasso Sea
MGKNKNNQPIWNTRIKKKTKNLFKKVGGSIEIDKRLFREDIEASIVHVEMLFRQKIINFKIKNKIVWGLNRIKNEIIKKKLIFDDRLEDIHMNIEHRLFELIGEDAGYIHTARSRNDQVVTDFKIWLRKANKEIVKNIDVTIKNILKKAEKNVETIMPGFTHLKNAQPVSFAHYLMAYL

SEQ ID NO: 153571 - protein, 206 aa, Unknown
  Bacterial polypetide isolated from the Sargasso Sea
MSNKKTTVGSVSKQVLEYTAGRDIELDRLLVDVDCIATAAHVKMLEQVPCDMPILSKMECDKIINSLNEIRVQKDKGKFKIRLSDQDVHLAIERVLTLELGDTGKKIHTGRSRNDQVAVDLRLYGKEQLLLILSELTDLIKVLIKFGKRYQLVPMVGRTHMQPGMPSSVGLWASAHAESLLDDTKLIFHILEVNDQCPLGSAASYG

SEQ ID NO: 153572 - protein, 252 aa, Unknown
  Bacterial polypetide isolated from the Sargasso Sea
IDRNYTSRQLGFKKPTDNSIDSVADRDFAVDFLYASALCAMHLSRLAEDFIIFNSNAFSLISFDDSMLTGSSIMPQKKNPDPAELIRGRVGLNYGNLNSMLTILKGLPMSYFKDLQDDKRLVFDGFDALNNSLVLSIELVNSVKPNKKNMLKMANEGFTTATDFADYLVKEKKLTFRESYSIATKLVNYAEKNNKLLFELSLQEIMKIYKNLDKKVLKIFDVNNSMNSKRSHGGTAIANVKAMIKKYKKELK

SEQ ID NO: 153573 - protein, 201 aa, Unknown
  Bacterial polypetide isolated from the Sargasso Sea
MDKNKNNKAIWNSRIKKKSSALFQKIGSSINIDKRLYKEDILGSIAHVEMLFRQKIITFKIKNKIIYGLQKIEKDILKNKFDFNEKYEDIHINIEKKLFEIIGEEAGYIHTARSRNDQVLVDFKIWIKNANREINSNLDKIINSILKLAEANIMTIMPGFTHMKNAQPTSFAHYLMAYVEMFSRDKKRLEFNLENLNENPL

SEQ ID NO: 153574 - protein, 242 aa, Unknown
  Bacterial polypetide isolated from the Sargasso Sea
MSKNKNNLPIWNTRIKKNSNNLFKKVGGSLSIDKRLFKEDIEASIVHVDMLFRQKIINFKVKNKIVWGLNRIKNEIIKKKFIFNDKLEDIHMNIEHRLFELIGDDAGYIHTARSRNDQVVTDFKIWLKKANSEILKNIDVTIKNILKKAEANIETIMPGFTHLKNAQPVSFAHYLMAYLEMFNRDKKRFINNLDSLNENPLGVAALTGTSFKIDRFYTSKKLGFQKPTKNSIDTVSDQRFCY

SEQ ID NO: 153575 - protein, 174 aa, Unknown
  Bacterial polypetide isolated from the Sargasso Sea
MSKNKNNETIWGSRIKKNTSTLFRKVGNSIDIDKRLYKEDIAGSIAHVEMLFKQKIISFKIKNKIIYGLNKIEKEIKSKKFEFHKKYEDIHINIEKRLFQIIGEEAGYIHTARSRNDQVITDFKIWIRSATKEININLDKLIKSIIKLAERNIYTIMPGFTHLKNAQAISFAHY

SEQ ID NO: 153576 - protein, 144 aa, Unknown
  Bacterial polypetide isolated from the Sargasso Sea
MAKNKNNQAIWSTRISKKTSQIFKKSGSSLNIDKRLYKEDIEASTAHIEMLFKQKIISFKIKAKIIWGLNKIKNEIIKKKFNFNNENEDIHMSIENRLFQIIGDDAGFVHTARSRNDQVITDFKLWLRKATDDLIANLNNTIKI

SEQ ID NO: 153577 - protein, 147 aa, Unknown
  Bacterial polypetide isolated from the Sargasso Sea
MTKNKNNQPIWSSRIKINSKNLFRKVGGSLDIDKRLFNEDISASIVHTEMLFKQKIINFKIKNKIVWGLNRIKNEIIKKKFPFDKNLEDIHMNIEKRLFDLIGEDAGFIHTARSRNDQVITDFKIWLKKSTYEITKTLDGLISTILK

SEQ ID NO: 153578 - protein, 180 aa, Unknown
  Bacterial polypetide isolated from the Sargasso Sea
MYRSRLGKNLDEITLNYVSSISDDSDIAFYDIIGSQAHTIMLYEKKLLTKTELKKILSALEDLKNGKISQPDFEPEDIHELIESLVIKKTGIDSGGKMHTARSRNDQVALDIRMKIRDDINILTQCLIETISELLYLAKQHHKTVVPLYTHLQQAQVGVFSHYLLSYADSLFRDLDRFIS

SEQ ID NO: 153579 - protein, 132 aa, Unknown
  Bacterial polypetide isolated from the Sargasso Sea
FLILPEHFCTGSSIMPQKKNPDVLEILRGKYHTVKACETEIAGLISGLGTGFHRDFQLTKEPAMKGIKTTLDSLEIASLVIKNITVNTDRCKEAMTDEIYATERAYALVKKGIPFREAYRQIGIELSEAKKN

SEQ ID NO: 153580 - protein, 196 aa, Unknown
  Bacterial polypetide isolated from the Sargasso Sea
QFNFINLPDDLSTGSSIMPQKKNPDGAELVRGKTSIIISNLSSMLNIIKGLPLSYSKDLQDDKQITFNSYDNVSLCIKVMNEILSKSTFNKTRMKELIDNSNATATDLANWLVQNLRYSFRDAYVVTGKIVSYCSKQNRNIDSLSLGELKKFDKNITADAKKVLSAANSVKSKSSFGGTAPEITKKIIKLVIKKYL

SEQ ID NO: 153581 - protein, 213 aa, Unknown
  Bacterial polypetide isolated from the Sargasso Sea
MGKNKNNQPIWSTRIKKESKNLFKKVGGSIAIDKRLFKEDIEASIVHVEMLFRQKIINFKIKNKIVWGLNRIKNEIIKKKFIFDDKLEDIHMNIEHRLFELIGEDAGYIHTARSRNDQVVTDFKMWLRKANKEIVKNIDVTIKNILKKAEKNVETIMPGFTHLKNAQPVSFAHYLMAYLEMFNRDKNRFKNNLESLNENPLGVAALTGTSFKS

SEQ ID NO: 153582 - protein, 273 aa, Unknown
  Bacterial polypetide isolated from the Sargasso Sea
NNIKLLDECPLGSAALAGTSYKIDRNYTSRQLGFKRPTDNSIDSVADRDFAVDFLYTSALCAMHLSRLAEDFIIFNSNAFNLISFDDSMLTGSSIMPQKKNPDPAELIRGRVGLNYGNLNSMFTIMKGLPMSYFKDLQNDKKLVFDGFDTLNDSLVLSLELVNSIKPNKKNMLKMANEGYTTATDFADYLVKEKKLTFRESYTVAAKLVNYAERKNKLLSEISLREIMKIYKNLDKNVLKIFDVNNSMNSKKSYGGTSSANVKAMIKKYKKEV

SEQ ID NO: 153583 - protein, 128 aa, Unknown
  Bacterial polypetide isolated from the Sargasso Sea
MGKNKNNQPIWNTRIKKGETNLFKKVGGSIGIDKRLFREDIEASIVHVEMLFKQKIINFKIKNKIVWGLNRIKNEIIKKKFIFDNKLEDIHMNIENRLFELIGEDAGYIHTARSRNDQVVTDFKIWLR

SEQ ID NO: 153584 - protein, 217 aa, Unknown
  Bacterial polypetide isolated from the Sargasso Sea
MYRSRLGKDLDDITLSYVSSIKDDSDIAFYDIIGSEAHVIMLYENKLLSKIETKKILTALEELKGGNISQPDFEPEDIHELIESLVIKKTGIENGGKMHTARSRNDQVALDIRLKIRDDINILLQCLIETISTLLKTAQENTKTIMPLYTHLQQAQVGVFSHYLLSYADSLLRDLDRFMSLYGRVNQSPLGAGPVGGTSLPIDRDSTAKLLGFSFSC

SEQ ID NO: 153585 - protein, 158 aa, Unknown
  Bacterial polypetide isolated from the Sargasso Sea
MSKNKNKQTIWNTRIKGNSSSLFKRVGSSIDIDKKLHKEDIACSIAHVEMLFRQKIISFQIKNKIIYGLNKIEKEIAKNKFEYKKKYEDIHMNIEKRLFELIGDDAGYVHTARSRNDQVITDFKMWLIKSTNEINKNLNNIIKTILKIAEKNIETIMP

SEQ ID NO: 153586 - protein, 160 aa, Unknown
  Bacterial polypetide isolated from the Sargasso Sea
MKIWNSKNQKINQKVDTFLSGEDIHLDNEIFTFDVDASIAHTEELLAIKLLTGNEASMLKRELKKIKKDFLSGKLTLNKKFEDCHSAIEYLLIKELGDVGKKIHTGRSRNDQVLVALRLYQQHYLKIIRDLVLKLAKELLSKSKQNEYLPMPGYTHLQRA

SEQ ID NO: 153587 - protein, 152 aa, Unknown
  Bacterial polypetide isolated from the Sargasso Sea
MKNKNKTVWSHRVGKANSINFQRIGSSINVDKRLYNEDIFASIVHAQMLIKQKIIPKKDGIKIINGLKKIKKEIEKNKFKFKEKFEDIHQNIEKRLFEIIGQSAGYLHTARSRNDQVVTDFKIWVKNASLDINKILNLLIKSILKKAEKNIS

SEQ ID NO: 153588 - protein, 232 aa, Unknown
  Bacterial polypetide isolated from the Sargasso Sea
MGKNKNNQPIWNTRIKKEKTNLFKKVGGSIEIDKRLFREDIEASIVHVEMLFRQKIINFKIKNKIVWGLNRIKNEIIKKKFIFDDKLEDIHMNIENRLFELIGEDAGYIHTARSRNDQVVTDFKIWLRKANKEILKNIDVTIKNILKKAEKNVETIMPGFTHLKNAQPVSFAHYLMAYLEMFNRDKNRFKNNLEGLDENPLGVAALTGTSFKIDRFYTSKKLGFDRPTKNSI

SEQ ID NO: 153589 - protein, 166 aa, Unknown
  Bacterial polypetide isolated from the Sargasso Sea
IRSKTGRVFSSLANSLIIQKGIPSGYSKDLQEDKEPTFDAYYSIEIILNVANEMVKSIKINKERMYQESNKGFTTATDLADWMVRKISLTFRDAHHKTGKIVLLAEKEKKMLCQLTLDSLKKIEPKINKDVYDILLPEKSISHKKSYGGTSLEKVVEAIKRAKKRI

SEQ ID NO: 153590 - protein, 198 aa, Unknown
  Bacterial polypetide isolated from the Sargasso Sea
SDIFKFIKINDKMLTGSSIMPQKKNPDPAELIRGRAGKNFGALQALLTTMKGLPLSYYKDMQEDKSLVFNSYDTILESIIISNELIKNLKPNKDRMLAQSNEGYTTATDFADYLVQKNKLSFREAYKISAKLVNYSEKRKKKLNQLSFAELKKMVKNLDKNAMRVFDVKNSVNLKTSYGGTSTKNIKKVIFKLKKEFK

SEQ ID NO: 153591 - protein, 215 aa, Unknown
  Bacterial polypetide isolated from the Sargasso Sea
MTKNKNNQAIWGDRIKSNTSSIFQKAGSSINIDKRLYREDIAASIVHVEMLFRQKIISFKIKNKIIYGLHKIEKEIAKKKFQFNERYEDIHLNIEKRLFQIIGDDAGYLHIARSRNDQVITDFKIWIRSASKKIMTKLDGIIKSSLKLAEKNIDTIMPGFTHLKNAQAISFAHYIMAYIEMFERDKKRFSNNLESLNENPLGVAALTGTSFNIDR

SEQ ID NO: 153592 - protein, 202 aa, Unknown
  Bacterial polypetide isolated from the Sargasso Sea
IVVNQQYNFIDLPDDLATGSSIMPQKKNPDGAELIRSQSATSISNLNNLLIILKGLPLGYSKDLQEDKKLIFNSYDTVNLSLKVMIELIKKIKFNKKNMQNACDQSYSTSTDLANYLVKQLNYTFRNAYILTGKIVEYSIKKNKKLEELSITELKKFDKKISISIYKILSSANSMKNKTSFGGASPESVNKSIQYAINKYLK

SEQ ID NO: 153593 - protein, 182 aa, Unknown
  Bacterial polypetide isolated from the Sargasso Sea
GSSIMPQKKNPDLLEYLRGKSGLAFGSLFSMLTILKGLPLSYFKDMQDDKEIIFKSYDTLINCLKIFDEILKNVSPNKKKMLELAETGYTTATDLADYLVQNHSMSFRKAYLKTAEIVNLAEKKKRKLKDLKIEELKKIEPKLTNEVLKVFDLKNSINSKKSYGGTSFENIKRMIMKYKKDK

SEQ ID NO: 153594 - protein, 248 aa, Unknown
  Bacterial polypetide isolated from the Sargasso Sea
MSQNKNNNTVWNTRIKKKISNILKKVGSSIEVDKRLYKEDILASVSHAEMLYKQKIITIKIKDKILWGLKRIQNEIEKKNFKFDENLEDIHMNIENRLFELIGNDAGYLHSARSRNDQVVTDLKLWLKKSTIEIDSLLLKLIKSLIKISEKNIFSIMPGFTHLKNAQPISLAHYFLSNVEMFKRDRLRFSSNMKSLNQNPLGAGAFSGTSFNIDRWYTTKKLKFEEPTNNSLDTVSDRDFVLDFLYSS

SEQ ID NO: 153595 - protein, 263 aa, Unknown
  Bacterial polypetide isolated from the Sargasso Sea
LVPALAGTSFNIDRNYTSKKLKFKNPTNNSIDTVSDRDFVLDFLYSVSVCSVHISRLAEEFIIWNSDAFRLIKLSDKIVTGSSIMPQKKNPDTLEYLRGKTGSSFGNLFAMLTILKGLPLSYFKDLQDDKELVFNSFDQIKNSILIVIEILKNFAPNKKRMYELANIGFTTSTDLADYIVKSYGIPFRKSYQITSKIVNYTESKKIKLNELTLQDLKKIEPMLQEDVLKIFDLKNSIKSKKSYGGTSFENIKKMIKKYKKESK

SEQ ID NO: 153596 - protein, 274 aa, Unknown
  Bacterial polypetide isolated from the Sargasso Sea
GDLGRRLHTGRSRNEQVSLDLRLYLRRQIGHLQVELEGLISALCGCSSSAGDTLVPAYTHLRRAQPVLVAHVLLAHATAFQRDWIRFDSARDEADAMPLGSGAVAGTSYEIDTQTLAQTLGFTRVVKNSIDAASDRDFVSSMLHACALTMVHISRLAEDLIIFTSEEFGYFELSDSVATGSSLMPQKKNPDPLELVRGKSGRVIGHLTGWLTTMKGLPSGYNKDLQEDKEIVFDTEKNVLGSIRATTSVVNNLTVCPGRTEFASTGMLLATRCS

SEQ ID NO: 153597 - protein, 147 aa, Unknown
  Bacterial polypetide isolated from the Sargasso Sea
MAKNKNNQAIWHSRIKKKSSTLFQKVGSSISIDKRLYEEDIKGSIAHVEMLFKQKIISFKIKNKIIYGLGKIEKEINKNKFEFNEKYEDIHMNIEKRLFQIIGEEAGYIHIARSRNDQVITDFKLWIKSATKEINLNLNKIIRSTIK

SEQ ID NO: 153598 - protein, 220 aa, Unknown
  Bacterial polypetide isolated from the Sargasso Sea
MKIWMKSSTKEINVLLDTIIKSVIKAAEKNIYTLMPGFTHLKNAQPVSFGHYLMAYVEMFKRDKKRFINNLDSLNENPLGVAALTGTSFNIDRNYTTKKLGFTKPTNNSIDTISDRDFVLDFLYSISVCAMHISRIAEELIIWNSDAFKLINLSDKVVTGSSIMPQKKNPDLLEFLRGKSGIIYGNLFSMLTVLKSLPLSYYKDLQDDKEIVFKSNDTLQ

SEQ ID NO: 153599 - protein, 165 aa, Unknown
  Bacterial polypetide isolated from the Sargasso Sea
MNNNDKTNPLWGGRFKSEADETALKFSASVDLDKRLYKEDIEGSIVYAMALKEAKVITQKDYSQIKKGLLAISKSIKDGKFHWDMNLEDVHMNIESALYRKIGKAAKKLHTGRSRNDQVATDLRLFLMRKIDLILHEISSTQKKVTKLAKKYHKNFNGLGLHILK

SEQ ID NO: 153600 - protein, 237 aa, Unknown
  Bacterial polypetide isolated from the Sargasso Sea
TNNSLDTVSDRDFVLDFLYSSSICSMHISRIAEELIIWNSDQFKFISLKDNIVTGSSIMPQKKNPDTLEFLRGKTGSIFGNLFSMLTIVKGLPISYFKDLQDDKDLVFRSFDNLKNCLIIFDEVINGVIVNKKVMLDAAKIGFTTATDFADALVKNMNFSFREAYLLTAKVVNFAEKKNLALNEIGHEDLKRIVPKISPDVMKNLDLRNSVNSKKSYGGTSFENIKKMIRKHKKEIK

SEQ ID NO: 153601 - protein, 219 aa, Unknown
  Bacterial polypetide isolated from the Sargasso Sea
MYNCSVCSMHISRIAEDLIIWNSDAFNLITLSDKIVTGSSIMPQKKNPDLLEFLRGKTGTIYGNFFSMLTILKGLPLSYFKDLQDDKEIIFKSTETLNNCLKILIEILNNINPNKKRMLELAKSGYITATDLAEHLVKNYSMPFRQAYQKTAAIVNLAEKKKKRLNELTIEELKKIEPKLKNDVVKIFDLKNSINSKKSYGGTAFDNIKKMIVKYKKNL

SEQ ID NO: 153602 - protein, 131 aa, Unknown
  Bacterial polypetide isolated from the Sargasso Sea
MVKNKNNQTIWNTRIKNNSSNLSHKIGSSIDVDKRLYKEDINGSIAHVEMLFKQKIISFRTKNKIIYGLNKIEKEISSKKFEFNKKYEDIHINIEKRLFQIIGEEAGYVHTARSRNDQVITDFKIWIKSAN

SEQ ID NO: 153603 - protein, 144 aa, Unknown
  Bacterial polypetide isolated from the Sargasso Sea
MSQNKNNNTVWNTRIKRKTSSIFKRVGSSIDVDKRLYKEDILASVSHAEMLYKQKIITIKIKDKILWGLKKIRNEIERKNFKFDENLEDIHMNIENRLYELIGNDAGYLHSARSRNDQVVTDLKLWLKKSTLEIDNLLLKLIKY

SEQ ID NO: 153604 - protein, 190 aa, Unknown
  Bacterial polypetide isolated from the Sargasso Sea
MAKVWSKRFDNALNPFIEKFNASIGFDRKLILEDLDCSIAHAKMLGKTKVLSSSEALQIINGLELIKVEYLEGKFSPGPPSEDIHYCIEEKLISLIGETGKKLHTGRSRNDQVGTDIRLWLRKEIDNIEILITDLQKSFLNLAKSNIYTLIPGYTHMQRAQPLSLAHHLLAYIEMLQRDRERYKEVRSRV

SEQ ID NO: 153605 - protein, 280 aa, Unknown
  Bacterial polypetide isolated from the Sargasso Sea
DKKRFLNNIENLNENPLGVAALSGTSFNIDRFFTSKKMKFKKPTNNSIDTVADRDFVLDFLYAVSVCSLHISRIAEELIIWNSDGFNLIYLSDKVVTGSSIMPQKKNPDPLEYLRGKAGGTFGNLFSMLTILKGLPLSYFKDLQDDKEIVFRSFDILDNCLSILNEILNNFKPNKDRMLELANKGFITSTDLADYLVKYHDKSFRKAYEISAKIVNYAEKKNIKLNELNLKDLQKIEPELTKNVLKIFNLKNSVNSKKSFGGTSFKNIRKMIVKYKKIYK

SEQ ID NO: 153606 - protein, 119 aa, Unknown
  Bacterial polypetide isolated from the Sargasso Sea
MKNKNKTVWSKRFKEDTSKSFQRIGSSINVDKRLYKQDILASIVHSQMLVKQKIISPKVGNKIINGLKKIKKQMDKGSFKYKEKYEDIHLNIEKKLFEISGQAAGYLHTARSRNDQVVT

SEQ ID NO: 153607 - protein, 238 aa, Unknown
  Bacterial polypetide isolated from the Sargasso Sea
PTNNSIDTVADRDFVIDFLYAVSVCSLHISRIAEELIIWNSDGFNLITLSDKVVTGSSIMPQKKNPDPLEYLRGKAGGTFGNLFSMLTILKGLPLSYFKDLQDDKEIVFRSFDTLINCISILDEVLGNFKPNKNKMLILANKGFATATDLAEYLVKYHEKTFRKAYQITANVVNYAEKNRKKLNELTIKDLQKFEPNLKNNVLNIFDLKNSINSKKSFGGTSFNNVKKMIVKYKKIYK

SEQ ID NO: 153608 - protein, 135 aa, Unknown
  Bacterial polypetide isolated from the Sargasso Sea
MKKNRTVWSNRITKGNSKNFQRIGSSINIDKRLYKEDIFASIIHTKMLIKQKIISKKDGFKIIKGLKKIEKEISKKKFKFKEQFEDIHQNIEKRLFQVIGESAGYLHTARSRNDQVVTDFKIWVKDSSEDTIDTI

SEQ ID NO: 153609 - protein, 99 aa, Unknown
  Bacterial polypetide isolated from the Sargasso Sea
FINIDKRLYNEDIQASIVHVQMLTKKKIIPRNAGIKIIKGLKKIKTEIDKNKFKFKEKFEDIHQNIEKRLFQIIGDSAGYLHTARSRNDQVVTDFKMSG

SEQ ID NO: 153610 - protein, 267 aa, Unknown
  Bacterial polypetide isolated from the Sargasso Sea
GSNSLDCIVSRWENEAQLAHVFSMLMNRLSVISQDLIILSLPYLKMVRIDDGFVTGSSIMPQKKNPDFAEVIRSKAAFVQGQLQSLLGIQKGALSGYNRDTQWTKYLIMDVVRECEDAPGILREVYRTLEIDIDAMRRHCQSGFMNAVDLADLLCRENGLAFREAHNIIARAVKLSSESGSISADSLKNAFQESGRDPQELPENIEAYQNPSTLIEARKQTGSPSPEQVWSQIGALRKELESISKPMIEISSRAENAWQRCRNVNSG

SEQ ID NO: 153611 - protein, 243 aa, Unknown
  Bacterial polypetide isolated from the Sargasso Sea
YTHLQKGQPVLLSHYLMAYFSILSRDLDRLESCYESMNVMPLGSGAFAGVTIPIDRKFLANELGFKNISDNSIDSVSSRDHILDLLYSLSSIMINTSRICEEFIIWSTDEFGFINLPENFTTGSSIMPQKRNPDYLELVRGKTGNSIGNLISLMTTLKGLPFTYNRDLQEDREGAMNSLESVTKTVVVLKSMFLGITFNKEKMLSSSIESNILSTDLADYLAFKKIPFREAYEVIKKVSKKLS

SEQ ID NO: 153612 - protein, 27 aa, Unknown
  Bacterial polypetide isolated from the Sargasso Sea
MTSPDSFCTGSSIMPQKKNPDVPNSSR

SEQ ID NO: 153613 - protein, 201 aa, Unknown
  Bacterial polypetide isolated from the Sargasso Sea
IWNSDIFKLINLDDKMLTGSSIMPQKKNPDPAELIRGRTGINFGSLQAMLTTMKGLPLSYYKDMQEDKALVFQSYDTLLESITISDQLIKSLKPNKERMLSLANEGYTTATDFADYIVKNNNLSFREAYKISAKLVNYAEKKRKKLNELTLKEVQNIKKDLNGNVLKVFDVKNSVNSKSSYGGTSTKNIKKMISKLKREFK

SEQ ID NO: 153614 - protein, 211 aa, Unknown
  Bacterial polypetide isolated from the Sargasso Sea
MAKNKNNQAIWNTRIKKDTSSLFQKVGNSLDVDKRLYKEDIKGSIAHVEMLFKQKIISFKIKNKIIYGLNKIEREISNKKFEFNKKYEDIHMNIEKRLFQIIGEEAGYVHTARSRNDQVITDFKLWIKSATKEINNNLDKVIKSSVKLAEKNIQTIMPGFTHLKNAQAISFAHYLMSYVEVFNRDKKRFSNNIESLDENPLGVAALSGTSF

SEQ ID NO: 153615 - protein, 268 aa, Unknown
  Bacterial polypetide isolated from the Sargasso Sea
NQNPLGAGAFSGTSFNIDRWYTTKKLKFEEPTNNSLDTVSDRDFVLDFLYSSSICSMHISRIAEELIIWNSDQFKFISLKDNIVTGSSIMPQKKNPDTLEFLRGKTGSIFGNLFSMLTIVKGLPISYFKDLQDDKDLVFRSFDNLKNCLIIFDEVINGVIVNKKVMLDSAKIGFTTATDFADALVKNMNFSFREAYLLTAKVVNFAEKKNLALNEIGHEDLKRIVPKISPEVMKNLDLRNSVNSKKSYGGTSFENIKKMIRKHKKEIK

SEQ ID NO: 153616 - protein, 168 aa, Unknown
  Bacterial polypetide isolated from the Sargasso Sea
MAKKEKEINPLWGGRFESGTDDIAQSFSASIDIDKRLFEVDIQGSIAYAEILKVANLINSSELKRIKKGLNKILDEIRHDKFNWDPGLEDVHMNIEARLVKIAGTAAKKIHTGRSRNDQVATDLRLFLKNQIDEILDLTILLQKSLLKKADENTDTLMPRSNSSSDCT

SEQ ID NO: 153617 - protein, 169 aa, Unknown
  Bacterial polypetide isolated from the Sargasso Sea
MYRSRLGKDLDDITLSYVSSIKDDSDIAFYDIIGSEAHVIMLYENKLLSKIETKKILTALEELKGGNISQPDFEPEDIHELIESLVIKKTGIENGGKMHTARSRNDQVALDIRLKIRDDINILLQCLIETISTLLKTAQENTKTIMPLYTHLQQAQVGVFSPLFTFIRR

SEQ ID NO: 153618 - protein, 145 aa, Unknown
  Bacterial polypetide isolated from the Sargasso Sea
MKNKTVWANRLKEKTSASFQKIGSSIGVDKRLYEQDITASIIHTKMLVKQKIIASNEGAKIINGLKKIKSQIEIGKFKFQDKFEDIHLNIEKKLYELIGPTAGFLHTARSRNDQVVTDFKLWIKKSSRETISNINSLMKILLKKA

SEQ ID NO: 153619 - protein, 258 aa, Unknown
  Bacterial polypetide isolated from the Sargasso Sea
AGTSFNIDRNFTTKKLKFSTPTKNSIDTVSDRDFVIDFLYAVSVCSLHISRFAEEFIIWNSDAFKLIQLNDKIVTGSSIMPQKRNPDPLEFLRGKTGNAFGNLFSMLTILKGLPLSYFKDMQDDKELVFKSFDQLKNSLLIFNDILKNFSANKKRMFELAKSGHTTATDLADYMVEELHFPFRKSYEITSKIVNYAESKRKNLDELDVNELKKIEPKLNEEALKMFDLRNSIKSKKSYGGTSFENIKKMINKYKKEIK

SEQ ID NO: 153620 - protein, 144 aa, Unknown
  Bacterial polypetide isolated from the Sargasso Sea
MSKNKNNQAIWGARIKKATSATFQKIGSSIEIDKRLYKEDIKVSKVHVEMLFKQKIVSFKIKNKIIYGLEKIEREIKNNKIHLSKSYEDIHMNIEKRLFQIIGDEAGYIHTARSRNDQVITDFKIWIKSSTKEISLKIDKVITS

SEQ ID NO: 153621 - protein, 213 aa, Unknown
  Bacterial polypetide isolated from the Sargasso Sea
TGSSIMPQKKNPDFAEVIFSKAAFVQGQLQSLLGIQKGALSGYNRDTQWTKYLIMDVVRECEDAPGILREVYRTLEVDMDAMRRHCQSGFMNAVDLADLLCRENGLAFREAHNIIARAVKLSSESGSISADSLKKAFQESGRDPQELPEKIEAYQNPTTLIEARKHTGSPSPEQVQNQIGALRKEFESISNPMIEISSRAENAWQRCRNVNPG

SEQ ID NO: 153622 - protein, 117 aa, Unknown
  Bacterial polypetide isolated from the Sargasso Sea
MKNKTVWANRLKGKTSLSFQKIGSSISIDKRLYEQDIAASIVHARMLVKQKIIGSKEGSKIINGLKKIKSQIDKGKFKFQEKFEDIHLNIEKNLFELIGPSAGFLHTARSRNDQVVT

SEQ ID NO: 153623 - protein, 275 aa, Unknown
  Bacterial polypetide isolated from the Sargasso Sea
MKNSTWSGRFKKGLDEEVLEFSESISFDHLLFDSDIRVCIAHAEMLSECKIISKKESNMLIKGLNAVQKKYDAGKLRLSIKFEDVHMNIEQALTKEIGELGKKIHMGRSRNDLVATDFRLYLRDCSDLILEKLRDIRYALALSAHDNSSVIFPGYTHLQLAQPVTFGHHLLAWHEMLARDEQRMAQTKDRLNVLPLGSAALSGTPYKIDRKFVAKKLGFKTVSSNSMDAVSDRDFVCDFAYTCSMTMMHLSRISEELVFWMNSHIKLVDIDEAFV

SEQ ID NO: 153624 - protein, 154 aa, Unknown
  Bacterial polypetide isolated from the Sargasso Sea
MAKKEKEINPLWGGRFESGIDDLAQSFSASIDIDKRLFEVDIQGSIAYAEILNVANLINSSELKKIKKGLNKILDEIKHDKFDWDSSLEDVHMNIEARLVKIAGSAAKKIHTGRSRNDQVATDLRLFLKNQIDEILYLTILLQKSLLKKADVNT

SEQ ID NO: 153625 - protein, 249 aa, Unknown
  Bacterial polypetide isolated from the Sargasso Sea
WYTTKKLKFEEPTNNSLDTVSDRDFVLDFLYSSSICSMHISRIAEELIIWNSDQFKFISLKDNIVTGSSIMPQKKNPDTLEFLRGKTGSIFGNLFSMLTIVKGLPISYFKDLQDDKDLVFRSYDNLKNCLIIFDEVINGIIVNKKVMLDAAKIGFTTATDFADALVKNMNFSFREAYLLTAKVVNLAEKKNLALNELNHEDLKKIVPKISLDVMKNLDLKNSVNSKKSYGGTSFENIKKMIRKHKKEIK

SEQ ID NO: 153626 - protein, 147 aa, Unknown
  Bacterial polypetide isolated from the Sargasso Sea
MPLSYSKDLQEDKEGLFDSFDSLYIVFKACIGMISDVTINKEKMLEASKQGHTTATDLADWIVKELKIPFRKSHEISGRIVKLAEKNNCLLHELPLDSFKSIERKINKNVFKVLSVENSVKSKISYGGTSPKEVLKQIKNAKRRFLK

SEQ ID NO: 153627 - protein, 302 aa, Unknown
  Bacterial polypetide isolated from the Sargasso Sea
MKNAQPISFSHYYLAYIEMFNRDKKRFNNNLDSLNENPLGVGALSGTSFKIDRLYTTKKLNFLKPSRNSIDTVADRDFVLDFLYAASTCSMHISRLAEELIIWNSDAFDLISLNDRVVTGSSIMPQKKNPDPLEFLRGKTGTIYGNLFSMLTILKGLPLSYYKDLQDDKKIIFDAFDNLSNSILLMNEVLKNFTANKTQMYELANKGFITATDLADYFVKELNYPFRKAYNITAKIVNYCEKKNKTFTKLTIAELRKIEPKLSKDVTKIFDLKNSINSKKSFGGTSFDNIKKMIKYYKKELK

SEQ ID NO: 153628 - protein, 279 aa, Unknown
  Bacterial polypetide isolated from the Sargasso Sea
KSRFFNNLELIDDSPLGVAALSGTSYKIDRHFTSKKLGFKKPTNNSIDTVSDRDFAIDFLYACAVCAMHLSRLAEDFIILNSDAYKLISFNDKMLTGSSIMPQKKNPDPAELIRGRTGINYGKLNSILTIMKGLPISYFKDLQDDKSLVFDGFDTLKDTLIMSNELIKNVYPNKTRMLNMANTGYTTATDFADYLVKEKNLSFRAAYKISSKIVNYAEKNKKNLDELNLNEIKKFYKDLDLKVLKIFNVKNSMNSKNSFGGTSEKNVKSMIKRYKKELR

SEQ ID NO: 153629 - protein, 209 aa, Unknown
  Bacterial polypetide isolated from the Sargasso Sea
LSRLAEDFIIYNSDASNLISFKDSMLTGSSIMPQKKNPDPAELIRGKVGMNYGKLNAMLTIMKGLPMSYFKDMQDDKELVFSGYDTLKDTLIMSAELINSVNANKANMLFMANQGYTTSTDFADYLVKNKNLSFRESYAISAKVVNYAEKNKKILSELNLDEIKKFYKDLDKSVLKVFDVKNSMNAKKSHGGTSIINVKSMIKKYKREI

SEQ ID NO: 153630 - protein, 171 aa, Unknown
  Bacterial polypetide isolated from the Sargasso Sea
MAKVWSKRFDNTLDPFIEKFNASIGFDRKLILEDLDCSIAHAKMLGKTKVLSPSETVEIINGLEKIKVEYLEGKFSPSPPSEDIHYCIEEKLISLIGDTGKKLHTGRSRNDQVGTDIRLWLRKEIDNLEILIIDLQKSFLKLAKSNIYTLIPGYTHMQRAQPLSLAHHLLA

SEQ ID NO: 153631 - protein, 278 aa, Unknown
  Bacterial polypetide isolated from the Sargasso Sea
MIRKNKAVWGARFNNQTSKIFEKIGASIDIDKRLFEEDIFGSIVHANMLVKQKIVSKKIGKKIINGLKKIRGEIRENKFKFNKKYEDIHLNVEKRLFEIIGENAGYLHIARSRNDQVITDFKLWVKKSSKKIIKNLDTLNKSFLHKAEQNIQTIMPGFTHLKNAQPISFAHYLLAYIEMFKRDKNRFVSNINYIDECPLGVGALAGTSYRIDRNFTSKKLGFKKPTNNSIDSVSDRDFALDFLSSASICAMHISRFAEELIIWNSDIFKLVSLDDKML

SEQ ID NO: 153632 - protein, 198 aa, Unknown
  Bacterial polypetide isolated from the Sargasso Sea
NQQFNFINLPDELATGSSIMPQKKNPDGAELVRGKASGIISNLNGLLVILKGLPLAYSKDLQDDKKIVFSAFDDACLTLEVMTEIWSKVSFNKGIMNDAVNNSNATATDFANWLVQHIELSFREAYQLTGRIVAHANKNNKKLDQLSLEELQKFNNKITKDAQKTLSSNESIKNKNSFGGTSPQRVKQSIKYAIKKYL

SEQ ID NO: 153633 - protein, 252 aa, Unknown
  Bacterial polypetide isolated from the Sargasso Sea
MTQNKNNNTVWNTRIKKKTSNIFKKVGSSIDIDKRLYKEDILASVSHAEMLYKQKIITIKIKDKILWGLKRIQNEIEKKNFKFDENLEDIHMNIENRLFELIGNDAGYLHSARSRNDQVVTDLKLWLKKSTGEIDSLLLKVIKSLIKISEKNIFTIMPGFTHLKNAQPISLAHYFLSNIEMFKRDRFRFSSNMKSLNQNPLGAGAFSGTSFNIDRWYTTKKLKFEEPTNNSLDTVSDRDFVLDFLYSSSICS

SEQ ID NO: 153634 - protein, 260 aa, Unknown
  Bacterial polypetide isolated from the Sargasso Sea
GLWFASFAESFIDNIDLIIKTIDWIDSNPLGTAAGYGVALPLDRKKTTKDLGFNRIQINSLYAQNSRGKYEMQIINTLKQPMLDLRKFAWDMSLFLSQEFNLLSIDNKYSTGSSIMPNKSNPDVIEIIRANYSILAGLSSELENLLSLPSGYHRDLQLTKRSLVSSFIICFQTLSIIPDILKSIKVNKTNSSSYINEDMMMTDKVYEYVAAGMSFRDAYDLVKNNPVDKKINTVKSKNYSLGSPKNLELNILKKRLTKIR

SEQ ID NO: 153635 - protein, 326 aa, Unknown
  Bacterial polypetide isolated from the Sargasso Sea
QKAFPEMGNREHDLIIPAYTHFRRAQPVLAAHQLLVWCEKFDRDRQRLADCRQRTNIMPLGSAALAGTSLPIDRSKTQTALGFDAIAPNSLDAASDRDFVCELAFVLSLTAVHLSQWAEEWIIYSTDEFGFLKLPEAFCTGSSIMPQKINPDVLELVRGKSARVISNVQQILVLLKGLPTAYNRDLQEDKEAVFDSIDTLETMLGVAAPLVAGTHFDRERIGESIEKGHLDATTLMEALIVEGVPQRTAHETVGKLVRLALTKGCSLAELTDDACRAEYDGWKASLRQALGSSRAVERMVSFGSTAPACVAEQLAAWRQKLETAAK

SEQ ID NO: 153636 - protein, 179 aa, Unknown
  Bacterial polypetide isolated from the Sargasso Sea
MNKKSKILSTTINKSTSSLMDDFNSSIDIDKRLIEEDIAVTSAHVKALVKLKVISKKEALTIQKGLNSILNDNKKGRLKFSKKNEDIHMNVESFLNKKIGNVANKIHTGRSRNDQVATDTRLWTIKASKNLQEEIKNLMKSILNQARGNEKTIIPGFTHLQVAQPVSLAHHLIAYLEMF

SEQ ID NO: 153637 - protein, 426 aa, Unknown
  Bacterial polypetide isolated from the Sargasso Sea
MKLWDKNNSGNEKIIEFTIGHDRLNDMHLIKYDLKASISHAKMLYKSNLLSEIECDRIINILNEMLIEAESGELKIEKEFEDMHSKIEYTLISRLGDIGKKIHTARSRNDQVLVSIQLYLIDELNNIKTEVKSLFDLLIKLANKNKDIIMPGYTHMKAAMPSSFGLWFSAYAETLIDDIISLNSSIEIVNQNTLGSAAGYGTSFNIDRDFTTKDLNFKTLKYNSLACQISRNKIEKNTFDAIGNIAFTLSKISMDICLYSGDEFQFISFPENITTGSSIMPHKKNPDVFEIIRGKCNSIQNLSNSVNLSSTNLPSGYHRDFQLNKGKIINAVNDIKECIQILSYCLSMISVNKKILQKSNYENIFSVELINEMVLKGMPFRDAYLELKSKLKSGEIKFPKTVNHSHIGSIGNLALDKIVLKMKDYY

SEQ ID NO: 153638 - protein, 118 aa, Unknown
  Bacterial polypetide isolated from the Sargasso Sea
MSQNKNNNTVWNTRIKKKTSNTFKKVGSSIEVDKRLYKEDILASVSHAEMLYKQKIITIKIKDKILWGLKRIQNEIEKKNFKFDENLEDIHMNIENRLFELIGNDAGYLHTARSRNDQ

SEQ ID NO: 153639 - protein, 502 aa, Unknown
  Bacterial polypetide isolated from the Sargasso Sea
MSKKQPQIWGKHLSNPPDEQNILFCAGRDVQEIPMADQILLPFDIWTNRAHCIMLHKQAIISGSCLRKILTGLGKLENLIEEGNFELDPKKEDVHINVEGFVTEDQGVDAGGRMHIGRSRNDQTACDMRLYLRSSCLNLFFAVKNFASALLLKAEENAESVMPGFTHYQPAMVTSWGHWLCSYIQGLCRDLERLEFALSLVNRNPLGAAAAFGTSWPIDRALTTKLLAFEKIDFNTLDCIVSRWENEAQLAHSISLLMNHLSIVAQDLIFLSHPYVGVIQIDDNYVTGSSIMPQKKNPDFAEVIKSKASLAHGMLSGLLSIQKGAMSGYNRDTQTSKYLIMDLIRECESVPLILQGVLESLTVNHKKMKELSETDFLNATDIADHLARKLNLPFRECYHLTAKSVKLSAPELKITNEALRKTLEEIGQPAEIADDMNNMQEPLKLIEQRLHHGSPSPEQTRLQVKEFTNQLNSLSAPLVNMGNKINDAQENCRNYEVRQVKR

SEQ ID NO: 153640 - protein, 242 aa, Unknown
  Bacterial polypetide isolated from the Sargasso Sea
MDNNTDKVFSKGLFSNFSSSVSFDKRIYKQDIELSIAYSKALNKIDIISSEEQKKIEDALILINKEIESGKFDWRDDLEDIHMNIESRLYDLIGPIAGKIHTGKSRNDQVATSLRMYLKSRVDHIKGLIRNLEIEIVRKADLNFGVIMPSYTHLQRAQPVLLSHYLMAYFEMLERDISRFSECKTRMDELILGSGAVAGSFYNIDRNFLAKELCFSRINKNSIDGVSDRDFIIDLANCIATS

SEQ ID NO: 153641 - protein, 175 aa, Unknown
  Bacterial polypetide isolated from the Sargasso Sea
NPDSLELIRAKTNSIRIKSLEFSNIISNLPLTYFKDFQEDKRIIFVCYDELLSCLKVMQDVIKKSKFEQSVGRDINNNYYATATDLADYLVIEKKIPFRDSYKIIANIVNYAQQNNKNLSEIKIDEYQKFQKVIDKNIYKYVDVDKSLSRKKTSMSTNPKEVSRMIKKYLKFLKV

SEQ ID NO: 153642 - protein, 138 aa, Unknown
  Bacterial polypetide isolated from the Sargasso Sea
MYRSRLGKDLDDITLSYVSSIKDDSDIAFYDIIGSEAHVIMLYENKLLSKTETKKILTALEELKGGNISQPDFEPEDIHELIESLVIKKTGIENGGKMHTARSRNDQVALDIRLKIRDDINILLQCLVETISTLLKTA

SEQ ID NO: 153643 - protein, 429 aa, Unknown
  Bacterial polypetide isolated from the Sargasso Sea
MKLWNQNSKDKNSAIDHFLSSEDITLDQELFLYDIEASIAHVHELEKINIFTKTEARKVISSLKKLGKLFQTNKFKLTAKYEDCHSAIEDFLTKELGSIGKKIHTGRSRNDQIMVAMRLYAREKLDEIQSINLKVAKAFLEKSEKHSSNPMPGYTHLQRAMPSSWGLWFGAFTESFLDNAELLSNTKSWINVNPLGTAAGYGVNLPIERDISTKELNFKRKQLNSLYVQNSRGKFELELIGVLKQPMLDIRKFSWDMSLFLSQEFNLLSLPPIYSTGSSIMPNKSNPDVIEIMRANFSILSGHYSELENLISLPSGYHRDLQLTKRSLIHSIHCVLKTMNLLPKLVRSIKINTHRSNELIDQDMLMTDQAYEMVQSGIPFRDAYSKVKSNRDKNVPLKNISRQKSSSGSAYNLNLQVLKSRFIKLSKNQ

SEQ ID NO: 153644 - protein, 366 aa, Unknown
  Bacterial polypetide isolated from the Sargasso Sea
IIKCLKDLNKKFISNKFKLTNKYEDCHSAIEFYLTKELGETGKKIHTGRSRNDQIQVALRLYAKDNLKNINKINKRIAKTFLQYAKKYHDLPMPGYTHLQRAMPSTWGLWFSSFAEAFIDNYDLNSSTIDWIDSNPLGTAAGYGVDIPLNRKMVTKELGFKRIQLNSLYVQNSRGKYEMQIINSLKQSMLDIRKFAWDMSLFLSQEFNLLTIGDIYLTGSSIMPNKKNPDVIEIMRGNYSIIAGNYSELENLLSLPTGYHRDLQITKKSLISSFKITEKTLELIPDLVRSIKINKKRSLEFIDDEMMMTSQVYELVSKGMPFRDAYQAVKDSKGKLQISKKNITNSSSGSPKNLNLEILEKRLNGK

SEQ ID NO: 153645 - protein, 122 aa, Unknown
  Bacterial polypetide isolated from the Sargasso Sea
MGKNKNNQPIWNTRIKKEKTNLFKKVGGSIEIDKRLFREDIEASIVHVEMLFRQKIINFKIKNKIVWGLNRIKNEIIKKKFIFDDKLEDIHMNIENRLFELIGEDAGYIHTARSRNDQVVTD

SEQ ID NO: 153646 - protein, 148 aa, Unknown
  Bacterial polypetide isolated from the Sargasso Sea
MAKNKNNQSVWSSRIKKKKNSFFDKIGSSINVDKRLYKEDINCSLVHVDMLFKQKIISFKVKNKIFFGLNKIKNEIIKKKYIFKAEDEDIHMSIERRLHEIIGDDAGYIHTGRSRNDQVVTDLKVWMKKSTNEIIDSLKSLQKTFLKL

SEQ ID NO: 153647 - protein, 190 aa, Unknown
  Bacterial polypetide isolated from the Sargasso Sea
MSDQIVTGSSIMPQKKNPDPLEFLRGKTGNAYGNLFSMLTILKGLPLSYFKDLQDDKEIVFRSYDSLGTCILLLDEVLKNIKPKKDKMISLAKKGFITSTDLADYLVKNYKINFRLAYKITARIVNYAEKNNKKLDELNLDELKKFYSKIDNKIFKILSLENSINSKKSFGGTSFNNIKKMIKKYYRAYI

SEQ ID NO: 153648 - protein, 139 aa, Unknown
  Bacterial polypetide isolated from the Sargasso Sea
DLQEDKEPIFDSSKTIKQCLINLAGMLETSKINKIEMFKALNKGYPTATDLADYLVTNLNFTFRDAHEITGKIVLLAEKKECSLEELTIDELKKIDNKIDSKALNVLSINSSISKKNSFGGTSPRLVKKAISDAKKRYL

SEQ ID NO: 153649 - protein, 227 aa, Unknown
  Bacterial polypetide isolated from the Sargasso Sea
RDFAIDFLYASAVCAMHLSRLAEDFIIYNSDAFNLISFNDSMLTGSSIMPQKKNPDPAELIRGKVGINYGKLNAMLTIMKGLPMSYFKDMQDDKELVFDGHDTLKNTLTLSAELINSVKPNKGIMLLMANKGYTTATDFADYLVKVKKLSFRESYTISSKLVNFAEKNKKMLSDLTLEEIKKIYKDLDKSVLKVFDVKNSMNLKKSFGGTSESNVKSMIKKYKKEAK

SEQ ID NO: 153650 - protein, 164 aa, Unknown
  Bacterial polypetide isolated from the Sargasso Sea
MKNKTIWANRLKGKTSLSFQKIGSSIGVDKRLYEQDIAASIIHTKMLVKQKIIGNKEGSKIINGLKKIKSQIDKGKFKFQEKFEDIHLNIEKKLFELIGPSAGFLHTARSRNDQVVTDFKLWIKKSSKETIANIKSLMKILIKKAEKNVDTVMPGLTHLKNAQP

SEQ ID NO: 153651 - protein, 129 aa, Unknown
  Bacterial polypetide isolated from the Sargasso Sea
MPIWNTRIKKEKTNLFKKVGGSISIDKRLFREDIEASIVHVEMLFRQKIINFKIKNKIVWGLNRIKNEIIKKKFIFDDKLEDIHMNIEHRLFELIGEDAGYIHTARSRNDQVVTDFKIWLRNANKEIVK

SEQ ID NO: 153652 - protein, 263 aa, Unknown
  Bacterial polypetide isolated from the Sargasso Sea
MKNVTWSSRFTKQIDSEVLDFSQSLNIDIVLYNADIKVTTAHVEMLSNCGHITITEKKKIINGLKKVNRLADTGKLNWSVEYEDVHMNIENALVSLIGDVGKKIHLGRSRNDLVTTDLRLYLRDFIDIYLDKIREIQHVIAKSAIQHSDLMFPGFTHMQIAQPVTFGHHLLAWCEMLYRDEVRLTNTRELLNTMPLGSAALSGTSLKINRNMIAKKLGFKTVTKNSMDAVSDRDYVCDFAYVNSMIMMHLSRVCEELVLWSNP

SEQ ID NO: 153653 - protein, 128 aa, Unknown
  Bacterial polypetide isolated from the Sargasso Sea
MTKNKNNSSVWNTRIKKSSSLFQKVGSSISFDKRLFKEDIQASIAHVEMLFKKKIITFKVKNKIIFGLNRIRNEIVKKKHKFDNKHEDIHMSIEKRLFEIIGEDAGYVHTARSRNDQVITDLKLWMIK

SEQ ID NO: 153654 - protein, 153 aa, Unknown
  Bacterial polypetide isolated from the Sargasso Sea
MKNKTIWSNRFKNKTSQSFQKIGSSIHIDKRLYEQDIASSVVHTQMLVKQKIIKSEDGNKIINGLKKIKVQIDKGNFEFKEKFEDIHLNIEKALFEIIGPSAGFLHTARSRNDQVVTDFKLWIKKASNEIIKDISVVMRNLKKKAEKNTDTVM

SEQ ID NO: 153655 - protein, 143 aa, Unknown
  Bacterial polypetide isolated from the Sargasso Sea
MAQNKNNKAIWNTRIKKDTSSIFKKFGSSIDVDKRLFKEDIQGSIVHVDMLFKQKIISFKIKNKIIWGLNRIKNEITKKKFNFNSNLEDIHMNIENRLFEIIGDDAGYIHTARSRNDQVITDFKLWLRNSTFEIINQLNDLIN

SEQ ID NO: 153656 - protein, 324 aa, Unknown
  Bacterial polypetide isolated from the Sargasso Sea
VSVQLLRQELDKLAEAIRVQARAHKHTVMIGRSHAIHGEPITFGFKLAGWLAETERNIKRLKRLQKAVSVGQISGAMGNYANTEPQIEERVCELLGLRPDPASTQVISRDRHADYVQTLALVGTALERFSTEIRNLQRSDVLEVEEAFAKGQKGSSAMPHKRNPIRSERISGLARVLRSYTVAALENVALWHERDISHSSVERMMLPDVSATLHFMLREMTKVVSGLQVYPDTMLRNMNRYGGVVFSQTVLLALVESGMRREDAYRLVQGHAHAAWNVEGGNFRKALENDPAITERISAEQLAYCFSTERHQSQLNVIFARLAI

SEQ ID NO: 153657 - protein, 305 aa, Unknown
  Bacterial polypetide isolated from the Sargasso Sea
EAKVKHDVIAFLTSITEQTGLKARYLHQGMTSSDVLDTTLNVQLVQSGNILLRDIDKILSVLKKQAKKYKMTPCIGRSHGIHAEPITFGLKLASFYEEFKRNKLRLKDAIENVSTCAISGAVGTFANINPKIEIYIAKKLKLKAEPISTQIIPRDRHAHYFSVLGIIAGSVERVATEIRHLQRSEVYELQEYFSKDQKGSSAMPHKKNPILSENLTGLARMVRSYVIPALENISLWHERDISHSSVERNIGPDANITLDFALVRLSGILEKMIVYPKTMIKNLNLTRGLVFSQRGNVRTYQIRLC

SEQ ID NO: 153658 - protein, 220 aa, Unknown
  Bacterial polypetide isolated from the Sargasso Sea
TQVIPRDRHAFYFSVLGIIAGSIERVAVEIRHLQRTEVYELQEYFSKNQKGSSAMPHKKNPILSENLTGLARMVRSAVIPALENIALWHERDISHSSVERNIGPDANITTDFALVRLTNILDNMIIYPKKMLENLNLTKGLIFSQEVMLELTKTGLSREKSYRMVQSYAKKCFAENINLIDIILSDKFIMSKISPKKIKSIFNYSKHFKNVNFIFRRVFK

SEQ ID NO: 153659 - protein, 250 aa, Unknown
  Bacterial polypetide isolated from the Sargasso Sea
SGAEVICHIDPFIEEYVCEKLKLNPEPISTQVIPRDRHAAFFATLGVIASSIENIATEIRHMQRTEVLEAEEYFSKGQKGSSAMPHKRNPVLTENLTGLSRLVRMVVIPAMENVTLWHERDISHSSVERNIGPDATITLDFALARLTSVIKKLVVYPDNMIKNMNKFNGLIMSQRVLLALTQAGLSREDAYKLVQRNAMKVWEEGKDFKTELINDSEVSKVLTKDEIDEKFDLAYHTKHVDTIFQRVFSD

SEQ ID NO: 153660 - protein, 269 aa, Unknown
  Bacterial polypetide isolated from the Sargasso Sea
MITRYSRKELTDIWSEYNKYQIWLDVEIAAAEAMEKIGIIPKGVASAVKKKAKINVKRIHSIEAKVKHDVIAFLTSVTEKVGIKARYLHQGMTSSDVVDTSFNIQLVQSGKIILKDIDQILKVLKSKAKKYKFTPCIGRSHGIHAEPITFGLKLASYYEEFKRNRKRLIQAIDEVSTCAISGAVGTFANINPNVEKHVARKLGLKVEPISTQVIPRDRHAHYFSILGIIAGSIERVSTEIRHLQRTEVYELQEFFSKKQKGSSAMPHKK

SEQ ID NO: 153661 - protein, 265 aa, Unknown
  Bacterial polypetide isolated from the Sargasso Sea
IRLERAINEVSTCAISGAVGTFANIDPRVEIYVSKKLKLRPEPISTQIIPRDRHAYYFSVLGIVAGSIERVATEIRHLQRSEVYELQEFFSKDQKGSSAMPHKKNPILSENLTGLARIVRSHVTPALENIALWHERDISHSSVERNIGPDSNITLDFALVRLANLLDNMLVYPKNMLKNLNLTKGVIFSQELMLELTKSGLAREKAYKIIQKHAKNSYSKNINLMELIKKDKLIVSKISEKKINNIFKFSKHLKYINYIFKRVFK

SEQ ID NO: 153662 - protein, 235 aa, Unknown
  Bacterial polypetide isolated from the Sargasso Sea
MVAKKLKLKVEPISTQIIPRDRHAQFFSTLGIIASSIERFATEIRHLQRTEVLEVEEFFGKKQKGSSAMPHKKNPILSENLTGLARLIRSYVIPSLENVALWHERDISHSAVERNIGPDATIALDFALHRLSNVIKNLNIYPKKMKKNLDITNGIFFSQRVLLELTNVGFTREQSYKIVQRNAMQAWKENSSFYNKIVSDKKIINKISVNKLKKLFDFGYHTKKINIIFKRSLKN

SEQ ID NO: 153663 - protein, 236 aa, Unknown
  Bacterial polypetide isolated from the Sargasso Sea
QDFVAKKLKLISEDISTQIIPRDRHAYFFSVLGILASSIERFAVEIRNLQKTEVLEVEESFSTNQKGSSAMPHKRNPVLSENLTGIARYIRSAVIPSLENIVLWHERDISHSSVERIMAPDIIIATDFALVRLNGIIKNLKVYSTNMKKNLNMLGGLHNTHNIMLKLINKGLSRQLAYKIVQESAMETWNNKKDFFEVLLNNKKLNKLLKNKDIKLIIKDNNDLKNIDWIYKNKIK

SEQ ID NO: 153664 - protein, 202 aa, Unknown
  Bacterial polypetide isolated from the Sargasso Sea
IAGSIERVATEIRHLQRTEVYELQEYFSKNQKGSSAMPHKKNPILSENLTGLSRMVRSAVVPALENIALWHERDISHSSVERNIGPDANITLDFALVRLANILDNMIVYPKKMLQNLNLTKGLIFSQELMLELTKTGLSREKSYRMIQNYAKKCFAEDLDLYSVIQTDRYIMSKISPKKLQSVFSYAKHFKNVNLIFKRVFR

SEQ ID NO: 153665 - protein, 170 aa, Unknown
  Bacterial polypetide isolated from the Sargasso Sea
GSSAMPHKRNPLLSENLTGISRYIRSGVMPSLENVVLWHERDISHSSVERIMTPDITIATDFALNRLNGIIKNLKVYPKNMLKNLNMLGGLHRTHNIMLKLIEKGLKRQQAYKIVQESAMETWNNNKNFSQVFQKNKELNKILNSKEIMKIIKDDNDLKKIDWIFKNKIK

SEQ ID NO: 153666 - protein, 323 aa, Unknown
  Bacterial polypetide isolated from the Sargasso Sea
REIHHDVIAFLTELGEQVGDEARFVHQGMTSSDVLDTCLAIQMTQAAEILLVGLDKVLKALEKRAREFKFTPCMGRSHGIHAEPTTFGIKLAGHFAEFARCRKRLEIGRTEIATCAISGAVGTFANIDPSVEAHVAASMNLEPEPISSQVMPRDRHAAFFAAMAITAAAIERLATEIRHLQRTEVREVQEYFAPGQKGSSAMPHKRNPILTENLTGLARIVRMTLAPALENITLWHERDISHSSVERMIGPDATVTLDFALNRIATVIDTLIVYPGNMMEHINKFGGIHDSQRILLALTQRGLSREASYKIVQRNAMKVWRSF

SEQ ID NO: 153667 - protein, 294 aa, Unknown
  Bacterial polypetide isolated from the Sargasso Sea
NFLIFGKIPKNAAVDIRKKAKFNVEEIIELEKETKHDVVAYIKNVSKYIGENAKFFHHGVTSSDIIDTSFSIQLKQSAEIIEKQLEILISILKQKAIEHKKTIMIGRSHGIHAETITFGLKMGSFYFEFKRNLKRLQIAKEDISVCAISGPVGTYESIDPSVEEYVAKKLDLTAENVSTQVIPRDRHAYFFATLGIIASSIERLSIEIRNLQKTEVCEVEEFFEKGQKGSSAMPHKRNPILSENLTGIARYIRSGINPTMENVALWHERDISHSSVERILAPDLTIASDFALAR

SEQ ID NO: 153668 - protein, 253 aa, Unknown
  Bacterial polypetide isolated from the Sargasso Sea
ALYLERLGTFANINPNVEKHVAKKLRLKIEPISTQVIPRDRHAHYFSVLGIIAGSIERVSTEIRHLQRTEVYELQEFFSKKQKGSSAMPHKKNPILTENLTGLARMVRSYTIPALENIALWHERDISHSSVERNIGPDANITLDFALVRLANVLDKMIVYPKKMLHNLNITKGTIFSQELMLELTKSGLSREKSYRLVQAHAKKCIADNLNLLDVVMNDKNITSRIPNKKMKKIFNYSNHFKNINLIFKRVFK

SEQ ID NO: 153669 - protein, 277 aa, Unknown
  Bacterial polypetide isolated from the Sargasso Sea
TPCIGRSHGIHAEPITFGLKLASYYEEFKRNRKRLISAIDEVSTCSISGAVGTFANIKPNVEKHVARKLGLKVEPISTQVIPRDRHAHYFSVLGIIAGSIERVSIEIRHLQRTEVYELQEFFSKKQKGSSAMPHKKNPILTENLTGLARMIRSYTIPALENIALWHERDISHSSVERNIGPDANITLDFALVRLANVLDKMIVYPKKMLHNLNITKGTIFSQELMLELTKTGLSREKSYRLVQKHAKKCIADNLNLFDVVMGDKNITSRIPNKKMKK

SEQ ID NO: 153670 - protein, 209 aa, Unknown
  Bacterial polypetide isolated from the Sargasso Sea
YFSVLGIIAGSVERVATEIRHLQRTEVYELQEFFSKKQKGSSAMPHKKNPILSENLTGLSRMVRSTVIPALENIALWHERDISHSSVERNIGPNANITIDFALVRLTNILDNMIVYPKKMLENLNITKGLIFSQELMLELTKTGLTREKSYRMVQNFSKKCFAENLNLFDVVQSDRYIMSKISIKKLKSIFSYSKHMKNVNFIFRRVIK

SEQ ID NO: 153671 - protein, 230 aa, Unknown
  Bacterial polypetide isolated from the Sargasso Sea
KLGLKIEPISTQVIPRDRHAFYFSVLGIIAGSVERVATEIRHLQRSEVYELQEYFSKDQKGSSAMPHKKNPILSENLTGLSRMVRSYVTPALENIALWHERDISHSSVERNIGPDANITLDFALNRLSNILDKMIIYPKKMIQNINLTKGLIFSQEIMLELTKSGLSREKSYKIVQIYAKKCFSENTNLFDLISRDKFIMSKISKSKLNSIFKYSSHFKNVNLIFKRVFK

SEQ ID NO: 153672 - protein, 305 aa, Unknown
  Bacterial polypetide isolated from the Sargasso Sea
SSDVLDTSFNIQLIQSGKILLKDIDQVLKVLKRQSKKYKLTPCIGRSHGIHAEPLTFGLKLASFYAEFKRNKKRLLSAIDEISTCAISGAVGTFANINPNVEKHVAKKLGLKIEPISTQIIPRDRHAFYFSVLGIIAGSVERVATEIRHLQRTEVYELQEFFSKKQKGSSAMPHKKNPILSENLTGLARMVRSYVIPALENIALWHERDISHSSVERNIGPDANITLDFALIRLSNVLKNMIVYPKKMANNLNITKGIIFSQELMLELTKTNLSREKSYRIVQSHAKKCITHNLNLFEVVKKDKN

SEQ ID NO: 153673 - protein, 173 aa, Unknown
  Bacterial polypetide isolated from the Sargasso Sea
NQKGSSAMPHKRNPVLSENLTGISRYIRSGVIPSLENVVLWHERDISHSSVERIMTPDITIATDFALNRLNGIIKNLKVYPKNMLKNLNMLGGLHRTHNIMLKLIEKGLKRQEAYKIVQESAMETWNNNKNFSQVFQKNKELNKILNSKEIVKIIKDDNDLKKIHWIFKNKIK

SEQ ID NO: 153674 - protein, 271 aa, Unknown
  Bacterial polypetide isolated from the Sargasso Sea
IWSEENKYKIWLDVEIAAAQAMEKLGQIPKGVSSVVRKKARINVKRIHQIENQVKHDVIAFLTSVTEKAGIKARYLHQGMTSSDVLDTSYNIQLVQSGKIILKDLDQILKVLKKQAKKYKFTPCMGRSHGIHAEPITFGLKLASFYEEFKRNKKRLISAIDEVSTCAISGAVGTFANIHPNVEKHVAKKLNLKIEPISTQVIPRDRHAFYFSVLGIIAGSIERAATEIRHLQRTEVYELQEFFSKNQKGSSAMPHKKNPILSENLTGLARM

SEQ ID NO: 153675 - protein, 252 aa, Unknown
  Bacterial polypetide isolated from the Sargasso Sea
CISGAVGTFANIDPNVEKHVAKKLGLRVEPISTQIIPRDRHAFYFSVLGIIAGSVERVAIEIRHLQRTEVYELQEFFSKKQKGSSAMPHKKNPILSENLTGLARMVRSAVVPALENIALWHERDISHSSVERNIGPDANITTDFALVRLTNILDNMIVYPKKMLENLNITKGLIFSQEVMLELTKSGLSREKSYKMVQSYAKKCFAENLNLYDVLLKDKLIMSKISQKRLKSIFGYSKHFKNVNLIFGRVFK

SEQ ID NO: 153676 - protein, 280 aa, Unknown
  Bacterial polypetide isolated from the Sargasso Sea
GLKLASFYEEFKRNKIRFERAIKEISTCAISGAVGTFANIDPRVEIYVSKKLKLRPEPISTQIIPRDRHAYYFSVLGIIAGSIERIATEIRHLQRSEVYELQEFFSKDQKGSSAMPHKKNPILSENLTGLARIVRSHVTPALENIALWHERDISHSSVERNIGPDSNITLDFALFRLANLLDNMIVYPKNMLKNLNLTKGLIFSQELMLELTKSGLAREKAYKIIQKHAKNSYSKNLNLMELIKTDKLIASKISEKKINNIFKFSKHIKNINFIFRRVFK

SEQ ID NO: 153677 - protein, 234 aa, Unknown
  Bacterial polypetide isolated from the Sargasso Sea
AKKLKLNIEPISTQVIPRDRHAQFFSTLGIIASSIERFAVEIRHLQRTEVQEVEEFFGKKQKGSSAMPHKKNPILSENLTGLARLIRSSVIPALENVALWHERDISHSAVERNIGPDATIALDFALARLNNTVKNLNVYPKKMLKNLNLSNGIFFSQRILLELTSIGFTREDAYAIVQKNAMNAWRENTSFYNKIIEDRKITTKISVNKLKKLFDFSYHTKKINIIFNRCLKIK

SEQ ID NO: 153678 - protein, 313 aa, Unknown
  Bacterial polypetide isolated from the Sargasso Sea
NSYYDLLNNLIENLKNKANEYKDIAMLARTHGQPASPTRLGKEFEVFIVRLEEQIKLLEKIPFCAKFGGATGNFNAHHVAYPKIDWKKFAKSFVSNLGLELSYPTTQIEHYDNLAAIFDNLKRINSIIIDLNRDMWLYISMDYFKQKIKKDEIGSSAMPHKVNPIDFENSEGNLGFANSIFNHLSSKLPISRLQRDLTDSTVLRNIGVPIAHSVIGINSTIKGINKLLVNTEKINSDLEMNWIVIAEGIQTVLRREGFPKPYEALKELTRNSQEINKKTFIDFIEKLEISDETKKELKKISPFNYTGDLKLKK

SEQ ID NO: 153679 - protein, 281 aa, Unknown
  Bacterial polypetide isolated from the Sargasso Sea
WFKLASFYEEFKRNRRRLQSAIYEVSTCAISGAVGTFANINPKVESFVSKKLKLRPEPISTQIIPRDRHAYYFSILGIIAGSIERVATEIRHLQRTEVYELQEFFSKSQKGSSAMPHKKNPILSENLTGLSRMIRSYVTPALENIALWHERDISHSSVERNIGPDANITLDFALNRLADILKNIVIYPKKMHSNLNLTRGLVFSQEVMLELTKSGISREKAYRLVQKHSKTSFLKKIDLIDLIKKDKIISKHMSENKINSIFKHDKHFKNINFIFNRVFKK

SEQ ID NO: 153680 - protein, 248 aa, Unknown
  Bacterial polypetide isolated from the Sargasso Sea
YEEFKRNRKRLVDAINEVSTCAISGAVGTFANINPNVEKHVAKKLSLKIEPISTQVIPRDRHAFYFSVLGIIAGSIERVATEIRHLQRTEVYELQEYFSKNQKGSSAMPHKKNPILSENLTGLARMVRSSVTPALENIALWHERDISHSSVERSIGPDANITVDFALVRLTNILDNMIVYPKKMLENLNITKGLIFSQELMLELTKTGLSREKSYKMVQSYAKKCFAENLDLFNVIQSDKYIMNNIHQ

SEQ ID NO: 153681 - protein, 280 aa, Unknown
  Bacterial polypetide isolated from the Sargasso Sea
VLTFNFLQEFLRNKKRLENSIKEISTCSISGAMGTFANVDPKVENYVSKKLKLKPEPISTQIIPRDRHAQFFSTLGIIAASIERFAVEIRHLQRTEVLEVEEFFEKKQKGSSAMPHKKNPILSENLTGLSRLIRSSVAPALENVVLWHERDISHSAVERNIGPDVTTALDFALVRLEKVIRNLNIFPKKMLKNLELSKGLFYSQRIMLELTKKGMSREKAYSLVQNKTMKTWKGNDSFYKVLCDDKLITNKIPVNKLKKLFDYDYHIKKINIIFKRGLKI

SEQ ID NO: 153682 - protein, 251 aa, Unknown
  Bacterial polypetide isolated from the Sargasso Sea
ISGPMGTFANISPNVEKHVAKKLGLKVEPISTQIIPRDRHAFYFSVLGIIAGSVERIATEIRHLQRTEVYELQEYFSKKQKGSSAMPHKKNPILSENLTGLSRMVRSYVVPALENIALWHERDISHSSVERNIGPDANITLDFALVRLSNVLKNMIIYPKKMTKNLNITKGIIFSQELMLELTKSGISREKSYRIIQSHTKKCISQNLNLFEVVKKNKLITDRISLNKLKKIFNYSSHFKNVNLIFNRVFK

SEQ ID NO: 153683 - protein, 190 aa, Unknown
  Bacterial polypetide isolated from the Sargasso Sea
HLQRTELLEIEESFGKNQKGSSAMPHKRNPILSENLTGLARYIRSSVTPSLENIALWHERDISHSSVERILAPDVSIATDFALDRLSNLIKNIIIYPKNMKRNMDRLSGLHKSQDILLFLIKQGLSRKKAYSIVQKSAMETWKKNKPFGEVLSKDPYIKKNINKKELERLLKAKDRIQNIDYIYKNIFKK

SEQ ID NO: 153684 - protein, 280 aa, Unknown
  Bacterial polypetide isolated from the Sargasso Sea
VKKKAKINVSRIHKIESEVKHDVIAFLTSITEKAGIKARYLHQGMTSSDVLDTSFNIQLVQSGRIILSDIDQILKVLKRQAKKYKLTPCIGRSHGIHAEPITFGLKLASFYEEFKRNRNRLAYAIDEVSTCAISGAVGTFANINPNVEKYVAKKLSLKVEPISTQVIPRDRHAFYFSVLGIIAGSIERVAIEIRHLQRTEVYELQEFFSKKQKGSSAMPHKKNPILSENLTGLARMVRSAVVPALENISLWHERDISHSSVERNIGPDANITTGFCFSQT

SEQ ID NO: 153685 - protein, 254 aa, Unknown
  Bacterial polypetide isolated from the Sargasso Sea
AACEANFSLGKIPVNAMKKIRSNAKFDESRITEIEKEVKHDVIAFLTSVNEFVGDSGRYIHVGMTSSDVLDTGLSLQLVDSCELLLVEIENLENEVRLLARKHKNTLMIGRSHAIHGEPISFGFKLAGWLAEIIRNKKRLLTLKDSVAIGQISGAMGTYANTNPKVEQITCDLLGLKPDTASTQVISRDRHAEYVQTIALVGASLDRFATEIRNLQRTDVLEVEEGFTKGQKGSSAMPHKRNPIRSERVSGLAR

SEQ ID NO: 153686 - protein, 277 aa, Unknown
  Bacterial polypetide isolated from the Sargasso Sea
TFYEEFSRNHKRLKSAIIEVSTCAISGAVGTFANVDPRVEKYVAKKLNLDVEPISTQIIPRDRHAYFFSVLGVIASSIERFATEIRHLQRTEVSEVEEFFNNKQMGSSAMPHKKNPVLTENLTGLARLIRASVIPALENVALWHERDISHSSVERNIGPDATITLDFALDRLNNVVKSMKVNKDNMKKNLNLTKGIFFSQRVLLELTSQGLRRDKAYRIVQNCAMKSVENNIPFYDSLLKDKIIADKIPVNTLKKLFDFSYHTRKINVIFSRVLRKK

SEQ ID NO: 153687 - protein, 160 aa, Unknown
  Bacterial polypetide isolated from the Sargasso Sea
MPHKVNPIDFENAEGYFGLANALLKHLSQKLPVSRWQRDLTDSTVLRNIGVALGHSQLALASLSKGIDKLEVAPEPIADDLEAAWEVLGEAVQTVMRRYGVPEPYEKLKALTRGQRLEADRLKSFILALEIPDDAKERLMSLTPDTYLGYAADLAKKTAL

SEQ ID NO: 153688 - protein, 200 aa, Unknown
  Bacterial polypetide isolated from the Sargasso Sea
LEKFATEIRGLQRTEVHEVEEPFGEGQTGSSAMPHKRNPDLSERVCGLARLIRGNSITGLENVALWHERDISHSSAERIILPDSCMALDYILNIFTGIVQGITVFPDRMIANIESTRGLLFSQRVMLSLVNAGMSRDEAYKLAQSYAAKTWDEGADFRELIKNDTKVKELIEPSSLEELFDYTFYTQCVDALYERVGLDK

SEQ ID NO: 153689 - protein, 233 aa, Unknown
  Bacterial polypetide isolated from the Sargasso Sea
VSKKLKLRPEPISTQVIPRDRHAYYFSILGIIAGSIERVATEIRHLQRSEVNELQEFFSKNQKGSSAMPHKKNPILSENLTGLARIVRSYVIPALENIALWHERDISHSSVERNIGPDSNITLDFALVRLANLLENMIVYPKKMLSNLNLTKGVIFSQEMMLELTKVGLTREKAYGIIQKHAKHSYYKNIDLINLIKNDKSITSKISNAKINSIFNFSKHLKNINFIFRRVFK

SEQ ID NO: 153690 - protein, 248 aa, Unknown
  Bacterial polypetide isolated from the Sargasso Sea
IDEVSTCAISGAVGTFANINPNVEKHVAKKLNLKVEPISTQVIPRDRHAFYFSILGIIAGSIERVATEIRHLQRTEVYELQEYFSKNQKGSSAMPHKKNPILSENLTGLARIIRSTVTPALENIALWHERDISHSSVERNIGPDANIAVDFALVRLSNILDNMIVYPRKMLENLNLTKGLIFSQELMLELTKTGLSREKSYKMVQTYAKKCFSENLDLFNVIQSDKYIMSNISQKKLSSIFSYRKHFK

SEQ ID NO: 153691 - protein, 174 aa, Unknown
  Bacterial polypetide isolated from the Sargasso Sea
AISGAVGTFANIDPRVEIYVSKKLKLRPEPISTQIIPRDRHAYYFSVLGIIAGSIERVDTEIRHLQRSEVYELQEFFSKDQKGSSAMPHKKNPILSENLTGLARIVRSHVTPALENIALWHERDISHSSVERNIGPDSNITLDFALVRLSNLLDNMIVYPKNMLKNLNLTKGVI

SEQ ID NO: 153692 - protein, 188 aa, Unknown
  Bacterial polypetide isolated from the Sargasso Sea
QRSEVSEVEEFFSAGQKGSSAMPHKRNPVLSENLTGLSRLIRMTVVPSLENISLWHERDISHSSVERNIGPDANILLDFSLNRLASLIENLMVYPDNMKDNLTKFYGLVNSQRVMLTLTQKGVSRENAYEIVQRCAMTSWNKKVDFFTTLSNDDEVVKILSKLDLENCFDDEFHLKNIDKIFKRVFSQ

SEQ ID NO: 153693 - protein, 252 aa, Unknown
  Bacterial polypetide isolated from the Sargasso Sea
CISGAVGTFANINPKVEKHVAKKLGLKVEPISTQVIPRDRHAFYFSVLGIIAGSIERVAIEIRHLQRTEVYELQEYFSKKQKGSSAMPHKKNPILSENLTGLARMVRSSVLPALENIALWHERDISHSSVERNIGPDANITTDFALVRLTNILDNMIIYPKKMLENLNITKGLIFSQELMLELTKSGLSREKSYKMVQSYAKKCFAENLDLFNVIQSDKYIMTKISSEKLKSIFSYSKHFNNVNFIFRRVFK

SEQ ID NO: 153694 - protein, 293 aa, Unknown
  Bacterial polypetide isolated from the Sargasso Sea
EKIWTLENKFKIWTDIEILIAEKLSDIGVIPKIASKEIRKKAKFSVSEILKLEKQTKHDVNAYIDNVCKHIGKHSKYFHHGVTSSDIIDTGFSIQLKQTGEIIHKELSILLRNLKSKSIKYKNTIMIGRSHGIHAEPITFGLKLGSFYNEFKRNLKRLELAIEEISICSISGPVGTYGSIDPGVEKYVAKKLKLKCEDVSTQIIPRDRHAFFFSIMGIIGSSIERFAVEIRHLQRTELLEVEEKFNSKQKGSSAMPHKRNPILSENLTGLARYIRSAVIPSMENIVLWHERDI

SEQ ID NO: 153695 - protein, 195 aa, Unknown
  Bacterial polypetide isolated from the Sargasso Sea
VAVEIRHLQRTEVYELQEYFSKNQKGSSAMPHKKNPILSENLTGLARMVRSAVVPALENIALWHERDISHSSVERNIGPDANITTDFALVRLTNILDNMIIYPKKMLENLNLTKGLIFSQEVMLELTKSGLSREKSYKMVQSYAKKCFAENLDLIDVISSDKFIMSKISPKKLKSIFNYSKHFKNVNFIFRRVFK

SEQ ID NO: 153696 - protein, 181 aa, Unknown
  Bacterial polypetide isolated from the Sargasso Sea
FWYYISRGILEQKRIKDEVGSSAMPHKINPIQFENAEGNLGISIALLNHLSTKLPVSRMQRDLSDSTVLRNQGVAMGHSVLSVKNIINGLKRIKANKTNLYNELDNHWEVLAEGVQTILRKSGNDSAYEKLKELTRGHTVDRELLSAFINDLEISTNDKKFLLSLTPHNYIGLAAEIAKLK

SEQ ID NO: 153697 - protein, 296 aa, Unknown
  Bacterial polypetide isolated from the Sargasso Sea
SKKIRSKAKINEKRIDQIEKKVKHDVIAFLTTISEYAGPPARFLHQGLTSSDVLDTAFNVQLKQSSVIIEKELLNLLKSLKKIAIKHKNTPCIGRSHGIHAEPTTFGVKMASFYAEFQRNHKRFLKAIEEINICAISGAVGNYANIDPRVEQYVAKKLGMKAETISTQVIPRDRHAVYFNTLAVIASSIERLATEIRHLQRTEVLEVEEFFSKGQKGSSAMPHKRNPVLTENLTGLARLVRGYTVPALENITLWHERDISHSSVERIMAPDANIIIDFALSRMNNVISNLVVYQKI

SEQ ID NO: 153698 - protein, 199 aa, Unknown
  Bacterial polypetide isolated from the Sargasso Sea
SIERVATEIRHLQRSEVYELQEYFSKDQKGSSAMPHKKNPILSENLTGLARIVRSHVVPALEDIALWHERDISHSSVERNIGPDSNITLDFALVRLSNLLDNMIVYPKKMIKNLNLTNGVVFSQEVMLELTKTGYTREKAYRLVQKHAKESISKNINLISLLKKDKMICSKISEKKIDSIFKYSKHLKNVNYIFKRVFK

SEQ ID NO: 153699 - protein, 246 aa, Unknown
  Bacterial polypetide isolated from the Sargasso Sea
KYFHFGVTSSDIIDTAYSIQLKQTAEIIRKNLLECIKNFKISSKKYKNTKMIGRSHGIHAEPITFGLKLASFYFEFKRNLKRLDQAIDEISVCAISGPVGTFNSIDPKIENYVAKKFKLKTENISTQIIPRDRHAYFFSILGIIASSVERFAVEIRNLQKTEVLEVEESFSVNQKGSSAMPHKRNPVISENLTGLSRYVRSAVIPSLENIVLWHERDISHSSVERILTPNITIATDFMLMRLNNLL

SEQ ID NO: 153700 - protein, 281 aa, Unknown
  Bacterial polypetide isolated from the Sargasso Sea
QSGKILLKDIDLILKVLKRQAKKHKFTPCVGRSHGIHAEPITFGLKLASFYEEFKRNRKRLVDAINEVSSCAISGAVGTFANINPNVERHVARKLGLKVEPISTQVIPRDRHAFYFSVLGIIAGSVERVATEIRHLQRSEVYELQEYFSKDQKGSSAMPHKKNPILSENLTGLSRMVRSYVTPALENIALWHERDISHSSVERNIGPDANITLDFALNRLSNILDKMIIYPKKMIQNINLTKGLIFSQEIMLELTKSGLSREKSYKIVQSHSKKCFSENKN

SEQ ID NO: 153701 - protein, 170 aa, Unknown
  Bacterial polypetide isolated from the Sargasso Sea
GSSAMPHKKNPILSENLTGLARMIRSYTIPALENIALWHERDISHSSVERNIGPDANITLDFALVRLASVLNNMIVYPKKMLDNLNITKGTIFSQELMLELTKSGLSRENSYRLVQAHAKKCIADNLNLLDVVMSDKNITSRISSKKMKKIFDYSSHFKNVNLIFNRVFK

SEQ ID NO: 153702 - protein, 252 aa, Unknown
  Bacterial polypetide isolated from the Sargasso Sea
LKKIPNSAKFSGAVGNFNAHKVAYPKINWKNFGVNFVENKLGLNYSYPTTQIEHYDSFASLSDNCRRINNILLDMCIDIWTYISHDYFNQKIVKNEVGSSAMPHKVNPIDFENAEGNLGIANSTFNFFSNKLTKSRLQRDLSDSTVLRNIGVPFSHTIISFESILKGLSKIYVNEDKINKDIEDNWIVVSEAIQTILRREGYPEPYEVMKELTRNNEKIDKSKLHNFIDSLNIDQAIKKELKKITPYNYTGI

SEQ ID NO: 153703 - protein, 192 aa, Unknown
  Bacterial polypetide isolated from the Sargasso Sea
EIRHLQRTELLEVEEKFNPKQKGSSAMPHKRNPVLSENLTGLARYIRSVVMPSMENIVLWHERDISHSSVERIMAPDITIALDFALSRLNEIVTTMKVYPDNMKKNLKLLGGLHNSQKILLHLTQKGISRQEAYSIVQKNAMIAWNNSKSFQDVLKNDKTLLKKITKDELKEILEINKKNSKLDWIFKNKIK

SEQ ID NO: 153704 - protein, 195 aa, Unknown
  Bacterial polypetide isolated from the Sargasso Sea
MRDALQIIEPKVAKMASILAKKSVKYAEIPAVGRTHGQHASIISFGLKFANWAAEMAKHVERIEEIKKRILICKTLGVVGTGSLMGAKSLEVQKRAAKRLKLFPAEVTTQVVPRERYAEYVFELALIGATLEKIAIEIRNLQRTEIGEVAEQFKKGQMGSSAVPVKRNPIKSERVSSLSKLVRSQVALSFENIPL

SEQ ID NO: 153705 - protein, 253 aa, Unknown
  Bacterial polypetide isolated from the Sargasso Sea
TSRKDSYFVQNFGGATGNFNAHHVGYPKIDWKKFAKSFVSNLGLELSYPTTQIEHYDNLAAIFDNLKRINSIIIDLNRDMWLYISIDYFKQKIKKGEIGSSAMPHKVNPIDFENSEGNLGVANSIFNHLSSKLPISRLQRDLTDSTVLRNIGVPIAHSVIGINSTIKGINKLLVNTEKINSDLEMNWIVIAEGIQTILRREGFPKPYEALKELTRNNQEINKKTFINFIEKLEISDEAKKELKKISPFNYTGI

SEQ ID NO: 153706 - protein, 320 aa, Unknown
  Bacterial polypetide isolated from the Sargasso Sea
SLKFKHDVIAFLLSITEKAGIKARYLHQGMTSSDVLDTSFNIQLIQSGKILLKDINQILKILKSQSKKYKLTPCIGRSHGIHAEPITFGLKLASFYEEFKRNKKRLLSAIDEVSTCAISGAVGTFANINPNVEKHVSKKLGLKIEPISTQIIPRDRHAFYFSVLGIIAGSVERVATEIRHLQRTEVYELQEFFSKKQKGSSAMPHKKNPILSENLTGLARMVRSYVIPALENIALWHERDISHSSVERNIGPDANITLDFALVRLSNILKNMIVYPKKMATNLNITKGIIFSQELMLELTKTNLSREKSYRIVQSHAKKC

SEQ ID NO: 153707 - protein, 248 aa, Unknown
  Bacterial polypetide isolated from the Sargasso Sea
GTFANIDPKLSSMVAKKMKLKPETISTQISPRDRHAMYFSVLGIIASCLERVSIEIRHLQRTEVREAEEKFSDGQKGSSAMPHKRNPILTENITGLARLVRSAVMPAQENVALWHERDISHSSVERVIAPDATVTLDFAINRLAGVIENLVLYPKNMKKNLNQLGGLHFSQGVLLALTQAGMSREDAYRVVQKSAMDVWNNKTDFKTLLINDKNVSKYLNKNEIDTLFDLKKHTKNIPYIFDKVFKNK

SEQ ID NO: 153708 - protein, 191 aa, Unknown
  Bacterial polypetide isolated from the Sargasso Sea
IRHLQRSEVYELQEFFSKKQKGSSAMPHKKNPILSENLTGLSRMVRSTVIPALENIALWHERDISHSSVERNIGPDANITIDFALVRLANILDNMIVYPKKMLENLNITKGLIFSQELMLELTKTGLSREKSYRMVQNFSKKCFAENLNLFDVVQSDSYIMSKISIKKLKSIFSYSKHMKNVNFIFRRVIK

SEQ ID NO: 153709 - protein, 256 aa, Unknown
  Bacterial polypetide isolated from the Sargasso Sea
LKVLKRQAKKHKFTPCIGRSHGIHAEPITFGLKLASFYEEFKRNKKRLVDAMDEVSSCAISGAVGTFANINPNIERHVAKRLGLKVEPISTQVIPRDRHAFYFSVLGIIAGSVERVATEIRHLQRSEVYELQEFFSKDQKGSSAMPHKKNPILSENLTGLSRMVRSYVTPALENIALWHERDISHSSVERNIGPDANITLDFALNRLANILDKMIIYPKKMIQNINLTKGLIFSQEIMLEHTKSGLSREKSYKIVQ

SEQ ID NO: 153710 - protein, 175 aa, Unknown
  Bacterial polypetide isolated from the Sargasso Sea
LFASQIVSRDRYAEVISCIGMLASSYDRIAINLRGYQRSEVGEIHESFSSEQKGSSAMPHKKNPITSERISGISRILRGYVVSALENISLWHERDISNSSVERIIFPDSFNLICFSTIEMKELFKNININHEKINSNINSAKVSLLTQSFLSHLVTKGIERDEAYRFLQSQSFEI

SEQ ID NO: 153711 - protein, 266 aa, Unknown
  Bacterial polypetide isolated from the Sargasso Sea
KAVEYYIKQKFDNLNLTEYKEFVHFGLTSQDINNTAIPLSVKDFIEEVYIPKLNNVLDAINEKCEELKDITIISRTHGQPASPTKLGKEFKVFWTRINNQLSSLKEIPNSAKFAGAVGNFNAHHVAYPNIDWKEFGQNFIENELNLNYSFPTTQIEHYDSFAALCDNCRRINNIFLDMCIDIWTYISHDYFKQKIIKGEVGSSAMPHKVNPIDFENSEGNIGLANSLFDFMSNKLPKSRLQRDLSDSTVLRNIGVPFGHSLISFES

SEQ ID NO: 153712 - protein, 228 aa, Unknown
  Bacterial polypetide isolated from the Sargasso Sea
NLKIEPVSTQIIPRDRHAHFFSTLGIIASSIERFSVEIRHLQRTEVSEVYEFFKKKQMGSSAMPHKKNPVLSENLTGLARLVRSTVIPSMENIVLWHERDISHSSVERNIGPDATVTLDFALNRLNEIVKSMKVDSKNMKKNLYLTNGLFFSQRVLLELVSRGIKRDLAYRMVQKIAMKSLENKYSFQDSLIKDKNITKIIPVNNLKKLFDFSYHTRKINVIFNRVLK

SEQ ID NO: 153713 - protein, 302 aa, Unknown
  Bacterial polypetide isolated from the Sargasso Sea
FEIEAHALTKMEELNVVPQGTSDVVWSKGQKEYTPERIARIDEIELEVKHDVIAFLTELAENVGDEARFVHQGMTSSDVLDTCLSVQMTQAADILLADLDRLLAALKTRAKETKDMVCIGRSHGIHAEPVTMGLKFARFYAEMDRNRTRLLQAREEIATCAISGAVGTFANVDPRVEEYVAEKMGLTPEPISTQVIPRDRHANYFCVLGTIASSIENIAIEIRHMQRTEVREAQEYFAPGQKGSSAMPHKRNPILTENLTGLARTVRMAVVPALENVALWHERDISHSSVERMIAPDATVTL

SEQ ID NO: 153714 - protein, 273 aa, Unknown
  Bacterial polypetide isolated from the Sargasso Sea
RSHGIHAEPITFGFKMLSFYQEFVRNKKRLLSSINEISTCAISGAVGTFANIDPKVESLVAKKLKLRVEPISTQVIPRDRHAQFFSTLAIIASSIERFATEIRHLQRTEVLEVEEFFSSKQKGSSAMPHKKNPILSENLTGIARLIRANVLPALENIALWHERDISHSAVERNIGPDSTIALDFALVRLNGIIKNLNIYPKNMKKNLNLTNGLFFSQRVLLELTSCGFTREQAYSIVQKNAMTSWKNNTSLLENLSKDRRIIKKIPVNKLKKL

SEQ ID NO: 153715 - protein, 284 aa, Unknown
  Bacterial polypetide isolated from the Sargasso Sea
FLTNLSENIGDDSRFIHQGVTSSDILDTTLSIQLKESCVIIKRELEKLLEVLKEKALSYKNTPCIGRSHGIYAEPTTFGLKMLGKYFEFKRSYERFLEAEKDVSVCAISGAVGTFANIDPYVQDYVAKKLKIRSEEFSTQVIPRDRYAYLFSVIAIIASSLENLAIEIRHLQRSEVREVQEFFSDKQKGSSAMPHKKNPVLSENITGIARIIRANILPILENISLWHERDISHSSVERVIFPDTLILLDFSLNRMSEIIKNLIINEKNMLINLNNSKGLYNSQR

SEQ ID NO: 153716 - protein, 246 aa, Unknown
  Bacterial polypetide isolated from the Sargasso Sea
PCMGRSHGIHAEPITFGLKLASFYEEFKRNKKRLKNAIDEVSTCAISGAVGTFANINPNVEKHVAKKLGLKVEPISTQVIPRDRHAFYFSVLGIIAGSIERVAVEIRHLQRTEVYELQEYFSKNQKGSSAMPHKKNPILSENLTGLARMVRSSVIPALENIALWHERDISHSSVERNIGPDANITTDFALVRLTNILDNMIIYPKKMLENLNLTKGLIFSQEVMLELTKTGLSREKSYKMVQSYAK

SEQ ID NO: 153717 - protein, 238 aa, Unknown
  Bacterial polypetide isolated from the Sargasso Sea
NVEKHVAKKLGLKIEPISTQVIPRDRHAFYFSVLGIIAGSVERVATEIRHLQRSEVYELQEYFSKDQKGSSAMPHKKNPILSENLTGLSRMVRSYVTPALENIALWHERDISHSSVERNIGPDANITLDFALNRLANILDKIIIYPKKMIQNINLTKGLIFSQEIMLELTKSGLSREKSYKIVQSHSKKCFSENKNLFDLISKDKLIMSKISKSKLNSIFNYSSHFKNVNLIFKRVFK

SEQ ID NO: 153718 - protein, 192 aa, Unknown
  Bacterial polypetide isolated from the Sargasso Sea
EIRHLQRSEVYELQEFFSKKQKGSSAMPHKKNPILSENLTGLARIVRSHTVPAFENIALWHERDISHSSVERSIGPDANITLDFALSRLANVLDKMIVYPNKMIQNLNLTKGLIFSQEIMLELTKGGISREKSYKIVQTYAKRCFSENKNLFDLISKDKKIMSIISEKKLKSIFNYSGHFKKVNFIFKRVFK

SEQ ID NO: 153719 - protein, 275 aa, Unknown
  Bacterial polypetide isolated from the Sargasso Sea
KKVHHDVIAFLTSITNKVGSEGKYLHKGMTSSDILDTCFNIQLIQSGNILKNDIDEILKVLKKKSFKYKKTVCIGRSHGIHAEPTTFGLKLASFYEEFKRNRKRLEIAIKEISTCAISGAVGTFANVDPRVESYVAKKFNLNIEPISTQIIPRDRYAYYFSVLAIIAGSVERVATEIRNLQKTELQEVGEFFDKKQKGSSAMPHKRNPILSENLTGLARMVRSYVIPALENIALWHERDISHSSVERNIGPDSTITLDFALFRLKNILNNMNVYP

SEQ ID NO: 153720 - protein, 256 aa, Unknown
  Bacterial polypetide isolated from the Sargasso Sea
AAAQAMEKIKIIPKGVATKVKKKAKINIDRIHKIESKVHHDVIAFLTSITEKVGKEGKFLHKGMTSSDVLDTCFNIQLVQSGKIILKDIDELLQVLKKKALKYKKTVCIGRSHGIHAEPTTFGLKLASFYQEFKRNRKRMENAINDVSTCAISGAVGTFANIDPRIESFVAKKFNLRPEPISTQIIPRDRHAIYFSTLGIIAGSVERIATEIRNLQKTELQEVEEFFDKKQKGSSAMPHKKNPILSENLTGLARMV

SEQ ID NO: 153721 - protein, 262 aa, Unknown
  Bacterial polypetide isolated from the Sargasso Sea
MPNLENNPLLSLSPLDGRYRAKCEELNPYFSEFGLIKYRLIIEISWLKALCKCPKIEELRGIDTQNLDILVDNFNVEDAQRIKDIEKTTNHDVKAVEYFIKENVEQKEHLKPLLEFIHFACTSEDINNLAYSLMLKDGRESVLLPVMQEIANRIALMARSYSDQPMLSRTHGQPATPTTVGKEFANFVYRLRRQIKHVTECEILGKINGAVGNYNAHIVAYPDIDWESFSKEFVESLGITFNPYTTQIEPHDYISELRIRFS

SEQ ID NO: 153722 - protein, 224 aa, Unknown
  Bacterial polypetide isolated from the Sargasso Sea
EDISTQIIPRDRHAYFFSIMGIIASSIERLAIEIRHLQRTEILEVEEFFKKNQKGSSAMPHKRNPVLSENLSGLARYIRSGVIPSLENIALWHERDISHSSVERILSPDITIALDFALDRINNILKNLIVYPKNMLKNISLIGGLHKSQIILLQLTQKGVSRQKAYSIIQKCAMESWNKNKDFEKILINNIKLKKYMNEKEIKKILKESDKIDNLNWIFSKKIK

SEQ ID NO: 153723 - protein, 303 aa, Unknown
  Bacterial polypetide isolated from the Sargasso Sea
KSKFDKSNHLKKYKEYIHICCTSEDINNLSYALMVDDGRKIILAKINDLNKILKSNIKKFSKNIMLSHTHGQPATPTTMGKEFLNFHSRIERLSNKLAKVSIKGKFNGATGNYCAHRVTFPNINWPITSKRFINSLNISENKYTTQIEPHDYICEINNILIHINSILIGFSQDMWSYISKNYFIQKNIAGEIGSSTMPHKINPINFENAEGNLGLANSMLRFLSEKLTISRLQRDLSDSTVLRNLGTGYGYSFLAYENLIIGLNKLTINKVKLTEDIEKSWELLAEPIQMVARKYNISNSYEL

SEQ ID NO: 153724 - protein, 259 aa, Unknown
  Bacterial polypetide isolated from the Sargasso Sea
NAQVEMLGKVNGAVGNYNAHLSAYPDYDWHTHADKFVSSLGLTLNPFTTQIEPHDYIAELFDAIARFNTILLDFDRDVWGYIALNHFKQKTIAGEIGSSTMPHKVNPIDFENSEGNLGLANAIFAHLAQKLPVSRWQRDLTDSTVLRNLGVGMGYALIAYQSTLKGVSKLEVNEPRLLEELDQNWELLAEPIQTVMRKYGIEKPYEKLKDLTRGKRVNQEIMADFIDGLDLPEVAKVEMKKLTPANYIGRAVEFIDDLV

SEQ ID NO: 153725 - protein, 230 aa, Unknown
  Bacterial polypetide isolated from the Sargasso Sea
KIILKDIDQILKILKKQAKKYKLTPCMGRSHGIHAEPVTFGLKLASFYEEFKRNKKRLADAIDEVSTCAISGAVGTFANINPNVEKHVAKKLNLKVETISTQVIPRDRHAFYFSVLGIIAGSIERIAIEIRHLQRTEVYELQEFFSKKQKGSSAMPHKKNPILSENLTGLARMVRSAVLPALENIALWHERDISHSSVERNIGPDANITTDFALVRLANILDNMIIYPKK

SEQ ID NO: 153726 - protein, 281 aa, Unknown
  Bacterial polypetide isolated from the Sargasso Sea
YTNFSEKDAKKIKEIENKTNHDVKAVEYFIKNKFDKLNLGKYKEFIHFGLTSQDINNTAIPISLKDALNEVYYPELNKIISILNNSSKKWSKIPMLARTHGQPASPTRLGKEIDVFIVRIKEQLKQLRSIPIAAKFGGATGNFNAHKLAYPDINWKSFSKKLISDKLGLKHSFPTTQIEHYDHLAGIFDNIKRINNILIDLNRDMWMYISMDYFKQRIKKGEIGSSAMPHKVNPIDFENSEGNLGIANANFQHLSSKLPISRLQRDLTDSTVLRNHRSPFS

SEQ ID NO: 153727 - protein, 180 aa, Unknown
  Bacterial polypetide isolated from the Sargasso Sea
VEEFFDRKQKGSSAMPHKRNPILSENLTGLARLVRSYVMPALENISLWHERDISHSSVERNIGPDSTVTIDFALNRLTNILKNLNIYPKKMLKNLDITKGLIFSQRVMIELTKYGFSREKAYLLVQQNAQKAWMKNISFYESLSKDSLINKKISNKDLKKMFDIEYHTKRINLIYKRVFK

SEQ ID NO: 153728 - protein, 223 aa, Unknown
  Bacterial polypetide isolated from the Sargasso Sea
FKRNKKRLKNAIDEISTCAISGAVGTFANIDPRVESYVAKKFDLKAEPISTQIIPRDRHAYYFSVLAIIAGSIERVATEIRNLQKTEVQEVEEFFGNKQKGSSAMPHKRNPILSENLTGLARMVRSYVVPALENISLWHERDISHSSVERNIGPDSTITLDFALIRLKNILNTMNVYPKKMLKNLDITSGLIFSQKVMLELTNYGFSREKAYRIVQKNAQKFL

SEQ ID NO: 153729 - protein, 268 aa, Unknown
  Bacterial polypetide isolated from the Sargasso Sea
LKHKFTKCIGRSHGIHAEPTTFGLKMAQAYTEMNRNLTRLKTASEEIRVGAISGAVGNYSSINPKVEEYVCKKLGLKVEEISTQIIPRDRHAAFFSTLSVVASSIERLAVEIRHLQRTEIMEVSEFFSKGQKGSSAMPHKKNPIHSENLTGLSRLIRMSVIPSLENIALWHERDISHSSVERVIGPDTTVILDFALTRLSLLMENLIVYPENMEKNLYKLNGVIFSQNVLLKLTQKGMSREESYKIVQKNALKAIDDDISFKDLLLND

SEQ ID NO: 153730 - protein, 297 aa, Unknown
  Bacterial polypetide isolated from the Sargasso Sea
RIHQIESQVKHDVIAFLTSVTEKAGIKARYLHQGMTSSDVLDTSFNIQLVQSGRIILKDIDQILKVLKKQANKYKSTPCMGRSHGIHAEPITFGLKLASFYAEFKRNRKRLVDAIDEVSTCAISGAVGTFANINPNVEKHVAKKLDLKVEPISTQVIPRDRHAFYFSVLGIIAGSVERVATEIRHLQRTEVYELQEFFSKKQKGSSAMPHKKNPILSENLTGLSRMVRSTVIPALENIALWHERDISHSSVERNIGPDANITIDFALVRLTNILNNMIVYPKKMIQNLNITKGLIFS

SEQ ID NO: 153731 - protein, 267 aa, Unknown
  Bacterial polypetide isolated from the Sargasso Sea
FYAEMDRNLKRMHVAKDEISTGALSGAVGTFANLDPAVEKYVCEKLGLTPEPISTQIIPRDRHAAFFATLGIIASSIENIATEIRHMQRTEVLEAEEFFSEGQKGSSAMPHKRNPVLTENLTGLARLIRMAVVPALENVTLWHERDISHSSVERNIAPDTTVNLDFALNRLANVIDNLVIYPDNMLKNMNKFKGLVMSQRVLLALTQAGASREEAYKLVQRNAMKVWEDNKDFQDELLSDKDVRHFLSEEDIREKFDLAYHTKSVDT

SEQ ID NO: 153732 - protein, 278 aa, Unknown
  Bacterial polypetide isolated from the Sargasso Sea
KLASFYEEFKRNRKRLAAAIDEVSTCAISGAVGTFANINPNVEKHVAKKLGLRVEPISTQIIPRDRHAFYFSVLGIIAGSIERVAIEIRHLQRTEVYELQEFFSKKQKGSSAMPHKKNPILSENLTGLARMVRSAVVPALENIALWHERDISHSSVERNIGPDANITTDFALVRLTNILDNMIVYPKKMLENLNITKGLIFSQEVMLELTKSGLSREKSYKMVQSYAKKCFAENLNLYDVLLKDKLIMTKISQKRLKSIFSYSKHFKNVNLIFRRVFK

SEQ ID NO: 153733 - protein, 281 aa, Unknown
  Bacterial polypetide isolated from the Sargasso Sea
FGLKLASFYEEFKRNKKRLSSAIFDISTCSISGAVGTFANIDPKVEVYVAKKLKLYPEPISTQIIPRDRHAHYFSVLGIIAGSIERVATEIRHLQRSEVYELQEFFSKNQKGSSAMPHKKNPILSENLTGLARIVRSHTIPALENIALWHERDISHSSVERNIGPDANITLDFALTRLANVLNKMIIYPNRMIQNLNFTKGLIFSQEVMLELTKGGLSREKSYKIVQTYAKKCFSEKKNLFDLISKDKKIMGIISEKKLRSIFNYSAHFKNVNYIFKRVFK

SEQ ID NO: 153734 - protein, 186 aa, Unknown
  Bacterial polypetide isolated from the Sargasso Sea
TEVLEVEEFFGNKQKGSSAMPHKKNPILSENLTGLARLIRSNVMPALENVVLWHERDISHSAVERNIGPDSTIALDFALCRLNNVIKNLNIYPKNMMNNLNITNGIFFSQRVLLELTDVGFTREAAYKIVQNNAMKSWQDKSSFFKNIVSDKKITNKIPVNKLKKLFNFSYHTKKINIIFKRSLKK

SEQ ID NO: 153735 - protein, 295 aa, Unknown
  Bacterial polypetide isolated from the Sargasso Sea
SKSRLKIWLDIDCYACEAMEKLGTVPKGTSKKVKSKAKINEKRIDTIEKKVKHDVIAFLTSISEYAGPPARFLHQGLTSSDILDTAFNIQLMQSSKIIEKEIAQLLKSLKKIALKYKNTPCIGRSHGIHAEPTTFGVKMANFYAEFERNHARFKKAKEEISVCAISGAVGNYANIDPRVEQFVAKKLGMKAETISTQVIPRDRHAVYFSTLGIIASSIERLATEIRHLQRTEVLEVEEFFSKGQKGSSAMPHKRNPVLTENLTGLSRLIRGYTIPALENVSLWHERDISHSSVER

SEQ ID NO: 153736 - protein, 289 aa, Unknown
  Bacterial polypetide isolated from the Sargasso Sea
TKKVKSKSKINVKRILEIEDKVKHDIIAFLTSITEKAGKEARFLHKGMTSSDVLDTCFNLQLKQAGEILSRDINDLLKIIKKQALKHKFTLCIGRSHGIHAEPITFGLKLLSFYQEFLRNKKRLDSSIKEISTCAISGAVGTFANVDPRVERYVAKKLKLNVEPVSTQIIPRDRHAQFFATLGIIASSIERFATEIRHLQRTEVLEVEEFFGKKQKGSSAMPHKKNPILSENLTGLARLIRSSVVPALENVALWHERDISHSAVERNIGPDSTIALDFALNQVKKFNKN

SEQ ID NO: 153737 - protein, 311 aa, Unknown
  Bacterial polypetide isolated from the Sargasso Sea
YEKDLKNLNTNLKKLSSKWSNIPLLSRTHGQAASPTTIGKEIKVFQTRIQREIKKLNSVVPLAKFSGAVGNYHAFDIAESRINWITFTNKFIKTFDVAQNPVTTQIESHDWIADLLQTITRINNICIDMSQDMWIYISNEIFKLKLNMNEVGSSAMPHKVNPIDFENAEGNFGISNSLNDYFINKLTKSRLQRDLSDSTVLRNIGMSFGYTKIGITSLQNGLQKISPNKEFILNELDNNWEVLTEAVQTIMRYEGIDDAYEQLKKLSRGKKLDKSSYKKFVNTLDISVKSKEKLLSLTPAKYIGFSKKNVN

SEQ ID NO: 153738 - protein, 298 aa, Unknown
  Bacterial polypetide isolated from the Sargasso Sea
IEKKVKHDVIAFLTSITEQAGIKARYLHQGMTSSDVLDTSLNIQLIQSGEILLKDINKILLVLKKKAKKYKYTPCIGRSHGIHAEPITFGLKLASFYAEFKRNEKRLKDAIHEVSTCAISGAVGTYANIDPRIEIFTAKKLKLRPETISTQIIPRDRHAQYFAVLGIIAGSIERVSTEIRHLQRSEVYELQEYFSKDQKGSSAMPHKKNPILSENLTGLARMVRSYTIPALENIALWHERDISHSSVERNIGPDANITLDFALVRLANILDQMIVYPKKMLKNLNLTNGVVFSQGSHA

SEQ ID NO: 153739 - protein, 220 aa, Unknown
  Bacterial polypetide isolated from the Sargasso Sea
TQIIPRDRHAHYFSVLGIIAGSVERVATEIRHLQRSEVYELQEYFSEDQKGSSAMPHKKNPILSENLTGLARIVRSYVVPSLENIALWHERDISHSSVERNIGPDANITLDFALVRLANVLDKMIVYPKKMLKNLNLTKGLVFSQEVMIELTKSGLQREKAYRIVQKHARESYAKNINLIDLIKKDQIITSKITLKKIDNIFKYSKHFKNVNYIFRRVFK

SEQ ID NO: 153740 - protein, 229 aa, Unknown
  Bacterial polypetide isolated from the Sargasso Sea
LKLRPEPISTQVIPRDRHAYYFSVLGIIAGSIERVATEIRHLQRSEVYELQEFFSKDQKGSSAMPHKKNPILSENLTGLARIVRSHVTPALENIALWHERDISHSSVERNIGPDSNITLDFALIRLANLLDNMIVYPKKMISNLNLTKGLIFSQEIMLELTKAGLPREKAYRIIQKHAKDSYSKNNDLINLIKKDKSITDKISNAKINNIFKFSKHLKNINYIYRRVFK

SEQ ID NO: 153741 - protein, 130 aa, Unknown
  Bacterial polypetide isolated from the Sargasso Sea
KLPVSRWQRDLTDSTVLRNLGVGFAYTVIAYHASLKGISKLEVNEANLLSELDQNWELLAEPVQTVMRKYGIEQPYEKLKELTRGKRITPADLAVFIDKLELPAEVKAELKALRPDNYIGAAIELVNLLD

SEQ ID NO: 153742 - protein, 310 aa, Unknown
  Bacterial polypetide isolated from the Sargasso Sea
MIKRYSRKELADIWSEENKYKIWLDVEVAAAQAMEKLGQIPKGVSAVVRKKARINVKRIHQIENQVKHDVIAFLTSVTEKAGIKARYLHQGMTSSDVLDTSFNIQMVQSGKIILKDIDGILKVLKKQAKKYKFTPCMGRSHGIHAEPITFGLKLASFYEEFKRNRKRLIDAINEVSTCAISGAVGTFANINPKVEQHVAKKLGLKIEPISTQVIPRDRHAFYFSVLGIIAGSIERISVEIRHLQRTEVYELQEYFSKNQKGSSAMPHKKNPILSENLTGLSRMVRSAVLPALENIALWHERDISHSSGKE

SEQ ID NO: 153743 - protein, 231 aa, Unknown
  Bacterial polypetide isolated from the Sargasso Sea
KKLGLRVEPISTQIIPRDRHAFYFSVLGIIAGSIERVATEIRHLQRTEVYELQEFFSKKQKGSSAMPHKKNPILSENLTGLARMVRSAVVPALENIALWHERDISHSSVERNIGPDANITTDFALVRLTNILDNMIVYPKKMLENLNITKGLIFSQEVMLELTKSGLSREKSYKMVQSYAKKCFAENLNLYDVLLKDKLIMSKISQKRLKSIFSYSKHFKNVNLIFGRVFK

SEQ ID NO: 153744 - protein, 217 aa, Unknown
  Bacterial polypetide isolated from the Sargasso Sea
RDRHAAFFAALGVVGSSIERIATEIRHLQRTEVLEVEEYFSPGQKGSSAMPHKRNPVLTENLTGLARLVRMAVVPAMENVALWHERDISHSSVERNIGPDTTVTLDFALARLTQVIDKLVVYPENMLRNMNQFRGLVMSQRVLLALTQAGVSREDSYKLVQRNAMKVWEQGADFKTELLSDPDVLAALSAEEIEEKFDIGYHTKHVDTIFARVFGDE

SEQ ID NO: 153745 - protein, 129 aa, Unknown
  Bacterial polypetide isolated from the Sargasso Sea
KNITTLSIIGGTLEKMAVEIRGLQKTEFNEILEPFSKKQKGSSAMPHKKNPIICERVTGLARVLRGYAVTAMENQALWHERDISHSSTERIIFPDATVSLDYMFGLMTKVIDGMTVNEEQMKQNIAKSY

SEQ ID NO: 153746 - protein, 179 aa, Unknown
  Bacterial polypetide isolated from the Sargasso Sea
CRVFFKDQKGSSAMPHKKNPILSENLSGLSRMVRSYVLPALENIALWHERDISHSSVERNIGPDANITLDFALVRLANILDKMIIYPKKMLENLNMTKGLVFSQEIMLELTKNGIPREKAYKIVQNHAKTSFVKNVDLIELIKKDKFITSKISEKKVNNIFNSKKHFKNVNYIFRRVFK

SEQ ID NO: 153747 - protein, 176 aa, Unknown
  Bacterial polypetide isolated from the Sargasso Sea
TKGQKGSSAMPHKRNPIRSERVSGLARILRSYVLTALENVPLWHERDISHSSNERIMLPDVSICLHFMLREMKDIVSNLEVYPKNMLKNLNIYGGVIFSQKVLLLLVEKGLSREKAYSLVQKNAHQAWNTQNGNFKQNIKRDNEIMNFIDQSDLEECFNPSIHLNNLSVIWEKLGI

SEQ ID NO: 153748 - protein, 181 aa, Unknown
  Bacterial polypetide isolated from the Sargasso Sea
EVEEFFDKKQKGSSAMPHKKNPILSENLTGLSRLIRSHVAPAFENVALWHERDISHSAVERNIGPDSTVTLDFALVRLNNLIKNLNIYPKKMRKNLEITQGLFFSQRVLLELTNSGLTREQAYSMVQKIAMKSWKSNTSFYQNILNEKKISKKIPVNKLKKLFDLNYHTKRINVIFKRCLK

SEQ ID NO: 153749 - protein, 316 aa, Unknown
  Bacterial polypetide isolated from the Sargasso Sea
RYSLWLKLKLLLQKQWEKYKIIPRGIVKKVKTKSKIDVEKILKLEGKLRHDVIAFLTSIIEKVGKEASFLHKGMTSSDVLDTCFNIQLKQSGLIISKDIEILLKSIKMQAIKHKYTLCIGRSHGIHAEPTTFGLKLLSFYGEFTRNHKRLQNAIKEISTCAISGAVGTFANVDPRVEKYVAKKLNLSVEPISTQIIPRDRHAYFFSVLGVIASSIERFATEIRHLQRTEVSEVEEFFNKKQMGSSAMPHKKNPVLTENLTGLARLIRATVIPALENVALWHERDISHSSVERNIGPDATVTLDFALDRLNNVVKSM

SEQ ID NO: 153750 - protein, 224 aa, Unknown
  Bacterial polypetide isolated from the Sargasso Sea
YLLRYSKRQACIFFSVLGVIASSLERFAVEIRHLQRTEVSEVEEFFNKKQMGSSAMPHKKNPVLTENLTGLARLVRASVIPALENVALWHERDISHSSVERNIGPDATITLDFALNRLTNVVKSMKVNKDNMKKNLDLTKGIFFSQRVLLELTTRGIRRDKAYRLVQKCAIQSLEKNIPFYDSLLKDRTITDKIPVNILKKLFDFSYHTRKINVIFSRVLTKNE

SEQ ID NO: 153751 - protein, 284 aa, Unknown
  Bacterial polypetide isolated from the Sargasso Sea
ASKLIEKGLNDLLMALRARALEHKYTVCIGRSHGIYAEPTTFGLKLAQAYAEMNRNHDRLKIAMSEISTGALSGAVGTYANIDPRVEEYVCEQFGLTPEPISTQVIPRDRHAFFFSILGVIASSIERVATEIRHLSRSEVLEAEEFFSQGQKGSSAMPHKRNPVLSENLTGLSRLIRMSVIPSLENVALWHERDISHSSVERNIAPDTTITADFAINRLTSIIKNLIIYPENMLKNLKKTKGLYNSQQLLLTLTQKGLSREKSYSLVQRIAMEVWENDKLDFME

SEQ ID NO: 153752 - protein, 316 aa, Unknown
  Bacterial polypetide isolated from the Sargasso Sea
TKNIPEIPKLSIKNISYLNDLIDNFSIKDANRVKAIEKRTNHDVKAVEYFLKEKFSKIRSLHKYSEFIHFACTSEDINNLSYSLMIRDASKIITTNIQVVSKNLKLKARKFSNTPMLSRTHGQTASPTTMGKEFSNFVHRINSISKSIQIIKLKGKINGAVGNFNAHTVAYPKVNWELVSKKFIKSIGLEINTHTTQVEPKDSIAELFLHFVRLNNVLIDLSRDIWGYISLGYFKQKLKKGEVGSSTMPHKVNPIDFENAEGNLGMANSVFQHLSNSVVISRWQRDLTDSTVMRNIGLCYGHTNLALHSLLKGLNK

SEQ ID NO: 153753 - protein, 176 aa, Unknown
  Bacterial polypetide isolated from the Sargasso Sea
FSKKQKGSSAMPHKKNPILSENLTGLARMVRSYTIPALENIALWHERDISHSSVERNIGPDANITLDFALVRLANVLDKMIIYPNKMLDNLNITKGTIFSQELMLELTKSGLTRENSYRLVQAHAKKCIADNLNLLDVVMSDKNITSRIPIKKMKKIFDYSSHFKNVSLIFNRVFK

SEQ ID NO: 153754 - protein, 195 aa, Unknown
  Bacterial polypetide isolated from the Sargasso Sea
ISTEIRHLQRSEVYELQEFFSKGQKGSSAMPHKKNPILSENLTGLSRMVRSHVMPALENIALWHERDISHSSVERNIGPDANITMDFALNRLASILDKMIIYPKKMIENINLTKGLIVSQEIMLELTKSGFTREKSYKIVQDHAKKCFRDNKNLKELIFKDQLIMNRISKSKINSIFSYSSHFKNVNLIFNRVFK

SEQ ID NO: 153755 - protein, 173 aa, Unknown
  Bacterial polypetide isolated from the Sargasso Sea
KGSSAMPHKKNPILSENLTGLARLIRSNVTPALENIVLWHERDISHSAVERNIGPDTTIALDFALFRLNNVIKNLNIYPKNMKKNLDITNGVFFSQRILIELTNAGFTREIAYKIVQKNALNAWKQNSSFLSNILSDKKITNKIPVNKLKKLFDFSYHTKKINIIFNRSLKKK

SEQ ID NO: 153756 - protein, 286 aa, Unknown
  Bacterial polypetide isolated from the Sargasso Sea
KVKHDVIAFLTSITEQAGIKARYLHQGMTSSDVLDTAFNIQLLQSAQILIKDIDKILKILKSKSIKYKYVPCIGRSHGIHAEPITFGLKLASFYAEFKRNKKRLLVAMEEISTCAISGAVGTFANVNPKVELYISKKFKLKPETVSTQIIPRDRHAHYFTVLGIIAGSIERIATEIRHLQRTEVYEVQEYFSKNQKGSSAMPHKKNPILSENLTGLSRMVRSYVIPALENISLWHERDISHSSVERNIGPDANITLDFALVRLSGLLENLVIYPNRMKKNLELTEV

SEQ ID NO: 153757 - protein, 209 aa, Unknown
  Bacterial polypetide isolated from the Sargasso Sea
YFNTLPVIASSIERLATEIRHLQRTEVLEVEEFFSKGQKGSSAMPHKRNPVLTENLTGLARLIRGYTVPALENITLWHERDISHSSVERIMAPDANIIIDFALSRMKNVISNLVIYPKNMKTNLDRLKKLPMSEGLMLAMTQKGLSRENAYKIVQRNAMEVWKKNTDFEVILNKDEELKKYLSKKEISKILNLKHAARRTDYIFKKVFK

SEQ ID NO: 153758 - protein, 241 aa, Unknown
  Bacterial polypetide isolated from the Sargasso Sea
LASFYEEFKRNRERLVYAIDQISTCAISGAVGTFANVNPNVEKHVAKKLGLKVEPISTQIIPRDRHAFYFSVLGIIAGSIERVAIEIRHLQRSEVYELQEYFSKSQKGSSAMPHKKNPILSENLTGLARMVRSSVVPALENIALWHERDISHSSVERNIGPDANITLDFALVRLAGVLDNMIVYPKKMLENLNLTKGLIFSQEVMLELTKTGITREKSYKLVQGYAKKCFAENLDLFNVIQ

SEQ ID NO: 153759 - protein, 207 aa, Unknown
  Bacterial polypetide isolated from the Sargasso Sea
SVLGIFAGSIERVAVKIRHLQRTEVYELQEYFSQNQKGSSAMPHKKNPILSENLTGLARMVRSSVAPALENIALWHERDISHSSVERNIGPDANITTDFALVRLTNILDNMIVYPKKMLENLNITKGLIFSQEVMLELTKTGLSREKSYKIVQSHAKKCFGENLNLIDVISLDKFIMSKISPKKLKSIFNYSKHFKNVNFIFRRVFK

SEQ ID NO: 153760 - protein, 233 aa, Unknown
  Bacterial polypetide isolated from the Sargasso Sea
ARKLRLTVEPISTQVIPRDRHAQFFSTLGIIASSIERFAVEIRHLQRTEVLEVEEFFGKKQKGSSAMPHKKNPILSENLTGLARLIRSSVAPALENVALWHERDISHSAVERNIGPDATIALDFALNRLSNVVKNLNVYPKNMKKNLDITNGIFFSQRVLLELTSVGFTREESYKIVQTNAMRAWKENSSFYDKIVSDKKITNKIPVNKLKKLFDFSYHTKKINIIFNRSLKK

SEQ ID NO: 153761 - protein, 282 aa, Unknown
  Bacterial polypetide isolated from the Sargasso Sea
KQAKKYKLTPCIGRSHGIHAEPITFGLKLASFYEEFKRNKLRLKDAIENVSTCAISGAVGTFANINPKIETYVAKKLKLNAEPISTQIIPRDRHAYYFAVLGIIAGSVERVATEIRHLQRSEVYELQEYFSKDQKGSSAMPHKKNPILSENLTGLARMVRSYVIPALENISLWHERDISHSSVERNIGPDANITLDFALVRLSGILEKMIVYPKTMIKNLNLTRGLVFSQEVMLELTKSGIAREKAYRLVQSHAKKSFAKNTNLLTLLKSDKSITSKIRKKD

SEQ ID NO: 153762 - protein, 218 aa, Unknown
  Bacterial polypetide isolated from the Sargasso Sea
QIIPRDRHAFFFSILGIIGSSIERFAVEIRHLQRTELLEVEERFDPKQKGSSAMPHKRNPILSENLTGLARYIRSAVIPSMENIVLWHERDISHSSVERIFAPDITIALDFSLNRLNEIVKTMKVYPQNMKKNINLLHGLHNSQKLLLKLTQKGLSRQLAYSIVQKNAMSAWGNKKSFFDILKKDKKLLKYLSIQELREVLETNNNNKVDWIFKNKIK

SEQ ID NO: 153763 - protein, 195 aa, Unknown
  Bacterial polypetide isolated from the Sargasso Sea
VAVEIRHLQRTEVYELQEYFSKNQKGSSAMPHKKNPILSENLTGLARMVRSAVVPALENIALWHERDISHSSVERNIGPDANITTDFALVRLTNILDNMIVYPKKMLENLNLTKGLIFSQEVMLELTKTGLSREKSYRLVQSYAKRCFTENLNLIDVISSDKFIMSKISPKKLKSIFNYSKHFKNVNLIFRRVFK

SEQ ID NO: 153764 - protein, 294 aa, Unknown
  Bacterial polypetide isolated from the Sargasso Sea
HEHKRTAIIGRSHGIHAEPTTLGLKFASFYAEFKRCRDRLVVARREIATCAISGAVGTFAHIDPFVEIHVAKKMGLEIEPISTQIIPRDRHAMFFATLGVIASSIERLSVEIRHMQRTEVREAEEFFSAGQKGSSAMPHKRNPVLTENLTGIARIVRAAVVPALENVVLWHERDISHSSVERVFAPDATIALDFALQRLASVVEDLLVYPEVMRANLNKLGGLVHSQQVLLALTQKGVSRENAYEYVQRNAMKIWAEGGSYLDKLKTDEDVKAYLSDQELDALFDLDQHFQHVD

SEQ ID NO: 153765 - protein, 233 aa, Unknown
  Bacterial polypetide isolated from the Sargasso Sea
RCKKLKLSPEPISTQIIPRDRHAYYFSVLGIIAGSIERLATEIRHLQRSEVYELQEFFSKDQKGSSAMPHKKNPILSENLTGLSRMVRSYVVPALENIALWHERDISHSSVERNIGPDANITLDFALVRLANILDKMIIYPKKMLENLNMTKGLVFSQEIMLELTKNGIPREKAYKIVQDHAKKSFVKNIDLIELIKKDKFITSKISEKKVNSIFNYKKHFKNVNYIFRRVFK

SEQ ID NO: 153766 - protein, 186 aa, Unknown
  Bacterial polypetide isolated from the Sargasso Sea
RSEVYELQEYFSKNQKGSSAMPHKKNPILSENLTGLARIVRGYVVPALENIALWHERDISHSSVERNIGPDANITLDFALHRLANILDNMIVYPKKMLSNLNQTKGLIFSQELMLELTKSGLSRERSYKVIQSYAKQSFSRNIDLIELIKRDKKILSIIPEKKLKNIFNYSKHFKNVNYIYRKVFR

SEQ ID NO: 153767 - protein, 312 aa, Unknown
  Bacterial polypetide isolated from the Sargasso Sea
MSQQVVHPRRPVIERYTLPEMGAVWSEQAKFQSWLDVEIAATEANCRLGRVPQDALDTIKAKAHFSVERILEIEAEVRHDVIAFLTNVNEHVGDAGRHIHVGMTSSDVLDTGLALQLKQSVALLRQELDALADALRALAREHKATEMIGRSHAIHGEPITFGFKIAGWLAESERNRSRLARLEEEVAVGQISGAMGTYANTDPQVEAITCEILGLTPDTASTQVISRDRHADYVQTLALVGASLDRFATEIRNLQRTDVLEVEENFAKGQKGSSAMPHKRNPIRSERISGLARVLRSYVVAALENVALWHER

SEQ ID NO: 153768 - protein, 303 aa, Unknown
  Bacterial polypetide isolated from the Sargasso Sea
VSNYIGNSSKYFHFGVTSSDIIDTGFSLQLKQSSKIITQQLEKLILSLKLKSEKYKNTIMIGRSHGVHAEPITFGLKLRSFYFEFLRNLKRLKQAEDEISICAISGPVGTYDTIDPSVEEYVAKKLNLKTENISTQIIPRDRHAYFFSILGIIASSIERLAIEIRHLQRTEILEVEEFFDKNQTGSSAMPHKRNPILSENLTGIARYIRSGVLPSFENISLWHERDISHSSVERILAPDITIATDFALSRLTGIIENLIVYPKNMKKNLKKLGGLHKSQKILLALIQKGLSRQKSYSIIKKLL

SEQ ID NO: 153769 - protein, 233 aa, Unknown
  Bacterial polypetide isolated from the Sargasso Sea
VCKKLGLKVEEISTQIIPRDRHAAFFSALSIIASSIERLAVEIRHLQRTEIMEVSEFFSKGQKGSSAMPHKKNPIHSENLTGLSRLIRMSVIPSLENIGLWHERDISHSSVERVIGPDTTVILDFALTRLSLLMENLIVYPENMEKNLYKLNGVIFSQNILLKLTQKGMSREQSYKIVQKNALKAIDDDVSFKDLLLNDKEIMYVLSPKELDQIFDISRYFKHVDTVYKRIFS

SEQ ID NO: 153770 - protein, 227 aa, Unknown
  Bacterial polypetide isolated from the Sargasso Sea
LKVEPISTQIIPRDRHAFYFSVLGIIAGSIERVAIEIRHLQRTEVYELQEYFSKKQKGSSAMPHKKNPILSENLTGLARMVRSAVVPALENIALWHERDISHSSVERNIGPDANITTDFALDRLKNILDNMIVYPKKMLENLNITNGLIFSQEVMLELTKSGLSREKSYKMVQSYAKKCFAENLNLYDALSDDKFIITKISQKKLKSIFNYSKHFKNVNLIFRRVFK

SEQ ID NO: 153771 - protein, 171 aa, Unknown
  Bacterial polypetide isolated from the Sargasso Sea
KGSSAMPHKKNPILSENLTGLARMVRSSVVPALENIALWHERDISHSSVERNIGPDANITLDFALVRLASVLDNMIVYPKKMLENLNLTKGLIFSQEVMLELTKTGITREKSYKLVQGYAKKCFAENLDLFNVIQSDKLIMSKISIKKLKSIFSYSKHFKNVNLIFRRVFK

SEQ ID NO: 153772 - protein, 231 aa, Unknown
  Bacterial polypetide isolated from the Sargasso Sea
KKLKLQTEPISTQIIPRDRHAYYFSVLGIIAGSIERVATEIRHLQRSEVYELQEYFSENQKGSSAMPHKKNPILSENLTGLARIVRGYVVPALENIALWHERDISHSSVERNIGPDANITLDFALYRLANVLDNMIVYPKKMLSNLNKTKGLIFSQELMLELTKTGLSREKSYKIIQSLANQSFSKNIDLIELIKKDKIISGRIPEKNLKNIFNYSKHFKNVNYIYKRVFK

SEQ ID NO: 153773 - protein, 209 aa, Unknown
  Bacterial polypetide isolated from the Sargasso Sea
GLKLASFYAEFKRNKKRLENAINEISTCAISGAVGTYANIDPRIELHVAKKLKLKPETISTQIIPRDRHAYYFSVLGIIAGSIERVSTEIRHLQRSEVYELQEYFSKDQKGSSAMPHKKNPILSENLTGLARMVRSYVFPALENIALWHERDISHSSVERNIGPDANITLDFALVRLGNILDQMIVYPKKMLKNLNLTNGVVFSQEVML

SEQ ID NO: 153774 - protein, 248 aa, Unknown
  Bacterial polypetide isolated from the Sargasso Sea
GAVGNYANVTPELETMVCEELNLKPAKISTQTLQRDRHANFISVITIIAGTLDKMATEIRALQKTEFNEVAEPFAKSQKGSSAMPHKRNPITCERVSGLARTIRGNAITAFENQVLWHERDISHSSAERVIFPDATITLDYMFGLMTKVLKDLVVNKDAMMRNIKCSYNSFYSQPLLLLLVNKGITREIAYRIVQRNAHAAFDNKVLFDEQIRNDKELTDLVSEKELDEIFSLDRYKKHVDLIFNRLF

SEQ ID NO: 153775 - protein, 280 aa, Unknown
  Bacterial polypetide isolated from the Sargasso Sea
SNIGVIPKIAAKEIRKKAKFKVSEINEIEKQTKHDVNAYIDNVSKYIGKNSKYFHHGITSSDIIDTGFSVQLKQTGEIIHKELNLLLKNLKSKSLKYKNTLMIGRSHGIHAEPITFGLKLGSFYNEFKRNLKRLELAIEEISICSISGPVGTYGSIDPRVEKYVAKKLKLKCEDVSTQIIPRDRHAFFFSILGIIGSSIERFAVEIRHLQRTELLEVEERFNPKQKGSSAMPHKRNPILSENLTGLARYIRSAVIPSMENIVLWHERDISHSSVERIFAP

SEQ ID NO: 153776 - protein, 198 aa, Unknown
  Bacterial polypetide isolated from the Sargasso Sea
IERFALEIRHLQRTEVYELQEYFSKNQKGSSAMPHKKNPILSENLTGLSRMVRSAVMPALENIALWHERDISHSSVERNIGPDANITLDFALNRLVNILDKMIIYPKKMIQNINLTKGLIFSQEIMLELTKSGFSREKSYKIVQSHSKKCFSENKNLFDLITNDKLIMSKISKSKLNSIFNYSSHFKNVNLIFKRVFK

SEQ ID NO: 153777 - protein, 267 aa, Unknown
  Bacterial polypetide isolated from the Sargasso Sea
NKKRLQGAIKDVSTCAISGAVGTFANVNPKVESYVAKKLKLIPEPISTQVIPRDRHAYYFSVLGIIAGSIERVATEIRHLQRSEVYELQEFFSKSQKGSSAMPHKKNPILSENLTGLSRMVRSYVVPALENIALWHERDISHSSVERNIGPDANITLDFALVRLANILDKMIIYPKKMLENLNMTKGLVFSQEIMLELTKSGIPREKAYKLVQNHAKVSFVKNINLIELIKKDRFITSKISEKKINSIFNYSKHFKNVNYIFRRVFK

SEQ ID NO: 153778 - protein, 397 aa, Unknown
  Bacterial polypetide isolated from the Sargasso Sea
MTPSDSHPLSALTALSPVDGRYGTKVSGLRSYFSEFALIRYRVFVEAQWLLSLASCEALAEVPPFSESAKTFLNDISDGFSISDAEAVKTIERTTNHDVKAVEYFLKEKVANHEELSAVSEFIHFGCTSEDINNLSYALMLRDGRNTILLSAVDQVTSALAGMADELADQPMLARTHGQPASPTTMGKELANVVARLDQARDQVATTAIRGKFNGAVGNFNAHLAAYPELDWSRLSQDFVEGIGLDWQQMTTQIEPHDDLAALCHGLVRLNTILIDLDRDLWGYISLGYFRQKAVAGEVGSSTMPHKVNPIDFENSEGNAGIANALLEHLAAKLPISRWQRDLSDSTVIRNLGPAFAHCLIALDAAHRGLGKLEIDGDKLHAELDQAWEVLAEAIQT

SEQ ID NO: 153779 - protein, 219 aa, Unknown
  Bacterial polypetide isolated from the Sargasso Sea
IPRDRHAYFFSVLAIIASSIERLATEIRHLQRTEVSEVEEFFNNKQMGSSAMPHKKNPVLTENLTGLSRLVRANVIPALENVALWHERDISHSSVERNIGPDSTITLDFALNRLNNVIKSMKVNKDKMKKNLELTKGIFFSQRVLLELTSKGFRRDKAYRIVQRCAIKSVENNTSFYDSLVKDQTIIEKIPVNTLKKLFDFGYHTRKINVIFSRVLNKK

SEQ ID NO: 153780 - protein, 258 aa, Unknown
  Bacterial polypetide isolated from the Sargasso Sea
DEISTCAISGAVGTFANVDPRIEQYVAKKFKLKVEPVSTQIIPRDRHAYYFSILAIIAGSVERVATEIRNLQKTELQEVEEFFDTQQKGSSAMPHKKNPILSENLTGLARMVRSYVIPALENISLWHERDISHSSVERNIGPDSTITLDFALNRLKNILNNMNVYPKKMLKNLNLTNGLIFSQRVMLELTKCGFSKEKAYKIVQKNAQNSHKKNINFYQSLMNDSLINKKISNKDLRKMFDLNYHTKKINVIFNRVFK

SEQ ID NO: 153781 - protein, 427 aa, Unknown
  Bacterial polypetide isolated from the Sargasso Sea
MIKRYEVKEIVDIWSQENKLSTWKKVESSVTKSLEEEGIVPKGLSEKILDTNVTVKEVEAREKVTNHDLASFVDILQDKVNEDSEWIHYGLTSSDVVDTSNSLLILESLDFLIGEVDKLISTLKNLAIKEKDTKIIGRTHGVFAEVTFLGNIISNWLLEIHRNKERLERAKENISIGKLSGVVGNYTIINSDVEKKSLETLNLKPELFASQIVSRDRYAEVISSIGMLASSYDRIAINLRGYQRSEVGEIHESFSSEQKGSSAMPHKKNPITSERISGISRILRGYVVSALENMSLWHERDISNSSVERIIFPDSFNLICFSTIEIKELFKNININHEKINSNINSAKVSLLTQSFLSHLVTKGVERDEAYRFLQSQSFEIDNLDSYIKNISTNFEEVEEKELQEIGKSFLSEKTNKNFEEKINSVV

SEQ ID NO: 153782 - protein, 222 aa, Unknown
  Bacterial polypetide isolated from the Sargasso Sea
ISTQIIPRDRHAHYFAILGIIAGSVERVATEIRHLQRSEVYELQEFFSKDQKGSSAMPHKKNPILSENLTGLARIVRSYVVPALENIALWHERDISHSSVERNIGPDANITLDFALTRLANILDKMIVYPKKMLENLNFTKGLVFSQELMLELTKSGMQREKAYRLVQGHAKSSFAKNINLIDLVKNDKTITQRISETKIKKIFTYSKHFKHINYIFKRVLK

SEQ ID NO: 153783 - protein, 430 aa, Unknown
  Bacterial polypetide isolated from the Sargasso Sea
MIPRYSRKELVKIWSEENKYKIWLDVEIAAAQAMEKYKLIPKGVSAIVKRKGKIKVKRIHDIEAKVKHDVIAFLTSITEQAGVKARYLHQGMTSSDVLDTSFNIQLIQSGKILINDINKILSILKKRAKKYKFTPCIGRSHGIHAEPITFGLKLASFYEEFKRNRKRLQDAIKDVSTCAISGAVGTFANVNPKIESYVAKKLKLSPEPISTQVIPRDRHAYYFSVLGIIAGSIERLAIEIRHLQRSEVYEVQEFFSKDQKGSSAMPHKKNPILSENLTGLSRMVRSYVVPALENIALWHERDISHSSVERNIGPDANITLDFALVRLGNILDKMIIYPKKMLENLNMTKGLVFSQEIMLELTKNSTPREKAYKIVQNHAKTSFVKNIHLIELIKKDKFITSKISEKKINSIFNYKKHFKNVNYIFRRVFK

SEQ ID NO: 153784 - protein, 400 aa, Unknown
  Bacterial polypetide isolated from the Sargasso Sea
WSDYTKYSIWLNIELAAAEAMERLKIIPKGVVKKVKSQAKINVKRILYIESKVKHDVIAFLTSITEKSGKESRYLHKGMTSSDVLDTCFNLQLKQSGEILLKDIEELLKSIKKQSIKHKFTLCIGRSHGIHAEPITFGLKLLTFYQEFLRNKNRLENSIKEISTCKISGAVGTFANVDPRIESHVAKKLKLKVEPVSTQIIPRDRHAQFFSTLGIIASSIERFAVEIRHLQRTEVLEVEEFFGKKQKGSSAMPHKKNPILSENLTGLARLIRSSVVPALENVALWHERDISHSAVERNIGPDSTIALDFALNRLNNVVKNLNVYPKNMLKNLNITNGIFFSQRVLLELTSVGLTREKAYKIVQKNAMKSWKNNSSFYENIAADKNITNKIPVNKLKNYSI

SEQ ID NO: 153785 - protein, 429 aa, Unknown
  Bacterial polypetide isolated from the Sargasso Sea
MISRYNRPKIEKIWTLENKFKIWTDIEILIAEKLSDIGVIPKIASKEIRKKAKFNVNDILKLEKKTKHDVNAYIDNVCKYIGKHSKYFHHGVTSSDIIDTGFSIQLKQTGEIIHKELSILLKNIKSKSMKYKNTLMIGRSHGIHAEPITFGLKLGSFYNEFKRNLKRLELAIEEISICSISGPVGTYGSIDPRVEKYVAKKLKLKCEDVSTQIIPRDRHAFFFSILGIIGSSIERFAVEIRHLQRTELLEVEERFDPKQKGSSAMPHKRNPILSENLTGLARYIRSAVIPSMENIVLWHERDISHSSVERIFAPDITIALDFSLNRLNEVVKTMKVYPQNMKKNINLLDGLHNSQKLLLKLTQKGLSRQLAYSIVQKNAMHAWSNKKSFIDILKKDKKLLKYISIHELRELLETNSNSKIDWIFKNKLK

SEQ ID NO: 153786 - protein, 427 aa, Unknown
  Bacterial polypetide isolated from the Sargasso Sea
MIKRYEVKEIVDIWSQENKLSTWKKVESSVTKSLEEEGIVPKGLSEKILDANVTVKEVEAREKVTNHDLASFVDILQDKVNEDSEWIHYGLTSSDVVDTSNSLLILESLDFLIGKVDELISTLKNLAIKEKDTKIIGRTHGVFAEVTFLGNIISNWLLEIHRNKERLERAKENISIGKLSGVVGNYTIINSDIEKKSLETLNLKPELFASQIVSRDRYAEVISCIGMLASSYDRIAINLRGYQRSEVSEIHESFSSEQKGSSAMPHKKNPITSERISGISRILRGYVVSALENISLWHERDISNSSVERIIFPDSFNLICFSTIEMEELFKNININHEKINSNINSAKVSLLTQSFLSHLVTKGIERDEAYRFLQSQSFEIDNLDSYIKNISTNFEEVEEKELQEIRKSFLSEKTNKNFEEKINSVV

SEQ ID NO: 153787 - protein, 392 aa, Unknown
  Bacterial polypetide isolated from the Sargasso Sea
MIPRYSRPEMVDIWSPSTKFKIWYEIEAYACDAMAKIGIIPAENAEAVWKAKDVEFDVSRIDEIEATTKHDVIAFLTHLAEHIGSEEARFVHQGMTSSDVLDTCLNIQLVRASNLLLQNLDDLLRALKIRAEEHKMTVRIGRSHGIHAEPTTMGLTFARFYAEMKRNKGRLETAKNEIATGAISGAVGTFANIDPFIEEYVCEKLELNPEPISTQVIPRDRHAAFFATLGVIASSIENIATEIRHMQRTEVLEAEEYFSKGQKGSSAMPHKRNPVLTENLTGLSRLVRMVVIPAMENVTLWHERDISHSSVERNIGPDATVTLDFALARLTSVIKKLVVYPDNMIKNMNKFKGLIMSQRVLLALTQAGLSREDAYKLVQRNAMKVGKREKTS

SEQ ID NO: 153788 - protein, 446 aa, Unknown
  Bacterial polypetide isolated from the Sargasso Sea
MNNSISPLDGRYSSDIVDLIPYFSEMALMRYRLEIEIEYLIKLSNERAIKELQPISNKQKKELQKIYLGFDVKDAKRIKKIEKTTNHDVKAIEYFIREKVNKSLHPWIHFALTSEDINNLSYTLMWKNALEKVFSPILTSLNDEIKKLAIKYDAASMLSMTHGQPATPTTFGKELAVFYSRLNRQANQINKHLFLGKFGGATGTWSTHHTTYPKVNWLQFAKKFIASFGLEPNLITTQIEPHDSLAESYHQIIRVNSILTDLCRDFWYYISRGILEQKKVKGEVGSSAMPHKINPIQFENAEGNMGISNALLNHLATKLPVSRMQRDLSDSTVLRNQGVAMGHSVLAMKNILKGLKRIRINQPQLNAELNNHWEVLAEAIQTILRKNSNQDAYEKLKELTRGHNINQKSLASFIMDLDISQAEKKRLLKLTPHDYTGLASKIVRLK

SEQ ID NO: 153789 - protein, 432 aa, Unknown
  Bacterial polypetide isolated from the Sargasso Sea
MIERYSREEIKKIWNDKNKYSIWLDIEIAAAEAMEKLKIIPKGVSKKVKSRAKIDVQRILKIEEKVKHDVIAFLTSISEKVGKDARYLHKGMTSSDVLDTCFNLQLKQSGEILLKDINQLLISIKRQALKHKHTLCIGRSHGIHAEPITFGLKMLTFYQEFLRNKKRLENSIKEISTCAISGAVGTFANVDPKVERYVAKKLKLNVEPISTQIIPRDRHAQYFSTLGIIASSIERFATEIRHLQRTEVLEVEEFFGKKQKGSSAMPHKKNPILSENLTGLARLIRSSTIPALENVSLWHERDISHSAVERNIGPDATIALDFALVRLSNLIKDLNIYPKKMQNNLNLTNGIFFSQRVLLELTNVGFTREEAYRIVQKNALNAWKENTSFYNKILSDKKINNKISVNKLKKLFNFSYHTKRINIIFGRCLKKR

SEQ ID NO: 153790 - protein, 366 aa, Unknown
  Bacterial polypetide isolated from the Sargasso Sea
MKTNHDVKAVEYFIKYKIKNTPMAKYSEYVHFCCTSEDINNVAYALMMSEAIKHIDFKIREITDNLKKNVKKYSAKAMLSYTHGQPATPTTMGKEFLIFYSRINELRDQLLKIDIKCKMNGATGNYSAHDLCFPRINWPNFTKKFIRRLKLKQNSFTTQIESHDYIAEICMKISHINSVMIGLTQDIWTYISKNYFIQKNIKGEIGSSTMPHKINPINFENAEGNLGLANAIFNHLSSKLVISRMQRDLSDSTVLRNIGVGFGYSVVAYINIIKGIKKISLNEIKMKEDLENSWEILAEPIQMIARKYNIPNSYELLKDASRGKKISKTELHNIISKLNIPEHEKDKLFGLTPTKYIGLSSKLCNG

SEQ ID NO: 153791 - protein, 430 aa, Unknown
  Bacterial polypetide isolated from the Sargasso Sea
MIERYSRKELKDIWSEENKYKIWLEVEIAAAEAMEKFKIIPKGVSSIVKKKGKIKVKRIHDIEAKVKHDVIAFLTSITEQAGIKARYLHQGMTSSDVLDTSFNIQLMQSGKIILKDIDKILIVLKRQAKKYKMTPCIGRSHGIHAEPITFGLKLASFYEEFKRNKKRLKDAIENISTCAISGAVGTFANISPKIEVYVAKKLKLRPEPISTQIIPRDRHAHYFTTLGIISGSIERVATEIRHLQRSEVYELQEYFSKDQKGSSAMPHKKNPVLSENLTGLARIVRGHVIPALENISLWHERDISHSSVERSIGPDANITLDFALVRLSNLLDKMVVYPKKMLENLNITRGLVFSQEVMLELTKTGMSREKAYKLVQGHAKKSISNHINLIELLKKDKNVTNRISENKINKIFTYKKHFKNVNYIFNRVFR

SEQ ID NO: 153792 - protein, 329 aa, Unknown
  Bacterial polypetide isolated from the Sargasso Sea
MLRDGVATLKPEMEKMVDAIAAMGVEHAATPMMSRTHGQPASPTTLGKEMANVAYRLARQVKQLDSIPLYGKMAGAVGNYNAHMSAYPNVDWQAVAEKFVTGLGLDFNPYVTQIEPHDYMAELFACIERFNTITLDFDRDIWSYISIGYFKQKTIAGEVGSSTMPHKVNPIDFENSEGNVGLANAVFAHLAAKLPVSRWQRDLTDSTVLRNMGVGFGYSILAYQSTLRGIGKLEVNAQAMADDLDVNWEVLAEPIQTVMRRYAVEKPYEKLKELTRGRRVDAEGMREFVSKLDIPDEGKAGLLAMTPASYIGNATAQAKDILNKLKEIK

SEQ ID NO: 153793 - protein, 445 aa, Unknown
  Bacterial polypetide isolated from the Sargasso Sea
MKNNPLNAISPIDGRYYSQTHFLDEFFSEKALIRYRLRVEVEYFIKLTETDISQLKDWNKNNNSKLRDIYINFDDSDAIKVKEIEKTTNHDVKAVEYFLKEKFELLELEKYSEFIHFGLTSQDINNTAIPLSLKEYFNSYYDLLGNLIENLKNKSNEYKDIAMLARTHGQPASPTRLGKEFEVFLVRLKEQIKHLEKIPFCAKFGGATGNFNAHHLAYPKIDWKKFSQSLVGNLGLELSYPTTQIEHYDNLAAIFDNLKRINSIIIDLNRDMWLYISMDYFKQKIKKGEIGSSAMPHKVNPIDFENSEGNLGVANSIFNHLSSKLPISRLQRDLTDSTVLRNIGVPIAHTVIGINSTIKGIKKLLVNTEKINSDLEMNWIVIAEGIQTILRREGFPKPYEALKELTRNNQEINKKTFIDFIEKLEISDETKKELKKISPFNYTGI

SEQ ID NO: 153794 - protein, 271 aa, Unknown
  Bacterial polypetide isolated from the Sargasso Sea
RIKRNKLRLKDAIENVSTCAISGAVGTFANIDPKIETYVAKKLKLKAEPISTQIIPRDRHAHYFAVLGIIAGSVERVATEIRHLQRSEVYELQEYFSKDQKGSSAMPHKKNPILSENLTGLARMVRSYVIPALENISLWHERDISHSSVERNIGPDANITLDFALVRLSGILEKMIVYPKTMIKNLNLTRGLVFSQEVMLELTKSGIAREKAYRLVQSHAKASFAKNTNLLTLLKSDKSITSKISEKRLDKIFTYDKHLKNVNYIFKRVFK

SEQ ID NO: 153795 - protein, 282 aa, Unknown
  Bacterial polypetide isolated from the Sargasso Sea
MGLTFARFYAEMKRNKSRLETAKNEIATGAISGAVGTFANIDPFIEEYVCDKLGLNPEPISTQIIPRDRHAAFFATLGVVASSIENIATEIRHMQRTEILEAEEYFSKGQKGSSAMPHKRNPVLTENLTGLSRLVRMAVIPAMENVTLWHERDISHSSVERNIGPDATVTLDFALARLTSVIKKLVIYPDNMIKNMNKFRGLIMSQRVLLALTQAGLSREDAYKLVQRNAMKVWEEGKDFKTELINDPEVSKVLTKDEIDEKFDLGYHTKHVDMIFQRVFAN

SEQ ID NO: 153796 - protein, 366 aa, Unknown
  Bacterial polypetide isolated from the Sargasso Sea
VKHDIIAFLTSVTEKSGAEARYLHKGMTSSDVLDTCFNIQLKQSGEILLNDINILLKSIKKQSLKHKYTLCIGRSHGIHAEPITFGLKMLTFYQEFLRNKKRLKNSIEEISTCAISGAVGTFANIDPRVESYVAKRLKLKVEPISTQIIPRDRHAQFFSTLGIIASSIERFAIEIRHLQRTEVLEVEEFFGKKQKGSSAMPHKRNPILSENLTGLARLIRSSVVPALENVALWHERDISHSAVERNIGPDATTALDFALSRLNNVVKNLNIYPNNMKKNLDITNGIFFSQRVLLELTNSGFTREDSYKIVQKNAMQAWKENSSFYNKIISDKKITKKIPVNKLKKLFNFSYHTKKINIIFNRSLKN

SEQ ID NO: 153797 - protein, 300 aa, Unknown
  Bacterial polypetide isolated from the Sargasso Sea
MELSALTAISPVDGRYGSKASELREFFSEYGLIKFRVTVEVRWLQKLAATAAITEVPALSDSANALLNAIVDNFSLADAQRVKDIERTTNHDVKAVEYLLKEKVAGHAELAAVSEFIHFACTSEDINNLSHGLMLSAARDEVLLPLCDQLLNEIKALAHKYKAIPMMARTHGQPASPTTLGKEMANVYMRLKRQREQIAKVELLGKINGAVGNYNAHLSAYPNLNWHQFAEEFVTSLGLSWNPYTTQIEPHDYIAELFDAIARFNTILLDFDRDVWGYIALGHFKQRTIAGEIGSSTYAA

SEQ ID NO: 153798 - protein, 423 aa, Unknown
  Bacterial polypetide isolated from the Sargasso Sea
KELVSIWSEENKYKIWLDVEIAAAEAMEKYKIIPKGVASLVKKKGKIKVKRIHDIEAKVKHDVIAFLTSITEQAGLKARYLHQGMTSSDILDTTLNVQLVQSGNILLRDIDKILSVLKKQAKKYKLTPCIGRSHGIHAEPITFGLKLASFYEEFKRNKLRLKDAIENVSTCAISGAVGTFANINPKVETYVAKKLKLKAEPISTQIIPRDRHAHYFSVLGIIAGTVERVATEIRHLQRSEVYELQEYFSKDQKGSSAMPHKKNPILSENLTGLARMVRSYVVPALENISLWHERDISHSSVERNIGPDANITLDFALVRLSGILEKMIVYPKTMIKNLNLTRGLVFSQEVMLELTKSGIAREKAYRLVQSHAKASFAKNTNLLTLLKSDKSITSKISEKRLDKIFTYDKHLKNVNYIFKRVFK

SEQ ID NO: 153799 - protein, 307 aa, Unknown
  Bacterial polypetide isolated from the Sargasso Sea
LKKKAKKYKFTPCMGRSHGIHAEPTTFGLKLATYYEEFKRNRKRLLNAIDEISTCAISGAVGTFANIDPKVEKMVAKKLKLNAEPISTQIIPRDRHAYYFSVLGIIAGSIERLSIEIRHLQRTEIFELQEYFSKDQKGSSAMPHKKNPILSENLTGLSRMVRSYVSPALENIALWHERDISHSSVERNIAPDANITLDFALVRLANILNNIVVYPQRMLSNIEMTKGLVFSQELMLELINSGIPREKAYRIIQKHSKESFSKNIHLLELIKKDKFINKKIPDSKLKKIFSYSKHFKNVNYIFRRVFN

SEQ ID NO: 153800 - protein, 363 aa, Unknown
  Bacterial polypetide isolated from the Sargasso Sea
MIDRYSRKEMKAIWDEENKFNIWLKIELAAAEAMEKLKIIPRGVVKKVKSKSKINVKRILEIEKNVKHDVIAFLTSITERAGKEARYLHKGMTSSDVLDTCFNLQLKQSGKILLKDIDILLKSIKKQSLKHKFTLCIGRSHGIHAEPITFGLKLLTFYQEFIRNKKRLQTAIKEISTCAISGAVGTFANIDPRVEQHVAKKLNLSIEPISTQIIPRDRHAQYFTTLAIIASSIERFAIEIRHLQRTEVLEVEEFFGKKQKGSSAMPHKRNPVLSENLSGLARLIRANVIPALENIALWHERDISHSSVERNIGPDSTIALDFALNRLNGIVQNLNIYPKNMIKNLNLTNGLFFSQRVMIELTN

SEQ ID NO: 153801 - protein, 308 aa, Unknown
  Bacterial polypetide isolated from the Sargasso Sea
MIPRYNRPKIEKIWSLENKFTIWTEIECLIAEKQAMLGVIPKKAAKEIRNKAKFNVKEIEKIEKETKHDVVAYINNVSKYIGDSSKYFHFGVTSSDIIDTSFSVQLKQTSEIIRKSLVECIQSLKIKSKKYKDTLMIGRSHGIHAEPITFGLKLSSFYFEFKRNLERLDQAINEISVCAISGPVGTFNSIDPRVQDYVAKKLKLNSEDVSTQVIPRDRHAYFFSVLGILASSIERFAVEIRNLQKTEVLEVEESFSSKQKGSSAMPHKRNPVLSENLTGIARYIRSGVIPSLENVVLWHERDISHSSV

SEQ ID NO: 153802 - protein, 224 aa, Unknown
  Bacterial polypetide isolated from the Sargasso Sea
KPEFFASQIVSRDRYAEVIIAIGMLGSCFDRISQNLRGYQRSEVGEIFESFSKEQKGSSAMPHKKNPITSERVSGISRILRGYVITSLENISLWHERDISNSSVERIIFPDGFNLISFATIEMEKLFSNIQINHEKINSNIDLAKVSILTQACLSHLITKGVDRDEAYRFIQSQSFEIDDLDDYLTTLSKNFENVSIEELKSITNEILSEKTNENFEEKINSIV

SEQ ID NO: 153803 - protein, 210 aa, Unknown
  Bacterial polypetide isolated from the Sargasso Sea
YYFSVLGIIAGSIERVSIEIRHLQRTEVYELQEFFSKKQKGSSAMPHKKNPILSENLTGLARMVRSHTIPALENIALWHERDISHSSVERNIGPDANITLDFALIRLANLLDKMIVYPKKMLNNLNITKGTIFSQELMLELTKSGLTRENSYRLVQAHAKKCIADNLNLFDVVMSDKSITSRISSKKMKKIFDYSSHFKNVNLIFNRVFK

SEQ ID NO: 153804 - protein, 430 aa, Unknown
  Bacterial polypetide isolated from the Sargasso Sea
MINRYSRKELTNIWSEENKYKIWLDVEVAAAEGMEKLGQIPKGVASAVKRKAKINVKRIHAIEDKVKHDVIAFLTSITEKVGIKARYLHQGMTSSDVLDTSFNIQLLQSGKILVKDIDQILKILKSKAKKYKFTPCIGRSHGIHAEPITFGLKLASYYEEFKRNRKRLISAIDEISTCAISGAVGTFANINSKVEQHVAKKLRLKVEPISTQIIPRDRHAYYFSVLGIIAGSIERVATEIRHLQRTEVYELQEFFSKKQKGSSAMPHKKNPILTENLTGLARMVRSYTIPALENIALWHERDISHSSVERNIGPDANITIDFALVRLGNVLNKMIVYPKKMLNNLNITKGTIFSQELMLELTKSGLSREKSYRLIQSHAKKCIADNLNLLDVVMNDKNITSRIPIKKMKKIFDYSSHFKNVNLIFNRVFK

SEQ ID NO: 153805 - protein, 409 aa, Unknown
  Bacterial polypetide isolated from the Sargasso Sea
MIERYSREEIKNIWLDKNRYALWLKIEIAAAEAMEKYKIIPKGIVRKVKAKSKIDVEKILKVEGKVRHDVIAFLTTLIEKVGNEASFLHKGMTSSDVLDTCFNIQLRDSGLIISKEIEILLQSIKKQAIKHKYTLCIGRSHGIHAEPTTFGLKLLTFYKEFSRNQKRLNNAIKEISTCAISGAVGTFANVDPKVEKYVARKLNLFIEPISTQIIPRDRHAYFFSVLGVIASSIERFAVEIRHLQRTEISEVEEFFNKKQMGSSAMPHKKNPVLTENLTGLARLVRASVIPALENVALWHERDISHSSVERNIGPDATITLDFALNRLNNVVKSMKVNKDKMKKNLDLTKGIFFSQRVLLELTSKGVRRDKAYRLVQSCAIQSMQKNIPFYDSLLKDRSIMDKIPVNILK

SEQ ID NO: 153806 - protein, 327 aa, Unknown
  Bacterial polypetide isolated from the Sargasso Sea
MIPRYSRPEMVKIWSPETKFKIWFEIEAHACDAMANLGLIPQENATAVWKAKDVNFDIARINEIEATTKHDVIAFLTHLAEHIGSEEARFVHQGMTSSDVLDTCLSIQLVRASDLLIKDIEQLLAALKRRALEHKMTVRIGRSHGIHAEPTTMGLTFARFYAEMDRNLKRMCVAKDEISTGALSGAVGTFANLDPAVEKYVCEKLGLTPEPISTQIIPRDRHAAFFATLGIIASSIENIATEIRHMQRTEVLEAEEFFSEGQKGSSAMPHKRNPVLTENLTGLARLIRMAVVPALENVTLWHERDISHSSVERNIAPDTTVNLDFAL

SEQ ID NO: 153807 - protein, 405 aa, Unknown
  Bacterial polypetide isolated from the Sargasso Sea
IRELPKLSIKNTPYLDDLVDNFSLNDAKRVKSIEKRTNHDVKAIEYFLKDKFSVIKSLNKYSEFVHFACTSEDINNLSYSLMIKDASNLVSSNVDGLLKNLKSKAKMYANIAMLSRTHGQTASPTTMGKEFANFIYRINVINKSLNKTPLNGKINGAVGNFNAHTVAYPEVNWELISKKFVNKLGLQLNTHTTQVEPKDSIAELFLHYVRLNNVLIDLSRDIWGYISLSYFKQKLKKGEIGSSTMPHKVNPIDFENAEGNLGIANSNFLHLSNSIVISRWQRDLTDSTVMRNIGLCFGHTNLALSSLMKGLNKLELNKNQIESDLNNSWEVLTEAIQTIFRKYLVKDGYEIMKELSRGKKIVKEDLHILIDKIDIPLEDKEMLKNLTPSSYTGIAKVLAKRLKES

SEQ ID NO: 153808 - protein, 261 aa, Unknown
  Bacterial polypetide isolated from the Sargasso Sea
VMLKTISICSISGAVGTYANIDPSIESFVAKKLRLKTEDVSTQIIPRDRHAFFFTALAMIASSIENLAIEFRHLHRSEVREVEEFFSKDQKGSSAMPHKKNPVLSENLTGIARVIRSSCIPFMENISLWHERDISHSSVERTLGPDTIILCDFALSRMNNIVENLVVDKKMMIYNLEKTNGLFNSQRVMLKLIEKNISRESAYKIVQKIALKAWKENKSFKKLLEKNNEVKSLLNVREINELFDLKYFLKNINAIYKKVLG

SEQ ID NO: 153809 - protein, 325 aa, Unknown
  Bacterial polypetide isolated from the Sargasso Sea
MKICIYGAGAIGGYLGAKLTEIGADVTLIARGPHYQAIKQDGLRLRKDGKELVVYPKCVDTAEKAGKQDYIFVTLKAHSVPGCLDAFEVLMKDDTSFVWGVNGIPWWYFYNHTNPDFKDKKVTSVDPDGSQWDRIGPEKIIGCIVNPASEVIKPGVIQHLEGDKFQLGEINGEETDRIKNLSETLEKAGFQAPVRPNIKGDIWLKLFGNLSLNPISALTTSTLVKICSNDEVRAVIKNMMNEAHAISQNLGIDKPFDVERRIDAAKAVGEHKTSMLQDLERDRPMEIDALITSVQELGKITNVPTPTIDTVLALTKLRAKEAKLY

SEQ ID NO: 153810 - protein, 264 aa, Unknown
  Bacterial polypetide isolated from the Sargasso Sea
INEQLKNLKQIPNSAKFAGAVGNFNAHKVAYPNINWKKFAKNFVEKNLSLNYSYPTTQIEHYDSFASLSDNCRRINNILLDMCQDIWSYISHDYFHQKIVDKEVGSSAMPHKVNPIDFENAEGNIGVANSIFDFFSNKLTRSRLQRDLSDSTVLRNVGVPFSHTLISFESIIKGLNKIYVNQEKINIDIENNWIVISEAIQTILRREGFEDPYEIMKHLTRKNSKLDKESIHRFIDNLDVNNNIKLELKKITPYNYTGIDYEKN

SEQ ID NO: 153811 - protein, 339 aa, Unknown
  Bacterial polypetide isolated from the Sargasso Sea
MTSSDVVDTSFNIQLVQSGRIILKDIDQILRVLKKQARKYKFTPCIGRSHGIHAEPITFGLKLASFYEEFKRNRERLVYAIDQISTCAISGAVGTFANVNPNVEKHVAKKLGLKVEPISTQIIPRDRHAFYFSILGIIAGSIERVAIEIRHLQRSEVYELQEYFSKSQKGSSAMPHKKNPILSENLTGLARMVRSSVVPALENIALWHERDISHSSVERNIGPDANITLDFALARLAGVLDNMIVYPKKMLENLNLTKGLIFSQEVMLELTKTGISREKSYKLVQGYAKKCFAENLDLFNVIQSDKLIMSKISIKKLKSIFSYSKHFKNVNLIFRRVFK

SEQ ID NO: 153812 - protein, 250 aa, Unknown
  Bacterial polypetide isolated from the Sargasso Sea
FCSYFDPFVENYVSKKMDLVPEDVSTQIIPRDRHAMFFSTLAIIASSVERLATEIRHIQRTEVREAEEYFSQGQKGSSAMPHKRNPVLTENLTGLARLVRSSVIPALENVTLWHERDISHSSVERMIAPDATITLDFALHRLNNVIENLLIYPDTMLTNLEKLGGLVHSQQVLLALTQKGASREDAYEMVQENAMKVWETPEHKRKDVYKNLLKNDKKVIKYLSEKEIDELFNLDQHFVHVNHIFDRVFD

SEQ ID NO: 153813 - protein, 347 aa, Unknown
  Bacterial polypetide isolated from the Sargasso Sea
FTHFACTSEDIFNLSHALMLRSGVQSVAPYMDEIVDAVAALAETEAETPMMSRTHGQPASPTTLGKEMANVAYRLARQRAQMDKVPLYGKMAGAVGNYNAHMSAYPDVDWQRVAEEFVTGLGLTWQPYVTQIEPHDYMAEIFAAVARFNTIVLDLDRDVWAYISIGYFKQKTVAGEVGSSTMPHKVNPIDFENSEGNIGLANAVFEHLGAKLPVSRWQRDLTDSTVLRNLGAGFGYSLIAYQSTLKGLGKLETNAQAMLDDLDVNWEVLAEPIQTVMRRHDVEKPYEKLKELTRGRRVDRDGMRAFVETLDIPDESKERLMELTPATYIGNAVAQAKDIRAQIAKIQ

SEQ ID NO: 153814 - protein, 243 aa, Unknown
  Bacterial polypetide isolated from the Sargasso Sea
IDPRVENYVAKKLNLDVEPISTQIIPRDRHAYFFSVLGVIASSVERFAIEIRHLQRTEVSEVEEFFNNKQMGSSAMPHKKNPVLTENLTGLARLVRATVVPALENVALWHERDISHSSVERNIGPDSTITLDFALNRLNNVVKSMRVNKNNMKKNLELTKGIFFSQRVLLELTSKGIRRDKAYKVVQKCAIKSLENNTSFYDSLLKDKIIMEKISVNNLKKLFDFGYHTRKINVIFNRVLKRK

SEQ ID NO: 153815 - protein, 305 aa, Unknown
  Bacterial polypetide isolated from the Sargasso Sea
RAFENKLTLCIGRSHGIHAEITTFGLKLASFYAEFNRALQRLKSVKKEISICAISGAVGTYANIDPFVEEYVAKQFNLNVETISTQIIPRDRHAVWFANLGIIASSIERVATEIRNLQKTEVREVEEFFEIGQKGSSAMPHKRNPVLSENLTGISRIIRSYVIPSMENIALWHERDISHSSVERVLAPDISIALDFSLARLTGIIENLIVYPENMIKNLRQLKGLIHSQQVLLKLTQSGFSREEAYLIVQNEAMKVWNNQGNFFDLLLNNETIKEKVKEKELKEIFDESLHLKNVEFIFQRVFSY

SEQ ID NO: 153816 - protein, 407 aa, Unknown
  Bacterial polypetide isolated from the Sargasso Sea
EIECLIAEKLSELGEIPNKAAEDIRKKAKFNIDEIKEIEKETKHDVVAYINNVSTYIGENSKYFHFGVTSSDIIDTGFSYQLKQTAEIITEQLKKLINNLKQKSIEHKYTFMIGRSHGVHAEQISFGLKMGSFYFEFLRNLKRLEIAKEEISICSISGPVGTYNSIDPRIEEYVAKKLNLKTEDISTQVIPRDRHALYFSTLGIIASSIERLVIEIRHLQRTEILEVEEFFSSGQKGSSAMPHKRNPILSENLTGLARYIRSATVPAMENIALWHERDISHSSVERILAPDINIAMDFALNRLSNIIENLVVYPENMEKNLNSLGGLHKSQDILKALIKKGLSRQEAYLNVQSLCTKAWNTKEKFIEILLKDNKINEFLSEKEIKKLLTNDDIKESIDWIYKNKYKI

SEQ ID NO: 153817 - protein, 391 aa, Unknown
  Bacterial polypetide isolated from the Sargasso Sea
MNEKNLEAISPVDGRYFDKTEKLKKYFSEKALIYYRLKVEVEYFISLCEAKIPQLSNFNHKKFKDLRKIYLDFSIDDALEIKKIEKSTNHDVKAVEYFIKQKFDKIGISGYKEFIHFGLTSQDINNTSIPLSIKDFINEVYLVKIEELLNSIEDKCNEYKDITIISRTHGQPASPTKLGKEFKVFWTRINEQLNSLKKIPNSAKFSGAVGNFNAHKVAYPKINWKNFGVNFVENKLGLNYSYPTTQIEHYDSFAALSDNCRRINNILIDMCIDIWTYISHDYFNQKIVKKEVGSSAMPHKVNPIDFENAEGNLGVANSTFNFFSNKLTKSRLQRDLSDSTVLRNIGVPFSHTIISFESILKGLSKIYLNNDKINNDIEDNWIVVSEAIQTI

SEQ ID NO: 153818 - protein, 345 aa, Unknown
  Bacterial polypetide isolated from the Sargasso Sea
KLKKYAEFVHFACTSEDINNLSYALVIKDASKITHSNIKQVQNKIRSFAKKFAKQSMLSRTHGQNASPTTMGKEFSNFSHRINKLQIEIDRHKMVGKINGAVGNYNAHHVAYPDINWEKVAKDFVKGLNLDFNSHTTQVEPKDTIAVLLSDYVKLNNILIDLSRDIWGYISLGYFKQRLKEGEVGSSTMPHKVNPIDFENAEGNLGMANANLNHISNTVTISRWQRDLTDSTIMRNIGTCFGYMNIALRSLQKGLNKLELNDQRLKEDLSKSWEILTEAIQTIIRKNNIPNGYELMKKLSRGKDINEKNLIEFINTMDVPSEDKKRLLQLTPQSYVGYAEKLSKD

SEQ ID NO: 153819 - protein, 430 aa, Unknown
  Bacterial polypetide isolated from the Sargasso Sea
MITRYNRPKIENIWTLENKFKIWTNIEILIAEKLSDINVIPKIAAQEIRKKAKFNVEEINKLEKQTRHDFNAYIDNVSKYIGKQSKYFHHGVTSSDIIDTAFSIQLKQTGEIIIKELKNLLKNLKSKSLKFKNTPMIGRSHGIHAEPITFGLKLGSFYNEFKRNLKRLEIAIEEISICSISGPVGTYESIDPRVEKYVAKKLKLRSEDISTQIIPRDRHAFFFSVLGIIASSIERFAVEIRHLQRTELLEVEEKFNHKQKGSSAMPHKRNPVLSENLTGLARYIRSAVIPSMENIILWHERDISHSSVERIMAPDITIALDFSLSRLNEIVTTMKVYPENMIKNLKLLGGLHNSQKLLLKLTQKGISRQEAYSIVQKNAMEAWNNNKKFKDVLKNDNTIMKKLTKKDIKEIIEIETKNIKIDWIFKNKIK

SEQ ID NO: 153820 - protein, 325 aa, Unknown; identical to SEQ ID NO: 153809
  Bacterial polypetide isolated from the Sargasso Sea

SEQ ID NO: 153821 - protein, 183 aa, Unknown
  Bacterial polypetide isolated from the Sargasso Sea
VYELQEYFSKNQIGSSAMPHKKNPILSENLTGLSRMVRSAVVPALENIALWHERDISHSSVERNIGPDANITLDFALVRLTNILDNMIVYPKKMLENLNMTKGLIFSQELMLELTKSGLSREKSYKIVQTYAKKCFIDNLDLFNVIQSDKYIMSNISLKKLRSIFSYSKHFKNVNLIFRRVFK

SEQ ID NO: 153822 - protein, 430 aa, Unknown
  Bacterial polypetide isolated from the Sargasso Sea
MIDRYSRKELKAIWSEENKYKIWLNIEIAAAEAMEKYKIIPKGVSSTVKKRAKINVKRIHQIESKVKHDVIAFLTSITEKAGIKARYLHQGMTSSDILDTAFNIQLKQSGEILLKDIDKILSVLKKQAKKYKFTPCIGRSHGIHAEPITFGLKLASFYEEFKRNKKRLASAIFDISTCAISGAVGTFANINPKVEAYVAKKFKLYPEPISTQIIPRDRHAHYFSVLGIIAGSIERVATEIRHLQRSEVYELQEFFSKEQKGSSAMPHKKNPILSENLTGLARMVRSHTIPALENIALWHERDISHSSVERNIGPDANITLDFALVRLANVLNKMIIYPKKMIQNINLTKGLIFSQEIMLELTKSGMTREKSYKIVQTYAKRCFSENKNLFDLISNDKKIMSLITEKKLKSIYSYSKHFKNINFIFKRVFK

SEQ ID NO: 153823 - protein, 386 aa, Unknown
  Bacterial polypetide isolated from the Sargasso Sea
KLANFDENRILDIEKETKHDVIAFLTNVAEYVGADSKYIHKGLTSSDILDTCFSIQLSKASSLLMKELKELLEILKSKALKYKYLICIGRSHGIHAEPTTMGLKFAYAYAEFFRHYNRLKNVKKEISVCKISGPVGSYSSVSPEVEKYIAEKLKLRPETISTQIIPRDRHASFFSFLSILASSVERLSVEIRHLQRTEVLEAEEYFSEGQKGSSAMPHKRNPVLSENLTGLSRYIRNTCNSAIENVILWHERDISHSSVERIIGPDVTTAMHFSLLRLKGLVKNLVIYPKNVEKNLNYLQGLHFSQNVMLKLIDNGVTREDAYKIVQESAMKTWNSIRSNKKKSFLSFLISNKKATSKVSKQDIKKIFNNKYFIKNIDHIYKSVFK

SEQ ID NO: 153824 - protein, 297 aa, Unknown
  Bacterial polypetide isolated from the Sargasso Sea
IARGPHYQAIKQDGLRLRKDGKELVVYPKCVDTAEKAGKQDYIFVTLKAHSVPSCLDAFEVLMKDDTSFVWGVNGIPWWYFYNHTNPDFKDKKVTSVDPDGRQWDRIGPEKIIGCIVNPASEVIKPGVIQHLEGDKFQLGEINGEETERIKNLSETLEKAGFQAPIRPNIKGDIWLKLFGNLSLNPISALTTSTLVKICSNDEVRAVIKNMMNEAHAISQNLGIEKPFDVERRIDAAKAVGEHKTSMLQDLERDRPMEIDALITSVQELGKITNVPTPTIDTVLALTKLRAKEAKLY

SEQ ID NO: 153825 - protein, 430 aa, Unknown
  Bacterial polypetide isolated from the Sargasso Sea
MIDRYSTKEMQNLWSDDNKYQKWLDVELAVCEAWSFYGHIPKQSFLRIKKRAKFNTKEIDKLEKVIKHDVIAFTTNLAKSIGKDSRFVHLGLTSSDVLDTSLSLFIVDSGNLIKKELSNTIKILTRLAKKHINTPIMGRSHGIHAEVTTFGLVVANWLDEMKRARDRLEKSIKVCSVGKMSGAVGTYSNVLPKIEAKACSILKLKPAKISSQIINRDYHAEYFTSLSFIASSIERISVQIRHMQRTEVLEVEEPFSKGQKGSSAMPHKRNPILSENLSGLARIVRSNAQASFENIPLWHERDISHSSVERVIGPDSSILIHFMLKRSNYMLQNLNVYKENMLKNIWKTNGVIFSQNILVKLIEKGLSREESYKMVQDLAFQAWNNDKNFKDLLLSDKKIMNILNKEELENCFAFNNLFKNAKSILSRVMK

SEQ ID NO: 153826 - protein, 430 aa, Unknown
  Bacterial polypetide isolated from the Sargasso Sea
MIDRYSRKELKNIWSEENKYKIWLDIEIAAAEAMEKYKIIPKGVASIVKKKTKIKVKRIHDIEKKVKHDIIAFLTSVTEKAGIKSRYLHQGMTSSDVLDTAFNIQLKQSGEILLKDIDKILSILKKQAKKYKLTPCIGRSHGIHAEPITFGLKLASFYEEFKRNKKRLSSAIFDISTCAISGAVGTFANIDPKIEIYVSKKLKLYPEPISTQVIPRDRHAHYFSVLGIIAGSVERVATEIRNLQRSEVYELQEFFSKDQKGSSAMPHKKNPILSENLTGLARIVRSCTIPALENIALWHERDISHSSVERNIGPDANITLDFALIRLANILDKMIIYPKKMKQNLNLTKGLIFSQKVMLELTKSGISREKSYKIVQTYAKKCFSQNKNLFDLISKDKKIMTIISEKKLKSIFNYSAHFKNINFIFGRVFK

SEQ ID NO: 153827 - protein, 188 aa, Unknown
  Bacterial polypetide isolated from the Sargasso Sea
RTEVSEVEEFFNNKQMGSSAMPHKKNPVLTENLTGLARLIRSSVIPALENVALWHERDISHSSVERNIGPDTTVTLDFALDRLNNVVKSMKINKDNMKKNLNLTKGIFFSQRILLELTSQGIRRDKAYRIVQKCAIKSLENNIPFYDSLLKDKVITDKIPVNILKKLFDFGYHTRKINVIFSRVLRKK

SEQ ID NO: 153828 - protein, 431 aa, Unknown
  Bacterial polypetide isolated from the Sargasso Sea
MIPRYNRPAIQSIWSDENKFKIWTEIECLIAEKLSELGEIPNKAAEDIRKKAKFNIDEIKEIEKETKHDVVAYINNVSTYIGENSKYFHFGVTSSDIIDTGFSYQLKQTAEIITEQLKKLINNLKQKSIEHKYTFMIGRSHGVHAEQISFGLKMGSFYFEFLRNLKRLEIAKEEISICSISGPVGTYNSIDPAIEEHVAKKLNLKTEDISTQVIPRDRHAFYFSTLGIIASSIERLVIEIRHLQRTEILEVEEFFSSGQKGSSAMPHKRNPILSENLTGLSRYIRSATVPAMENIALWHERDISHSSVERILAPDINIAIDFSLNRLSNIIENLVVYPENMEKNLNSLGGLHKSQDILKALIKKGLSRQEAYLNVQSLCAKAWNTKEKFIEILLKDNKINEFLSEKEIKKLLTNDDIKESIDWIYKNKFKI

SEQ ID NO: 153829 - protein, 403 aa, Unknown
  Bacterial polypetide isolated from the Sargasso Sea
MIPRYSRPIMSQIWDDENRFKIWFEIEAHAADGMANEGTIPKEAAKKIWKLGQFEINRINEIEKETQHDVIAFLTNLSEHIGPDARFLHQGMTSSDVLDTALSVQMKQSTNLLLEGINKLLQSLKKRAYEHKGSICIGRSHGIHAEPTTFGLKLAGFYAEFERAYKRLQTAKDEISVCAISGAVGTFANISPNVEKYVAKKMGLSAETISTQVIPRDRHAAWFSCLSLIASSIERFATEIRGLQRTEVREVEEYFSSGQKGSSAMPHKRNPVLTENLTGIARIVRASLVPAMENVALWHERDISHSSVERVFAPDATIALDFAITRMTNVVDNLLVYPDRMRENMNKLKGLVNSQQVLLKLTQSGISREDAYSIVQDIAMQVWNEKGLFLSLLKSNDLIKNKL

SEQ ID NO: 153830 - protein, 352 aa, Unknown
  Bacterial polypetide isolated from the Sargasso Sea
MIKRYEVKEIVDIWSQENKLSTWKKVESSVTKSLEEEGIVPKGLSEKILDANVTVKEVEAREKVTNHDLASFVDILQDKVNENSEWIHYGLTSSDVVDTSNSLLILESLDFLIGVVDELISTLKNLAIKEKDTKIIGRTHGVFAEVTFLGNIISNWLLEIHRNKERLERAKENISVGKLSGVVGNYTIINSDVEKKSLETLNLKPELFASQIVSRDRYAEVISSIGMLASSYDRIAINLRGYQRSEVGEIHESFSSEQKGSSAMPHKKNPITSERISGISRILRGYVVSALENISLWHERDISNSSVERIIFPDSFNLICFSTIEMEKLLKNININHEKINSNINSAKVSLL

SEQ ID NO: 153831 - protein, 306 aa, Unknown
  Bacterial polypetide isolated from the Sargasso Sea
MIDRYTTPEMAKIWSEYNKFDTWKKVEITVTEVLSDMGEVPKEAVKVINEKADFSVERILEIEKTTRHDVIAFLTNMAENIGPESRFIHMGMTSSDLLDTSLALLCKEAGELILQKLKTFKNVLRVRAVEHRESFQIGRSHGVHAEPITFGLKLALWSEEIGRHIDRWEQAIDSIATGKISGAVGTYQHLDPEVEEESCKRLGLKAATVSSQVVQRDHHAEYLSTLAIIAASLEKIAIEIRHLQRTEVLEAEEYFQKGQKGSSAMPHKRNPIVTERITGMARLLRANAMVAMENIALWHERDISHL

SEQ ID NO: 153832 - protein, 254 aa, Unknown
  Bacterial polypetide isolated from the Sargasso Sea
GQVSGAMGTYANTDLQVEAIACEILGLTPDTASTQVISRDRHADYVQTLALVGASLERFSTEIRNLQRTDVLEVEENFAKGQKGSSAMPHKRNPIRSERISGLARVLRSYTIAALENVALWHERDISHSSTERMMLPDCSVTLHFMLREMTSVVKGLGIYPENMSRNMNVYGGVVFSQRVLLALVGTGMSREEAYRVVQRNAHTAWNMAGGDFRANLEADGDVNSRLSADQLAVCFSTEMHQANLDVIWERLGI

SEQ ID NO: 153833 - protein, 196 aa, Unknown
  Bacterial polypetide isolated from the Sargasso Sea
FATEIRNLQRTDVLEVEENFAKGQKGSSAMPHKRNPIRSERISGLARVLRSYVVAALENVALWHERDISHSSTERMMLPDCSVTLHFMLREMTSVVKGLGVYPDNMRRNMNVYGGVVFSQRVLLALVGTGMSREEAYRIVQRNAHTAWNHEGGDFRANLEADADVISRLSTNQLADCFSTELHQAKLGVIWERLGI

SEQ ID NO: 153834 - protein, 283 aa, Unknown
  Bacterial polypetide isolated from the Sargasso Sea
RAGIKARYLHQGMTSSDVLDTSLNIQLVQSGKILVKDLEQILKVLKRQARKYKFTPCMGRSHGIHAEPITFGLKLASFYEEFKRNRKRLVDAIDEVSTCAISGAVGTFANINPNVEKHVAKKLGLKVEPISTQVIPRDRHAFYFSVLGIIAGSIERVATEIRHLQRTEVYELQEYFSKNQKGSSAMPHKKNPILSENLTGLARMVRSAVIPALENIALWHERDISHSSVERNIGPDANITLDFALVRLTNILDNMIVYPKKMLENLNLTKGLIFSQELMLELT

SEQ ID NO: 153835 - protein, 279 aa, Unknown
  Bacterial polypetide isolated from the Sargasso Sea
GDSGRYIHVGMTSSDVLDTGLSLQLKDSCELLLEEIENLENEVRLLARKHKNTLMIGRSHAIHGEPISFGFKLAGWLAEIIRNKKRLLTLRESVAIGQISGAMGTYANTNPKVEQITCDLLGLKPDTASTQVISRDRHAEYVQTIALVGASLDRFATEIRNLQRTDVLEVEEGFTKGQKGSSAMPHKRNPIRSERVSGLARILRSYVLTALENVPLWHERDISHSSNERIMLPDVSICLHFMLREMKDIVSNLEVYPENMIKKLNIYGGVIFSQKSFTF

SEQ ID NO: 153836 - protein, 237 aa, Unknown
  Bacterial polypetide isolated from the Sargasso Sea
VEQYVAKKLGMKAETISTQIIPRDRHAVYFNTLAVIASSIERLATEIRHLQRTEVLEVEEFFSKGQKGSSAMPHKRNPVLTENLTGLARLIRGYTVPALENITLWHERDISHSSVERIMAPDANIIIDFALSRMNNVISNLVVYPKNMKTNLDRLKKLPMSEGLMLAMTQKGLSREDAYKIVQRNAMEVWKTNTDFEVILNKDEELKKYLSKKEISKILDLKHAARRTDYIFKKVFK

SEQ ID NO: 153837 - protein, 202 aa, Unknown
  Bacterial polypetide isolated from the Sargasso Sea
CASLDRFATEIRNLQRTDVLEVEEGFTKGQKGSSAMPHKRNPIRSERVSGLARILRSYVLTALENVPLWHERDISHSSNERIMLPDVSICLHFMLREMKDIVNNLEVYPKNMLKNLNIYGGVIFSQKVLLLLVEKGFSREKAYRLVQRNAHQAWNTQNGNFKRNIETDNEIMDLIDQSDLEECFNPSIHLNNLSVIWEKLGI

SEQ ID NO: 153838 - protein, 291 aa, Unknown
  Bacterial polypetide isolated from the Sargasso Sea
KIAACEANFSLGKIPENAMKEIRLNAKFDESRITEIEKEVKHDVIAFLTSVNEFVGDSGRYIHVGMTSSDVLDTGLSLQLKDSCELLLEEIESLENEVRLLARKHKNTLMIGRSHAIHGEPISFGFKLAGWLAEIIRNKKRLLTLKESVAIGQISGAMGTYANTNPKVEQITCDLLGLKPDTASTQVISRDRHAEYVQTIALVGASLDRFATEIRNLQRTDVLEVEEGFTKGQKGSSAMPHKRNPIRSERVSGLARILRSYVLTALENVPLWHERDISHSSNERIMLPDVS

SEQ ID NO: 153839 - protein, 249 aa, Unknown
  Bacterial polypetide isolated from the Sargasso Sea
IAFLTFITERAGIKARYLHQGMTSSDVLDTSFNIQLVQSGKIILKDIDRILKVLKKQSKKYKLTPCMGRSHGIHAEPITFGLKLASFYEEFKRNRKRLVYAIEEISTCAISGAVGTFANINPNVEKHVAKKLGLKVEPISTQVIPRDRHAFYFSILGIIAGSIERVATEIRHLQRTEVYELQEYFSKNQKGSSAMPHKKNPILSENLSGLSRMVRSAVIPALENIALWHERDISHSSVERNIGPDANIT

SEQ ID NO: 153840 - protein, 283 aa, Unknown
  Bacterial polypetide isolated from the Sargasso Sea
MENLGQIPKGVASVVRKKARINVSRIHKIESEVKHDVIAFLTSVTEKAGIKARYLHQGMTSSDVLDTSFNIQLVQSGKIILKDIDQILKVLKKQAKKYKFTPCMGRSHGIHAEPITFGLKLASFYEEFKRNRKRLKDAIEEVSTCAISGAVGTFANINPNVEKHVAKKLGLKVEPISTQVIPRDRHAFYFSVLGIIAGSIERVAVEIRHLQRTEVYELQEYFSKNQKGSSAMPHKKNPILSENLTGLARMVRSSVVPALENIALWHERDISHSSVERNIGPRC

SEQ ID NO: 153841 - protein, 302 aa, Unknown
  Bacterial polypetide isolated from the Sargasso Sea
TRYSRKELTNIWSEENKYRIWLDVEIAAAEAMEKYKIIPKGVASTVKKKGKINVKRIHQIEKKVKHDVIAFLTSITEKAGISARYLHQGMTSSDVLDTSFNIQLVQSGKVLMIDIDKILKVLKKKAIKYKLTPCIGRSHGIHAEPITFGLKLASYYEEFKRNKKRLESAINEVSTCAISGAVGTFANIDPKIEVYVSKKLKLKPEPISTQVIPRDRHAYYFSILGIIAGSIERIATEIRHLQRTEVYELQEFFSKDQKGSSAMPHKKNPILSENLTGLSRMVRSYVVPSLENVALWHERDIS

SEQ ID NO: 153842 - protein, 323 aa, Unknown
  Bacterial polypetide isolated from the Sargasso Sea
HKIEAKVKHDVIAFLTSVTEKVGIKARYLHQGMTSSDVLDTSFNIQLVQSGKILVNDIDQILKVLKSKAKKYKFTPCIGRSHGIHAEPMTFGLKLASYYEEFKRNRKRLISAIDEISTCAISGAVGTFSNINPNVEKHVAKKLGLKIEPISTQVVPRDRHAYYFSILGIIAGSIERVSTEIRHLQRTEVYELQEFFSKKQKGSSAMPHKKNPILTENLTGLARMVRSYTLPALENIALWHERDISHSSVERNIGPDANITIDFALVRLANILNKMIVYPEKMLNNLNFTKGTIFSQELMLELTKSGLSREKSYRLISEHSKNA

SEQ ID NO: 153843 - protein, 282 aa, Unknown
  Bacterial polypetide isolated from the Sargasso Sea
WLDVEIAAAHSMEKLGQIPKGVSSIVRKKARINVKRIHQIESKVKHDVIAFLTSITEKAGIKARYLHLGMTSSDVVDTSFNIQLVQSGKIILKDIDQILKVLKKQARKYKFTPCIGRSHGIHAEPITFGLKLASFYEEFKRNRERLVSAIDQISTCAISGAVGTFANVNPNVEKYVAKKLGLKVEPISTQIIPRDRHAFYFSVLGIIAGSIERVAIEIRHLQRSEVYELQEYFSKSQKGSSAMPHKKNPILSENLTGLARMVRSSVVPALENIALWHERDIS

SEQ ID NO: 153844 - protein, 241 aa, Unknown
  Bacterial polypetide isolated from the Sargasso Sea
IDPRIEKYVAKKLNLKIEPISTQIIPRDRHAHFFSVLGIIASSIERFSVEIRNLQRTEVAEVYEFFNKKQMGSSAMPHKKNPVLSENLTGLSRLIRSTVIPAMENVALWHERDISHSSVERNIGPDATVTLDFALNRMNEIVKSMKINKNNMKKNLDLTKGLFFSQRVLLYLTEKGLKREVAYRIVQKCALRAIDLNISFYDSLLKDKKIRGIITVNNLKNLFDFSYHTKKINVIFNRVLK

SEQ ID NO: 153845 - protein, 221 aa, Unknown
  Bacterial polypetide isolated from the Sargasso Sea
IRCVDALTDFAREHASLPTLGYTHFQPAQPTTVGKRATLWIQDLLLDLEELDHRIEVLRFRGVRGTTGTQASFLELFEGDHHKVDKLDLAVGKRMGFESTYPVSGQTYTRKVDYAVQASLAGTAASVSKIGHDLRILANLREVEEPFEAEQIGSSAMPYKRNPMRAERICALARHVITLSIDPAFTAATQWLERTLDDSANRRLSVPNAFLALDGCLVLLE

SEQ ID NO: 153846 - protein, 213 aa, Unknown
  Bacterial polypetide isolated from the Sargasso Sea
GKLNGAVGNYNAHRVAYPDVDWPAVSEQFVTGLGIEWNPYTTQIEPHDYLAEYFDAIARLNQILVDFSRDIWSYISLGYFKQRMVEGEVGSSTMPHKVNPIDFENAEGNFGLANALLNHLSQKLPVSRWQRDLTDSTVLRNMGVALGYSQLALGSLSRGIGKLEVAPEPIAQDLETAWEVLGEAVQTVMRRYGVPEPYEKVKALTRGQRLEAE

SEQ ID NO: 153847 - protein, 303 aa, Unknown
  Bacterial polypetide isolated from the Sargasso Sea
IKLLAQKYKAIPMMARTHGQPASPTTLGKEMANVYMRLNRQREQIAKVELLGKINGAVGNYNAHLSAYPNLNWHQFAEEFVTSLGLSWNPYTTQIEPHDYIAELFDAIARFNTILLDFDRDVWGYIALGHFKQRTIAGEIGSSTMPHKVNPIDFENSEGNLGLANAIFQHLSSKLPVSRWQRDLTDSTVLRNLGVGFAYTVIAYHASLKGISKLEVNEANLLSELDQNWELLAEPVQTVMRKYGIEQPYEKLKELTRGKRITPQDLAVFIDKLELPEQVKTELKALRPDNYIGAAIELVDLLN

SEQ ID NO: 153848 - protein, 247 aa, Unknown
  Bacterial polypetide isolated from the Sargasso Sea
PVGTYNSIDPSVEKYVASKLNFKCEDISTQIIPRDRHAYFFSILSIIASSIERVAIEIRNLQRTEILEVEEFFDKKQKGSSAMPHKRNPILSENLTGVARYIRSSIIPFLENVALWHERDISHSSVERILAPDITIAVDFALNRLNEIIKNLKIYPKNMKKNLNYLNGIHKSQNLLLLLTKKGLSRQKAYKMVQNIAMESWNNNKKFDELVLKNKEIIKYISKEKIVSIFKKEDFVKNIDKIYRRIK

SEQ ID NO: 153849 - protein, 292 aa, Unknown
  Bacterial polypetide isolated from the Sargasso Sea
SAFNSRKKAVINVNRIHKIESEVKHDVIAFLTSVTEKAGIKARYLHQGMTSSDVLDTSFNIQLVQSGKIILKDIDQILKVLKKQANKYKMTPCMGRSHGIHAEPVTFGLKLASFYEEFKRNRNRLKDAIDEVSTCAISGAVGTFANISPNVEKYVAKKLGLKVEPISTQVIPRDRHAFYFSVLGIIAGSIERVAIEIRHLQRTEVYELQEYFSKNQKGSSAMPHKKNPILSENLTGLARMIRSAVIPALENIALWHERDISHSSVERSIGPDANITTDFALVRLTNILDNMI

SEQ ID NO: 153850 - protein, 298 aa, Unknown
  Bacterial polypetide isolated from the Sargasso Sea
IHNIESKVKHDVMLFLTSVTEKTGIKARYLHQGMTSSDVLDTSFNIQLVQSGKIILKDIDQLSKVLKRQSKKYKLTPCIGRSHGIHAEPITFGLKLASFYEEFKRNRKRLVDAIDEVSTCAISGAVGTYANINPKVEKHVGKKLGLKVEPISTQIIPRDRHAFYFSVLGIIAGSIERVATEIRHLQRTEVYELQEYFSKNQKGSSAMPHKKNPILSENLTGLARMVRSAVVPALENIALWHERDISHSSVERNIGPDANITLDFALVRLTNILDNMIIYPKKMLENLNTTKGLIFSQE

SEQ ID NO: 153851 - protein, 305 aa, Unknown
  Bacterial polypetide isolated from the Sargasso Sea
ILLKDIDLILKVLKRQAKKHKFTPCIGRSHGIHAEPITFGLKLATFYEEFKRNKKRLTDAIDEVSSCAISGAVGTFANINPNVEKHVAKKLGLKIEPISTQVIPRDRHAFYFSVLGIIAGSVERVAIEIRNLQRTEVYEIQEYFSKDQKGSSAMPHKKNPILSENLTGLSRMVRSYVAPALENIALWHERDISHSSVERNIGPDANITLDFALNRLANILDKMIVYPKKMIQNINLTKGLIFSQEIMLELTKNGLSREKSYKIVQSYSKKCFSENKNLLDLISKDKLIMSKISKSKLNSIFNYSS

SEQ ID NO: 153852 - protein, 219 aa, Unknown
  Bacterial polypetide isolated from the Sargasso Sea
LSQETDIAEYVQTIALVGASLDRFATEIRNLQRTDVLEVEEGFTKGQKGSSAMPHKRNPIRSERVSGLARILRSHVLTALENVPLWHERDISHSSNERIMLPDVSICLHFMLREMKDIVSNLEVYPKNMLKNLNIYGGVIFSQKVLLLLVEKGMSREKAYSLVQKNAHQAWNTENGNFKQNIERDNEIMDFIDQSDLEECFNPSIHLNNLSVIWEKLGI

SEQ ID NO: 153853 - protein, 278 aa, Unknown
  Bacterial polypetide isolated from the Sargasso Sea
RICLWIHDLLIDLDQILERRTALLARGVKGTTGTQASFLELFDGDHAKVRRLDELVAEKLGFPASYAVSGQTYTRKIDSQVVFALAGISESTHKAGNDLRLASAWGELEEPFESEQVGSSAMPYKRNPMRAERMCGLARFVLGLTSTAEQTAATQWFERTLDDSAPRRLILPQAFLATDAQLVLYDNIAKGLVVVPGVIRRTLEQYLPFLASERILMEATKAGGDRQELHEAIRRHSHAATAQIRDGFQNDLVNRLSSDSLFASVDLAAAMDVKGLAG

SEQ ID NO: 153854 - protein, 323 aa, Unknown
  Bacterial polypetide isolated from the Sargasso Sea
KTIEATTNHDVKAVEYFLKEALKDNPELNAVGEFVHFGCTSEDINNLAHALMICDGHRVMIEHYEAIRNALAGLAQENAEQPMLSRTHGQAATPTTLGKELANVVMRLNRQLATASAIRPLGKMNGAVGNYNAHRVAYPNVDWPALSEHFVTGLGIEWNPYTTQIEPHDYLAAYFDAIARLNQILVDFSRDIWSYISLGYFKQRMIEGEVGSSTMPHKVNPIDFENAEGNFGLANALLNHLSQKLPVSRWQRDLTDSTVLRNMGVALGYSQLALVSLSRGIGKLEVAPEPLAKDLETAWEVLGEAVQTVMRRYAVPEPYEKLK

SEQ ID NO: 153855 - protein, 276 aa, Unknown
  Bacterial polypetide isolated from the Sargasso Sea
QLVQSGKIILKDIDQILKVLKKQAKKYKMTPCMGRSHGIHAEPLTFGLKLASFYEEFKRNKKRLQDAIDEVSTCAISGAVGTFANISPNVEKHVAKKLGLKVEPISTQVIPRDRHAFYFSVLGIIAGSIERVAIEIRHLQRTEVYELQEYFSKKQKGSSAMPHKKNPILSENLTGLARMVRIAVIPALENIALWHERDISHSSVERNIGPDANITTDFALVRLTNILDKMIVYPKKMLENLNITKGLIFSQEVMLELTKSGLSREKSYRMVQSYAK

SEQ ID NO: 153856 - protein, 291 aa, Unknown
  Bacterial polypetide isolated from the Sargasso Sea
AQEHAEQPMLSRTHGQAATPTTLGKELANVVMRLNRQLAAASAIRPLGKMNGAVGNYNAHRVAYPDVDWPALSEHFVTGLGIEWNPYTTQIEPHDCLAAYFDAIARLNQILVDFSRDIWSYISLGYFKQRMVEGEVGSSTMPHKVNPIDFENAEGNFGLANALLNHLSQKLPVSRWQRDLTDSTVLRNMGVALGYSQLALVSLSRGIGKLKVAPEPIAEDLEAAWEVLGEAVQTVMRRYGVPESYEKLKALTRGQRLEADTLKSFILALDIPDDAKERLMSLTPDTYLGYA

SEQ ID NO: 153857 - protein, 295 aa, Unknown
  Bacterial polypetide isolated from the Sargasso Sea
EIAAAQAMEKFKIIPKGVASVVRRRGKINVKRIHQIESKVKHDIIAFLTSITEKAGIKARYLHQGMTSSDVLDTSFNIQLVQSGKILVKDIEKLLSVIKKKALKHKMTPCIGRSHGIHAEPITFGLKLATYYEEFKRNKKRLENAIDEVSTCAISGAVGTFANIDPRVEVFVSKKLKLKPEPISTQVIPRDRHAYYFSVLGIIAGSIERFATEIRHLQRSEVYELQEFFSKGQKGSSAMPHKKNPILSENLTGLARLVRSSVVPALENIALWHERDISHSSVERNIGPDANITLD

SEQ ID NO: 153858 - protein, 273 aa, Unknown
  Bacterial polypetide isolated from the Sargasso Sea
FLTSITEKAGIKARYLHQGMTSSDVLDTSFNIQLVQSGKVLLKDIDQILKILKKQAKKYKLTLCIGRSHGIHAEPLTFGLKLASFYEEFKRNKKRLISAIDEISTCAISGAVGTFSNIHPNVEKIVAKKLALKVEPISTQIIPRDRHAFYFSVLGIIAASIERVATEIRHLQRTEVYELQEYFSKKQKGSSAMPHKKNPVLSENLTGLSRLVRSYVAPSLENIVLWHERDISHSSVERNIGPDANITLDFALSRLSDILKNMIVYPKKMVTNM

SEQ ID NO: 153859 - protein, 301 aa, Unknown
  Bacterial polypetide isolated from the Sargasso Sea
KGVSSVVRKKARINVKRIHQIETRVKHDVIAFLTSVTEKAGLKARYLHQGMTSSDVLDTSFNIQLVQSGKIILKDLDLILKVLKKKAKKYKFTPCMGRSHGIHAEPITFGLKLASFYEEFKRNRKRLVNAINEVSTCAISGAVGTFANISPNVERHVAKKLGLQVEPISTQIIPRDRHAFYFSVLGIIAGSIERVATEIRHLQRTEVYEIQEYFSKSQKGSSAMPHKKNPILSENLTGLARIVRSTVIPALENIALWHERDISHSSVERNIGPDANITLDFALVRLTNILENMVVYPKKKC

SEQ ID NO: 153860 - protein, 259 aa, Unknown
  Bacterial polypetide isolated from the Sargasso Sea
QGMTSSDVLDTSFNIQLVQSGKIILNDIDQILKVLKKQAKKYKLTPCMGRSHGIHAEPITFGLKLASFYEEFKRNRKRLAAAIDEVSTCAISGAVGTFANINPNVEKHVAKKLGLRVEPISTQIIPRDRHAFYFSVLGIIAGSIERVAIEIRHLQRTEVYELQEFFSKKQKGSSAMPHKKNPILSENLTGLARMVRSAVVPALENIALWHERDISHSSVERNIGPDANITTDFALVRLTNILDNMIVYPKKMLENLNIT

SEQ ID NO: 153861 - protein, 217 aa, Unknown
  Bacterial polypetide isolated from the Sargasso Sea
IPRDRHAYFFSVLGILASSIERFSVEIRNLQKTEVLEVEESFSNNQKGSSAMPHKRNPILSENLTGISRYIRSAVIPSLENIVLWHERDISHSSVERIMTPDISIATDFALFRLNSIIKNLVVYPKNMKKNLNMLGGLHNTHNIMLKLIKKGLKRQIAYKIVQESAMETWNSKKQFYDVLLRNKQLNKLLKKKDIEIIIKNGNELKNIDWIYKNKIK

SEQ ID NO: 153862 - protein, 244 aa, Unknown
  Bacterial polypetide isolated from the Sargasso Sea
NYNAHIAVYPEVDWHQFSEEFVTSLGIQWNPYTTQIEPHDYIAELFDCMARFNTILIDFDRDVWGYIALNHFKQKTIAGEIGSSTMPHKVNPIDFENSEGNLGLSNAVLQHLASKLPVSRWQRDLTDSTVLRNLGVGVGYALIAYQATLKGVSKLEVNRDRLLDELDHNWEVLAEPIQTVMRRYGIEKPYEKLKELTRGKRVDAEGMKQFIDSLALPEDEKVRLKAMTPANYIGRAITMVDELK

SEQ ID NO: 153863 - protein, 268 aa, Unknown
  Bacterial polypetide isolated from the Sargasso Sea
LLKEQAAKLPELAKVSEFIHFACTSEDINNLSHALMLRAGRDDVLLPLMRQIADAIRALAHAHADVPMLSRTHGQPASPTTLGKELANVVYRLERQIAQVAAVPLLGKINGAVGNYNAHLSAYSQIDWEQNARAFIEDELGLQFNPYTTQIEPHDYIAELFDAIARFNTILIDFDRDVWGYISLGYFKQKTVAGEIGSSTMPHKVNPIDFENSEGNLGIANALFQHLASKLPISRWQRDLTDSTVLRNLGVGFAHSVIAYEASLKGIG

SEQ ID NO: 153864 - protein, 281 aa, Unknown
  Bacterial polypetide isolated from the Sargasso Sea
KVGIKARYLHQGMTSSDVLDTSFNIQLVQSGKILVKDIDQILKVLKAKAKRYKFTPCIGRSHGIHAEPITFGLKLASYYEEFKRNRIRLLSAIDEVSTCAISGAVGTFANINPNVEKHVAKKLRLKVEPISTQVIPRDRHAHYFSVLGIIAGSIERVSTEIRHLQRTEVYELQEFFSKKQKGSSAMPHKKNPILTENLTGLARMVRSYTIPALENIALWHERDISHSSVERNIGPDANITLDFALVRLANVLDKMIVYPKKMLHNLNITKGTIFSQELMWN

SEQ ID NO: 153865 - protein, 299 aa, Unknown
  Bacterial polypetide isolated from the Sargasso Sea
GKIKVKRIHDIEAKVKHDVIAFLTSITEQAGIKARYLHQGMTSSDVLDTSFNLQLVQSGKILIKDIDKILSVLKKQAKKHKLTPCIGRSHGIHAEPITFGLKLASFYEEFKRNKNRLKDAIENISTCSISGAVGTFANIDPRIEVYVAKKLKLKPEPISTQIIPRDRHAHYFSTLGIIAGSLERISTEIRHLQRSEVYEIQEFFSKDQKGSSAMPHKKNPILSENLTGLARIVRGYVIPSLENIALWHERDISHSSVERSIGPDANITLDFALSRLANVLDKMIIYPKKMLENLNLQKV

SEQ ID NO: 153866 - protein, 297 aa, Unknown
  Bacterial polypetide isolated from the Sargasso Sea
FLRCLERIHLNAKFDESRIKEIEKEVKHDVIAFLTSVNEFVGDSGRYIHVGMTSSDVLDTGLSLQLKDSCELLLEEIEKLENEVRLLARKHKNTLMIGRSHAIHGEPISFGFKLAGWLAEIIRNKKRLLTLKESVAIGQISGAMGTYANTNPEVEQITCDLLGLKPDTASTQVISRDRHAEYVQTIALVGASLDRFATEIRNLQRTDVLEVEEGFTKGQKGSSAMPHKRNPIRSERVSGLARILRSYVLTALENIPLWHERDISHSSNERIMLPDVSICLHFMLREMKDIVKNLEVY

SEQ ID NO: 153867 - protein, 278 aa, Unknown
  Bacterial polypetide isolated from the Sargasso Sea
AFLSSIMEKSGKEGRFLHKGMTSSDVLDTCFNLQLKQSGEILLKDIDNLLSAIKKQSIKHKFTLCIGRSHGIHAEPTTFGLKLLTYYAEFVRNKKRLERAIEDISTCAISGAVGTFANIDPRIERFVANKLKLKIEPISTQIIPRDRHAYFFSVLGIIASSIERFSVEIRNLQRTEVAEVYEFFKKKQMGSSAMPHKKNPVLSENLTGLARLIRSMVIPAMENVALWHERDISHSSVERNIGPDATVTLDFALNRMSEVVNSMKINKNNMKKNLDLTK

SEQ ID NO: 153868 - protein, 207 aa, Unknown
  Bacterial polypetide isolated from the Sargasso Sea
TIALVGASLDRFATEIRNLQRTDVLEVEEGFSKGQKGSSAMPHKRNPIRSERVSGLARILRSYVLTALENVPLWHERDISHSSNERIMLPDVSICLHFMLREMKDIVSNLEVYPKNMLKNLNIYGGVIFSQKVLLLLVEKGFSREKAYRLVQKNAHQAWNTQNGDFKQNIERDNEIMDLIDQSDLEECFNPSIHLNNLSVIWEKLGI

SEQ ID NO: 153869 - protein, 324 aa, Unknown
  Bacterial polypetide isolated from the Sargasso Sea
VKHDVIAFLTSVTEKAGIKARYLHQGMTSSDVLDTSFNIQLVQSGKIILKDIDQILKVLKRQAKKYKFTPCMGRSHGIHAEPITFGLKLASFYEEFKRNRKRLKGAIDEVSTCAISGAVGTFANINPNVEKHVAKKLGLKVEPISTQIIPRDRHAFYFSVLGIIAGSIERVSVEIRHLQRTEVYELQEYFSKNQKGSSAMPHKKNPILSENLTGLSRMIRSAVVPALENIALWHERDISHSSVERNIGPDANITTDFALVRLANILDNMIVYPKKMLENLNLTKGLIFSQEVMLELTKTGLSREKSYKMVQSYAKKMFCRENLN

SEQ ID NO: 153870 - protein, 311 aa, Unknown
  Bacterial polypetide isolated from the Sargasso Sea
MITRYSRKELTDIWSEYNKYQIWLDVEIAAAEGMEKLGTIPKGVASAVRKKAKINVKRIHSIEAKVKHDVIAFLTSVTEKVGIKARYLHQGMTSSDVVDTSFNIQLVQSGKILVKDIDQILKVLKSKAKKYKFTPCMGRSHGIHAEPITFGLKLASYYEEFKRNKKRLISAIDEISTCAISGAVGTFANINPNVEKHVAKKLGLKAEPVSTQIIPRDRHAYYFSVLGIIAGSIERVSTEIRHLQRTEVYELQEFFSKKQKGSSAMPHKKNPILSENLTGLARMVRSYTIPALENIALWHERDISHSSVERN

SEQ ID NO: 153871 - protein, 309 aa, Unknown
  Bacterial polypetide isolated from the Sargasso Sea
MIKRYSRKELTNIWSEENKYKIWLDVEVAAAQAMEKLGQIPKGVSSVVRKKARINVKRIHQIENQVKHDVIAFLTSITEKAGIKARYLHQGMTSSDILDTSFNIQLVQSGKIILKDLDQILKVLRKQSKKYKFTPCMGRSHGIHAEPITFGLKLASFYEEFKRNKKRLIAAIDEVSTCAISGAVGTFANINPNVEKHVAKKLGLKIEPISTQVIPRDRHAFYFSVLGIIAGSIERVAVEIRHLQRTEVYELQEYFSKNQKGSSAMPHKKNPILSENLTGLARMVRSVVTPALENIALWHERDISHSSVK

SEQ ID NO: 153872 - protein, 304 aa, Unknown
  Bacterial polypetide isolated from the Sargasso Sea
NQIPKGVSSIVRKKAKINVKRIHQIESQVKHDVIAFLTSVTEKAGIKARYLHQGMTSSDVVDTSFNIQLVQSGKIILKDIDQILKVLKKQANKYKFTPCMGRSHGIHAEPITFGLKLASFYAEFKRNRKRLIDAIDEVSTCAISGAVGTFANINPNVEKHVAKKLGLKAEPISTQVIPRDRHAFYFSVLGIIAGSIERVAIEIRHLQRSEVYELQEFFSKKQKGSSAMPHKKNPILSENLTGLSRMVRSAVIPALENIALWHERDISHSSVERNIGPDANITIDFALVRLTNILDNMVVYPKKC

SEQ ID NO: 153873 - protein, 307 aa, Unknown
  Bacterial polypetide isolated from the Sargasso Sea
GKIRVRRIHDIEAKVKHDVIAFLTSITEQAGLKARYLHQGMTSSDVLDTSFNLQLVQSGKILIKDIDKILTVLKKQAKKYKLTPCIGRSHGIHAEPITFGLKLASFYEEFKRNKKRLNDAIDDISTCSISGAVGTFANIDPRVEVYVAKKLKLKPEPISTQVIPRDRHAHYFSILGIIAGSVERIATEIRHLQRSEVYELQEFFSKDQKGSSAMPHKKNPILSENLTGLARMVRSYVIPSLENIALWHERDISHSSVERNIGPDANITLDFALFRLANVLDKMIIYPKKMLENLNFTKGLVFSQEMM

SEQ ID NO: 153874 - protein, 272 aa, Unknown
  Bacterial polypetide isolated from the Sargasso Sea
DVIAFLSSITEQAGLKARYLHQGMTSSDVLDTSFNLQLVQSGKILIKDIDKILSVLKKKAKKYKLTPCIGRSHGIHAEPITFGLKLASFYEEFKRNKKRLEDAVDNISTCSISGAVGTFANIDPRIEVYVAKKLKLKPEPISTQIIPRDRHAHYFTILGIIAGSVERVATEIRHLQRSEVYELQEFFSKDQKGSSAMPHKKNPILSENLTGLARMVRSYVIPSLENIALWHERDISHSSVERNIGPDANITLDFALFRLANVLDKMNYLSKK

SEQ ID NO: 153875 - protein, 338 aa, Unknown
  Bacterial polypetide isolated from the Sargasso Sea
KRINWIFWSEENKYKIWLYVEVAAAEAMEKLGQIPRGVASVVRKKARINVSRIHKIESEVKHDVIAFLTSVTEKAGSKARYLHQGMTSSDVLDTSFNIQLVQSGKIILNDIDQILKVLKKQSKKYKFTPCMGRSHGIHAEPITFGLKLASFYEEFKRNRKRLKDAIDEVSTCSISGAVGTFANINPNVEKHVAKKLGLKVEPISTQVIPRDRHAFYFSVLGIIAGSIERVAVEIRHLQRTEVYELQEYFSKNQKGSSAMPHKKNPILSENLTGLARMVRSSVVPALENIALWHERDISHSSVERNIGTDANITTDFALVRLTNILDNMICYPKKCLKT

SEQ ID NO: 153876 - protein, 307 aa, Unknown
  Bacterial polypetide isolated from the Sargasso Sea
EDAMRIKEIERTTNHDVKAVEYFLKEKVADNSELSAVNEFIHFACTSEDINNLSHGLMLREARETVILPYCDKLIEALVELAKRYQNVPMMARTHGQPASPTTMGKEMANVAIRLKRQRSQIAGVELLGKINGAVGNYNAHLSAYKDVDWHEVSEKFVTSLGLTWNPFTTQIEPHDYIAEMFDAIARFNTILIDFDRDVWGYIALGHFKQKTVAGEIGSSTMPHKVNPIDFENSEGNLGLANAIFDHLAAKLPISRWQRDLTDSTVLRNLGVGVGYAVIAYQATLKGISKLEVNEQSLLNELNNNWN

SEQ ID NO: 153877 - protein, 200 aa, Unknown
  Bacterial polypetide isolated from the Sargasso Sea
SLDRFATEIRNLQRTDVLEVEENFAKGQKGSSAMPHKRNPIRSERISGLARVLRSYVVAALENVALWHERDISHSSTERMMLPDCSVTLHFMLREMTSVVKGLGVYPDNMRRNMNVYGGVVFSQRVLLALVGTGMSREEAYRIVQRNAHTAWNHEGGDFRANLEADADVCSRLSADQLAECFSTELHQANLGVIWERLAI

SEQ ID NO: 153878 - protein, 305 aa, Unknown
  Bacterial polypetide isolated from the Sargasso Sea
RCENCSCRSNEKLGKFPRGVLSMVKKKARINVSRIHKIESEVKHDVIAFLTSITEKAGIKARYLHQGMTSSDVLDTSFNIQLVQSGKIILKDIDQILRVLKKQAKKYKFTPCMGRSHGIHAEPITFGLKLASFYEEFKRNRNRLKNAIDEVSTCAISGAVGTFANINPNVEKHVAKKLGLKVEPISTQVIPRDRHAFYFSVLGIVAGSIERVAVEIRHLQRTEVYELQEYFSKNQKGSSAMPHKKNPILSENLTGLARMVRSSVVPALENIALWHERDISHSSVERNIGPDANITTDFALVRLTN

SEQ ID NO: 153879 - protein, 430 aa, Unknown
  Bacterial polypetide isolated from the Sargasso Sea
MILRYSRKELVNIWSEKNKYKIWLDVEIAAAQAMEKYKIIPKGVSSVVKRKGKINVKRIHQIESKVKHDVIAFLTSITEKAGYNARYLHQGMTSSDVLDTSLNIQLVQSGKILLSDIDRILSVLKKKAFKYKFTPCIGRSHGIHAEPITFGLKLASYYEEFKRNKKRLQSAIHEVSTCAISGAVGTFANIDPRVEVHVSKKLKLRPEPISTQVIPRDRHAYYFSILGIIAGSIERIATEIRHLQRSEVYELQEYFSKDQKGSSAMPHKKNPILSENLTGLARIVRSHVTPALENISLWHERDISHSSVERSIGPDSNITLDFALVRLSNLLDNMIVYPKKMIKNLNLTNGVVFSQEVMLELTKVGFTREKAYRMVQKHAKISISKNINLIDLLKKDRLIYSKISNKKIESIFKYSKHLKNINYIFKRVFK

SEQ ID NO: 153880 - protein, 462 aa, Unknown
  Bacterial polypetide isolated from the Sargasso Sea
MSDTRPDTLFALNALSPLDGRYASKTEALRDWLSEAAFMRNRVTVEIHWLIALSHAGFAEVPRFSEASEQFLLQLAERFTAHDAARIKEIERVTNHDVKAVEYWLKESVKGQEELERASEFIHFACTSEDINNTSHGLMLAGAREHVILPALRSVHQRLVALAHAQAEQPMLSRTHGQPASPTTLGKEIANVAARLERAIERIAKVELLGKMNGAVGNFNAHLSAYPEFDWEAFSREVVEKRLKLTFNPYTIQIEPHDYMAELFDAVSRANTILLDLDRDVWGYISVGYFKQRTKAGEIGSSTMPHKVNPIDFENSEGNLGLANATLRHLADKLPISRWQRDLTDSTVLRNIGVAFGYSLLAYDSLIRGLDKLEVNAQRLNEDLDNCWEVLAEPVQTVMRRYGIENPYEQLKELTRGKGITREALQTFVSGLAIPQDAKDRLLAMTPGSYIGKAVELAKRIA

SEQ ID NO: 153881 - protein, 411 aa, Unknown
  Bacterial polypetide isolated from the Sargasso Sea
YKIWLNVEVLAAEAMEKLGQIPRGVASVVRKKAKINVNRIHKIEAEIKHDVIAFLTSVTEKAGIKARYLHQGMTSSDVLDTSFNIQLVQSGKMILKDIDQLLKVLKRQAKKYKFTPCMGRSHGIHAEPITFGLKLASFYEEFKRNRKRLNDAIDEVSTCAISGAVGTFANINPNVEKHVAKKLGLKVEPISTQVIPRDRHAFYFSILGIIAGSIERIAIEIRHLQRTEVYELQEYFSKNQKGSSAMPHKKNPILSENLTGLARMVRSTVVPALENIALWHERDISHSSVERNIGPDANITTDFALVRLTNILDNIIVYPKKMLENLNLTKGLIFSQEVMLELTKTGLSREKSYKMVQSYAKKCFAENLNLIDVVSSDKLIMSKISPKKLKSIFNYSKHFKNVNFIFRRVFK

SEQ ID NO: 153882 - protein, 378 aa, Unknown
  Bacterial polypetide isolated from the Sargasso Sea
KINVKRIHAIETKVKHDVIAFLTSVTEKAGIKSRYLHQGMTSSDVLDTSFNIQLVQSGKILLKDIDLILKVLKRQAKKHKFTPCIGRSHGIHAEPITFGLKLASFYEEFKRNRKRLVDAIDEVSSCAISGAVGTFANLNPNVEKHVAKKLGLKIEPISTQVIPRDRHAFYFSVLGIVAGSVERVATEIRHLQRSEVYELQEYFSKDQKGSSAMPHKKNPILSENLTGLSRMVRSYVTPALENIALWHERDISHSSVERNIGPDANITLDFALNRLSNILDKMIIYPKKMIQNINLTKGLIFSQEIMLELTKSGLSREKSYKIVQSHSKKCFSENKNLFDLISKDKLIMSKISKSKLNSIFNYSSHFKNVNLIFKRVFK

SEQ ID NO: 153883 - protein, 356 aa, Unknown
  Bacterial polypetide isolated from the Sargasso Sea
KIQSDTKLKNISQFIHFACTSEDINNLSYALMLKDARESILVPKLQQLVTILEKMSADYSSIPMLSRTHGQTASPTTLGKEMAVYVHRLNRQNNQLKNIELLGKLNGAVGNFNAHFSAYPDIDWMTLSKEFVEELGLTWNPLTTQIESHDYMAEYFHVLIRSNTILIDLCRDLWGYISLGYFKLKLIKGEVGSSTMPHKINPIDFENSEGNFGFANSLLEHLAMKLPTSRWQRDLTDSTVLRNTGVGIAHSVIALDACIAGLSKIDVDTEIINQDLENSWEVLTEAIQTVMRCYNIEGAYEKLKEISRGNEINRETLHNFIEKLDIPNDAKSRLKNLTPSNYLGNAETQTKLIKKK

SEQ ID NO: 153884 - protein, 411 aa, Unknown
  Bacterial polypetide isolated from the Sargasso Sea
YKIWLEVEIAAAQAMEKLGQIPKGVSSTVRRKAKINVKRIHAIEVKVKHDVIAFLTSVTEKAGIKARYLHQGMTSSDVLDTSFNIQLVQSGKILLKDIDLILKVLKRQAKKYKFTPCVGRSHGIHAEPITFGLKLASFYEEFKRNRKRLVDAIDEVSSCAISGAVGTFANINPNVERHVAKKLGLKIEPVSTQVIPRDRHAFYFSVLGIIAGSVERVATEIRHLQRSEVYELQEYFSRDQKGSSAMPHKKNPILSENLTGLSRMVRSYVTPALENIALWHERDISHSSVERNIGPDANITLDFSLNRLANILDKIIIYPKKMIQNINLTKGLIFSQEIMLELTKSGLSREKSYKIVQSHSKKCFSENKNFFDLISKDKLIMSKISKSKLNSIFNYSSHFKNVNLIFKRVFK

SEQ ID NO: 153885 - protein, 456 aa, Unknown
  Bacterial polypetide isolated from the Sargasso Sea
MDLSALTAISPVDGRYGSKTASLRGIFSEFGLTKYRVQVEINWLKLLADCPEITEVPPLSESAIALLDAIKDNFSEQDALRVKAIESTTNHDVKAVEYFIKEKIADNAELAAVGEFVHFACTSEDINNLSHGLMLTEAREQVVLPYCNELLSAIKKLAVEYRSVPLMSRTHGQPASPSTLGKEMANVAVRLERQIKQIAAVEIMGKINGAVGNYNAHISAYPEVNWHALSERFVTSLGLHWNAYTTQIEPHDYIAELFDAIARFNTILLDFDRDVWGYIALGHFKQRTIAGEIGSSTMPHKVNPIDFENSEGNLGIANALMQHLAAKLPVSRWQRDLTDSTVLRNLGVGIAHSLIAYQATLKGISKLQVNEEHLRAELDQNWEVLAEPVQTVMRRYGIEKPYEKLKELTRGKRIDAKQLAEFIDGLALPEDVKAELKKMTPANYIGRAEAFVDELN

SEQ ID NO: 153886 - protein, 339 aa, Unknown
  Bacterial polypetide isolated from the Sargasso Sea
MIKRYSRKELTDIWSEENKYKIWLDVEVAAAEAMEKLGQIPKGVASIVKKKSKINVSRIHKIESEVKHDVIAFLTSVTEKAGIKARYLHQGMTSSDVLDTSFNIQLVQSGKIILKDIDQILKVLKKQAKKYKFTPCMGRSHGIHAEPITFGLKLASFYEEFKRNRKRLKEAIDEVSTCAISGAVGTFANINPNVEKHVAKKLGLKVEPISTQIIPRDRHAFYFSVLGIIAGSIERVAIEIRHLQRTEVYELQEYFSKNQKGSSAMPHKKNPILSENLTGLARMVRSTVVPALENIALWHERDISHSSVERNIGPDANITTDFALVRLTNILDNMIVYPK

SEQ ID NO: 153887 - protein, 430 aa, Unknown
  Bacterial polypetide isolated from the Sargasso Sea
MIPRYSRAPMTDIWSSKSRFKIWLDIELYACEAMEKLGTVPKGTSKKVKSKAKINEKRIDAIEKKVKHDVIAFLTSISEYVGPPARFLHQGLTSSDILDTAFNIQLMQSSKIIEKEMAQLLKSLKKIALKYKNTPCIGRSHGIHAEPTTFGVKMANFYAEFERNQARFKKATEEISVCAISGAVGNYANIDPRVEQFVAKKLGMKAETISTQVIPRDRHAVYFSALGIIASSIERLATEIRHLQRTEVLEVEEFFSKGQKGSSAMPHKRNPVLTENLTGLSRLIRGYTIPALENVSLWHERDISHSSVERIMAPDANIIIDFALARLNNVIANLVVYPKNMKANLDKLRKLPMSEGLMLAMTQKGLSREKAYKIVQRNAMKVWKSDLDFETVLDTDNELKKYLNKKEISKILDLKHATRRTDYIFKKVFK

SEQ ID NO: 153888 - protein, 400 aa, Unknown
  Bacterial polypetide isolated from the Sargasso Sea
MKEWKKLGTIPKGVASTVRKKAKINVKRIHNIEAKVKHDVIAFLTSVTEKVGIKARYLHQGMTSSDVVDTSFNIQLVQSGKILVKDIDQILKVLKSKAKKYKFTPCMGRSHGIHAEPITFGLKLASYYEEFKRNRKRLINAIDEISTCAISGAVGTFANINPNVEKHVAKKLGLKAEPISTQVIPRDRHAYYFSVLGIIAGSIERVSTEIRHLQRTEVYELQEFFSKKQKGSSAMPHKKNPILSENLTGLSRMVRSYTIPALENIALWHERDISHSSVERNIGPDANITLDFALVRLANLLDNMIVYPKKMLNNLNITKGTIFSQELMLELTKSGLTREKSYRLVQAHAKKCIADNLNLFDVVMSDKNITSRISSKKMKKIFDYSSHFKNVNLIFNRVFK

SEQ ID NO: 153889 - protein, 430 aa, Unknown
  Bacterial polypetide isolated from the Sargasso Sea
MITRYSRKELTDIWSEYNKYKIWLDVEIAAAEGMERLGTIPKGVASAVRKKARINVKRIHNIEAKVKHDVIAFLTSVTEKVGIKARYLHQGMTSSDVVDTSFNIQLVQSGKILLKDIDQILKVLKSKAKKYKFTPCMGRSHGIHAEPITFGLKLASYYEEFKRNKKRLISAIDEISTCAISGAVGTFANINPNVEKHVAKKLGLKVEPISTQVIPRDRHAHYFSVLGIIAGSIERVSTEIRHLQRTEVYELQEFFSKKQKGSSAMPHKKNPILSENLTGLARMVRSYTIPALENIALWHERDISHSSVERNIGPDANITLDFALVRLASVLDKMIVYPKKMLNNLNITKGTIFSQELMLELTKSGLSREISYRLVQAHAKKCIADNLNLLDVVMSDKNITSRISSKKMKKIFDYSSHFKNINIIFNRVFK

SEQ ID NO: 153890 - protein, 373 aa, Unknown
  Bacterial polypetide isolated from the Sargasso Sea
MIKRYSRKELTDIWSEENKYKIWLDVEIAAAQAMEKLGQIPKGVSSIVRKKARINVKRIHQIESKVKHDVIAFLTSVTEKAGIKARYLHLGMTSSDVVDTSFNIQLVQSGKIILKDIDQILKVLKKQARKYKFTPCIGRSHGIHAEPITFGLKLASFYEEFKRNRERLVYAIDQISTCAISGAVGTFANVNPNVEKHVAKKLGLKVEPISTQIIPRDRHAFYFSVLGIIAGSIERVAIEIRHLQRSEVYELQEYFSKSQKGSSAMPHKKNPILSENLTGLARMVRSSVVPALENIALWHERDISHSSVERNIGPDANITLDFALVRLASVLDNMIVYPKKMLENLNLTKGLIFSQEVMLELTKTGITREKSYK

SEQ ID NO: 153891 - protein, 430 aa, Unknown
  Bacterial polypetide isolated from the Sargasso Sea
MITRYSRKELTDIWSEHNKYKIWLDVEIAAAEGMEKLGTIPKGVASAVRKKAKINVKRIHSIEAKVKHDVIAFLTSVTEKVGIKARYLHQGMTSSDVVDTSFNIQLVQSGKILVKDIDQILKVLKSKAKKYKFTPCMGRSHGIHAEPITFGLKLASYYEEFKRNRKRLISAIDEISTCAISGAVGTFANINPNVEKHVAKKLGLNAEPVSTQVIPRDRHAYYFSVLGIIAGSIERVSTEIRHLQKTEVYELQEFFSKKQKGSSAMPHKKNPILSENLTGLARMVRSYTIPALENIALWHERDISHSSVERNIGPDANITLDFALVRLANVLDKMIVYPKKMLDNLNITRGTIFSQELMLELTKSGLTRENSYRLIQAHAKKCIADNLNLLDVVMSDKNITSRISSKKMKKIFDYSSHFKNVNLIFNRVFK

SEQ ID NO: 153892 - protein, 433 aa, Unknown
  Bacterial polypetide isolated from the Sargasso Sea
QKKVINQLEIEAAAALSQGEINLIPKSIAKDIAKAARSGKITAKRIKQLEAKSDHDTAALVESLAERCKKESRPWIHYGLTSNDLVDTSNSMQMRDAIRIIQPKVAKLALVLTKNAVKYKTLPAVGRTHGQHASIISFGLKFANWAAEMSTHLERIDEIKKRILICKTLGVVGTGSLMGKNAVRVQDRVAKKLSLFPAKVTTQIIPRERYAEYIFQLSLLGATLEKISIEIRNLQRTEIGEVAEHFKKGQMGSSAVPVKRNPIKSERISSLSKLLRSQINTSFENIPLWHERDLSNSANERFTIPMASILLDEMIETMIRIISNLKINDKRVRENLYITKGQIFAEFVLEALIKKGIPRFVAYRDVQRVAFEAHEKKMNYMDALIGDKNILKSLTEKEVREIFVPEKHLGASQIIINNVDKHVKVNAKKLSKL

SEQ ID NO: 153893 - protein, 456 aa, Unknown
  Bacterial polypetide isolated from the Sargasso Sea
MDLSALTAISPVDGRYGSKTASLRGIFSEFGLTKYRVQVEINWLKLLADCPEITEVPPLSESAIAVLDAIKDNFSEQDALRVKAIESTTNHDVKAVEYFIKEKIADNAELAAVGEFVHFACTSEDINNLSHGLMLTEAREQVVLPYCNELLSAIKKLAVEYRSVPLMSRTHGQPASPSTLGKEMANVAVRLERQIKQIAAVEVMGKINGAVGNYNAHLSAYPEVNWHALSERFVTSLGLHWNAYTTQIEPHDYIAELFDAIARFNTILIDFDRDVWGYIALGHFKQRTVAGEIGSSTMPHKVNPIDFENSEGNLGIANALMQHLASKLPVSRWQRDLTDSTVLRNLGVGIAHSLIAYQATLKGISKLQVNEDHLRAELDQNWEVLAEPVQTVMRRYGIEKPYEKLKELTRGKRIDAQQLAVFIDGLALPEEVKAELKKMTPANYIGRAEAFVDELN

SEQ ID NO: 153894 - protein, 340 aa, Unknown
  Bacterial polypetide isolated from the Sargasso Sea
MIKRYSRKELTDIWSEENKYKIWLDVEVAAAQAMEKLGQIPRGVSSVVRKKAKINVNRIHVIESKVKHDVIAFLTSVTEKAGIKARYLHQGMTSSDVLDTSFNIQLVQSGKIILKDINQLLKVLKRQSKKYKLTPCIGRSHGIHAEPITFGLKLASFYEEFKRNRKRLVYAIDEVSTCAISGAVGTYANINPKVEKHVAKKLGLKVEPISTQIIPRDRHAFYFSVLGIIAGSIERVATEIRHLQRTEVYELQEYFSKNQKGSSAMPHKKNPILSENLTGLARMVRSAVIPALENIALWHERDISHSSVERNIGPDANITLDFALVRLTNILDNMIIYPKK

SEQ ID NO: 153895 - protein, 425 aa, Unknown
  Bacterial polypetide isolated from the Sargasso Sea
MIERYSSDEMSSIWSEDNKVAKWLDVERAVIEILEKEEITPKGLSKQLKEVSITHNEVLEREAVTNHDLAAFVDVLQSKIQKDSNWIHYGLTSSDVVDTANALLIKESLNIVVEKIAELVNSLKNKAISESDTLIIGRTHGVYAEPTTLGSIFGNWCLEVSRGLDRLSSSLEIISYGKISGAVGNHSLISEEIENKILEQLSLKPEPLASQIVSRDRYADLFSSFAIIAGTYERIATNIRHYQRSEVGEMYEAFKQGQKGSSAMPHKKNPIGSERICGLARVVRGNTQASYETMALWHERDISNSSVERIILPDTFKLIDFMTRDLINIINDLVINHENIESNLNSAKTKLGSQKLLSLIVSKGNSRDEGYKFVQNITQNNFSIDAIIESTLSEFDDISKDEIENCFSLTTNIDSKIIEKKLKEL

SEQ ID NO: 153896 - protein, 430 aa, Unknown
  Bacterial polypetide isolated from the Sargasso Sea
MIKRYSRKQLTNIWSEENKYKIWLDVEIAAAEAMEKLGQIPRGVASIVRKKAKINVSRIHKIESEVKHDVIAFLSSVTEKAGIKARYLHQGMTSSDVLDTSFNIQLVQSGKIILNDIDQILKVLKKQAKKYKLTPCMGRSHGIHAEPITFGLKLASFYEEFKRNRKRLAAAIDEVSTCAISGAVGTFANINPNVEKHVAKKLGLRVEPISTQIIPRDRHAFYFSVLGIIAGSIERVAIEIRHLQRTEVYELQEFFSKKQKGSSAMPHKKNPILSENLTGLARMVRSAVVPALENIALWHERDISHSSVERNIGPDANITTDFALVRLTNILDNMIVYPKKMLENLNITKGLIFSQEVMLELTKSGLSREKSYKMVQSYAKKCFAENLNLYDVLLKDKLIMTKISQKRLKSIFSYSKHFKNVNLIFRRVFK

SEQ ID NO: 153897 - protein, 308 aa, Unknown
  Bacterial polypetide isolated from the Sargasso Sea
QLIDGVTALSVEYRDIPLLSRTHGQPATPSTMGKEMANVAYRMERQYRQLNQVEILGKINGAVGNYNAHIAAYPEVDWHQFSEEFVTSLGIQWNPYTTQIEPHDYIAELFDCIARFNTILIDFDRDVWGYIALGHFKQKTVAGEIGSSTMPHKVNPIDFENSEGNLGLSNAVLQHLASKLPVSRWQRDLTDSTVLRNLGVGIGYALIAYQSTLKGVSKLEVNRDHLLDELDHNWEVLAEPIQTVMRRYGIEKPYEKLKELTRGKRVDAEGMKQFIDGLALPEEEKTRLKAMTPANYIGRAIAMVDELK

SEQ ID NO: 153898 - protein, 303 aa, Unknown
  Bacterial polypetide isolated from the Sargasso Sea
MITRYSRKELTDIWSEHNKYQIWLDVEIAAAEGMEKLGTIPKGVASAVKKKSKINVKRIHNIEGKVKHDVIAFLTSITEKVGIKARYLHQGMTSSDVLDTSFNIQLVQSGKILIKDIDQILKVLKLKAKKYKFTPCIGRSHGIHAEPITFGLKLASYYEEFKRNRKRLFDAIEDVSTCAISGAVGTFANINPNVEKHVARKLGLKVEPISTQVIPRDRHAHYFSVLGIIAGSIERVSTEIRHLQRTEVYELQEFFSKKQKGSSAMPHKKNPILTENLTGLARMVRSYTIPALENIALWHERDI

SEQ ID NO: 153899 - protein, 357 aa, Unknown
  Bacterial polypetide isolated from the Sargasso Sea
MIERYTLPEMGSVWSEQAKFQSWLDVEIAATEANCRLGRVPQDSLDTIKAKADFSVERILEIEAEVRHDVIAFLTNVNEHVGDAGRHIHVGMTSSDVLDTGLALQLKRSVALLRQELDALADALRALAREHKATEMIGRSHAIHGEPITFGFKLAGWLAETERNRSRLARLEEEVAVGQISGAMGTYANTNPQVEAITCEILGLTPDTASTQVISRDRHADYVQTLALVGASLDRFATEIRNLQRTDVLEVEENFAKGQKGSSAMPHKRNPIRSERISGLARVLRSYVVAALENVALWHERDISHSSTERMMLPDCSVTLHFMLREMTSVVKGLGVYPDNMRRNMNIYGGVVFSQRV

SEQ ID NO: 153900 - protein, 430 aa, Unknown
  Bacterial polypetide isolated from the Sargasso Sea
MIKRYSRKQLTDIWSEENKYKIWLDVEIAAAESMEKLGQIPRGVSSIVRKKAKINVSRIHKIESEVKHDVIAFLSSVTEKAGIKARYLHQGMTSSDVLDTSFNIQLVQSGKIILNDIDQILKVLKRQAKKYKLTPCMGRSHGIHAEPITFGLKLASFYEEFKRNRKRLAAAIDEVSTCAISGAVGTFANIDPNVEKHVAKKLGLKVEPISTQVIPRDRHAFYFSVLGIIAGSIERVATEIRHLQRTEVYELQEFFSKKQKGSSAMPHKKNPILSENLTGLARMVRSAVVPALENIALWHERDISHSSVERNIGPDANITTDFALVRLTNILDNMIVYPKKMLENLNITKGLIFSQEVMLELTKSGLSREKSYKMVQSYAKKCFAENLNLYDVLLEDKLIMTKISQKRLKSIFSYSKHFKNVNLIFRRVFK

SEQ ID NO: 153901 - protein, 306 aa, Unknown
  Bacterial polypetide isolated from the Sargasso Sea
MIERYSRKELKDIWSEENKYKIWLDIEIAAAEAMEKYKVIPKGVASIVKKRGKIKVKRIHDIEAKVKHDVIAFLTSITEQAGIKARYLHQGMTSSDVLDTTLNIQLVQSGKILLTDIDKILSVLKKQSKKYKMTPCIGRSHGIHAEPITFGLKLASFYAEFKRNKERLKHSIDNISTCAISGAVGTYANISPKIELYVAKKLKLKPETISSQIIPRDRHAQYFTTLGIIASSVERVATEIRHLQRSEVYELQEFFSKDQKGSSAMPHKKNPILSENLTGLARIVRGHVVPALENVTLWHERDISHS

SEQ ID NO: 153902 - protein, 430 aa, Unknown
  Bacterial polypetide isolated from the Sargasso Sea
MISRYSRKELTSIWSEENKYKIWLDVEIAAAQAMEKLGQIPKGVASVVRKKARINVKRIHQIESQVKHDVIAFLTSVTEKAGIKARYLHQGMTSSDVLDTSFNIQLVQSGKIILKDLDQILKVLKKQAKKYKFTPCMGRSHGIHAEPITFGLKLASYYAEFTRNKKRLELAIDEVSTCAISGAVGTFANINPNVEKYVAKKLGLQIEPISTQVIPRDRHAFYFSVLGIIAGSIERVATEIRHLQRTEVYELQEFFSKKQKGSSAMPHKKNPILSENLTGLARMVRSSVVPALENIALWHERDISHSSVERNIGPDANITLDFALTRLTNILDNMIVYPKKMLQNLNITKGLIFSQELMLELTKNGLSREKSYRMVQNYAKKCFAENLDLFNVIQSDKYIMSKIPSKKLKTIFSYSKHFKNINLIFRRVFK

SEQ ID NO: 153903 - protein, 471 aa, Unknown
  Bacterial polypetide isolated from the Sargasso Sea
MIRAPFRCPTVREHPMQLSSLTAVSPVDGRYAGKTQALRPIFSEYGLIRARVLVEVRWLQRLAAHPAISEVPAFSAEANAVLNTLAENFSLEHAERVKEIERTTNHDVKAIEYLLKEQAAQLPELAQVSEFIHFACTSEDINNLSHALMLREGRDDVMLPLMRQTAEAIRELAIRFAAVPMLSRTHGQPASPTTLGKELANVVYRLERQIAQVAAVPLLGKINGAVGNYNAHLSAYPEIDWEANARAFIEDELGLGFNPYTTQIEPHDYIAELFDAIARFNTILIDFDRDIWGYISLGYFKQRTIAGEIGSSTMPHKVNPIDFENSEGNLGIANALFQHLASKLPISRWQRDLTDSTVLRNLGVGLAHSVIAYEASLKGISKLELNEQKIAADLDACWEVLAEPIQTVMRRYNIENPYEKLKELTRGKGISPEALQTFIDGLDMPAAAKAELKLLTPANYIGNAVEQAKRI

SEQ ID NO: 153904 - protein, 430 aa, Unknown
  Bacterial polypetide isolated from the Sargasso Sea
MISRYSRKELTEIWSEENKYKIWLDVEIAAAQAMEKFKIIPKGVASVVKRRGKINVKRVHQIEGKVKHDIIAFLTSITEKAGMKARYLHQGMTSSDVLDTSFNIQLVQSGKILMKDIEKLLSIIKKKAFKHKMTPCIGRSHGIHAEPITFGLKLATYYEEFKRNKKRLENAINEVSTCAISGAVGTFANIDPRVEFFVSKKLKLKPEPISTQIIPRDRHAYYFSVLGIIAGSIERFATEIRHLQRSEVYELQEFFSKGQKGSSAMPHKKNPILSENLTGLARLVRSNVIPALENIALWHERDISHSSVERNIGPDANITLDFALFRLTNLVDNMIIYPKNMMKNLNITKGVIFSQEMMLELTKVGLSREKAYKKIQMHAINSFNKNINLIELVKKDKSITSLISEKKIDKVFTYSKHLKNVNYIFRRVFK

SEQ ID NO: 153905 - protein, 418 aa, Unknown
  Bacterial polypetide isolated from the Sargasso Sea
IWSEENKYKIWLDVEIAAAEGMEKLGHIPKGVASAVKKKAKINVKRIHAIEDKVKHDVIAFLTSVTEKVGIKARYLHQGMTSSDVLDTSFNIQLVQSGKILVKDIDQILKVLKSKAKKYKFTPCIGRSHGIHAEPITFGLKLASYYEEFKRNKKRLISAIDEISTCAISGPVGTFANINPKIEKHVAKKLKLKVEPISTQVIPRDRHAYYFSVLGIIAGSIERVATEIRHLQRTEVYELQEFFSKKQKGSSAMPHKKNPILTENLTGLARMVRSYTFPALENIALWHERDISHSSVERNIGPDANITIDFALVRLGNVLDKMIVYPKKMLNNLNITKGTIFSQELMLELTKSGLSREKSYRLIQTHAKKCIADNLDLLDVVMNDKSITSRIPIKKMKKIFDYSAHFKNVNFIFNRVFK

SEQ ID NO: 153906 - protein, 261 aa, Unknown
  Bacterial polypetide isolated from the Sargasso Sea
RAIEDISTCAISGAVGTFANIDPRIEKFVANKLKLKIEPISTQIIPRDRHAHFFSVLGIIASSIERFSVEIRNLQRTEVAEVYEFFKKKQMGSSAMPHKKNPVLSENLTGLARLIRSMVIPAMENVALWHERDISHSSVERNIGPDATVTLDFALNRMSEVVNSMKINKNNMKKNLDLTKGLFFSQRVMLFLTEKGLKREVAYRIVQKCALRAIDQNISFYDSLMEDKKIKDIITVNNLKNLFDFGYHTKKINVIFSRVLK

SEQ ID NO: 153907 - protein, 423 aa, Unknown
  Bacterial polypetide isolated from the Sargasso Sea
KNLTDIWSEENKYKIWLDVEVAAAEGMEKLGHIPRGVASVVKKKARINVSRIHKIESEVKHDVIAFLTSVTEKAGIKARYLHQGMTSSDVLDTSFNIQLVQSGKIILKDIDQILKVLKRQAKKYKFTPCMGRSHGIHAEPITFGLKLASFYEEFKRNRKRLKDAIDEVSTCAISGAVGTFANINPNVEKHVAKKLGLKVEPISTQVIPRDRHAFYFSVLGIIAGSIERVAVEIRHLQRTEVYELQEYFSKNQKGSSAMPHKKNPILSENLTGLARMVRSAVVPALENIALWHERDISHSSVERNIGPDANITTDFALVRLTNILDNMIVYPKKMLENLNLTKGLISSQEVMLELTKSGLSREKSYRLVQSYAKKCFAENLNLIDVISSDKLIMSKISPKKLKSIFNYSKHFKNVNFIFRRVFK

SEQ ID NO: 153908 - protein, 176 aa, Unknown
  Bacterial polypetide isolated from the Sargasso Sea
VGTYDSIDPRVEKHVAKKLKLKCEDVSTQIIPRDRHAFFFSVLGIIGSSIERLAVEIRNLQRTELLEVEEKFNPKQKGSSAMPHKRNPVLSENLTGLARYIRSAVIPSMENIVLWHERDISHSSVERIFAPDITIALDFSLNRLNEIINTMKVYPENMKKNLNSLGKLHNSQKLIR

SEQ ID NO: 153909 - protein, 141 aa, Unknown
  Bacterial polypetide isolated from the Sargasso Sea
MAPRARSAASASASSSDPDPLVDPDHLCVSAGCGAVIDNLFLAIAAEGDAVLIPAPYYPAFDNDLRVRDGVVAVPVHGESAASLPTPAALDAAVDAQRRDFGRDVRAVLLTNPSNPLGIVYPARDVAAILAWGLERGVHVV

SEQ ID NO: 153910 - protein, 92 aa, Unknown
  Bacterial polypetide isolated from the Sargasso Sea
FAECVRNHSDAVIDFGPMGCQTGFYLIMIGEPDVPGTCELVETTLRDILKLDATPAANEVQCGWGANHSIKAAQEAAHTMLNHRDEWEQVMA

SEQ ID NO: 153911 - protein, 43 aa, Unknown
  Bacterial polypetide isolated from the Sargasso Sea
MPLLDSFTVDHTRMNAPAVRVAKHMSTPKGDAITVFDLRFCAP

SEQ ID NO: 153912 - protein, 172 aa, Unknown
  Bacterial polypetide isolated from the Sargasso Sea
MYEEKDAATQGFVFNQTMLRIADPKRSLDFYTRVMGMTLIKRLDFEEMKFSLYFLAAGDDFSDISDDVDERTQQTFGRPAMLELTHNWGDTPETVDYHNGNTEPKGFGHIGFHVPDAEAACARFASLDVPFQKGLNDGSMKGIAFIKDPDGYWIEIFNASNVSATCAPHLKK

SEQ ID NO: 153913 - protein, 132 aa, Unknown
  Bacterial polypetide isolated from the Sargasso Sea
MRLLHTMLRVADLERSLAFYTEVLGMTLLRRKDYPSGRFTLAFVGYGPESEQTVLELTHNWDTDSYSLGDAYGHIALGVDDIQSTCAGISSQGGRVVRQPGPMKHGSTVIAFVEDPDGYKVELIELASRSAA

SEQ ID NO: 153914 - protein, 129 aa, Unknown
  Bacterial polypetide isolated from the Sargasso Sea
MRILHTMLRVGDLDKSIDFYVNRLGMNLLRKKDYPHGKFTLAFVGYGSENENSVIELTYNWDKKSDDYELGDKYGHIAIGVKDIHLTCQGLENNGCKVITKPKTMKNSTTILAFVEDPDGYKIELIERD

SEQ ID NO: 153915 - protein, 134 aa, Unknown
  Bacterial polypetide isolated from the Sargasso Sea
MRLLHTMLRVGDLERSLAFYTELLKMSLLRRKDYPSGRFTLAFVGYGPESDQTVLELTHNWDTSSYTLGEGYGHIALGVDDIYRTCEQIRLQGGKVVREPGPMKHGSTVIAFVEDPDGYKVELIQLSSRADAAA

SEQ ID NO: 153916 - protein, 130 aa, Unknown
  Bacterial polypetide isolated from the Sargasso Sea
MRLLHTMLRVGDLDQSIAFYTEVLGMTLLRRKDYPDGQFTLAFVGYGDEAHNSVIELTHNWGVDSYELGTGYGHIALEVEDVYRACEDIRSRGGKITREPGPMKHGSSILAFVEDPDGYKVELLSPKRSD

SEQ ID NO: 153917 - protein, 129 aa, Unknown
  Bacterial polypetide isolated from the Sargasso Sea
MRILHTMLRVGDLEKSIDFYVNRLGMNLLRKKDYPHGKFTLAFVGYGSEKENTVIELTYNWDKKSEDYELGDKYGHIAIGVKDIHGICQGLEDNGCKVTTKPKTMKNSTTVLAFVEDPDGYKIELIERD

SEQ ID NO: 153918 - protein, 120 aa, Unknown
  Bacterial polypetide isolated from the Sargasso Sea
MLHTMLRVADLEQSLGFYTEVLGMQLLRRKDYPSGRFTLAFVGYGSESDHTVLELTHNWDTDSYTLGNAYGHIALGVEDIHSTCAGIADKGGRVVREPGPMKHGTTVIAFVEDPDGYKVE

SEQ ID NO: 153919 - protein, 131 aa, Unknown
  Bacterial polypetide isolated from the Sargasso Sea
MNNNYELLHAMIRVYDLEKSIDFYTRLMGMKLLRRKEFPEGRFTLAFVGYGPEKESTVIELTHNWDQQEQYQMGNAFGHLAIGVNNIYGVCKMLVEEGVRVPRPAGPMKGGERIIAFVEDPDGYKIELIER

SEQ ID NO: 153920 - protein, 136 aa, Unknown
  Bacterial polypetide isolated from the Sargasso Sea
MSQLLHTMLRVGNLERSIAFYTQVLGMKLLRTSENPEYKYSLAFVGFGEESTGQAVIELTYNWGTEKYDLGTAFGHIAIGDEDIYARCEAIAAAGGKVTRAPGPVAGGTTEIAFVEDPDGYKIEFIQMKSATQGLG

SEQ ID NO: 153921 - protein, 182 aa, Unknown
  Bacterial polypetide isolated from the Sargasso Sea
MSRHFDKAEGLYEEKDAATQGFVFNQTMLRIADPKRSLDFYTRVMGMTLIKRLDFEEMKFSLYFLAAGDDFSDISDDVDERTQQTFGRPAMLELTHNWGDTPETVDYHNGNTEPKGFGHIGFHVPDAEAACARFASLDVPFQKGLNDGSMKGIAFIKDPDGYWIEIFNASNVSATCAPHLKK

SEQ ID NO: 153922 - protein, 129 aa, Unknown
  Bacterial polypetide isolated from the Sargasso Sea
MRILHTMLRVGDLDKSIDFYVNRLGMNLLRKKDYPHGKFTLAFVGYGSEKENSVIELTYNWDKKSEDYEIGDKYGHIAIGVKDIHLICKGLEKNGCKITTKPKTMKNSTTVLAFVEDPDGYKIELIERD

SEQ ID NO: 153923 - protein, 171 aa, Unknown
  Bacterial polypetide isolated from the Sargasso Sea
MQEMSQNPDQETLEYVFNQTMLRIKDPEKSIDFYTKVLGMTILKKLDFPDFKFSLYFLAYLRDGDDPVPENNQDRFAYTLSQKAVLELTHNWGTENDEDFSHHDGNSDPRGFGHIGITVPDVYEACERFESLGVEFQKKPDDGNMKGLAFIKDPDGYWIEILSAKGLASTI

SEQ ID NO: 153924 - protein, 171 aa, Unknown
  Bacterial polypetide isolated from the Sargasso Sea
MEEMSQNPDQETLDYVFNQTMLRIKDPKKSIDFYTKVLGMTILKKLDFPDFKFSLYFLAYLRNEDDPVPENNQERFAYTLSQKAVLELTHNWGTENDEDFSHHDGNSDPRGFGHIGITVPDVYEACERFESLGVEFQKKPDDGNMKGLAFIKDPDGYWIEILSAKGLASTI

SEQ ID NO: 153925 - protein, 168 aa, Unknown
  Bacterial polypetide isolated from the Sargasso Sea
MSQNPDKETLEYVFNQTMLRIKDPEKSIDFYTKVLGMTILKKLDFPDFKFSLYFLAYLRNEDDPVPENNQERFAYTLSQKAVLELTHNWGTEDDEDFSHHDGNSDPRGFGHIGITVPDVYKACARFEELGVEFQKKPDDGNMKGLAFIKDPDGYWIEILSAKGLASTI

SEQ ID NO: 153926 - protein, 89 aa, Unknown
  Bacterial polypetide isolated from the Sargasso Sea
THNWGSENDDKVKFHDGNAEPKGFGHICFSVPDIYAACKKFEENGVEFVKKPDDGSMKGLAFIKDPDGYWIEIVQSKKVANIVKEMGKI

SEQ ID NO: 153927 - protein, 130 aa, Unknown
  Bacterial polypetide isolated from the Sargasso Sea
MLHTMLRVGDLDQSIAFYTEVLGMQLLRRKDYPTGRFTLAFVGYGPESEQTVLELTHNWDTSSYELGDGYGHISIGVEDIRTTCAAISGKGGRVVREPGPMKGGSTVIAFVEDPDGYKVELIEMSSRAAA

SEQ ID NO: 153928 - protein, 130 aa, Unknown
  Bacterial polypetide isolated from the Sargasso Sea
MLHTMLRVADLERSLGFYTEVLGMQLLRRKDYPSGRFTLAFVGYGSESDHTVLELTHNWDTDSYTLGDAYGHIALGVEDIHSTCAGIADKGGRVVREPGPMKHGTTVIAFVEDPDGYKVELIEMSSKAHA

SEQ ID NO: 153929 - protein, 182 aa, Unknown
  Bacterial polypetide isolated from the Sargasso Sea
MSRHFEQADGLCEEIDTATQGFVFNQTMLRIADPKRSLDFYTRVMGMTLIKRLDFEEMKFSLYFLAAGDDFSDISDDVEKRTQQTFGRPAMLELTHNWGDTPETVSYHNGNSEPKGFGHIGFHVPDADAACARFEALDVPFQKGLNEGSMKGIAFIKDPDGYWIEIFDASKVAQTCAPHLKK

SEQ ID NO: 153930 - protein, 170 aa, Unknown
  Bacterial polypetide isolated from the Sargasso Sea
MDELTKTKAIGTEEFVFNQTMLRIKDPEVSLDFYVNQLGMTLVKQLDFPEMSFTLYFLGYLRDFDEEVPEDPVQRAEYAFSQKAMLELTHNWGTESDANFSYHDGNSDPRGFGHIGITVPDVYAACKQFEEYGIEFVKKPDDGSMKGLAFIKDPDGYWIEILSAKASSQF

SEQ ID NO: 153931 - protein, 136 aa, Unknown
  Bacterial polypetide isolated from the Sargasso Sea
MSQLLHTMIRVGNLERSINFYTQILGMKLLRTSENPEYKYSLAFVGYGEESTGQAVIELTYNWGTEKYDLGTGFGHIAIGDEDIYARCEAIAAAGGKVTRAPGPVAGGTTEIAFVEDPDGYKIEFIQMKSATQGLG

SEQ ID NO: 153932 - protein, 79 aa, Unknown
  Bacterial polypetide isolated from the Sargasso Sea
FASEGIIQFFFEEADNESGFNIYILDESNRAEVYHHCEGSKEELVRDVSRFYSSSHDRFTYGSSFINFNLPQVLSDRRR

SEQ ID NO: 153933 - protein, 214 aa, Unknown
  Bacterial polypetide isolated from the Sargasso Sea
LNRAGWYLYKHSLEPADIIGRAPLEYNGYISKLVSWAYFNGLLTPQSRVHLFNQGSDLHIDNLHQFCRDLSGTFPVKYPRATNLALSRPCEIRQLSIFLNLETDPTSHWVGQVIEFDANAADVFSFGRNQECLVGSVDLVYRNSWSEIRTLHFQGDEAVVDALTTILGKMHQDAAAPEMIEVFCYSQHFRSLVRTRFQQLVAECIELRLARDKQ

SEQ ID NO: 153934 - protein, 255 aa, Unknown
  Bacterial polypetide isolated from the Sargasso Sea
IKKINKKNLKIIYGDSERAGSSLKAINYIDKFKPNKVFIHDAARPNISLKLIKKLAKLIKKYKTVVPYIKVDDSIKIKKKKNYDNLDRNKIILTQTPQCFDYKLLKENYKDIKNNITDEVSILLKNKIKVKFVTGEKENFKITHRKDLINEGLKIFYGIGFDIHRLIKNKKLYLGGIKIPYHSGLKGHSDGDVILHAIIDAILGAMRKKDIGSLYPDNNKIFKNIRSTKMLYPLISDLNKNNYFINNLDINLICE

SEQ ID NO: 153935 - protein, 155 aa, Unknown
  Bacterial polypetide isolated from the Sargasso Sea
MRIGQGYDAHGWAEDDRPLVIGGVTFTEKRGLDGHSDGDVVTHAIMDAMLSAAGLGDIGQIFPDTSEELNGANSVQLLRETAEMISDAGWVLVNADCTVVTDTPRIAPVKKQMEAGLSDAAGGVVTVCGKRTEGIGALGRGEGVVALAVALLEKK

SEQ ID NO: 153936 - protein, 214 aa, Unknown
  Bacterial polypetide isolated from the Sargasso Sea
AFKFKILYKLFKQNSKFITDDVSLFIDNNLKVKFIKGDENNLKITNKIDIKKNIQKTHFGIGFDIHRLETNKKLFLGGVKIPYHLGLKAHSDGDVIIHALIDSLLGACKLKDIGILFSNKKQKYKNIRSSKMLIKVLKLINQRKFYVNNIDINVVAERPKINKYRNKIINSISKLCNINKSQINIKGKTAEKLGLIGKEKAIACEVITSVIKYA

SEQ ID NO: 153937 - protein, 257 aa, Unknown
  Bacterial polypetide isolated from the Sargasso Sea
KRLLNHLKKNNAVVPYINSKNTIKYKVKNEFYNLNRENTFLTQTPQAFKFKKLYELAINESDKITDEATLFINKNRKIKFIKGENTNDKITFKNDIKLTKTFFGIGFDIHRLVKNKKLYLGGAKIPFHSGLKGHSDGDVILHSIIDAILGAMRNKDIGSFFPNTKKYKNIRSPKMLKPVIENLYKSNFFINNLDINLICEQPKVSKYRDRIIKSISKLMMLKKDLINLKGKTVEKLGLIGKEKAIACEVIISITKYD

SEQ ID NO: 153938 - protein, 127 aa, Unknown
  Bacterial polypetide isolated from the Sargasso Sea
GAVGHSDADVLIHAICDAILGACNLGDIGYHFPDTDSKYKNIDSKIILKKVSDLMKKAGYSIVNIDSTVVLEKPKLAHHLSAMKKTLAEILMISSLDISIKATTHEKVDSFGKSESIKAYAVCLLTK

SEQ ID NO: 153939 - protein, 161 aa, Unknown
  Bacterial polypetide isolated from the Sargasso Sea
MIRVGHGFDAHRLESDQALIIGGVSIPYEKGLVGYSDADVLIHALCDALLGAASLGDIGQHFPSHDQAHAGRDSREFLRVVIDLLDEAGYRPVNVDCTIIAEAPRMAPFLPEMRLILSSLLLISPTCINVKATTTDGMGYVGRGEGIAAHAVASISDAHVE

SEQ ID NO: 153940 - protein, 111 aa, Unknown
  Bacterial polypetide isolated from the Sargasso Sea
LLGALALGDIGDHFPDTDSQYREADSLVLLKKVWEMIQQQGYRINNLDSVLIAQRPRLKPFLETMRTNLASCVDCEIELVSVKATTTEKLGFAGREEGIAAKSVVLLSKFQ

SEQ ID NO: 153941 - protein, 295 aa, Unknown
  Bacterial polypetide isolated from the Sargasso Sea
GKERSDSSLIALKYLKKYRPKNVFIHDAARPNFSYKLLQNLFKNLKKNKAVVPVVSSKDSIKYKIKNQIFNLNKNNSYLTQTPQAYRFKELYNLAINEKDKISDEATLFINNNTQVKFIPGENKNNKITYLSDIDTSKTYFGIGFDIHKLIENKKLYLGGVKIPFHSGLKGHSDGDVVLHAIIDAILGATKKKDIGTFFPNTKKFKNIRSPKMLKPIIDNLYKSNFSINNLDINLICERPKVSKYRNKIINSISKLITLNKNQINLKGKTTEKLGLIGKEKAIACEVIISITKYD

SEQ ID NO: 153942 - protein, 197 aa, Unknown
  Bacterial polypetide isolated from the Sargasso Sea
KDNISDEATLYLNNNIKVKFISGENQNNKITYFNDLKKIKLFAGIGFDIHKLVKNKKLYLGGVKIPFHSGLMGHSDGDVILHAIIDAILGATQKKDIGTYFPNTKKFKNIRSPNMLKPIIKNLYKSNFSINNLDINLICEQPKVSKYRDKIINSISKLTTINKDQINLKGKTVEKLGLIGKEKAIACEVIISIIKYD

SEQ ID NO: 153943 - protein, 229 aa, Unknown
  Bacterial polypetide isolated from the Sargasso Sea
KSKFYLVQTPQISNFNDLKISLKKCIDENINCPDESFAIEYSDLTSSKVMGARSNIKITEPEDIELLSKFLTRSGIGFDLHKYEAGDGIILGGYKMKCDYKIVAHSDGDVLLHSIADSILGAAGLGDIGKFFPDNDENNRDLNSSKIIKYCLDKINEVNLEIYNIDATVICEEPKINPYRGEILQKLSSILMIPISSIGLKATTSEKIGIIGENKAIAVQSIVNLREKL

SEQ ID NO: 153944 - protein, 161 aa, Unknown
  Bacterial polypetide isolated from the Sargasso Sea
MIDVRLGNGFDVHAFTEGNEVTLCGIKIPFSKKLLGHSDADVGLHAITDAIYGAIAAGDIGTHFPPNDQTWKDVSSDIFLKHAVQLADKLGYQINNVDCTIICEKPKIGPLSDKMKSSISKIMELDKNRISVKATTSEKLGFTGREEGIAALATASVSKVE

SEQ ID NO: 153945 - protein, 220 aa, Unknown
  Bacterial polypetide isolated from the Sargasso Sea
VAIHDAARPLIPTNLLDGLIAAINNTNDDKQKAEIIGAVPVLLLADSIKTIDKSNGQNNSQNNPTSNLALITGSIDRSQLAAAQTPQLFRRNFITKLHDDFAGKSDFTDDCSLAEAAGFKITMIDGAKQLMKLTDADDFAMLSYLFASDRAAPSYQQHTDDNSMTETRFGTGFDVHKFSDEAGPIWLGGIKLDSDRRMLAHSDGDVGLHALCDAIFGAIA

SEQ ID NO: 153946 - protein, 190 aa, Unknown
  Bacterial polypetide isolated from the Sargasso Sea
TLFINNNLKIKFINGESQNKKITFKNDVENSKIFFGIGFDIHRLIKNKKLYLGGVKIPFHSGLKGHSDGDVILHSIIDAILGATSNKDIGAHYPDNKKKFKNIRSPNMLKPIMEKFNKQKYSINNLDINLICERPKISIYRNRIITSLSKLLSLDKNKINLKGKTTEKLGLIGKEKAIACEVIVSVTKND

SEQ ID NO: 153947 - protein, 223 aa, Unknown
  Bacterial polypetide isolated from the Sargasso Sea
DLVKNLKIYKAVIPVISSKDSIKYKIKNHIFNLNRDYTLLTQTPQAFRFKDVFDLAINQKEKINDEATLFINTNRKIKFIRGENKNNKITYFDDVNASKTYFGIGFDLHRLIKNKKLYLGGLKIPFHSGLKGHSDGDVILHAIIDAILGATKKKDIGTYFPNSKKFKNIRSPKMLKPIIDNLYKSNCSINNLDINLICEQPKVSKYREKIINSISKLTNLNKN

SEQ ID NO: 153948 - protein, 134 aa, Unknown
  Bacterial polypetide isolated from the Sargasso Sea
HHPDKLGLDGHSDADVLSHSIMDALLGALSLGDIGKYFPPTDEKWKNADSLFLLSKVIDLIRQNGWEINNIDSVLIAERPKIMPHIKLMKKNISEILKIDENLIGIKATTNEKLGPEGREEGISCHSVVLLEKK

SEQ ID NO: 153949 - protein, 162 aa, Unknown
  Bacterial polypetide isolated from the Sargasso Sea
MKVIKTFYGIGFDIHKLVKGKRLYLGGIKVPFHSGLKGHSDGDVILHAIIDAILGATRSKDIGTYFPNIKRFKNIKSSKMLKPIMDNLTKSNFYINNLDINLICEQPKVSKYRNRIINSVSKLMNLDKDLINIKGKTVEKLGLIGNEKAIACEVIISLSKYD

SEQ ID NO: 153950 - protein, 160 aa, Unknown
  Bacterial polypetide isolated from the Sargasso Sea
MIKSGIGYDAHQLGEGESLVIGGVKIESNVGSIGHSDGDVLIHAIIDAILGATASGDIGLLFPSDNIKYKNFHSGDFLKIVKKEILNKNYKILHIDSVVILQSPKLRAFIDQMRTNISNILDLKLNQVSIKATTTDFLGYIGRGEGLAAQSIVTIEDNRL

SEQ ID NO: 153951 - protein, 196 aa, Unknown
  Bacterial polypetide isolated from the Sargasso Sea
ARWRQEQREQRTRERRPDLFARWQTATMNDPLDPGMELRIGNGYDIHRLVPGRALILGGVTLDHPDGLGLDGHSDADVLVHAVMDALLGALALGDIGKYFPPTDPQWKGADSLKLLVQVVKLVKERGWSVVNIDAVVIAERPKLKPHIAEMSSRMASAIGITSDAVGVKATTNEGLGPEGREEGISCQAVALLQRS

SEQ ID NO: 153952 - protein, 195 aa, Unknown
  Bacterial polypetide isolated from the Sargasso Sea
ESFAIEYSNLKLSKILGDRSNIKVTEKADIEILNNFLTRSGIGYDLHKYEPGDGIILGGYKITCNYKIVAHSDGDVLLHSIADSILGAAGLGDIGMFFSDQDNKNKNLDSTLIIEHCLNELNKMDLEIYNIDTTIICENPKINPHREKILENLSAILKVPMKKIGLKATTSEKIGIIGNNEAISVQSIVNLKDLS

SEQ ID NO: 153953 - protein, 203 aa, Unknown
  Bacterial polypetide isolated from the Sargasso Sea
MPVITIDGDPLTLKITYEKDLNLLEPHLTKNLNNYITKIGNGFDIHRFDNSKKSGNNFILLGGIKIKASKPLIGHSDADVLLHAITDSILGVMNKGDIGSIFPPTDEKWKNADSSIFLTHASKLLQNEKGIINNIDAVIVCEKPKILDYSKKMKKNIAKILNINEQKVSIKGKTSESIGFIGREEGIAAMVSTAIQVNNTDLK

SEQ ID NO: 153954 - protein, 299 aa, Unknown
  Bacterial polypetide isolated from the Sargasso Sea
SKRFHNKTAKQFYHYKNKEIIDHSIEKSLNSKLFKKIIIITNNLNHLKKKKLPKIIKIIKGGKERSDSSLIALKYLKKFKPANVLIHDAARPNFSIKLLKNLINKLKKNRAVIPYIYSNDSIKYKSQNQLFNLNRNKALLTQTPQAFKFKDLYNLSSKQMTKVNDEATLFIKNNLKIAFIKGEIKNNKITYFNDVKQNKVSFGIGFDIHRLVKNKKLYLGGTKIPFHSGLQGHSDGDVILHATIDAILGAIQKKDIGTYFPSNKNRFKNIRSPKMLKPIIENLYKNDFSINNLDINLIC

SEQ ID NO: 153955 - protein, 159 aa, Unknown
  Bacterial polypetide isolated from the Sargasso Sea
MIKVGLGYDVHKFEKGDKITLCGVTIPFDKKLIGHSDADVCYHSIVDAILGSLSLGDIGDHFPPSQKKWKNADSKIFMIFAKKKLIENNAEIQNLDLTIICEKPKIGIYKKEMKKKISSVLDLSIETINIKATTSEKLGFTGREEGIAAQSIVLIKCEK

SEQ ID NO: 153956 - protein, 222 aa, Unknown
  Bacterial polypetide isolated from the Sargasso Sea
LTFKDMKVPDILVSGNHEEIKSWRRRKSFERTLERRSDLISNENYKKSPQSKRIIKENNHFMKFRIGNGYDIHRLVEDRDLIIGGVKLHHPENLGLDGHSDADVLSHSIMDALLGALSLGDIGKYFPPSDEKWKNADSLFLLSKVIDLIRQYGWEINNIDSVLVAERPKIMPHIKLMKKNISEILNIDKNLIGIKATTNEKLGPEGREEGISCHSVVLLEKK

SEQ ID NO: 153957 - protein, 287 aa, Unknown
  Bacterial polypetide isolated from the Sargasso Sea
IAAAGLGERFGNETPKQYARVNGKTIIESAVKPFVDSKYVSEIIIAISENDNHIKNQNFYNSNKIKYVVGGASRQESINNALNAADKDYEYVLTHDAARPNITEDDIVKLYKDIKKSKTSCSFLYTPVYDSLKEVSPKDTTKDKNKFYLVQTPQISKFSHLKSSIKRCIDENINCPDESFAIEYANLTLSKVKGSRSNIKVTEPQDLEILNNFLTRSGVGFDLHKYQAGDGIILGGYKIECDYEIIAHSDGDVLLHSIADSILGAAALGDIGIFFSDQDEKNKDLNS

SEQ ID NO: 153958 - protein, 277 aa, Unknown
  Bacterial polypetide isolated from the Sargasso Sea
QSNCHVIQGGATRQQSVYAGLQTAADIDPAARFVAIHDAARPLLPARLLSTMLATISDAVAGVAPVLPLADTLSCVDAQQHIDRIIDRAPIRALQTPQLFWREAITDLHKHYVDNPTFTDDCGLALAAGHTIATVTGAHQLLKLTQPQDYDMLKTYCNANDSASIPAGHSMPDIRIGNGYDVHKFADTPGPIMLAGISVESGRSVLAHSDGDVALHALCDAIFGALAEGDIGHHFPPSDPQWQAADSSLFLKFAIDRVRKRGGQIMNLDLTIICETP

SEQ ID NO: 153959 - protein, 160 aa, Unknown
  Bacterial polypetide isolated from the Sargasso Sea
KFRIGNGYDIHRLIKGRDLILGGVKLHHPENLGLDGHSDADVLSHSIMDALLGALSLGDIGKYFPPSDEKWKNADSLFLLSKVIDLIRQDGWEINNIDSVLVAERPKIMPHIKLMKKNISKILNIDENLIGIKATTNEKLGPEGREEGISCHSVVLLEKK

SEQ ID NO: 153960 - protein, 285 aa, Unknown
  Bacterial polypetide isolated from the Sargasso Sea
RFDGDLPKQYVKINGRSIIENAVKPFIDSKYISKIVIAISDGDELIKNQNFYNCEKIEYIIGGLTRLESIFNALYSIEGNYEFVITHDAARPNVSENDIARLFEDIVHSKSSCSYLYTPVYDSIREDDRTLDKSKFNLVQTPQICNFKDLKKSIQSCIDNNVDCPDESFAIEYSNLKLSKILGNRSNIKVTEKADIEILNNFLTRSGIGYDLHKYESGDGIILGGYKITCNYKIVAHSDGDVLLHSIADSILGAAGLGDIGMFFSDQDNKNKNLDSTIIIEHCLN

SEQ ID NO: 153961 - protein, 152 aa, Unknown
  Bacterial polypetide isolated from the Sargasso Sea
MLSANLRIGHGYDVHQLVEERVLVICGVVIDYHKGSLGHSDGDVGIHAICDAILGALALGDLGTHFSSSDSKWSGQDSRTFLNHVLKLMNDEGYHINNIDCTIILQSPHLNIYIKSMRKIIAEICQININMVSIKATTTDKLGAIGRGEGIG

SEQ ID NO: 153962 - protein, 132 aa, Unknown
  Bacterial polypetide isolated from the Sargasso Sea
FHSGLQGHSDGDVILHAIIDAILGAIQKKDIGTYFPSDKNRFKNIRSPKMLKPIIENLYKNNFSINNLDINLICQKPKVSTYRNRIINSLSNLMNLERNKINLKGKTVEKLGLIGKEKAIACEVLISINKYD

SEQ ID NO: 153963 - protein, 161 aa, Unknown
  Bacterial polypetide isolated from the Sargasso Sea
MDLRVGNGYDIHRLVAGRPLILGGQHLEHPDGLGLDGHSDADVLVHALMDALLGALSLGDIGKYFPPTDPKWKGADSLVLLEQVMGLVRERGWSVVNVDTVVIAERPKLKPHIEAMRGAIAERMGLDSERVGVKATTNEKLGAEGREEGISSHAVALLCKP

SEQ ID NO: 153964 - protein, 279 aa, Unknown
  Bacterial polypetide isolated from the Sargasso Sea
KYKPTSVFIHDAARPNFSIKLLNTMIKNLRRYKAVVPIIKSKDSVKYSIKKQIFNLDRNNVLLTQTPQAFKFKELYKLAIKQKDKVNDEATLFINENYKIKLITGENQNNKITYLDDINTPKTFFGIGFDIHKLIKGKKLYLGGIKIPFHSGLKGHSDGDVILHAVIDAILGAIRKKDIGTHFPNTKKFNNIRSPKMLKPILDKLYKSNFSINNLDINLICEQPKVSKYRNKIINSISKLIQLDKNQINLKGKTVEKLGLIGKEKAIACEVIISITKND

SEQ ID NO: 153965 - protein, 68 aa, Unknown
  Bacterial polypetide isolated from the Sargasso Sea
MKLRIGHGFDVHAFGGPGPVTLGGVKIDYAQGLLAHSDGDVVLHALSDALLGAVALGDIGHHFPDTDD

SEQ ID NO: 153966 - protein, 230 aa, Unknown
  Bacterial polypetide isolated from the Sargasso Sea
DKDKFYLVQTPQICILKDLKASLKKCIDENISCPDESFAIEYAGLSSSKVLGSRSNIKITEPDDLKMLNNFLVRTGVGFDLHRYEAGTEIILGGHKIKCEYKILAHSDGDVLLHSIADSILGAAALGDIGIFFSDKDDKNKNLDSSDIIKYCLDQLERLKLEIFNIDTTIICEKPMISPHRDKILKNLSSLLHIPISNIGLKATTSEKLGIIGENKAIAVQSLVNLKEKI

SEQ ID NO: 153967 - protein, 160 aa, Unknown
  Bacterial polypetide isolated from the Sargasso Sea
MKEIKIGNGFDVHKLSSGKKIKLCGVEINHNKKLIGHSDADVGLHSLTDALFGALGKGDIGIWFPPSKKKWKNADSEIFLIKALKLMRKEKFLLSNIDLTFICEEPKIHYYRDKMIKYLSKVCYILPKNINIKATTSEKLGFTGRKEGIAVITTVLIYKI

SEQ ID NO: 153968 - protein, 164 aa, Unknown
  Bacterial polypetide isolated from the Sargasso Sea
MTARPFDIRLGNGYDVHRFTDGDHVILCGVTIPHERALLGHSDADVGMHAVTDAIYGALAMGDIGRHFPPSDPQWKGAASEMFLAHAGKLARENGFEISNIDCTLICERPKIGPHATAMQTELARILQVDAARISVKATTSERLGFTGREEGIASIATATLINQ

SEQ ID NO: 153969 - protein, 161 aa, Unknown
  Bacterial polypetide isolated from the Sargasso Sea
MDKTTFGIGFDIHKLIRKKKLFLGGVKIPFHSGLQGHSDGDVILHATIDAILGATKKKDIGTYFPSNKNKFKNIRSPKMLKPVIENLYKNNYSINNLDINLICQKPKVSKYRNKIVNSLSNLMNLDKKKINLKGKTVEKLGLIGKEKAIACEVIISITKYD

SEQ ID NO: 153970 - protein, 203 aa, Unknown
  Bacterial polypetide isolated from the Sargasso Sea
MEIITIDGDPLTLKITYEKDLNLLEPHLNKNYNNYITKIGNGFDIHRFDNSKISESNFIFLGGIKIKSSKQLIGHSDADVLLHAITDSILGVINKGDIGSIFPPTDDKWKNEDSSIFLKHASKLLQNEKGMINNIDAIIVCEKPKILDHSKKMKENIAKILNISEKKVSIKGKTSESIGFIGREEGIAAMVSTAIQIKDTDFQ

SEQ ID NO: 153971 - protein, 177 aa, Unknown
  Bacterial polypetide isolated from the Sargasso Sea
MSKEIKYITKVGNGFDIHRFDIKKRDKNNYIILGGIKILNLNPLIGHSDADVLLHAITDSILGIVNKGDIGKIFPSSDKKWKNADSSLFLSYASRVLKDAKGKINNIDAVIICEKPKVLDYSKKIQENIAKILNISPKRISVKGKTSESVGFIGRKEGIAAMACTSVEIVENIFDDQ

SEQ ID NO: 153972 - protein, 155 aa, Unknown
  Bacterial polypetide isolated from the Sargasso Sea
MIKSGIGYDAHQLGEGESLVIGGVKIESNVGSIGHSDGDVLIHAIIDAILGATASGDIGLLFPSDNIKYKNFHSGDFLKIVKKEILNKNHKILHIDSVVILQSPKLRTYIDQMRTNISNMLELKLNQVSIKATTTDFLGYIGRGEGLAAQSIVTI

SEQ ID NO: 153973 - protein, 275 aa, Unknown
  Bacterial polypetide isolated from the Sargasso Sea
MNNYFVILAAGKSKRFGKNFLKQFFKYENKEIIDHSVEKSLKSKLFKKIIIVSNNARYLKKKKYPKLVTIIKGGKERSDSSLSALKFIKKYNPKNVFIHDAARPNFSIGLLKNISKNLKKNKAVVPIVNSRDSIKYKVKNEVFNLNRKNSLLTQTPQAFNFKELYKLAIKEKSKINDEATLFLNQNYKIKFIPGENSNKKITYLDDIKSPKTFHGLGFDIHRLVKNKKLFLGGAKIPFHSGLKGHSDGDVILHAITDAILGALRRKDIGTYFPKY

SEQ ID NO: 153974 - protein, 300 aa, Unknown
  Bacterial polypetide isolated from the Sargasso Sea
INFPKNVIIINGGKERSDSSLKGLNYIKKYKPNNVLIHDAARPNFSIDLLKKLISSLKKNNASVPIINSKDSIKYKIKNQLFNLKRDNSFLTQTPQAFKFKDIYELSIKQNKKIQDEATLFIENNLNIKFIKGEITNDKITFKEDIKKTKTYFGIGFDIHRLIEKKKLYLGGTRIPFHSGLKGHSDGDVILHAIIDAILGAIRKKDIGSLFPDNKNKYKNIRSPNMLKPVLKILDKNNFYINNLDINLICEQPKVSKYREKIISSLSSLLRLDKDLINLKGKAVEKLGLIGKEKAIACEV

SEQ ID NO: 153975 - protein, 231 aa, Unknown
  Bacterial polypetide isolated from the Sargasso Sea
DRSNLYYSQTPQFFNFKKLSQLIIKYGDDNNYTDEIQLFEKENMKIGTIDGNLLNHKITFENDLVALDNLNYESNFTGIASDVHGLKKGEVLYLGGVKIPSSKGLLGHSDGDVVLHAICDAILGASSNGDLGKYYPSSNKKWKNAPSKLFLKNTLDLIKKENKQIKNIDVQIILQEPKLVKYLESIKENIGKLLNLNSENINVKVTSTDKLGLIGSGEGIGTLCAVNLIKL

SEQ ID NO: 153976 - protein, 139 aa, Unknown
  Bacterial polypetide isolated from the Sargasso Sea
YLGGIKIPFHSGLEGHSDGDVILHSIIDAILGAIRKKDIGTYFPNTKKFKNIRSPKMLKPIINNLNKYSFSVNNIDINLICEKPKVSKYRDKIINSISKLMDVNKNLINLKGKTVEKLGLIGSEKAIACEVIISITKYD

SEQ ID NO: 153977 - protein, 291 aa, Unknown
  Bacterial polypetide isolated from the Sargasso Sea
KQYIKINGRSIIENAVKPFIDSKYISKIVIAISYGDELIKSQNFYNCEKIEYIIGGLTRQESIFNALNSIEDNYEFVITHDAARPNFSENDIARLFEDIVHSKSSCSYLYTPVYDSIREDDRTLDKSKFNLVQTPQICNFKDLKKSIQSCIDNNVDCPDESFAIEYSNLKLSKILGDRSNIKVTEKADIEILNNFLTRSGIGYDLHKYEPGDGIILGGYKITCNYKIVAHSDGDVLLHSIADSILGAAGLGDIGMFFSDQDNKNKNLDSTLIIEHCLNELNKMDLEIYNID

SEQ ID NO: 153978 - protein, 124 aa, Unknown
  Bacterial polypetide isolated from the Sargasso Sea
HSDGDIILHAISDALLGAAGLRDIGYYFPDTDPKNKNLSSLKIIEQSLDLLKQSGLQPRNIDFVVVCEQPKIAPYVDDLKKSLSSILNIEESFIGVKATTTEKMGVIGNGNGIAVFAIASLRDL

SEQ ID NO: 153979 - protein, 335 aa, Unknown
  Bacterial polypetide isolated from the Sargasso Sea
DHSIEKSVNSKLFKKILVVTNNIKHLKKKQIHNSVKIIKGGKERSDSSLIALKYLKKYKPNNILIHDAARPDFTIKLLKQILNHLKKNIAVIPYINSKDTIKYKVKNELYNLNRQNTYLTQTPQAFKFKKLYELAINEKNKITDEATLFINKNRKIKFIKGENTNNKITFNSDVKLNKTFFGIGFDIHRLVKNKKLYLGGTKIPFHSGLKGHSDGDVILHSIIDAILGAMRNKDIGSFFPNTKKYKNIRSPKILKPVIESLFKSNFFINNLDINLICEQPKVSKYRDRIINSLSKLMMLNKDLINLKGKTVEKLGLIGKEKAIACEVIISITKYD

SEQ ID NO: 153980 - protein, 322 aa, Unknown
  Bacterial polypetide isolated from the Sargasso Sea
MSNCFILLAAGKGKRFKSKLAKQFINYKNKPLFMHSIDKALKSNLFKEIVIVTNNKIKLKNKKIKVIKGGKERYQSSQKALEYIKNKKLKNVFIHDAARPNFSINLLKNLKKHLIKNKAVVPYINTENSTKYANKNEIVNLKREKVLLTQTPQCFDFKTLYNLSKNNKVLVTDEATLFLNDNKKVKFIKGEQINIKITKKSDLDKSPIKNFYGIGFDIHRLIKNKKLYLGGIQIPFHSGLKGHSDGDVILHSIIDAILGAMRKKDIGSLYPSNKNKFKNMRSTKMLKPIISDLENNSFFINNLDINLICEKPKVSKIRNKII

SEQ ID NO: 153981 - protein, 135 aa, Unknown
  Bacterial polypetide isolated from the Sargasso Sea
MDHPDNLGLDGHSDADVLSHSIMDALLGALSLGDIGKYFPPSDEKWKNADSLFLLSKVIDLIRQDGWEINNIDSVLVAERPKIMPYIKIMKKNISEILNIEENLIGIKATTNERLGPEGREEGISCHSVVLLEKK

SEQ ID NO: 153982 - protein, 223 aa, Unknown
  Bacterial polypetide isolated from the Sargasso Sea
CSTPQISNFNDLKIALKKCIDENINCPDESFAIEYSDLTLSKVMGTRSNIKITEPEDVELLSKFLTRSGTGFDLHKYEAGDGIILGGYKIKCDYKTVAHSDGDVLLHSIADSILGAAALGDIGKFFPDNDENNRDLNSSNIIRYCLDKINELNLEIYNIDTTVICEKPKINPYREEILQKLSSLLMIPVSRIGLKATTSEKIGIIGENKAIAVQSLVNLREKL

SEQ ID NO: 153983 - protein, 378 aa, Unknown
  Bacterial polypetide isolated from the Sargasso Sea
MKENSILAIIAAAGIGKRFDDDLPKQYVKINGRSIIENAVKPFIDSKYISKIVIAISDGDELIKSQNFYNCEKIEYIIGGLTRQESIFNALNSIEDNYEFVITHDAARPNVSENDIARLIEDIVHSKSSCSYLYTPVYDSIREDDRTLDKSKFNLVQTPQICIFKDLKKSIQSCIDNNVDCPDESFAIEYSNLKLSKIMGDRSNIKVTEKADIEILNNFLTRSGIGYDLHKYEPGDGIILGGYKISCNYKIVAHSDGDVLLHSIADSILGAAGLGDIGMFFSDQDNKNKNLDSTLIIEYCLNELNKIDLEIYNIDTTIICENPKINPHREKILENLSAILKVPMDKIGLKATTSEKIGIIGNNEAISVQSIVNLKDLS

SEQ ID NO: 153984 - protein, 296 aa, Unknown
  Bacterial polypetide isolated from the Sargasso Sea
MKKNSLLTIIAAAGVGERFSCKAPKQYAQINGHSIIERALKPFIDSSYVSEIIIAISKDDNLIKNQDFYNSKKIKYVIGGATRQESINNALHAAEKEYEYVITHDAARPNITEDDITNLYKDITNSKTSCSFLYTPVYDSIKEIDSKEKTKDKSKFYLVQTPQISNFNDLKIALKKCIDENINCPDESFAIEYSDLSLSKVMGARSNIKITEPGDIELLSKFLTRSGTGFDLHKYEAGDGIILGGYKIKCDYKIVAHSDGDVLLHSIADSILGAAALGDIGKFFPDNDENNRDLDS

SEQ ID NO: 153985 - protein, 180 aa, Unknown
  Bacterial polypetide isolated from the Sargasso Sea
MGDRSNIKVTEKADIEILNNFLTRSGIGYDLHKYEPGDGIILGGYKITCNYKIVAHSDGDVLLHSIADSILGAAGLGDIGMFFSDQDNKNKNLDSTLIIEHCLNELNKMDLEIYNIDTTIICENPKINPHREKILKNLSSILKVPVKKIGLKATTSEKIGIIGNNEAISVQSIVNLKDIS

SEQ ID NO: 153986 - protein, 159 aa, Unknown
  Bacterial polypetide isolated from the Sargasso Sea
MNFRVGLGFDIHELIAGTMIKLAGVSIPSKKMIKAHSDGDIIYHSLADAILGALSKGDIGMHFPDSDLKNKNLDSGKILSHAYSLMINNKYIINNIDITLILEEPKIKKYKDNMCQNISSLLHCNSDLINIKATTSESIGFVGRGEGIACHTIVSIISD

SEQ ID NO: 153987 - protein, 231 aa, Unknown
  Bacterial polypetide isolated from the Sargasso Sea
LEYPQYTRPLTFKDMKVPDILVSGNHEEIKSWRRRKSLERTLERRSDLISSENYKKSPQSKRIIKENNQFMKFRIGNGYDIHRLVEDRDLIIGGVKLHHPENLGLDGHSDADVLSHSIMDAMLGALSLGDIGKYFPPSDEKWKNADSLFLLSKVIDLIRKDGWEINNIDSVLVAERPKIMPHIQLMKKNISEILDIDENLIGIKATTNEKLGPEGREEGISCHSVVLLEKQ

SEQ ID NO: 153988 - protein, 143 aa, Unknown
  Bacterial polypetide isolated from the Sargasso Sea
MYRIGLGYDVHQLTQGRKLILAGVEIPHELGLEGHSDADVLTHAVMDSLVGALALGDIGDHFPDTDSQYRGADSLVLLKKVWEMIQQRGYRVNNLDSVLIAQRPRLKPYLETMRTNLASCMDCEIELVSVKATTTEKLGFIGR

SEQ ID NO: 153989 - protein, 110 aa, Unknown
  Bacterial polypetide isolated from the Sargasso Sea
MYKVGIGYDAHRLEKGEKLILGGVQIKNEYGIIGHSDGDVLVHSIIDAILGAAAKGDLGKFFPSSDNQWKNYSSLKMLKIIFNNEIKDEFIINHIDSVSHSSKTKHIGLY

SEQ ID NO: 153990 - protein, 381 aa, Unknown
  Bacterial polypetide isolated from the Sargasso Sea
MKEDSIVAIIPAAGIGSRFDGDVPKQYFNVNGSSIIESAVLPFLNSIYVSKIIIPIAKNDKYINAQNFFNHEKISFVEGGKDRHDSVLNALEVIDESYEYVITHDAARPNISEKDIEDLYKIIIEKGSSCVYFYSPVYDSIKQLSNNDKTVDKNDFLLVQTPQISKLVDLKNSIKSCLKEGLHIPDESFAIEHCGFSSSKILGRRSNIKVTEKHDIDYLNKFLTRGGIGFDLHKYKQGKGITLGGVKIECDFEIVAHSDGDVLLHSIADSILGAAGLGDIGEHFPDTDIKNKGLDSKKIINFCLETIKNKNLEIYNIDNTIICEIPKINPHRKAILNSLSNILKIDSEKIGLKATTSEQIGIIGKNKAIAVQSFVNLRKRV

SEQ ID NO: 153991 - protein, 166 aa, Unknown
  Bacterial polypetide isolated from the Sargasso Sea
MGENYRIGQGIDVHKFADTIDKKKPLKLAGIQVSEEYSLIAHSDGDVVLHAICDAILGAASKGDIGYHFPDDDEDYFGINSSKLLAHVLALIHKDNFEIVNIDITVLAEVPRLSPFRKKMIDNLCGLLSLDSSRCNLKATTTEGLGYLGRKEGIACHCVVLLKQNG

SEQ ID NO: 153992 - protein, 259 aa, Unknown
  Bacterial polypetide isolated from the Sargasso Sea
EGYSGVVPTLPMSDSIIKKDKVLSSIKRKNLYRVQTPQIFSANVLSFKDFDKNNEATDESEMIIRKNKKVKIVKGNEKLHKITTEWDYKFLMNIFDTKINTRVGNGFDVHAFTKEPSKLILGGVIIDYPFGLKGHSDADVLLHSITDAILGSISMGDIGTHFPPNDSKWKNAKSSIFLTKSLKLLKEKNGEINNLDINIICEEPKISKYTKKIQKNLSKLLNIKEEKISLKATTTEGLGFTGRKEGIAVMSNILVNIKS

SEQ ID NO: 153993 - protein, 159 aa, Unknown
  Bacterial polypetide isolated from the Sargasso Sea
MYRIGLGYDVHQLTQGRKLILAGVEIPHELGLEGHSDADVLTHAVMDSLIGALALGDIGDHFPDTDSQYRGAESLVLLKKVWEMIQQRGYRVNNLDSVLIAQRPRLKPYLETMRTNLACCMDCEIELVSVKATTTEKLGFAGREEGIAAKSVVLLKKFE

SEQ ID NO: 153994 - protein, 71 aa, Unknown
  Bacterial polypetide isolated from the Sargasso Sea
MFRTGIGFDAHSLLEGRPLVIGGVRIPHSKGLLGHSDADVLVHAVMDAILGALALGDIGEHFPDTEDEYEG

SEQ ID NO: 153995 - protein, 68 aa, Unknown
  Bacterial polypetide isolated from the Sargasso Sea
MNPSAFPPIRIGQGYDVHAFGEGDHVMLGGVRVPHRCGVLAHSDGDVILHALCDAMLGALALGDIGQH

SEQ ID NO: 153996 - protein, 75 aa, Unknown
  Bacterial polypetide isolated from the Sargasso Sea
MDIRIGHGFDVHAFEEGNFVILGGVKISHTSKLSGHSDADVLLHAITDAIFGALAEGDIGTHFPPDDVTWKDAPS

SEQ ID NO: 153997 - protein, 118 aa, Unknown
  Bacterial polypetide isolated from the Sargasso Sea
LHAICDAILGAASKGDIGYHFPDDDKVYSGINSSKLLANVLALIHKDNFEIVNIDITVLAEVPRLSPLRKTMIDNLCGLLSLDSSRCNLKATTTEGLGYLGRKEGIACHCVVLLKKNG

SEQ ID NO: 153998 - protein, 90 aa, Unknown
  Bacterial polypetide isolated from the Sargasso Sea
QGADSIGLLSRVQKMIEKKGYCCENLDSIIIAEKPKLKTYLGDMRGNLASVLKINIDQLSIKATTTEHMGFTGREEGIAAQAIVLLKSNN

SEQ ID NO: 153999 - protein, 159 aa, Unknown
  Bacterial polypetide isolated from the Sargasso Sea
MYRIGLGYDVHQLTRGRKLILAGVEIPHELGLEGHSDADVLTHAVMDSLLGALALGDIGDHFPDTDSQYKGAESLMLLQKVWEMIQQRGYRVNNLDSVLIAQRPKLKPYLETMRTNLAIIMDCEIELVSVKATTTEKLGFAGREEGIAAKSVVLLKKFE

SEQ ID NO: 154000 - protein, 75 aa, Unknown
  Bacterial polypetide isolated from the Sargasso Sea
MRIGHGYDVHRFAEGDFITLGGVRIAHHHGLLAHSDGDVVLHALSDALLGAAALGDIGKHFPDTDPTFKGADSRV

SEQ ID NO: 154001 - protein, 159 aa, Unknown
  Bacterial polypetide isolated from the Sargasso Sea
MYRIGTGFDVHAFKPGKKLVLCGIEIPFDKSLAGHSDADVALHSLTDAILGALALGDIGLHFPDSDTRWNGADSVIFLSWSLERAKQMNLKLANIDLTIICEKPKINKYREQLILNLAKICSLEHNKINVKATTTERLGFTGREEGIASICSVLLYDFI

SEQ ID NO: 154002 - protein, 54 aa, Unknown
  Bacterial polypetide isolated from the Sargasso Sea
ISKYTKEIQKNLSKLLNIEEEKISLKATTTEGLGFTGRKEGIAVMSNILVNIKS

SEQ ID NO: 154003 - protein, 159 aa, Unknown
  Bacterial polypetide isolated from the Sargasso Sea
MFRTGIGFDVHALAEGLPLVIGGVNIPHSRGLHGHSDADVLVHAVMDAILGSLALGDIGEHFPDTEGEFKGADSLELLSRVQKIIEEKGYSCENLDSIIIAEKPKLKSYIGEMRENLASVLKINVDQLSIKATTTENIGFTGREEGIAAQAIVLLKSNN

SEQ ID NO: 154004 - protein, 54 aa, Unknown
  Bacterial polypetide isolated from the Sargasso Sea
KMAPHIEAMRAVIAADLQIELDQVNVKATTTEKLGFTGREEGIAVHSVALLLRA

SEQ ID NO: 154005 - protein, 302 aa, Unknown
  Bacterial polypetide isolated from the Sargasso Sea
MKGLEYLSSSGTTHVFIHDAARPNFLSTLPNNLIKAAKGHDGSIPIIEASNTIKQLKNEKLKTLDRSTIIESQTPQFFEFMAIYNSYRNLVELTNGVDHITDDAQVAELSGLKVNTFKDNKKNYKITTYDDLDRFKMDNENMSSSRVGIGFDVHRFGEGHNIRIFGIDIPFNKTLVGHSDADVGLHAITDAIYGSIGSDDIGSHFNPADKRWLGADSKIFLDHSLLKLEEFGGKILNIDLVVIAEEPNINAYKNVIKKELSALLKIDVSNIGLKATTTEKLGFTGRKEGIAVQTIVNISVKK

SEQ ID NO: 154006 - protein, 164 aa, Unknown
  Bacterial polypetide isolated from the Sargasso Sea
MDLTHMDFRIGQGYDVHALVPGRPLIIGGVTIPYERGLLGHSDADVLLHAITDAIFGAAAMGDIGRHFSDTDAKFAGADSRVLLRECFARVTAGGFSIANVDSSVVAQAPKLAPHIEAMRINIAADLNLPVERVNVKAKTNEKLGYLGRGEGIEAQAVVLLIKN

SEQ ID NO: 154007 - protein, 109 aa, Unknown
  Bacterial polypetide isolated from the Sargasso Sea
MPFRIGHGFDVHAFGGEGPITLGGVKIPYQQGLLAHSDGDVVLHAVSDALLGAMALGDIGHHFPDTDAAFKGIDSRILLRKVFADVKALGYEVGNLDVTIMAQAPKMAP

SEQ ID NO: 154008 - protein, 79 aa, Unknown
  Bacterial polypetide isolated from the Sargasso Sea
DELIEKYTEMGIKDMPVISPGFSVDCLETLEEIEIQYKELFLEKGGEKFTYIPCLNDSNEHISLIEDIIRSETKGWKNV

SEQ ID NO: 154009 - protein, 207 aa, Unknown
  Bacterial polypetide isolated from the Sargasso Sea
KSSLDAWFKEAQNQELIAKTKYTCCYPYDTKLIKAHQKLIQDKINHIKDKKIRVLFSAHSLPVSIIKKGDPYQWQVEQTVKAVIQGIHGYEDHVLAYQSKVTPVKWLEPTTPSEIENAINEDRALVIVPIAFVSDHSETLVELDIEYQELANELGCKHYYRSESLNIDQTFIESLSEIVSESEKVESGNIRQKICPATFKQCDQELR

SEQ ID NO: 154010 - protein, 134 aa, Unknown
  Bacterial polypetide isolated from the Sargasso Sea
MKSEHPKVKFGKTGILLVNLGTPNSTKWLDIRKYLKEFLSDRRVIEVNPIIWQIILNLFILNLRPSKTAEAYKKIWMKEENLSPLRYYTVMQAKKLSKRFVDPQIEVDYAMRYGDPSIKSKIGALHEKGCENLI

SEQ ID NO: 154011 - protein, 63 aa, Unknown
  Bacterial polypetide isolated from the Sargasso Sea
MLSDQHPKINYGKTGVLIVNLGTPDSTKWLDIRKYLKEFLSDKRVIEVNPIIWQSSFKSIHLT

SEQ ID NO: 154012 - protein, 109 aa, Unknown
  Bacterial polypetide isolated from the Sargasso Sea
MEKNHPKVNFGKTGILLINLGTPDSTNWFDIRKYLKEFLSDRRVIEVNPLIWKIILNTFILTFRPSKTAKAYKKIWMQKENMSPLRHYTIMQAKKLENKIGNENIIIDY

SEQ ID NO: 154013 - protein, 82 aa, Unknown
  Bacterial polypetide isolated from the Sargasso Sea
MVKYIGEKDYEHGSKEKIGVLITNLGTPDAPEKKELKIYLNQFLSDPRVIELPRILWQILLKLVILQIRPSRSAAAYKKVGP

SEQ ID NO: 154014 - protein, 141 aa, Unknown
  Bacterial polypetide isolated from the Sargasso Sea
MRSEHPKVNYGKTGVLIINLGTPDSTSWLDIRKYLKEFLSDRRVIEVNPLIWQVILNLFILTFRPSKTAKAYKEIWMKDKNMSPLRFFTESQAHKLSQKIGNEKLIVDFAMRYGNPSIKNKINDIHEKGCENLIVLPLYPQ

SEQ ID NO: 154015 - protein, 120 aa, Unknown
  Bacterial polypetide isolated from the Sargasso Sea
MIEDHPDIKFGKTGLLLVNLGTPDSTKWFDIRKYLKEFLSDKRVIEVNPILWQIILNLFILNFRPSKTAKAYKEIWMQKENMSPLRYYTIMQTKKLSEKMQKKNLIIDFAMRYGNPSIKK

SEQ ID NO: 154016 - protein, 181 aa, Unknown
  Bacterial polypetide isolated from the Sargasso Sea
MNENHPKVNYGKTGLLLINLGTPDSTGWWDIRKYLKEFLSDKRVIEVNPFLWQIILNLFILTFRPSKTAKAYKEIWMKDKNMSPLRYYTMMQTQKLSKKFNTENLIVDFAMRYGSPSINGKIKDLKEKGCENLIILPLYPQYASPTTATVCDEVFRSLMKLRWQPSLQIVSHYEANPLYID

SEQ ID NO: 154017 - protein, 151 aa, Unknown
  Bacterial polypetide isolated from the Sargasso Sea
MINNIEHPPVKFGKTGVLIINLGTPDSTSWFDIRKYLKEFLSDKRVIEVNPFVWQIILNVFILNLRPSKTAKAYKEIWMKNENMSPLLYYTKKQTEKLSSSISKENIIVDFAMRYGNPSIKSKIVKLHAEGCENLIILPLYPQYAAATTAT

SEQ ID NO: 154018 - protein, 199 aa, Unknown
  Bacterial polypetide isolated from the Sargasso Sea
KKNNLKVKTSTICCYPTNKNFIQAHKDEILKKINNLDNFKLIFSAHGLPEKNIKKGDPYQWQVEQSVNNIVKSLNIENLDWILSYQSRVGPLKWIGPSTEDIIVENSKLGKHIVLVPVAFVSEHSETLVELDIEYKELADKNGCKNYLRVPALGTNINYIQAMSNLIINKEEYNFNGEVFPPQIQCPNKFKKCPCLNYE

SEQ ID NO: 154019 - protein, 104 aa, Unknown
  Bacterial polypetide isolated from the Sargasso Sea
YGTSEQGESGVVLVPIGFISDHMEVLFDLDTEAADLCQTLGMKMARANTAGTDPEFVQMIRDLISERAFGLSEKTAIGCMPANHDVCPLDCCPAPVRPATSRPS

SEQ ID NO: 154020 - protein, 114 aa, Unknown
  Bacterial polypetide isolated from the Sargasso Sea
MNKDHPKVKFGKTGILIINLGTPDSTSWWDIRKYLKEFLSDRRVIEVNPIIWQIILNLFILTFRPSKTAHAYKQIWRKESNESPLLYFTKSQAAKLRNKVESEKTIVDYAMRYG

SEQ ID NO: 154021 - protein, 113 aa, Unknown
  Bacterial polypetide isolated from the Sargasso Sea
MEKHPEIKYGKTGVIIINLGTPDSTNWLDVRRYLKEFLSDRRVIEVNPIIWQVILNLFILNFRPSKSAKAYKEIWMKEENISPLLYYTKKQAEKLSKSFLSENLIIDFAMRYG

SEQ ID NO: 154022 - protein, 60 aa, Unknown
  Bacterial polypetide isolated from the Sargasso Sea
MSKLTILVNLGTPDQPFEKEVRTYLREFLSDKYVIRLPRIFWLTLLNLVILRTRPKKSAE

SEQ ID NO: 154023 - protein, 240 aa, Unknown
  Bacterial polypetide isolated from the Sargasso Sea
SQTEKVNKEIGNENLIIDYAMRYGNPSIKNKIVDLQGKGCEKIIILPLYPQYAAPTTATVCDEVYRTLMKLRWQPNLQIIPHYESEPLYIDAIVNSLNKKISQIDWKPEVIIASYHGVPKKYFEKGDPYHCYCHKTTRLISEKFDKIPLITTFQSRFGPEQWLQPYTDKTLESLPKEGKKNILIICPGFASDCVETLEEISIEGKKSFIEAGGKNFSMVPCLNDSSDHIELLKYLIKKSL

SEQ ID NO: 154024 - protein, 194 aa, Unknown
  Bacterial polypetide isolated from the Sargasso Sea
MDSNHPQINFGKTGVLLINLGTPGSTGWWDIRKYLNEFLSDRRVIEVNPFLWKIILNLFILTFRPSKTAKAYKEIWMKEENISPLRYYTIKQTEKVRSFIGNKNLIVDYAMRYGNPSIKSKMLDLQESGCENIIILPLYPQYAAATTATVCDEVYRSLMKMRWQPSLQIIPHYESEPLYIQAIVNSINHKLSNI

SEQ ID NO: 154025 - protein, 175 aa, Unknown
  Bacterial polypetide isolated from the Sargasso Sea
MKEDHPKINFGKTGVLLINLGTPDSTSWLDIRKYLKEFLSDKRVIEVNPLLWQVILNLFILNFRPSKTAKAYKEIWMKKENMSPLRYYTIMQTKKLLDRISNKDLIVDYAMRYGNPSIKSKIKKLHEVGCERLIILPLYPQYAAATTATVCDEVYRVLMNMRWQPSLNIIPHYES

SEQ ID NO: 154026 - protein, 155 aa, Unknown
  Bacterial polypetide isolated from the Sargasso Sea
AHGLPKKIIEEGDPYQSQVEETVSEVVAKLSRPELDWVICYQSRVGPLEWIGPSTEDELQKAGLDKKNVIVVPIAFVSDHSETLVELDIEYKELAASFGIDKFYRVPVTGTHPKFIEGLSKMIFNASEKTGKLFPEARKKSFFCGIDFKECQKFQ

SEQ ID NO: 154027 - protein, 164 aa, Unknown
  Bacterial polypetide isolated from the Sargasso Sea
IDQVKDKKVRVLFSAHSLPVSIIKKGDPYQWQVEQTVKAVMKGIQGYEDHILAYQSKVTPVKWLEPTTPSEIENAIHEDRALVIVPIAFVSDHSETLVELDIEYQELASELGCNHYYRSESLNIDQTFIESLSEIVGESEKVKSGNIRQKICPTTFKQCDQELR

SEQ ID NO: 154028 - protein, 64 aa, Unknown
  Bacterial polypetide isolated from the Sargasso Sea
MKIDHNHPPIKFGKTGVLIVNLGTPDSTNWLDIRKYLKEFLSDKRVIEVNPIIWQFVFNLFILT

SEQ ID NO: 154029 - protein, 97 aa, Unknown
  Bacterial polypetide isolated from the Sargasso Sea
YSDIEIKTTFQSRFGPQEWLQPYTDKTFETLPKEGIKNILVICPGFSSDCVETLEEISIQGKESFIKSGGENFEMVPCLNDSEDHISLLKHLVTKNL

SEQ ID NO: 154030 - protein, 49 aa, Unknown
  Bacterial polypetide isolated from the Sargasso Sea
MNIDHPNVNYGKTGILLVNLGTPNSTSWFDIRKYLKEFLSDRRVIEVNP

SEQ ID NO: 154031 - protein, 118 aa, Unknown
  Bacterial polypetide isolated from the Sargasso Sea
YQKECLHTAHLIANELKLTEDEYEIAFQSRFGKAEWIKPYLSSRLEELPKEGITNLHVFCPGFSSDCLETIDEIGRESKEDYFEHGGKEFTFIPCLNSDEQFIKALMDIQTVSDTKLL

SEQ ID NO: 154032 - protein, 235 aa, Unknown
  Bacterial polypetide isolated from the Sargasso Sea
VNKEIGNENLIIDYAMRYGNPSIKNKIVDLQGKGCEKIIILPLYPQYAAPTTATVCDEVYRTLMKLRWQPNLQIIPHYESEPLYIDAIVNSLNKKISQIDWKPEVIIASYHGVPKKYFEKGDPYHCYCHKTTRLISEKFDKIPIITTFQSRFGPEQWLQPYTDKTLESLPKEGKKNILIICPGFASDCVETLEEISIEGKESFMEAGGKNFSMVSCLNDSSDHIELLKYLIKKSL

SEQ ID NO: 154033 - protein, 193 aa, Unknown
  Bacterial polypetide isolated from the Sargasso Sea
LNIETSTICCYPEDDKFIKAHIELIRKKIKGISNFKLIFSAHGLPEKNIKKGDPYQWQVEQGVKKIIEGIDDSSIDFILSYQSRVGPLKWIGPSTEDVIVENSKMGKHLVIVPIAFVSEHSETLVELDIEYAKLAKKNGCQNYTRVEALGINENFIESLTDLILHKDKYKFKENLYAPKNRCPSNFIKCPCLN

SEQ ID NO: 154034 - protein, 60 aa, Unknown
  Bacterial polypetide isolated from the Sargasso Sea
MIEKNHPPIKYGKTGVLIINLGTPDSTNWFDIRKYLKEFLSDRRVIEVNPLVWQIILNLF

SEQ ID NO: 154035 - protein, 127 aa, Unknown
  Bacterial polypetide isolated from the Sargasso Sea
LNNDSWNICYQSRVGPLEWIGPSLDDELKRASEDKIGVIVLPIAFVSEHSETLVELDIEYRKLAEDLNVPYYGRVPAIGTHPNFIDGLKELIDKAILSESSVISGRGDPICLKDQKCYLRQESVKNV

SEQ ID NO: 154036 - protein, 59 aa, Unknown
  Bacterial polypetide isolated from the Sargasso Sea
MDKIGVLLMNLGGPERITDVGPFLYNLFSDPEIIRTPFPAFQKPLAWLISTLRSTTSQQ

SEQ ID NO: 154037 - protein, 171 aa, Unknown
  Bacterial polypetide isolated from the Sargasso Sea
IIKKIDNLKNFKLIFSAHGLPEKNIKKGDPYQWQVEQSVDKIVEALNIKELDWILSYQSRVGPLKWIGPSTEDIIVENSKLGKHIVLVPIAFVSEHSETLVELDIEYKELADKNGCKNYSRVPALGTNENYIKAMANLIINKNDYNFNGEIFPPKLQCPNQFKKCPCINYE

SEQ ID NO: 154038 - protein, 109 aa, Unknown
  Bacterial polypetide isolated from the Sargasso Sea
MENNHPKVNFGKTGVLIINLGTPDSTSWLDIRKYLKEFLSDRRVIEVNPIIWQIILNLFILTFRPSKTAKAYKKIWFKKENMSPLRFYTKSQSEKLSEAIKSDKILVDY

SEQ ID NO: 154039 - protein, 69 aa, Unknown
  Bacterial polypetide isolated from the Sargasso Sea
MDSNHPQVNFGKTGVLLINLGTPDSTGWWDIRKYLKEFLSDRRVIEVNPFLWKIILNLFILTFRPSKTA

SEQ ID NO: 154040 - protein, 53 aa, Unknown
  Bacterial polypetide isolated from the Sargasso Sea
MEIDNNHPPIKFGKTGVLIVNLGTPDSTNWFDIRKYLKEFLSDKRVIEVNPII

SEQ ID NO: 154041 - protein, 193 aa, Unknown
  Bacterial polypetide isolated from the Sargasso Sea
NYNTKTKIICCYPTEDYFIESHISLIKKTIEKVENNNFKLIFSAHGLPENKIKKGDPYQWQVEKTVKKIMSKIKNEKLDYILSYQSRVGPLKWIGPSTDEVIKKYSKEKKGIVIVPVAFVSEHSETLVELDIEYKQLAEKNGCSFYKRVPALGIEENFIKGLAHLVLKPKTKGNFVSSTTCPSKYKKCPCLKL

SEQ ID NO: 154042 - protein, 131 aa, Unknown
  Bacterial polypetide isolated from the Sargasso Sea
MERVAVVLYNLGGPDKPEAIQPFLFNLFNDPLILRLSPPIRWILAKIISSRRTPIAKEIYAKIGGGSPILEETRKQAWALQEELEKDGKFKVFVAMRYWRPFADECIDEVINFNPDSVILLPLYPQFSTTT

SEQ ID NO: 154043 - protein, 119 aa, Unknown
  Bacterial polypetide isolated from the Sargasso Sea
TCYKHQCLETTRLVTEKLNIEKDKYSNSFQSRLPNEPWLKPYTDSELERLAKSGKKKLVIITPAFVTDCLETLEEIEMEGKEEFLEAGGEEYTYVPCLNDDDNWAELISSWTKDYLKLN

SEQ ID NO: 154044 - protein, 203 aa, Unknown
  Bacterial polypetide isolated from the Sargasso Sea
MKYKKALLIINLGTPDNPSYFSVFKFLKEFLSDPRVIDIPRMFRILIVNLIICPFRSFSSSKVYSQMWKANNNESPIKTNTEKLIQKLQSKLPEYDVYSAMRYQNPSIKDTLSEILLTNPDEIIIFPSFPQYASSTTGSVYEEVFNILSKEWVIPKIKFINQFFNNDLFIDAWIEKISDFDISNYEKIIFSYHGLPDTQVDKV

SEQ ID NO: 154045 - protein, 129 aa, Unknown
  Bacterial polypetide isolated from the Sargasso Sea
MIEKNHPPIKFGKTGVLIINLGTPDSTNWFDIRKYLREFLSDRRVIEVNPLVWQIILNLFILNLRPSKTAKAYKEIWMKDENMSPLLYYTKKQSEKISNVLSKENIIIDFAMRYGNPSIKSKIHKLHKM

SEQ ID NO: 154046 - protein, 128 aa, Unknown
  Bacterial polypetide isolated from the Sargasso Sea
QKKYFDQGDPYHCLCQKTSRLVAEKLGIKEENFITTFQSRLGTAEWLKPYTSDVMKKLPSEGCSNILVIAPGFSVDCLETIEEIDEENKEYFLESGGKKFTYINCLNDSDQHIKFLNAFIEQKVSLWN

SEQ ID NO: 154047 - protein, 137 aa, Unknown
  Bacterial polypetide isolated from the Sargasso Sea
MNTEHPKVNYGKTGVLIINLGTPDSTSWLDIRKYLKEFLSDRRVIEVNPLIWQVILNLFILTFRPSKTAKAYKEIWIKDKNMSPLRFFTESQARKLSEKIGDEKLIVDFAMRYGNPSIKSKINKLHEKGCENLIILP

SEQ ID NO: 154048 - protein, 107 aa, Unknown
  Bacterial polypetide isolated from the Sargasso Sea
MDASQTAKIPEHANADHPAIPKAKTGVLLANLGTPDHYSYWPMRRYLSEFLSDRRVIDYSPWKWQPLLQLIILSKRPFASGEAYKSIWNEEKNESPLMTITRDQTAK

SEQ ID NO: 154049 - protein, 205 aa, Unknown
  Bacterial polypetide isolated from the Sargasso Sea
MQGILLINLGSPKDLEDLSIKEYLKEFLSDDLVIDYPKFIQKVLVNLLIVPNRYKKTKEAYSQIWTDTGSPLISQTIELGKRLSKRTSLCVEVAMRYQEPSIEDALIKFSKSNISKLKVVPLYPHYAMSTSKTTQREVRRVRDKLNLKIDLEFVDSFHNANGYIDALCEIIKNKMQPQSEFLLFSYHGIPNRHLKKTDPTKKHCL

SEQ ID NO: 154050 - protein, 84 aa, Unknown
  Bacterial polypetide isolated from the Sargasso Sea
MINNNHPPIKFGKTGVLIINLGTPDSTNWFDIRKYLKEFLSDRRVIEVNPLIWQPILNLFILNFRPSKTAKAYKEIWMKEETFL

SEQ ID NO: 154051 - protein, 290 aa, Unknown
  Bacterial polypetide isolated from the Sargasso Sea
MLEHVTSAKIGCLLMNIGTPSEPTVSGLRTYLKEFLSDPDVVDTNPILRWIIVNLLVVPFRPQKILPQYQSVWMDEGSPLLVYTQKFVKKITEKNTDIIFDIGMRYGTPSIEQGLKNLVEAKVEKVILCPMFPQYAQATSGSCIKRAIEVIEHEDINIPYEINSYFYDEDLLINCLAETIKNSTAYHESEFLLFSFHGLPERQIKKMDTSNNHCLVQENCCEIECEFNQLCYKRHCYETVQRVVDKADLKKPFDIAFQSRFGIDPWIKPNTTDIIEALPKKGIKNISVIC

SEQ ID NO: 154052 - protein, 131 aa, Unknown
  Bacterial polypetide isolated from the Sargasso Sea
MVKANQHQQKAKLRTTILLVNLGTPIKPSYFATFSFLREFLSDRRVININKLLWYPILYGFILPFRSYSSSKKYAQIVTEKGMPLAYLSEQLQEKVNREIQRQHQGVAVKLCMRYGKNSIEATLSSIKQIP

SEQ ID NO: 154053 - protein, 190 aa, Unknown
  Bacterial polypetide isolated from the Sargasso Sea
MKKKIGVVLFNLGGPDKLSAVKPFLFNLFNDPAIIGAPSFIRYFLAKLISSKREKTAKEIYSFIGGRSPILEETKEQKKQLENLLKTEKDDYKVFISMRYWKPFVNETVTKIMKWQPDEIILLPLYPQFSTTTSGSSLHSWKKEIDTKKFRVPTKIICCYPTEENFIKAHVNEIKKIINKAKKQNIINKK

SEQ ID NO: 154054 - protein, 217 aa, Unknown
  Bacterial polypetide isolated from the Sargasso Sea
MSKKGVLILNLGTPNSPSVKDVRLYLREFLNDPRVIDIGRIAQLLLVNLIIVPFRAPKSAKEYKKLFKIGRGKSPLLTYGYSLTEKLKKLAANDFNIELAMRYGSPSMENVLSKMKMENYDEIYIFPLYPQYASASSGSTIEKAFRIINKWWVIPEVSVIGQFYKNSNYINCIVNRSKKFNLSDYDHIIFSYHGIPERHVDKVYLDGLPCSDHSCEE

SEQ ID NO: 154055 - protein, 60 aa, Unknown
  Bacterial polypetide isolated from the Sargasso Sea
MTIIKKPINHPVFPDKNKIGVLLVNLGTPDGTDYWSMRRYLKQFLMDKRVVDLFKPLWWL

SEQ ID NO: 154056 - protein, 47 aa, Unknown
  Bacterial polypetide isolated from the Sargasso Sea
MQKDHPEVKFGKTGVLLINLGTPDSTSWWDIRKYLKEFLSDRRVIEV

SEQ ID NO: 154057 - protein, 180 aa, Unknown
  Bacterial polypetide isolated from the Sargasso Sea
MFDTSTPLETPQYAEEDHPKIPKQKIGILVANLGTPDNYDYWSMRRYLNEFLSDRRVIDYSPFLWQPLLQLLILTSRPFRSGAAYKSIWNEPEAESPLMTITKAQTAAIKKIMHEKYADNVAVDFCMRYGNPSTKSRVRSLVSMGCSKILFFPLYPHYAGATSATANDQFFRALMNEKWQ

SEQ ID NO: 154058 - protein, 130 aa, Unknown
  Bacterial polypetide isolated from the Sargasso Sea
MRYQFPSIEEGLVNLKKKGCSEIFVVPLYPHYAMSTVLTTEKEVKRIENDLELGLKLNFIKAFYSEREYISSLSNVISSNRQSESDFLLFSYHGIPNRHLLKTDPTQSHCLKVENCCDIESKAKPLCYKA

SEQ ID NO: 154059 - protein, 207 aa, Unknown
  Bacterial polypetide isolated from the Sargasso Sea
IKEWNDLCNKENYKVKTKTICCYPTENNFIESHANLIKKTLKTLDSKNFKLLFSAHGLPEIKIKKGDPYQWQVEQTVEEIMLKLTNENLDHIISYQSRVGPLKWIGPSTDDVIIKYSKEKKGIVIVPVAFVSEHSETLVELDIEYKKLAEKNGCSFYKRVPALGIEESFIKGLTELIFQKETRGNFVSSVMCPNKYVKCPCLELKIE

SEQ ID NO: 154060 - protein, 154 aa, Unknown
  Bacterial polypetide isolated from the Sargasso Sea
MKTKKGLLLINLGTPDDPGYLAVFKYLRQFLMDPKVITVPYILRFILVSLIIVPFRAFSSGRIYKKIWTENGSPLIVNTSALADKVSKKVPNIEVEFAMRYQSPSIEDKLKKLISQNLDEIIILPLFPQYSTATTGSVFDEISRVLKKQSVTPS

SEQ ID NO: 154061 - protein, 87 aa, Unknown
  Bacterial polypetide isolated from the Sargasso Sea
MNKDHPEVKFGKTGILLINLGTPDSTSWWDIRKYLKEFLSDRRVIEVNPFIWQIILNLFILTFRPSKTAHAYKQIWRKESNESPLLF

SEQ ID NO: 154062 - protein, 53 aa, Unknown
  Bacterial polypetide isolated from the Sargasso Sea
MNEEHPNVNYGRTGVLIINLGTPDSTSWWDIRKYLKEFLSDRRVIEVNPFIGK

SEQ ID NO: 154063 - protein, 74 aa, Unknown
  Bacterial polypetide isolated from the Sargasso Sea
MDKNHPEVNFGKSGVLIINLGTPDSTNWWDIRKYLKEFLSDRRVIEVNPIIWQVILHLFILTFRPSKTAHAYKK

SEQ ID NO: 154064 - protein, 173 aa, Unknown
  Bacterial polypetide isolated from the Sargasso Sea
WQPSLQIIPHYESEPLYIKALVKSIDEKISKLSWKPDLIIASYHGIPKKYFEKGDPYHCYCQKTSRLIKESFSSNIPIMTTFQSRFGPQEWLTPYTDKTFEKLPGEGKKNILVICPGFSSDCVETLEEISIQGKETFLEKGGKNFETVSCLNDNEDHINLLQHLINKFLIEKK

SEQ ID NO: 154065 - protein, 59 aa, Unknown
  Bacterial polypetide isolated from the Sargasso Sea
MDKNLEHPPIKFGKTGALIVNLGTPDSTSWFDIRKYLKEFLSDKRVIEVNPFIWQLILN

SEQ ID NO: 154066 - protein, 48 aa, Unknown
  Bacterial polypetide isolated from the Sargasso Sea
MEKHPEIKYGKTGVLIVNLGTPDSTDWLDVRRYLKEFLSDKRVIEVNP

SEQ ID NO: 154067 - protein, 99 aa, Unknown
  Bacterial polypetide isolated from the Sargasso Sea
MIEKNHPPIKFGKTGVLIINLGTPDSTSWLDIRKYLREFLSDRRVIEVNPVIWQIILNVFILNFRPSKTAKAYKEIWMKEENMSPLLYYTKKQSEKISN

SEQ ID NO: 154068 - protein, 205 aa, Unknown
  Bacterial polypetide isolated from the Sargasso Sea
MTKKVALVFFNLGGPDSLETVKPFLFNLFNDKAIIQLPQPFRYLLAKFISFKREHTAQEIYDYIDGQSPILQNTKKQVKDIETYLKTKSSNTFKTFIAMRYWHPMSPETALKVQDYNPDEIILVPLYPHWSTTTSESSVKDWDKACRRIGLKAPTKLICCYPTNDGFIKQNAEMIKKEYQKAQKFGEPRILFSAHGLPEKIIKQG

SEQ ID NO: 154069 - protein, 82 aa, Unknown
  Bacterial polypetide isolated from the Sargasso Sea
MNVIQSNIPKDHPRILKPKVGVIIGNLGTPDATDYWSMRRYLKEFLSDRRVIDYSPWVWKPILNLILLRRPFSSGEAYKEIW

SEQ ID NO: 154070 - protein, 186 aa, Unknown
  Bacterial polypetide isolated from the Sargasso Sea
MSKLTILVNLGTPDQPFEKEVRKYLREFLSDKYVIRLPRIFWLTLLNLVILRTRPKKSAELYRKVWSKWGSPLLFHTYAQTGHLRKLAISTKEDIHFDTAMRYGNPSIKNILYKSIDNGYSDITILPMFPQYSTTTTLSIFELIKSIIENDKNFFKNVNISAVNDFHDNDAYIESCAIKLELHNKV

SEQ ID NO: 154071 - protein, 178 aa, Unknown
  Bacterial polypetide isolated from the Sargasso Sea
KKVAPAVRVVEPYFEQPLYIEALAKSVEEAYATKKTKPEILVCSYHGVPKRYLMQGDPYHCQCQKTTRLLKERLGWRDTDIVTTFQSKFGPEEWLKPYTVEEVARLVEEEKKKSIAVIAPAFSSDCIETLEEINEEIKESFEEAGGEEFTYIPCLNDSKAHIDALSALIDKNLSGWIT

SEQ ID NO: 154072 - protein, 270 aa, Unknown
  Bacterial polypetide isolated from the Sargasso Sea
KKIWTENGSPLIVNTSALADKVSKKVPNIEVEFAMRYQSPSIEDKLKKLISQNLDEIIILPLFPQYSTATTGSVFDEISRVLKKQSVTPSIKFINQFYEQESFIDSWEERLQSFNVEEYDHILFSYHGLPTKAVDEIYEDSLCADNNCENEITNENKFCYKATCYETTRLIANRFNLSSDKYTVSFQSRLTKNWLEPFTDEVLESFPGKGIEKILVLSPAFTADNLETLYEIDDEYKELFLENGGKSLTMVPSLNDSSKWADSIVEIIDA

SEQ ID NO: 154073 - protein, 80 aa, Unknown
  Bacterial polypetide isolated from the Sargasso Sea
YTDETIIELAKQGSKNIVVIAPGFISDCLETLEELNVEARELFFENGGKTFQYIPCLNDNEYSIKFLNEIVKQNLLGWNN

SEQ ID NO: 154074 - protein, 293 aa, Unknown
  Bacterial polypetide isolated from the Sargasso Sea
PKDLEDESIKEYLKEFLSDDLVVDYPKQIQQILVNWIIVPNRYKKTQEAYSKIWTEEGSPLIQNTKELGLRLAKLSSLPIEVAMRYQEPSIEKAITSLKKKGCTTIRAIPLYPHFAISSTLTTQNKMIEEVRKIDKDIEIDFIEPFYKDPEYIDSLCSLIDENISKNSDFLLFSYHGIPIRHLRKASPEGKHNDNLCKNSDCPSRDYCYRFQVYETSRLCTEKLNIPKEKWKVSFQSRIGPGWLKPFTDKELNKLPKRGIKKLDVISPSFVIDNLETLEEINIEGRHNFLAAG

SEQ ID NO: 154075 - protein, 135 aa, Unknown
  Bacterial polypetide isolated from the Sargasso Sea
QVEQTVEGVMSKLTNENPDHIISYQSRVGPLKWIGPSTDEMIIKYSKEKKGIVIVPVAFVSEHSETLVELDIEYKKLAEKNGCSFYKRVPALGIEENFIKGLAELVLKQETRGNFVSSLMCPDKYKKCPCLASKS

SEQ ID NO: 154076 - protein, 101 aa, Unknown
  Bacterial polypetide isolated from the Sargasso Sea
MVKYIGEKDYKHGSKEKIGVLITNLGTPDAPNRKELKVYLNQFLSDPRVIELPKILWQILLKLVILQIRPSRSAEAYKQIWTENGSPLLDIANKQLNKIQS

SEQ ID NO: 154077 - protein, 92 aa, Unknown
  Bacterial polypetide isolated from the Sargasso Sea
MENHPKIKYGKTGVLIINLGTPDSTNWLDVRKYLKEFLSDRRVIEVNPIIWQVILNLFILNFRPSKSAKAYKEIWMKEENISPLLYYTKKQA

SEQ ID NO: 154078 - protein, 145 aa, Unknown
  Bacterial polypetide isolated from the Sargasso Sea
KISEISWKPDLIVASYHGIPKKYFEKGDPYQCYCQKTSRLLKESFNKDIPIKTTFQSRFGPQQWLQPYTDKTFESLPKDGVKNILVICPGFSSDCVETLEEILIQGKESFLKSGGKNFDLVPCLNDNDDHIALFRELINRYIPKK

SEQ ID NO: 154079 - protein, 164 aa, Unknown
  Bacterial polypetide isolated from the Sargasso Sea
INHIKDKKVRVLFSAHSLPVSIIKKGDPYQWQVEQTVKAVIQGIHGYEDHVLAYQSKVTPVKWLEPTTPSEIENAISEDRALVIVPIAFVSDHSETLVELDIEYQELASELGCKHYYRSESLNIDQTFIESLSEIVSESEKVESGNIRQKICPATFKQCDQELR

SEQ ID NO: 154080 - protein, 315 aa, Unknown
  Bacterial polypetide isolated from the Sargasso Sea
ILFNLGGPDKLDSVEPLLFNLFYDPAIINLPKLFRYPLAKIISKRRTPIAKKIYKELGGSSPILKLTRKQSDALEKKLNQNKNKDLYKCFVVMRCWHPRAENVISEIKLYNPDEVILMPLYPQFSASTSGSSINEWKDICMKYNYKVKTSTICCYPTDENFINAHIENIKNKIGKNINEKLIFSAHGLPEKNIKNGDPYQWQIEQTVKSIVKKMNITDLDYILSYQSRVGPLKWIGPSTDDIIIENSKLGKNIIIVPIAFVSEHSETLVELDIEYKKIAEENGCKSYSRVPAIGINENYIKGMSDLNFNKEIYKF

SEQ ID NO: 154081 - protein, 148 aa, Unknown
  Bacterial polypetide isolated from the Sargasso Sea
MKIKKGLLLINLGTPDDPGYLSVFKYLRQFLMDPKVITVPYFLRFILVSLIIVPFRAFSSGRIYKKIWSENGSPLIVNTSALAKKVSNKVPHMEVEFAMRYQSPSIEDKLKKLISQNLDEIIILPLFPQYSTATTGSVFDEISRVLKK

SEQ ID NO: 154082 - protein, 272 aa, Unknown
  Bacterial polypetide isolated from the Sargasso Sea
SEPTISGLRSYLKEFLSDPDVIDTNPLLRWIIVNLFVVPFRPQKVLPQYQSVWMDEGSPLLVYTKNFVKKITKINPDIIFDIGMRYGKPSIEQGLRNLQEAKVEKIVLCPMFPQYAQATSGSCIKKAIQIIEDQNINIPYEINSYFYDEDFIIDCLAETIEKSDVYQESEFLLFSFHGLPERQVKKMDISKSHCLIQDNCCEIECEFNKMCYKHHCYETVKNVMNKVSIKKPFDIAFQSRFGFDPWIKPNTTDIIEALPGKGIKNISVICPA

SEQ ID NO: 154083 - protein, 269 aa, Unknown
  Bacterial polypetide isolated from the Sargasso Sea
MIMKAILLVNLGSPKDLNLSSIKEYLMEFLTDDNVVDLPKIIQKILVKNIIVPFRSKKTQEAYSSIWKKDGSPLIINTNSLAKKLSEKTNYSVEIAMRYQYPTINEAIEKLINKGCKEIIAVPLYPHYAQSTILTTENKIKEISTSLEGDFKLSFIKPFYNQEGYINSLTSLIKENLPSEFDHLLFSYHGIPERHVRNTDPSKKHCLKVRDCCNIKADAHQFCYRHQVLETTKLCAERLNIEKEKWSISFQSRIGPGWLKPFTDKILDE

SEQ ID NO: 154084 - protein, 201 aa, Unknown
  Bacterial polypetide isolated from the Sargasso Sea
TSWFDIRKYLREFLSYRRVIEVNPIIWQIILNLFILTFRPSKTAKAYKEIWMKKENMSPLLYYTKQQSKKTSQLLYKENTVVDFAMRYGNPSIKSKIEKLHDVGCENLVILPLYPQYAAATTATVCDEVYRTLMKMRWQPSLKIIPHYESNPLYIDALVNSINKKINEINWKPDLIIASYHGIPKKYFDKGDPYHCYCHKT

SEQ ID NO: 154085 - protein, 253 aa, Unknown
  Bacterial polypetide isolated from the Sargasso Sea
MSKSLLLINLGTPDKPTYFSVFKYLRQFLMDGRVININPILRYILVNFIICPTRSFSSTKIYKEVWDSKTGSPLLHNTKELTKKIKSRLHEYDVHFAMRYQNPSIEKVIDDILKKNPDELIILPLFPHYAAATTGSVYEEVSRILSKRWVVPKIKFINQFYDNDKFIDAWIDKASKFQIDTYDKIIFSYHGIPNSHVDNVYPDSMCADHNCEMEVTQDNKFCYKATTYETTKILAKKLNIPEDKYIVTYQSRL

SEQ ID NO: 154086 - protein, 125 aa, Unknown
  Bacterial polypetide isolated from the Sargasso Sea
MKFPKKYFDKGDPYHCYCHKTTRLISENFSDIEIKTTFQSRFGPQEWLQPYTDKTFETLPKEGKKNILVICPGFSSDCVETLEEISIQGKESFIKSGGENFEVVPCLNDSEDHIFLLKHLVSKNL

SEQ ID NO: 154087 - protein, 219 aa, Unknown
  Bacterial polypetide isolated from the Sargasso Sea
MKGILLINLGSPKDLEFESIKDYLKEFLSDDLVIDYPKFLQQILVNWIIVPSRYKNTREAYSEIWTDQGSPLINSTLNLGEKIKSKAEVPVEVSMRYQYPSIEEGLVKLKNKGCSDIFVVPLYPHYAMSTTLTTENEVKRIASELNLGLNLKFIGAFYNKEEYIKSLSAVIAKNRQEDSDFLLFSYHGIPNRHLLKTDPTKKHCLKVESCCDVQSDATP

SEQ ID NO: 154088 - protein, 162 aa, Unknown
  Bacterial polypetide isolated from the Sargasso Sea
MTKYIGENNYEHGSVERTGILLTNLGTPDEPNSKAVKIYLAEFLSDTRVIEFPKLIWKVILHGIILRIRPKRSAKTYKTIWTDEGSPLLNIAKKQIELIKEKFEGKYPNTVFALGMRYGNPSIESALLELQSKKVRRLIIFPLYPQYCAATTASTFDAVTNV

SEQ ID NO: 154089 - protein, 182 aa, Unknown
  Bacterial polypetide isolated from the Sargasso Sea
AFDAIAREMMKWRYLPFLHFINTYHDNPDSFDAIAASIKQDFDAHGKPQKLVMSYHGMPERNLHLGDPYYCFCMKTTRLVAEKLGLNQDDYVATFQSRFGKAKWLQPYTDATIGSLPEKGITDIAVICPAFSADCLETLEEIKGENRHVFEDAGGKNFRYIECLNDNDDHINMMANLVKPYL

SEQ ID NO: 154090 - protein, 158 aa, Unknown
  Bacterial polypetide isolated from the Sargasso Sea
MTKYIGENNYEHGSVERTGILLTNLGTPDEPNSKAVKIYLAEFLSDTRVIEFPKFIWKIILHGIILRIRPKRSAKTYKTIWTDEGSPLLNIAKKQIELVKEKFEGKYHNTVFALGMRYGNPSIESALLELQSKKVRRLIIFPLYPQYCAATTASTFDA

SEQ ID NO: 154091 - protein, 124 aa, Unknown
  Bacterial polypetide isolated from the Sargasso Sea
MKYFGEKNYEHGSKDKTGVLITNLGTPDAPDAKSLKVYLNQFLSDPRVIEIPKFLWQIILKGIILQVRPRKSAANYKKIWTNNGSPLLDISNKQLSGIKKILSSKYPNIEFALGMRYGNPSIDN

SEQ ID NO: 154092 - protein, 177 aa, Unknown
  Bacterial polypetide isolated from the Sargasso Sea
KLIKAHQKLIQDKINHIKDKKVRVLFSAHSLPVSIIKKGDPYQWQVEQTVKAVIQGIHGYEDHVLAYQSKVTPVKWLEPTTPSEIENAISEDRALVIVPIAFVSDHSETLVELDIEYQELASELGCKHYYRSESLNIDQTFIESLSEIVSESEKIESGNIRQKICPATFKQCDQELR

SEQ ID NO: 154093 - protein, 109 aa, Unknown
  Bacterial polypetide isolated from the Sargasso Sea
MENSHPKVKFGKTGVLLINLGTPDSTGWWDIRKYLKEFLSDRRVIEVNPVVWKIILNLFILTFRPSKTSKAYKKIWMKEKNMSPLRYYTEMQTIKLSKKIGNKDVIVDY

SEQ ID NO: 154094 - protein, 233 aa, Unknown
  Bacterial polypetide isolated from the Sargasso Sea
MPEYEAILILSFGGPESKEDVIPFLKNVTAGKNIPLERLQEVAAQYDLFDGVSPINQQNRDFIRVLEEELRKHDLNQPIYFGNRNWEPFLQDTVKQIVDDGHRKVLTFVTSAFGSYSGCRQYQEDIDRAIQNIQVENLTIDKIRLFWNHPKFLSAVASRIETTMKDVPHANRPHTKLLFTAHSIPKAWEKTSPYTSQLLAISNEISQRVAPDLQWDLVYQSRSGPPAVPWLEP

SEQ ID NO: 154095 - protein, 112 aa, Unknown
  Bacterial polypetide isolated from the Sargasso Sea
MILKPTDHPKTHSKKNIGVLLVNLGTPENTETKSIRIYLKEFLSDRRVIDVPKILWWLILNLIILNTRPKKTAAAYKKIWLKNDPDGSPLRKITRLQSEKLQKKINKKKCNR

SEQ ID NO: 154096 - protein, 203 aa, Unknown
  Bacterial polypetide isolated from the Sargasso Sea
YEWNDLCKKENYKVKTKTICCYPTESNFVKSHANLIKKTIKNLDNKNFKLLFSAHGLPESKIKKGDPYQWQVEKTVESIMSELINENLDFLISYQSRVGPLKWIGPSTDEIIIKYSREKKGIVIVPVAFVSEHSETLVELDIEYKKLAEKNGCSFYKRVPALGIEENFIKGLTELVLQKEKKNNFVSSVTCPNKYVKCPCLEL

SEQ ID NO: 154097 - protein, 263 aa, Unknown
  Bacterial polypetide isolated from the Sargasso Sea
MKGILLINLGSPKDLEFESIKDYLKEFLSDDLVIDYPKFLQQILVNWIIVPSRYKKTREAYSEIWTDQGSPLINSTLHLGEKISSKAGVPVEVSMRYQYPSIEEGLLKLKNKGCSDIFVVPLYPHYAMSTTLTTENEVKRIASELNLDLNLRFIGTFYDKEEYIKSLSTVIAKNRQEESDFLLFSYHGIPNRHLLKTDPTKNHCLKVENCCDVQSDATPFCYKAQVLETSKLCVNNLNLKDHEWGVSFQSRIGPGWIEPFTDK

SEQ ID NO: 154098 - protein, 52 aa, Unknown
  Bacterial polypetide isolated from the Sargasso Sea
MDSNHPQVNFGKTGVLLINLGTPDSTGWWDIRKYLNEFLSDRRVIEVNPFFW

SEQ ID NO: 154099 - protein, 91 aa, Unknown
  Bacterial polypetide isolated from the Sargasso Sea
KIVPHMSRDPLYIKALVNSLNKKIKEINWKPDLILASYHGIPQKYFDKGDPYHCYCHKTTRLISEKFTSIEIKTTFQSRFGPEKWLQPLHR

SEQ ID NO: 154100 - protein, 332 aa, Unknown
  Bacterial polypetide isolated from the Sargasso Sea
MSKSLLLINLGTPDKPTYFSVFKYLRQFLMDGRVININPILRYILVNFIICPTRSFSSAKIYKEVWDSKTGSPLLHNTKELTKKIKSRLPEYDVHFAMRYQNPSIEKVIDDILKKNPDELIILPLFPHYAAATTGSVYEEVSRILSKRWVVPKIKFINQFYDNNKFIDAWIDKASKFQIDTYDKIIFSYHGIPNSHVDNVYPDSMCADHNCEMEVTQDNKFCYKATTYETTKILANKLNIPEDKYIVTYQSRLTNKWLSPFTDEVLESLPKDDKKNVLVFSPAFTADCLETIIEIGDEYKELFEESGGENLDYVESLNYSDLWADAIIDIIK

SEQ ID NO: 154101 - protein, 232 aa, Unknown
  Bacterial polypetide isolated from the Sargasso Sea
MKKALLLINLGTPDKPSYFSVFRYLRQFLMDGRVININPILRFFLVNFIICPTRSFSSTKIYKKVWDDNNGSPLLYNTAKLSKKVAKKLPEYDVHFAMRYQNPSIEIAIKKIMEKNPDEIVILPLFPHYASATTGSVYEEVSRILSKQWVVPKINFINQFYDNEKFIDAWIEKASKFNVQSYDKIIFSYHGIPNSHVDNVYQDSVCSDHNCEDSITEMNKFCYKATTYETTK

SEQ ID NO: 154102 - protein, 341 aa, Unknown
  Bacterial polypetide isolated from the Sargasso Sea
MKSKIGVLLLQLGTPDDPSVSSVRKYLKQFLNDPRVIDIPYLLRKILVNLIIVPFRAPKSAKIYKELWDYGNGVSPLIHHSEALQNELQNRFSNENVHVHLAMRYKNPSMPSVLNRMKNDGFDHIIILPLFPQYASASSGSAIEHAMQLISKWWVIPQLSVINQFYTNEGYLDSIIERAKVNDLSSFDHIVFSYHGLPERQVDKVYEADDLCGDQPCETEINDKNKLCYKATCYATTRLLADKLNLDNDHYTVAFQSRLDKKWLTPFSDEIVADLAKNGAKRILVFSPAFVADCLETIIEIGDEYQEIFEENGGEEVVLVESNNTHPLFIDGMEALIRSRF

SEQ ID NO: 154103 - protein, 332 aa, Unknown
  Bacterial polypetide isolated from the Sargasso Sea
MSKALLLVNLGTPDKPSYFSVYKYLRQFLMDGRVLDINPVLRYFLVNFIICPTRSYSSAKSYQEVWDDENGSPLLYNTEKLSEKIQKKLSNYDVYFAMRYQNPSIKNVLDKILEKNPDELIILPLFPHYAAATTGSVYEEISRLLSKKWVVPKVKFINQFYDNDKFLDAWVDKASKFDVNSYDKVIFSYHGVPISHVDNVYPNSLCKDNDCENKITNDNKFCYKATTYETTKLLASRLNIPEENYIVTYQSRLFGKWLTPFTDDVLKLSPKNGDSNILVFSPAFTADCLETIIEIGDEYKELFQKFGGENLDYVESLNYSDLWADAIIDIIK

SEQ ID NO: 154104 - protein, 173 aa, Unknown
  Bacterial polypetide isolated from the Sargasso Sea
MIDNNHPPIKFGKTGVLIINLGTPDSTSWFDIRKYLKEFLSDKRVIELNPIIWQLILNLFILNLRPSKTAKAYKEIWMKDQNMSPLLYYTKRQSEEISKSFSNKNVIIDFAMRYGNPSIKSKIFKLHEIGCENLVILPLYPQYAAATTATVCDEVYRTLMKMRWQPSLKIIPH

SEQ ID NO: 154105 - protein, 119 aa, Unknown
  Bacterial polypetide isolated from the Sargasso Sea
YRLYLSYQSRVGPLKWIGPSTEDVIVENSKIGKHLVIVPIAFVSEHSETLVELDIEYAKLAKKNGCENYTRVEALGINKNFIESLSDLILHKDNYKFKENLYAPKNRCPSNFTKCPCLN

SEQ ID NO: 154106 - protein, 177 aa, Unknown
  Bacterial polypetide isolated from the Sargasso Sea
MEILFIKDFHDNQLYIQSCKSKIEQFQEINGKPEKLVLSFHGIPESYIGHDEPYRDQCIHTSKLIAAALDIKEDKYEVAFQSRFGKSEWIKPYLANRLESLPSEGVRNIQVFCPGFVSDCLETIEEIGEESKELFIESGGDSFNHIPCLNDSELFIDMLKNLLENHQSLNTNYKTIL

SEQ ID NO: 154107 - protein, 56 aa, Unknown
  Bacterial polypetide isolated from the Sargasso Sea
MIEKNHPPIKFGNTGVLIINLGTPDSTNWFDIRKYLKEFLSDRRVIDVNPFFWQLF

SEQ ID NO: 154108 - protein, 77 aa, Unknown
  Bacterial polypetide isolated from the Sargasso Sea
TDDVIEDCVKDGIKKIAVISPGFSVDCLETLEEIEIQYKELFLELGGTDFAYIPCLNDSNDHISLIADLIDSETKGW

SEQ ID NO: 154109 - protein, 364 aa, Unknown
  Bacterial polypetide isolated from the Sargasso Sea
MVASKKNGYLILNTGTPDEPSIPALRRYLKEFLSDPDMLDYPSTRPEEFSKGFDKIKNRFASVLRWMIVNLIVVPFRPAKIQHKYKGIWTEEGSPLLVNTVKFTEKLKKFTNGNIEIGMRYGNPSIESAIKKLKDNGTEKLFLVSMFPQYAEATSGSTFTEIDRVLKAENYNPELVKVEHYYNEDFYLKSLAKSIIDSEEYKNSEYLLFSFHGLPVRHLTKSDISQSHCQKIENCCEKVSENNEFCYKSHCVKTIMKLADIIDPDKPFKVCYQSTFGPEQWIQPNIVDVLEDLAEKGIKNVSVACPSFTADCLETLEEIAVENHEDFEKNGGESVKLIPSLNDNDDWVKGFANYLHDKEFESTK

SEQ ID NO: 154110 - protein, 100 aa, Unknown
  Bacterial polypetide isolated from the Sargasso Sea
MKKALLLVNLGTPDKPTYFSVFRYLRQFLMDGRVININPFLRFILVNFIICPTRSFSSTKVYKEVWDENTGSPLLHNTKKLSEKLTSKLQEYDVYYAMRY

SEQ ID NO: 154111 - protein, 75 aa, Unknown
  Bacterial polypetide isolated from the Sargasso Sea
MKTGLLLINLGTPDSPSTADVRSYLREFLSDPRVIDLPFLGRWLLLNLIILPFRPRRSAKAYKSIWTGGRFSPKS

SEQ ID NO: 154112 - protein, 50 aa, Unknown
  Bacterial polypetide isolated from the Sargasso Sea
MDKNHPKVKFGKVGILLINLGTPDSTSWWDIRKYLKEFLSDRRVIEVNPI

SEQ ID NO: 154113 - protein, 337 aa, Unknown
  Bacterial polypetide isolated from the Sargasso Sea
MQKNILLINLGSPKTLQLKDVRAYLAEFLSDKFVIDLPKLLQQIIVRLIILPFRSPKTRKAYKAIWNSEGSPLIQNTNRIAQSLIKQTGWNVKVAMRYQEPSIKDSILSFKNKQLNDVIIIPLYPHNAMSTTHSTKVEVDRIIKKYYPDLRYSIIKPFFDHPKYINALSEQLKPHISGKMDKLIFSYHGLPERHIRKSDKSEIHCLQSSLCCEIDCDAAKHCYRSNTLNTSRLVAKELNLDEEQWMSSFQSRVTIIDRKWLKPFTDIELKDFPLKGIKNIVIICPSFVADCLETLEEIDLRARETFMKAGGKNFIYIPCLNNDKNFINLLQQLISEI

SEQ ID NO: 154114 - protein, 332 aa, Unknown
  Bacterial polypetide isolated from the Sargasso Sea
MKRALLIVNLGTPNKPTYFSVFKYLRQFLMDRRVININPILRFFLVNLIICPSRSFSSTKIYKKVWNKETGSPLLHNTKKLTQKIQSKLPEYTVEYAMRYQNPSIEKVLNKLLIQNPDEIIILPLFPHYAAATTGSVYEEVSRILSKKWVVPKIKFINQFYDNDKFIDAWVEKARKFNINSYDKIIFSYHGIPNSHVDNVYENSVCNDHDCESKITEDNKFCYKATTYETTKLIASRLNINPENYLVTYQSRLTNKWLSPFTDEVLQSMAKEGKKNVLVFSPSFTADCLETIIEIGDEYNELFISSGGQKLDYVESLNYSDLWSDAIISIIK

SEQ ID NO: 154115 - protein, 141 aa, Unknown
  Bacterial polypetide isolated from the Sargasso Sea
MSFLGEQNFEHESSEKIGVLLCNLGTPDSFQTSDVRKFLKEFLSDGRVVEIPKFVWWFILNGIILIFRPKKSAKLYESVWTKEGSPLMVYSEKLVNKLSKELPDNFEIKLAMRYRNPSIEESLISLKKKNCRNLIVLPLFP

SEQ ID NO: 154116 - protein, 129 aa, Unknown
  Bacterial polypetide isolated from the Sargasso Sea
MKDHPKVNYGKTGVLLVNLGTPDSTSWWDVRKYLKEFLSDKRVIEVNFFLWQIILNLFILTFRPSKTAKAYKEIWMKKENMSPLRYYTEMQTKKLKEKMKNEKIIIDHAMRYGNPSIKIQLKIFQKMDV

SEQ ID NO: 154117 - protein, 119 aa, Unknown
  Bacterial polypetide isolated from the Sargasso Sea
MRYINSPNYDHKQNDKIGILLTNLGTPDEPTPKALKRYLKQFLSDPRVVEVPRLLWWLILNCVILQFRPRRSAKAYATVFTEQGSPLLFNTQAQSDAIAAQLQQQGMQNVVVDFAMRYG

SEQ ID NO: 154118 - protein, 97 aa, Unknown
  Bacterial polypetide isolated from the Sargasso Sea
LTSIKIKTTFQSRFGPQEWLQPYTDKTLENLPKEGVKNVLTICPGFASDCVETLEEIQIQAKESFLNSGGENFDMVPCLNDNNDHIILLKSLIERNI

SEQ ID NO: 154119 - protein, 34 aa, Unknown
  Bacterial polypetide isolated from the Sargasso Sea
MKNRIIVVNLGTPDTTKWLDIRKYLKEFFLTEEL

SEQ ID NO: 154120 - protein, 208 aa, Unknown
  Bacterial polypetide isolated from the Sargasso Sea
ALNNLINQGCEEIRVLPLYPQFTGSSSLTSINKVKELKKELNSKSINYIYKESFYNDQNYIKYLTESISRKLPDNVDYLLFSFHGLPNRQDTQFEPSYSSQCKETSRLVAEKLGFSEKQWGVSFQSRLGPGWTKPFTDKVLSNLPNEGKKNLAVVSPAFYVDNLETLEELSIEGKKTFLDSGGEEFTYIDCLNDSDFGVKVIASLLEE

SEQ ID NO: 154121 - protein, 111 aa, Unknown
  Bacterial polypetide isolated from the Sargasso Sea
MFDTSTPLETPQYAEEDHPKIPKQKIGILVANLGTPDNYDYWSMRRYLNEFLSDRRVIDYSPFLWQPLLQLLILTSRPFRSGAAYKSIWNEAESESPLMTITKAQTAAIKK

SEQ ID NO: 154122 - protein, 133 aa, Unknown
  Bacterial polypetide isolated from the Sargasso Sea
MEKHPEIKHGKTGALIINLGTPDSTNWLDIRKYLKEFLSDRRVIEVNPIIWQVILNVFILNFRPSKTAKAYKEIWMKEENISPLLYYTKKQAEKLSKSISNENLIIDFAMRYGNPSIKSKIIKLHEEGCENII

SEQ ID NO: 154123 - protein, 170 aa, Unknown
  Bacterial polypetide isolated from the Sargasso Sea
MPKLISEKNFSHGTPSSVGILLINLGTPENTKTSSVRKYLRQFLSDPRVIEVPKLLWWFILNLFILPFRPSKSAEAYKEIWTEEGSPLLLYSEEITKKIQEAFDERNFDIDFHIELAMSYGQPSIKSSLNKLRKKNARRILLLPMYPQYSSTTTGSVFENVTKELSKQRW

SEQ ID NO: 154124 - protein, 79 aa, Unknown
  Bacterial polypetide isolated from the Sargasso Sea
MIEDHPKVQFGKTGVLIINLGTPDSTSWLDIRKYLKEFLSDRRVIEVNPILWQIILNLFILNLRPSKTAKAYKEIWMKD

SEQ ID NO: 154125 - protein, 206 aa, Unknown
  Bacterial polypetide isolated from the Sargasso Sea
MPIKTNAIPSGHPNVPTKKVGILLANLGTPDNYDYWSMRRYLSEFLSDRRVIDYSPWLWQPLLQLVILSIRPSRSGAAYKSIWNNEDDESPLMTITRNQTLKIKSIMEKQYGDKIKVDFCMRYGNPSTQSKVREMVQAGCSKILFFPLYPHYAGATSATANDQFFKALMKETWQPAVRVVEPYFEQPLYIEALAKSVEEAYAAKKT

SEQ ID NO: 154126 - protein, 54 aa, Unknown
  Bacterial polypetide isolated from the Sargasso Sea
MKKTLLIVNLGTPDKPNYFSVFKYLRQFLMDGRVINVNPIIRFFLVNLIIVPFR

SEQ ID NO: 154127 - protein, 77 aa, Unknown
  Bacterial polypetide isolated from the Sargasso Sea
MIEKNHPPIKYGNTGVLIINLGTPDSTNWFDIRKYLKEFLSDRRVIEVNPLVWKIILNLFILNFRPSKTAKAIKKFG

SEQ ID NO: 154128 - protein, 114 aa, Unknown
  Bacterial polypetide isolated from the Sargasso Sea
MVKYIGEKDYEHGSKERIGVLITNLGTPDAPNKKELKVYLNQFLSDPRVIELPKILWQILLKLVILQIRPSKSAEAYKQIWTDKGSPLLDIANRQLDKIQSSFSLKNENIVLKW

SEQ ID NO: 154129 - protein, 270 aa, Unknown
  Bacterial polypetide isolated from the Sargasso Sea
KKYGTENGSPLIVNTSALADKVSKKVPHIEVEFAMRYQSPSIEDKLKKLISQNLDEIIILPLFPQYSTATTGSVFDEISRVLKKQSVTPSIKFINQFYEQESFIDSWEDKLKSFDVDKYDHILFSYHGLPTKAVDDIYDDSLCADNNCENKITNENKFCYKATCYETTRLIASRFNLPSEKYTVSFQSRLTKNWIEPFTDELLEDFPSKGIKNILVLSPAFTADNLETLYEIDDEYKELFIENGGKSLTMVPSLNDSSKWADSIVKIIES

SEQ ID NO: 154130 - protein, 84 aa, Unknown
  Bacterial polypetide isolated from the Sargasso Sea
MKSDHPKVNYGKTGVLIINLGTPDSTSWLDIRKYLKEFLSDRRVIEVNPLIWQVILNLFILTFRPSKTAKAYKEIWMKDKNMSP

SEQ ID NO: 154131 - protein, 134 aa, Unknown
  Bacterial polypetide isolated from the Sargasso Sea
MGDKIKNENIIVDYAMRYGSPSIKDKIYSLQKKGCENLIVLPLYPQYAAATTATVCDEVYRCLTQMRWQPSLQIIPHYESEPLYIKALTKSLDKKISQLSWKPDIIVASYHGIPKKYFEKGDPYHCYCQKTTRL

SEQ ID NO: 154132 - protein, 172 aa, Unknown
  Bacterial polypetide isolated from the Sargasso Sea
YINAIANTIKPCLEKASFDKIVFSYHGIPKRQAKKTDETGVHCFSDSKCCEIAGDGSKDCYRSHTRIASDLTAKKLGLSDDQWEVAYQSRLGPGWLTPFTDKRLAELPEEGKKNIAVLCPSFISDCLETLEEIDIRGRKTFFDAGGKIMTYIPCLNDSEDTINLLENLVKSA

SEQ ID NO: 154133 - protein, 278 aa, Unknown
  Bacterial polypetide isolated from the Sargasso Sea
QLILNLFILTFRPSKTARAYKKIWMKKENISPLLYYTKKQSEKTSQLLQKENIILDFAMRYGNPSIKKKIHKLNEMGCENLVILPLYPQYAAATTATVCDEVYRTLMKMRWQPSLKIIPHYESNPLYIDALVNSINKKINKINWKPDLIIASYHGIPKKYFDKGDPYHCYCHKTTRLISEKFTSIKIKTTFQSRFGPQEWLQPYTDKTLENLPKEGIKNILTICPGFSSDCVETLEEILIQGKESFINAGGINFDMVPCLNDNDDHIILIKSLIEKNI

SEQ ID NO: 154134 - protein, 152 aa, Unknown
  Bacterial polypetide isolated from the Sargasso Sea
MKVAVILFNLGGPDKLDNVEPFLFNLFNDPAILNLPSFIRYPIAKLISKKRAPIAKDIYKEIGGSSPILKLTQDQAESLEKSLNSNEKAFNYKVFITMRCWHPRASETIKLVKDFNPSEIILLPLYPQYSAATSGSSILEWKEIAKKNNLNI

SEQ ID NO: 154135 - protein, 142 aa, Unknown
  Bacterial polypetide isolated from the Sargasso Sea
KSDISGNWCKNNKECCHELTNDNKYCYSAHCHETSKLIAKRLKLDGEKWSVSFQSRFGREEWVKPYTEKHLEELAQNGAKRVLVFCPSFVADCLETTEEIGMQAAENFQKYGGKELILVDSLNDHPEWIKSLTSIIRQQIPS

SEQ ID NO: 154136 - protein, 260 aa, Unknown
  Bacterial polypetide isolated from the Sargasso Sea
AYKEIWMKDENMSPLLYYTKKQSEKTSNSILKENIIIDFAMRYGNPSIKRKIYKLHEMGCENLIILPLYPQYAAATTATVCDEVYRTLMKMRWQPSLKIIPHYESDPLYIDALVNSINKKINEINWKPDLIIASYHGIPKKYFDKGDPYHCYCHKTTRLISEKFNSIKIKTTFQSRFGPQEWLQPYTDKTLENLPKEGIKNVLTICPGFSSDCVETLEEILIQGKESFISSGGENFDMVPCLNDNDDHILLLKSLIERNI

SEQ ID NO: 154137 - protein, 135 aa, Unknown
  Bacterial polypetide isolated from the Sargasso Sea
MRKDHPEVKYGKTGVLLVNLGTPDSTSWFDIRKYLKEFLSDRRVIEVNPILWQIILNLFILTFRPSKTARAYKEIWMKNENMSPLRYYTQMQTKKLAGKLNDHKIIIDYAMRYGNPSIKSKLNKLQGQGCENIVI

SEQ ID NO: 154138 - protein, 249 aa, Unknown
  Bacterial polypetide isolated from the Sargasso Sea
MVKYIGEKDYEHGSKERIGVLITNLGTPDAPNKKELKVYLNQFLSDPRVIELPKILWQILLKLVILQTRPSKSAEAYKQIWTDKGSPLLDIANRQLNKIQSSFSSKNENIVFEVGMRYGNPSILDALLKLQKKQVRRLLVLPMYPQYCAATTGSTFDEVTNVLQKWRWIPEMRFINQYFEEKNYIEALSNSIKSYWKKTPKPQKIIFSYHGIPKRYLTNGDPYHCFCLKTTRLVKEHMGLSNDEIITTF

SEQ ID NO: 154139 - protein, 222 aa, Unknown
  Bacterial polypetide isolated from the Sargasso Sea
MNTDHPEVKFGKTGVMIINLGTPDSTSWWDIRKYLKEFLSDRRVIEVNPIIWKLILNLFILTFRPSKTAHAYKKIWRKESNESPLLYFTKEQANKLNTKIGNDKIIVDFAMRYGNPSIKYKLNKLKEKGCENIIILPLYPQYAAATTATVCDEVYRSLMKMRWQPSLQIIPHYESEPSYIDSLIKSIEKKLNEINWKPDLIISSYHGIPKSYFDKGESLITC

SEQ ID NO: 154140 - protein, 224 aa, Unknown
  Bacterial polypetide isolated from the Sargasso Sea
MELDNNHPPIKFGKTGVLIVNLGTPDSTDWLDIRKYLKEFLSDKRVIEVNPIIWQFILNVFILTFRPSKTAKAYKEIWMKDENMSPLLYYTQKQSEKISSSISKENLLIDFAMRYGNPSIKSKIYRLQQQGCENLVILPLYPQYAAATTATVCDEVYRTLMQMRWQPSLKIIPHYESDSLYIDALVKSINKKINEINWKPDVIIASYHGIPKKYFDKGDPYHCY

SEQ ID NO: 154141 - protein, 196 aa, Unknown
  Bacterial polypetide isolated from the Sargasso Sea
MKSDHPKVKYGKTGVLIINLGTPDSTSWFDIRKYLKEFLSDRRVIEVNPIIWQIILNVFILNLRPSKTAEAYKKIWMEEENMSPLRYYTLNQSKKLKNKINDENIIIDYAMRYGNPSISSKMNKLQQDGCENVVILPLYPQYAAATTATVCDEVYRTLMKMRWQPSIQIIPHYESEPLYIEALVNSLNKKISEIKW

SEQ ID NO: 154142 - protein, 204 aa, Unknown
  Bacterial polypetide isolated from the Sargasso Sea
ILVLPLYPQAGSPTNTSTLDEISNVFSKWPWVPSLRFVNGYHDREDYIAALSKSIISSVSDTSTIEKLIISFHGMPFRYLKEGDPYYCFCHKTARLLANKLKLKSEQYSLAFQSRFGREEWLKPYIDEEIVKYAKNGTKKLHVISPGFSVDCLETLEEIKIQYNKLFKENGGEELAYIPCLNSSEEHLEIIKGILDENLNGWLT

SEQ ID NO: 154143 - protein, 152 aa, Unknown
  Bacterial polypetide isolated from the Sargasso Sea
MIEKNHPPIKYGNTGVLIINLGTPDSTSWLDIRKYLKEFLSDRRVIEVNPLLWQIILNLFILNFRPSKTAKAYKEIWMKDENISPLLYYTRKQSEKISNLLSKENVIVDFAMRYGNPSINSKIHKLHKMGCENLVILPLYPQYAAATTATVC

SEQ ID NO: 154144 - protein, 150 aa, Unknown
  Bacterial polypetide isolated from the Sargasso Sea
MNVAVVLFNLGGPDKLDNVEPFLFNLFNDPAILNLPSFIRYPLAKLISKRRTPTAKAIYKEMGGSSPIVKLTRDQASSLEQCLNMNEKDNNYKVFIAMRCWHPRASETMQLVKEFNPAEIILLPLYPQYSAATSGSSILEWKDIAKKNNL

SEQ ID NO: 154145 - protein, 114 aa, Unknown
  Bacterial polypetide isolated from the Sargasso Sea
MTPDHPKINYGKTGVLIVNLGTPDSTNWLDIRKYLKEFLSDRRVIEVNPVIWQIILNLFILTFRPSKTAKAYKEIWMEDKNMSPLRYFTESRAEKLSQHIGNEKLIVDFAVRYG

SEQ ID NO: 154146 - protein, 177 aa, Unknown
  Bacterial polypetide isolated from the Sargasso Sea
MEKNHPKVNFGKTGILLINLGTPDSTSWFDIRKYLKEFLSDRRVIEVNPLIWKVILNTFILTFRPSKTAKAYKKIWMQKENMSPLRHYTIMQAKKLENKIGNKNIIIDYAMRYGNPTIKDKIKYLQKNGCENLIVLPLYPQYAAATTATVCDEVYRCLTKMRWQPSLQIIPHYESEP

SEQ ID NO: 154147 - protein, 189 aa, Unknown
  Bacterial polypetide isolated from the Sargasso Sea
MLAATTATVCDEVYRTLMSMRWQPSLKIIPHYESDPLYIDALVNSINSKIENINWKPDLILASYHGIPKKYFDKGDPYHCYCHKTTRLISEKFKEIEIKTTFQSRFGPEEWLQPYTDKTLERLPKEGVKNVLAICPGFSSDCVETLEEILIQGKESFMESGGENFDMVSCLNDNDDHIKLLNNLIKRNI

SEQ ID NO: 154148 - protein, 211 aa, Unknown
  Bacterial polypetide isolated from the Sargasso Sea
MIPDHPKINYGKTGILIVNLGTPDSTSWLDIRKYLKEFLSDRRVIEVNPLIWQVILNLFILTFRPSKTARAYKEIWMNDKNMSPLRYFTERQAEKLSYQIGKEDLIVDFAMRYGNPSIKSRIHGLQKKGCENLIVLPLYPQYAAATTATVCDEVYRTLMKMRWQPNLKIIPHYESEPLYIEAIKNSILKKISEINWKPDLIIASYHGIQKN

SEQ ID NO: 154149 - protein, 224 aa, Unknown
  Bacterial polypetide isolated from the Sargasso Sea
VDFAMRYGNPSIKSKIHGLQNIGCENLIILPLYPQYAAATTATVCDEVYRTLMKMRWQPNLKIIPHYESEPLYIEALKNSILKKIDEINWKPDLIIASYHGIPKKYFEKGDPYHCYCHKTTRLISEKYSDIEIKTTFQSRFGPQEWLQPYTDKTFETLPREGKKNILVICPGFSSDCVETLEEICIQGKESFIKSGGENFEMVPCLNDNDDHIDLFKHLILNNT

SEQ ID NO: 154150 - protein, 159 aa, Unknown
  Bacterial polypetide isolated from the Sargasso Sea
MDKNHPKINFGKTGVLIINLGTPDSTSWWDIRKYLKEFLSDRRVIEVNPVIWQIILNLFILTFRPSKTAHAYKQIWRNESNESPLLYFTKNQTAKLNNLIGNEKIIVDFAMRYGNPSIKSKLNILRDRGCENIIVLPLYPQYAAATTATVCDEVYRSLR

SEQ ID NO: 154151 - protein, 104 aa, Unknown
  Bacterial polypetide isolated from the Sargasso Sea
SRLISEKFKEIKIITTFQSRFGPQEWLQPYTDKTIEKLPSEGNKNILVICPGFASDCVETLEEISIQGKESFINSGGNNFDLIPCLNDSEDHIKLLSYLINKHI

SEQ ID NO: 154152 - protein, 304 aa, Unknown
  Bacterial polypetide isolated from the Sargasso Sea
MLFESNTPEDHPKILKQKVGVIIGNLGTPDATDYWSMRRYLKEFLSDRRVIDYSPWVWKPILNLILLRRPFSSGEAYKEIWNTKENESPLLTTTKAQTKKLQAKFHKEYGDQVLLDFCMRYGNPSTESVLRKMVSQGCTKILFFPLYPQYAAPTTATANDQIFRSLMRLNWQPSIRTVPPYFDNPEFISSVSKSIETAYKKSKFKPQHLVISYHGVPERYLLNGDPYHCQCQKTSRLIREKLKWKKSELTTAFQSKFGPEKWVGPATVELVADLAKSGKDNIAIIAPSFSSDCVETLEEICGEI

SEQ ID NO: 154153 - protein, 213 aa, Unknown
  Bacterial polypetide isolated from the Sargasso Sea
MDKNFEHPPIKFGKTGVLIINLGTPDSTNWFDIRKYLKEFLSDKRVIEVNPIIWQVILNVFILNLRPSKTAKAYKEIWMKNENISPLLYYTQKQKDKISNSISSKNLIIDFAMRYGNPSIKSKIHKLHQQGCENLIILPLYPQYAAATTATVCDEVYRSLMNMRWQPSLKIIPHYESDPLYIDALVNSINKKINEINWKPDLILASYHGIPKK

SEQ ID NO: 154154 - protein, 158 aa, Unknown
  Bacterial polypetide isolated from the Sargasso Sea
MDKNFEHPPVKFGKTGVLIVNLGTPDSTSWLDIRKYLKEFLSDKRVIEVNPIIWQLILNIFILNLRPSKTAKAYKEIWMKNENISPLLYYTQKQKDKISNLISSESLIIDFAMRYGNPSIKSKIDKLHQQGCENLIILPLYPQYAAATTATVCDEVYR

SEQ ID NO: 154155 - protein, 84 aa, Unknown
  Bacterial polypetide isolated from the Sargasso Sea
MEKKIEHPPVNFGKTGVLIVNLGTPDSTSWFDIRKYLKEFLSDRRVIEVNPIIWQIILNVIILTFRPSKTAKAYKEIWMKDKNI

SEQ ID NO: 154156 - protein, 246 aa, Unknown
  Bacterial polypetide isolated from the Sargasso Sea
MEKNHPKVNYGKTGVLIINLGTPDSTSWLDIRKYLREFLSDRRVIEVNPIIWQVILNVFILNLRPSKTAEAYKKIWMKKENMSPLRYFTIMQAKKLSDKINKDSIIIDYAMRYGSPSIMQKMNSLKKSGCENIIILPLYPQYAAATTATVCDEVYRCLMKMRWQPSLQIIPHYESEPLYINALKNSLEKKISEINWHPDLIVASYHGIPKKYFDKGDPYHCYCQKTTRLLNERTENDIEIKTTFSR

SEQ ID NO: 154157 - protein, 211 aa, Unknown
  Bacterial polypetide isolated from the Sargasso Sea
MEKNHPKVNYGKTGILLINLGTPDSTSWLDIRKYLKEFLSDRRVIEVNPIIWQIILNTFILTFRPSKTAKAYKKIWMEKENMSPLRHYTIMQTKKLGSKIRNENIIVDYAMRYGNPSIKNKIEILQKKGCENLIILPLYPQYAAATTATVCDEVYRCLTKMRWQPSLQIIPHYESEPLYINAIVKSLEKKISQLNWKPDTIVASYHGIPKK

SEQ ID NO: 154158 - protein, 274 aa, Unknown
  Bacterial polypetide isolated from the Sargasso Sea
SSIWEKDGSPLIINTNSLAKKLSEKTNYSVEMAMRYQHPSIKHAIEKLINKGCNEIIAVPLYPHYAQSTILTTENKIKEISTSLGGNLKVSFIRPFYNEEGYIDALTSLIKESLPSDFDHLLFSYHGIPERHVKNTDPSKTHCLKVKDCCNIKADAHQFCYRHQVLETTKLCAKKLNIEKEKWSVSFQSRIGPGWLKPFTDKVLDELPKKNIKKLAVVCPAFVADNLETLEEINIRAREQFIHNGGIEFTYIPCLNDNNNWVDFLSNYIIQKGG

SEQ ID NO: 154159 - protein, 232 aa, Unknown
  Bacterial polypetide isolated from the Sargasso Sea
FNKIFVLPLYPHNAMSTTITTQVEVDRIAKEIIPDAELVYIKPFYKNQKYISAVADSVQKYLNKEKFDKLIFSYHGIPKRQAKKTDETGSHCFVSNECCEVEELGSADCYKAHTVQASIKIAKELGLNDTQWEIAYQSRIGPGWLTPFTDKRLEALPKEGKSSIGILCPSFISDCLETLEEIDIRGRKTFFDAGGERMTYIPCLNDSEDTINLIISIINDAESLKVKSLKIA

SEQ ID NO: 154160 - protein, 187 aa, Unknown
  Bacterial polypetide isolated from the Sargasso Sea
AATTATVCDEVYRTLMKMRWQPNLKIIPHYESEPLYIEAIKNSIKKKVNEIDWKPDLIIASYHGIPKKYFDKGDPYHCYCHKTTRLISEKYSDIEIKTTFQSRFGPQEWLQPYTDKTFEALPKEGKKNILVICPGFSSDCVETLEEISIQGKESFINSGGENFEMIPCLNDSEDHILLFKHLLTKNI

SEQ ID NO: 154161 - protein, 289 aa, Unknown
  Bacterial polypetide isolated from the Sargasso Sea
RRVIELNPFIWQIILNVFILNLRPSKTAKAYKEIWMKKENMSPLRYYTIMQTKKLLDRISSKDLIVDYAMRYGNPSIKSKISKLHNAGCEKLIVLPLYPQYAAATTATVCDEVFRTLMEMRWQPSLQIIPHYESEPLYIKALNNSLSKKISALSWRPDIIVASYHGIPQKYFNKGDPYHCYCHKTSRLLREQFKDIEIITTFQSRFGPEAWLKPYTDKTLERLPSEGKKNVLVICPGFSSDCVETLEEISIQGKESFLKSGGKNFDVVPCLNDGNDHINLLEKLTRDVL

SEQ ID NO: 154162 - protein, 182 aa, Unknown
  Bacterial polypetide isolated from the Sargasso Sea
MDKIGVLLMNLGGPERITDVGPFLYNLFSDPEIIRTPFPVFQKPLAWLISTLRSTTSQQAYLSIGGGSPIRRITEQQARELQSKLRDKGFNATTYIAMRYWHPFTESAIADMKADGIDQVVVIPLYPHFSISTSGSSFRELKKLRDSDDEFKKVPMRCVRSWFSQSGYLKSMVELISEQISL

SEQ ID NO: 154163 - protein, 281 aa, Unknown
  Bacterial polypetide isolated from the Sargasso Sea
ILNTRPRKSAKAYKKIWWKEGSPLIVLSKRLFNKVTKSLDIPVALAMRYGSISIKKGLDELNKKGVKNVLVLPLYPHYAMSSYETVVEKVKEEKETNFPSLNLDVIPPFYKNPQYIDILSAKIEESIKNVEYDHLLFSYHGIPVSHLKISDTTNSHCYKVNDCCNVDSLAHSTCYKHQCLETTKKVVEKLNIGEDKHSNSFQSRLPNEPWLKPYTDSELERLAKAGKKKLVIVTPAFVTDCLETLEEIAMEGKEEFLEAGGKEYTYVPCLNEDDNWAELIS

SEQ ID NO: 154164 - protein, 194 aa, Unknown
  Bacterial polypetide isolated from the Sargasso Sea
MNIAVVLFNLGGPDKLDNVEPFLFNLFNDPAILNLPSFIRYPLAKLISKRRTPIAKAIYKEMGGSSPIVKLTQDQATSLEQSLNKNEKGFNYRVFIAMRCWHPRASETVKSVKDFNPSEVILLPLYPQYSAATSGSSILEWKEIAKKNNLNTNTSTICCYPQDINFVKAHAELITKKIDGLKNFKLIFSAHGLP

SEQ ID NO: 154165 - protein, 231 aa, Unknown
  Bacterial polypetide isolated from the Sargasso Sea
MKVAVILFNLGGPDKLDNVEPFLFNLFNDPAILNLPSFIRYPIAKLISKKRAPIAKDIYKEIGGSSPILKLTQDQAESLEKSLNSNEKAFNYKVFITMRCWHPRASETIKLVKDFNPSEIILLPLYPQYSAATSGSSILEWKEIAKKNNLNIETNTICCYPEDDKFIKAHIELIKKKIKGIRNFKLIFSAHGLPEKNIKKGDPYQWQVEQGVKKIIEGIHDTSIDYILSYQ

SEQ ID NO: 154166 - protein, 250 aa, Unknown
  Bacterial polypetide isolated from the Sargasso Sea
ILFNLGGPDKLENVEPFLFNLFNDPAILSLPSFLRFPLAKLIANRRAPTAKKIYEELGGSSPILKLTKEQANALELKLNNEDDLSDYKCFIVMRCWHPRAENVVKEVIKYNPDEIILMPLYPQYSAATSGSSIKEWKDICIKNSFKVKTSTICCYPTDENFIEAHKNEILKKIKNLKNFKLIFSAHGLPEKNIKKGDPYQWQVEQSVNQIVKFLNFKDLDWILSYQSRVGPLKWIGPSTEDIIVENSKLG

SEQ ID NO: 154167 - protein, 252 aa, Unknown
  Bacterial polypetide isolated from the Sargasso Sea
MKTYRLFFIILKNKAEKISNAISKENIVLDFAMRYGNPSIKSKIHKLHEMGCENLVILPLYPQYAAATTATVCDEVYRTLMNMRWQPSLKIIPHYESDPLYIGALVNSINKTIEEINWKPDLIIASYHGIPKKYFDKGDPYHCYCHKTTRLISEKLSSIKIKTTFQSRFGPQEWLQPYTDKTLENLPKEGVKNVLTICPGFASDCVETLEEIQIQAKESFLKSGGEHFEMVPCLNDSDDHIILLKSLIERNI

SEQ ID NO: 154168 - protein, 225 aa, Unknown
  Bacterial polypetide isolated from the Sargasso Sea
GMRYGNPSIKNALKIFKEKTISKILVLPLYPQAGSPTTTSTFDAINAHIKDQSWVPNIRFISGYHDDENYINSLSVSIEKSFSKHGRPDKLIFSYHGMPERYLHEGDPYYCFCHKTTRLVAERLSLDSKFYDMAFQSRFGYEKWLQPYIDDMIPKAADDGVRHLQIISPGFSVDCLETLEEINIQYRELFLEQGGEKFEYIPCLNDGDDHIKMIQSIINNNIKGW

SEQ ID NO: 154169 - protein, 241 aa, Unknown
  Bacterial polypetide isolated from the Sargasso Sea
MNKDHPEVKFGKNGILLVNLGTPNSTGWWDIRKYLKEFLSDRRVIEVNPFIWQIILNLFILTFRPSKTAHAYKKIWRKESNESPLLYFTRNQANKLKNKIGNEKVIVDFAMRYGNPSIKSRLNILREEGCENIIILPLYPQYAAATTATVCDEVYRSLMRMRWQPSLQVIPHYEGEPQYINALITSIEKKIEEIKWKPDLIISSYHGIPKSYFDKGDPYHCYCHKTNRLMREKFNKVEIQT

SEQ ID NO: 154170 - protein, 251 aa, Unknown
  Bacterial polypetide isolated from the Sargasso Sea
VNRVLWSVILNLIILNVRPKISAKAYKEIWLETTDESPLRFHTRAQSETLSQRFKENGVPVEINWAMRYGTPAIADRLEEMRAKGCRKILLLALYPQYSATTTASAYDKAFQALQKMRWQPVIRTSPAYYNNKNYIRILAKSINEHIEILDWEPDVLLTSFHGLPKRYLDAGDPYHCECAQTSRLLAEEIGWTGDRVRLAFQSRFGREEWLKPYIQEVITELPSQGIKKIAIISPGFISDCVETLEEVAIG

SEQ ID NO: 154171 - protein, 112 aa, Unknown
  Bacterial polypetide isolated from the Sargasso Sea
MKSDHPKVNYGKTGVLIVNLGTPDSTNWLDIRKYLKEFLSDRRVIEVNPLIWQVILNLFILTFRPSKTAKAYKEIWMKDKNMSPLRFYTESQAHKLSERIGNEKLIVDFAMR

SEQ ID NO: 154172 - protein, 247 aa, Unknown
  Bacterial polypetide isolated from the Sargasso Sea
MDKNTSDTGILLINLGTPDSTNTSDVRKYLKEFLMDPYVVNAPSFIRALIVYGFILPTRPKKSAEAYSHIWTDEGSPLLVGSTKLCQALRAELKMTVELAMRYGNPSISEGLHRMKKNGIKHVLVVPLYPQYADSTVTTSIEKVRSELPSDISAEVLPTFFNSDHFIEPWANQIKKNLPAEWDHLLLSYHGIPEKHLKIADQTNSHCLATRDCCNMQSPAWRTCYRHQVFETSKRIAKALGIPDSKY

SEQ ID NO: 154173 - protein, 214 aa, Unknown
  Bacterial polypetide isolated from the Sargasso Sea
MEIDNNHPPVKFGKTGVLIVNLGTPDSTSWFDIRKYLKEFLSDKRVIEVNPIIWQIILNLFILTFRPSKTAKAYKEIWMKNENMSPLLYYTQKQSEKISKFIKKEDLIIDFAMRYGNPSIKSRINKLQEQGCENLVILPLYPQYAAATTATVCDEVYRTLMNMRWQPSLKIIPHYESNPLYIDALVKSINEKISDINWKPDLIIASYHGIPKKY

SEQ ID NO: 154174 - protein, 199 aa, Unknown
  Bacterial polypetide isolated from the Sargasso Sea
PLYPQYAAATTATVCDEVYRCLIKMRWQPSLQIIPHYESEPLYIKALVKSLDKKISQLSWKPDLIVASYHGIPKKYFEKGDPYHCYCQKTSRLIKESFSSDIPIMTTFQSRFGPQEWLTPYTDKTFEKLPQEGKKNLLVICPGFSSDCVETLEEISIQGKETFLEKGGKNFETVSCLNDNEDHINLLQHLINKFLIEKK

SEQ ID NO: 154175 - protein, 135 aa, Unknown
  Bacterial polypetide isolated from the Sargasso Sea
MIPDHPKVNYGKTGVLIVNLGTPDSTSWWDIRKYLREFLSDRRVIEINPFIWQLILNIFILNFRPSKTAKAYKKIWMKDKNMSPLRFYTEMQARKLSDRISNEKIIVNFAMRYGNPSIKSKINELQKNGCENLII

SEQ ID NO: 154176 - protein, 184 aa, Unknown
  Bacterial polypetide isolated from the Sargasso Sea
TVCDEVFRSLIDMRWQPSLQIIPHYESEPLYITALEKSLNNKISEINWKPDLIVASYHGIPKKYFDKGDPYHCYCQKTSRLLSEKFTKIPIQTTFQSRFGPQEWLKPYTDKTLESLPKEGKKNILVICPGFSSDCVETLEEISIQGRESFLSSGGKNFDVVPCLNDGKDHIDLLEHLAKRYMVK

SEQ ID NO: 154177 - protein, 266 aa, Unknown
  Bacterial polypetide isolated from the Sargasso Sea
RKSAKAYKKIWWKEGSPLIVLSKRLFDKVTKLVKFPVALAMRYGSISIFKGLKELDDKGVKNITVLPLYPHYAMSSYETVVEKVKDEVKTNFPHLKIKTVEPFYNDKKYIDLLCKKIKSTISKIEYDHILFSYHGIPISHLKISDPTNSHCYKVKDCCNNHSDAHKFCYKHQVLETTELVIKKLKIDKKKYSNAFQSRLPNEAWLKPYTDDELVRLAKDGKKKLVIVTPAFVTDCLETLEEIAMEGKEEFLEAGGESYHYVPCLND

SEQ ID NO: 154178 - protein, 159 aa, Unknown
  Bacterial polypetide isolated from the Sargasso Sea
MENHPKINFGKTGVLLINLGTPDSTNWLDIRKYLKEFLSDRRVIEINPILWKIILNTFILNFRPSKTAKAYKEIWMKDINMSPLLYYTLKQTEKVSKNMSDKNLVVDFAMRYGNPSIKSKIKALHDDGCENLIILPLYPQYAAATTATVCDEVYRTLMK

SEQ ID NO: 154179 - protein, 261 aa, Unknown
  Bacterial polypetide isolated from the Sargasso Sea
MEKSLNNNEKGFNYKVFITMRCWHPRASETVKIVKNFNPSEIILLPLYPQYSAATSGSSISEWKEIAKKNNLNINTSTICCYPEDDKFIKAHTELIRKKIEGINNFKLIFSAHGLPEKNIKNGDPYQWQVEQGVKKIMEGINDANIDYILSYQSRVGPLKWIGPSTEDVIVENSKRGKHLVVVPIAFVSEHSETLVELDIEYEKLARKNGCKNYTRIEALGVNENFIQSLSGLIINKDNYKFKDNLYPPKNRCPSSFTKCP

SEQ ID NO: 154180 - protein, 164 aa, Unknown
  Bacterial polypetide isolated from the Sargasso Sea
MKVAVILFNLGGPDKLENVEPFLFNLFNDPAILNLPSFIRYPLAKIISKRRAPVAKKIYQELGGSSPILKLTQDQASSLEKSLNNKQKSFNYKVFITMRCWHPRASETVRMVKDFNPSEIILLPLYPQYSAATSGSSILEWREIAKKNNFNINTSTICCYPEDT

SEQ ID NO: 154181 - protein, 183 aa, Unknown
  Bacterial polypetide isolated from the Sargasso Sea
MEKHPEVKHGKTGALIINLGTPDSTNWLDIRRYLKEFLSDRRVIEVNPIIWQVILNVFILNLRPSKTAKAYKEIWMKEENISPLLYYTKKQAEKISKSISNENLIIDFAMRYGNPSIKSKILKLNEEGCENIIVLPLYPQYAAATTATVCDEVYRTLMNMRWQPSLKIIPHYESDPLYVDALV

SEQ ID NO: 154182 - protein, 82 aa, Unknown
  Bacterial polypetide isolated from the Sargasso Sea
MPFLPEPLFQHGQPDRTAILLVNLGTPDGTSPREVGRYLRQFLSDPRVVEIPRAVWWFILHGLIVPLRSRASAHKYESIWLR

SEQ ID NO: 154183 - protein, 228 aa, Unknown
  Bacterial polypetide isolated from the Sargasso Sea
LKRVLSDRRVIEVNPILWKIILNLFILNLRPSKTAKAYKEIWMKDINMSPLRYYTLKQTEKLSKEIGNKNLLVDYAMRYGNPSIRSKIHSLKEDGCENLIVLPLYPQYAAATTATVCDEVYRTLMKMRWQPNLQIIPHYESEPLYIDALINSINKKINEINWKPEIIIASYHGIPKKYFDKGDPYHCYCHKTTRLMSEKFKEIPIKTTFQSRFGPQEWLQPYTDKTIS

SEQ ID NO: 154184 - protein, 102 aa, Unknown
  Bacterial polypetide isolated from the Sargasso Sea
AVWWFVFVGFLFTFRPRRSAGAFSPVWTEEGSPLMAITKAQASAIAERCKAQYGDDVIVDFAMRYGKPAIGDTIESMLEKGVRKLVVLPLYPQYSASTTGST

SEQ ID NO: 154185 - protein, 125 aa, Unknown
  Bacterial polypetide isolated from the Sargasso Sea
MKDHPKINFGKTGILLVNLGTPDSTSWLDIRKYLKEFLSDRRVIEVNPIIWQIILNLFILTFRPSKTAKAYKEIWMKNENISPLRYYTQNQASKLRAKISTKNIIVDFAMRYGNPSIKNVMTKMQ

SEQ ID NO: 154186 - protein, 266 aa, Unknown
  Bacterial polypetide isolated from the Sargasso Sea
KTAKAYKEIWMKNENMSPLRYFTISQADKLRKVLGTENILIDYAMRYGNPSINSKLVKLQEMGCERIIILPLYPQYAAATTATVCDEVYRCLMKMRWQPSLQIIPHYESEPLYINSLVKSIETKINQIKWKPDLIIASYHGIPKKYFDKGDPYQCYCQKTTRLMSEKFNRFPIITTFQSRFGPAEWLKPYTDKTFEDLPKQGKKNILVVCPGFASDCVETLEEISIQGKKTFIEMGGKNFDTVPCLNDSDDQISLFKKLIEQYIIK

SEQ ID NO: 154187 - protein, 208 aa, Unknown
  Bacterial polypetide isolated from the Sargasso Sea
MKKAVILFNLGGPDKLENVEPFLFNLFNDPAILNIPSFFRYPLAKLISNRRAPTAKKIYQELGGSSPILKLTQEQSSALETDLNQNDNLSEYKCFVVMRCWHPRADDVVKEVMKYGPDEIILMPLYPQYSAATSGSSIKEWNDVCFKNDFKIKTSTICCYPTDENFVQAHKDEIIKKIKNLKNFKLIFSAHGLPEKNIKKGDPYQWQV

SEQ ID NO: 154188 - protein, 227 aa, Unknown
  Bacterial polypetide isolated from the Sargasso Sea
NIIIDFAMRYGNPSIKSKIYKLHQIGCENLVILPLYPQYAAATTATVCDEVYRTLMKMRWQPSLKIIPHYESDSLYIDALVNSINKKINDIRWKPDLIIASYHGIPKKYFDKGDPYHCYCHKTTRLISEKFSSIKIKTTFQSRFGPQQWLQPYTDKTLESLPKEGVKNVLTICPGFASDCVETLEEIQIQAKESFLNSGGENFDMVPCLNDNNDHIILLKSLIERNI

SEQ ID NO: 154189 - protein, 217 aa, Unknown
  Bacterial polypetide isolated from the Sargasso Sea
GNPSIKSRLEILKEQGCENIIVLPLYPQYAAATTATVCDEVYRSLMGMRWQPSLQIIPHYESEPLYIDALITSIERKIKEISWKPDLIISSYHGIPKSYFDKGDPYHCYCHKTTRLMKEKFNNVEIQTTFQSRFGPQEWLTPYTDKTLEDLPKKGTKNLLVICPGFASDCVETLEEINIQGKESFLKNGGENFDLIPCLNDSLDHIKLLEKLVTKYL

SEQ ID NO: 154190 - protein, 240 aa, Unknown
  Bacterial polypetide isolated from the Sargasso Sea
KQSEKISKLITNENLIIDFAMRYGTPSINSKIYKLQESGCENLVILPLYPQYAAATTATVCDEVYRTLMNMRWQPSLKIIPHYESDPLYIDALVKSINKKISAINWKPDLIIASYHGIPKKYFDKGDPYHCYCHKTTRLISEKFNSIEIKTTFQSRFGPQAWLQPYTDKTLESLPGEGKKNILTICPGFSSDCVETLEEILIQGKDSFLKSGGENFDMVPCLNDNDDHILLLKSLIEKNI

SEQ ID NO: 154191 - protein, 261 aa, Unknown
  Bacterial polypetide isolated from the Sargasso Sea
LIINLETPDSTSWLDIRKYLKEFLSDRRVIEVNPIIWQFILNVFILTFRPSKTAKAYKEIWMKDKNISPLLYYTQKQAEKLSSTISEKNLIIDYAMRYGNPSIRSKIATLHEMGCENLIILPLYPQYAAATTATVCDEVYRTLMKMRWQPSLKIVPHYESDPLYIEALVNSLNKKIKEINWKPDLILASYHGIPQKYFDKGDPYHCYCHKTTRLISEKFTSVEIKTTFQSRFGPEKWLQPYTDKTLEGLPKEGKKNILAIC

SEQ ID NO: 154192 - protein, 100 aa, Unknown
  Bacterial polypetide isolated from the Sargasso Sea
MTIGHPKVNYGKTGVLIVNLGTPDSTSWLDIRRYLKEFLSDRRVIEVNPFIWQVILNLFILTFRPSKTAKAYKEIWMKDKNMSPLRFFTESQAHKLSEKM

SEQ ID NO: 154193 - protein, 58 aa, Unknown
  Bacterial polypetide isolated from the Sargasso Sea
MSRVGIVLLNLGGPERIQDVGPFLYNLFADPEIIRLPIPALQKPLAWLISTLRSNKSQ

SEQ ID NO: 154194 - protein, 221 aa, Unknown
  Bacterial polypetide isolated from the Sargasso Sea
YGNPGIMNKMNYLQKSGCENIIILPLYPQYAAATTATVCDEVYRSLMKMRWQPSLQIIPHYESEPLYINALKKSLEKKVSEINWKPDLIIASYHGIPKKYFDKGDPYHCYCQKTTRLLKESFQNKIPILTTFQSRFGPQQWLQPYTDKTLEKVPQEGKKNILVICPGFSSDCVETLEEIAIQGKESFLKNGGKKFDIVPCLNDSAEHIELLYNLVKKYLIK

SEQ ID NO: 154195 - protein, 226 aa, Unknown
  Bacterial polypetide isolated from the Sargasso Sea
IIIDFAMRYGNPSTKSKIHKLHEMGCENLVILPLYPQYAAATTATVCDEVYRTLMKMRWQPSLKIIPHYESDPLYIDALVNSINKKLNEINWKPDLIIASYHGLPKKYFDKGDPYHCYCHKTTRLISEKFSSIKIKTTFQSRFGPQEWLQPYTDKTLENLPKEGVKNVLTICPGFSSDCVETLEEILIQGKESFISAGGENFDMVPCLNDNDDHILLLKSLIERNI

SEQ ID NO: 154196 - protein, 215 aa, Unknown
  Bacterial polypetide isolated from the Sargasso Sea
MENKQEHPPVKFGKTGVLIVNLGTPDSTRWFDIRKYLKEFLSDRRVIEINPIIWQFILNVFILTFRPSKTAKAYKEIWMKDKNISPLLHYTQKQAEKLSNQMSETNLLVDYAMRYGNPSIRSKIANLHKMGCENLIILPLYPQYAAATTATVCDEVYRTLMKMRWQPSLKIVPHYESDPLYIEALVNSLNKKIKEINWKPDLILASYHGDPPKIF

SEQ ID NO: 154197 - protein, 272 aa, Unknown
  Bacterial polypetide isolated from the Sargasso Sea
IVWQIILNLFILTFRPSKTAKAYKEIWMKDKNMSPLLYYTKKQMEKTSNYLKNENLIIDFAMRYGNPSIKSKIKKLHSQGCENLVILPLYPQYAAATTATVCDEVYRTLMNMRWQPSLRIIPHYESNPLYIEALVKSINKKISEIDWKPDLILASYHGIPKKYFDKGDPYHCYCHKTTRLINEKLNSIEIKTTFQSRFGPQEWLQPYTDKTLEELPKDGKRNVLAICPGFSSDCVETLEEILIQGKESFMESGGENFDMVPCLNDNDDHIFL

SEQ ID NO: 154198 - protein, 147 aa, Unknown
  Bacterial polypetide isolated from the Sargasso Sea
MKKIAIILFNLGGPDSPEAVQPFLFNLFNDKAIIGAPQPIRWLIAKLISTRRAPIAQEIYKELGGKSPLLENTEAQAKALEETLRTAHPDKSFKCFISMRYWHPMAAETAAGVRDWNADEVVMLPLYPQFSTTTTGSSVENWQKALV

SEQ ID NO: 154199 - protein, 46 aa, Unknown
  Bacterial polypetide isolated from the Sargasso Sea
MNEHPKIKFGKTGVLIVNLGTPDSTKWSDIRRYLKEFLSDRRVIEV

SEQ ID NO: 154200 - protein, 193 aa, Unknown
  Bacterial polypetide isolated from the Sargasso Sea
MEKIGVLLMNLGGPERITDVGPFLYNLFSDPEIIRTPFPAFQKPLAWLISTLRSTTSQQAYLSIGGGSPIRRITEQQARELQSKLRERGLNATTYIAMRYWHPFTESAIADMKADGINQIVVLPLYPHFSISTSGSSFRELKKLRDSDPDFKKIPMRCIRSWFSQSGYLKSMVELISEQISLCDSSTNAHIFF

SEQ ID NO: 154201 - protein, 210 aa, Unknown
  Bacterial polypetide isolated from the Sargasso Sea
MNKEHPKINFGKTGVLLINLGTPDSTRWLDIRRYLKEFLSDKRVIEVNPFLWQIILNLFILNFRPSKTAKAYKEIWMKKENMSPLRYYTIMQTKKLLDKISNSTLIVDYAMRYGNPSIKSKIQKLQEAGCERLIVVPLYPQYAAATTATVCDEVYRVLMGMRWQPSLNIIPHYESEPLYIKALSNSLKSKIAKLDWNPDLIIASYHGIPQ

SEQ ID NO: 154202 - protein, 203 aa, Unknown
  Bacterial polypetide isolated from the Sargasso Sea
MIEEHPKVQFGKTGVLIVNLGTPDSTSWFDIRKYLKEFLSDRRVIEVNPILWQIILNLFILNLRPSKTAKAYKEIWMKDENMSPLRYYTLKQADKLTKEIGNKNLLVDYAMRYGNPSIKSKIHSLKENGCENLIVLPLYPQYAAATTATVCDEVYRTLMKMRWQPNLQIIPHYESEPLYIDALINSLRKKINEISWKPDLVIA

SEQ ID NO: 154203 - protein, 281 aa, Unknown
  Bacterial polypetide isolated from the Sargasso Sea
YKEIGNKSPILELTQEQANSLENNLKKKGDYKCFVAMRCWHPRSSIVIKKVREYNPEEIILLPLYPQYSASTSGSSINEWKDLCKKENYQIKTKTICCYPTENNFIESHVTLIKKTFKTLENNNFKLIFSAHGLPENKIKKGDPYQWQIEETVNRIMSQLSNENLDYIISYQSRVGPLKWIGPSTDDVIIKYAKEKKGIVIVPVAFVSEHSETLVELDIEYRKLAEKNGCSFYKRVPALGIEENFIKGLTELVLQKETRGNFVSSVMCPNKYVKCACLEIK

SEQ ID NO: 154204 - protein, 82 aa, Unknown
  Bacterial polypetide isolated from the Sargasso Sea
MKNDQEHPSVKFGKTGVLIVNLGTPDSTSWFDIRKYLKEFLSDRRVIEVNPIVWQIILNVFILTFRPSKTAKAYKEIWMKDK

SEQ ID NO: 154205 - protein, 284 aa, Unknown
  Bacterial polypetide isolated from the Sargasso Sea
PDSTNWWDIRKYLKEFLSDRRVIEVNPIIWQIILNLFILTFRPSKTAHAYKKIWRKESNESPLLYFTKNQASDLNNKIGNEKTCVDFAMRYGNPSIKSKLNKLKDVGCENIVILPLYPQYAAATTATVCDEVYRSLMKMRWQPSLQIVPHYESEPLYIDAIVNSIEKKVREISWKPDLIISSYHGIPKSYFDKGDPYHCYCHKTTRLIKEKFKSIEIQTTFQSRFGPQEWLTPYTDKTIESLPSKGIKNLLVVCPGFASDCVETLEEINIQGRESFLEKGGVKF

SEQ ID NO: 154206 - protein, 287 aa, Unknown
  Bacterial polypetide isolated from the Sargasso Sea
VIEVNPIIWQVFLNLFILTFRPSKTAKAYKEIWMKEKNMSPLRYYTEMQTMKLSKIINNENIIVDYAMRYGNPSINSRIRVLHEKGCENLMVLPLYPQYAAATTATVCDEVYRTLMKMRWQPNLKIVPHYESEPLYISALKNSLENKISNIDWKPDLIVASYHGIPKKYFEKGDPYHCYCHKTTRLISESFNKIPIQTTFQSRFGPQEWLQPYTDKTLENLPKEGKKNVLVVCPGFSSDCVETLEEISIQGKESFLKSGGNNFDLVPCLNDNEDHIKLIKHLVTKNF

SEQ ID NO: 154207 - protein, 128 aa, Unknown
  Bacterial polypetide isolated from the Sargasso Sea
MNEEHPQVNYGKTGVLLVNLGTPDSTSWLDIRKYLKEFLSDRRVIEVNPLIWQIILNLLILNLRPSKTAEAYKKIWMKKENMSPLRYYTIMQTKKLMDKIGSDSLIIDFAMRYGNPSIKSKTLKLKNA

SEQ ID NO: 154208 - protein, 238 aa, Unknown
  Bacterial polypetide isolated from the Sargasso Sea
MIEKNHPPIKYGNTGVLIINLGTPDSTNWFDIRKYLREFLSDRRVIEVNPIVWQIILNLFILNFRPFKTAKAYKEIWMNDKNMSPLLYYTQKQAEKISSSFSKENIVIDFAMRYGNPSIKSKIYKLHKMGCENLVILPLYPQYAAATTATVCDEVYRTLMKMRWQPSLKIIPHYESDQLYIDSLVNSINKKINEIGWKPDLIIASYHGIPKKYFDKGDPYHCYCHKTTRLILEKFSSI

SEQ ID NO: 154209 - protein, 243 aa, Unknown
  Bacterial polypetide isolated from the Sargasso Sea
MTPDHPKINYGKTGILIINLGTPDSTNWLDIRKYLKEFLSDRRVIEVNPIIWQIILNLFILTFRPSKTAKAYKEIWMRDKDMSPLRYYTESQAQKLSKQIGNEDLIVDFAMRYGNPSIKSKINELQKKGCESLIVLPLYPQYAAATTATVCDEVYRTLMKMRWQPNLKIIPHYESEPLYIEAIKNSIEKKISEINWKPDLIIASYHGIPKKYFDKGDPYHCYCHKTTRLISEKYSDMKLRLHS

SEQ ID NO: 154210 - protein, 263 aa, Unknown
  Bacterial polypetide isolated from the Sargasso Sea
LTTDESPLRFHTRAQSEALSQRFKESGVPVEIDWAMRYGTPAIGDRLEEMRAKGCRKILLLALYPQYSATTTASAYDKAFQALQKMRWQPVIRTSPAYFNNKDYIRILAKSINEHIAFLDWEPDVLLTSFHGLPKRYLDAGDPYHCECAQTSRLLAEEIGWTGDRVRLAFQSRFGREEWLKPYIQEVITELPSQGIKKIAIISPGFISDCVETLEEVAIGLKESFLEAGGEKFTYVPCLNSSEDSIDLLQELALQELRGWIPE

SEQ ID NO: 154211 - protein, 221 aa, Unknown
  Bacterial polypetide isolated from the Sargasso Sea
MTPNHPKVNYGKTGALIINLGTPDSTSWLDIRKYLREFLSDRRVIEVNPIIWQIILNLFILNFRPSKTAKAYKEIWMKDKNMSPLRYFTQNQAEKLSKQIGDEKLIVDFAMRYGNPSIKNKIHGLKNKGCENLIILPLYPQYAAATTATVCDEIYRTVMKMRWQPNLKIISHYESEPLYIEAIKNSILKKINEINWKPDLIVASYHGIPKKYFDKGDPYHC

SEQ ID NO: 154212 - protein, 160 aa, Unknown
  Bacterial polypetide isolated from the Sargasso Sea
MYSAHGLPKKIVEAGDPYAHQVERTAAAVHAKLGDQTADHVICYQSRVGPMEWLKPYTEDEIRRAGADGKALVVVPVAFVSEHSETLVELDIEYSELAEKSGVPAYIRAPTVNDDPAFIESLAGIVRAARDTGTATGGEICPAGFADCPCNGRASTRDFA

SEQ ID NO: 154213 - protein, 196 aa, Unknown
  Bacterial polypetide isolated from the Sargasso Sea
IVPLYPQYAAATTATVCDEVYRVLMGMRWQPSLQIVPHYESEPLYIKALVNSLKLKISQLSWKPDLILASYHGIPQKYFDKGDPYHCYCHKTTRLILEKFNEIEIKTTFQSRFGPEAWLKPYTDKTLEVLPKEGKKNILVICPGFSSDCVETLEEISIQGKESFLNAGGKNFDTVPCLNDNVDHINLLEHLVKKNL

SEQ ID NO: 154214 - protein, 218 aa, Unknown
  Bacterial polypetide isolated from the Sargasso Sea
MVKYIGEKNYEHGSKEKIGVLITNLGTPDAPNKKELKVYLNQFLSDPRVIELPKILWQIILKLVILQIRPSKSAEAYKQIWTDKGSPLLDIANRQLNKIQSSFSSKNENIVFEVGMRYGNPSIPDALSKLQKKQVRRLLVLPMYPQYCAATTGSTFDEVTNVLQKWRWIPEIRFINQYFEEKNYIEALSNSIKTFWKKTPKPQKIIFSYHGIPKKVFD

SEQ ID NO: 154215 - protein, 236 aa, Unknown
  Bacterial polypetide isolated from the Sargasso Sea
MKVAVILFNLGGPDKLENVEPFLFNLFNDPAILNLPSFIRYPLAKLISKKRAPIAKDIYKEIGGSSPILKLTQDQAESLEKSLNSNEKAFNYKVFITMRCWHPRASETIKQVKDFNPSEIILLPLYPQYSAATSGSSILEWKEIAKKNNLNIETNTICCYPEDDKFIKSHIELIRKKIKGISNFKLIFSAHGLPEKNIKKGDPYQWQVERGVKKIIEGINDPSIDYILSYQSRVGP

SEQ ID NO: 154216 - protein, 243 aa, Unknown
  Bacterial polypetide isolated from the Sargasso Sea
MIEKDHPPVKFGKTGVLIINLGTPDSTSWLDIRKYLREFLSDRRVIEVNPVIWQIILNVFILNFRPSKTAKAYKEIWMKDKNMSPLLYYTKKQSEKISNLISKENIIIDFAMRYGNPGIKTKIHKLHEMGCENLVILPLYPQYAAATTATVCDEVYRTLMKMRWQPSLKIISHYESDPLYIGALVNSINKKLNEINWKPELIIASYHGIPKKYFDKGDPYHCYCHKTTRLISEKFSFIKIKTT

SEQ ID NO: 154217 - protein, 149 aa, Unknown
  Bacterial polypetide isolated from the Sargasso Sea
ALVNSINKKLNEINWKPDLIIASYHGIPKKYFDKGDPYHCYCHKTTRLISEKFSSIKIKTTFQSRFGPQEWLQPYTDKTLENLPKEGVKNVLTICPGFSSDCVETLEEILIQGKESFTSAGGGNFDMVPCLNDSDDHIFLLKSLIEKNI

SEQ ID NO: 154218 - protein, 223 aa, Unknown
  Bacterial polypetide isolated from the Sargasso Sea
VILLPLYPQFSAATSGSSIMEWKAIAKKNSFNVNTSTICCYPQESKFIKAHSELIKKKIEGLKNFKLIFSAHGLPEKNIKNGDPYQWQVEQSVKKIMENLNNKNIDYVLSYQSRVGPLKWIGPSTEDIIIEYSKKKMHLVIVPIAFVSEHSETLVELDIEYEKLAKINGCQNYTRIEALGINHYFIESLSNIILNKEENKFKNNLYPPKERCPTNLTKCPCLN

SEQ ID NO: 154219 - protein, 89 aa, Unknown
  Bacterial polypetide isolated from the Sargasso Sea
TFQSRFGPQEWLQPYTDKTLENLPKEGKKNVLTICPGFSSDCVETLEEILIQGKKSFMDSGGENFDMIPCLNDNDDHISLLKNLIQKNI

SEQ ID NO: 154220 - protein, 279 aa, Unknown
  Bacterial polypetide isolated from the Sargasso Sea
MKKAVILFNLGGPDKLENVEPFLFNLFNDPAILNLPSLFRFPLAKIIANRRAPTAKKIYEELGGSSPILKLTSEQATALELKLNKDDDSANYKCFIVMRCWHPRAENVVKEVINYNPDELILMPLYPQYSAATSGSSIKEWNDICIKNNFKVKTSTICCYPTDEYFVQAHRNEIMKKIENLKRFKLIFSAHGLPEKNIIKGDPYQWQVEQSVSKIVESLNIKDLDWILSYQSRVGPLKWIGPSTEDIIVENSKLGKHIVLVPIAFVSEHSETLVELDIE

SEQ ID NO: 154221 - protein, 132 aa, Unknown
  Bacterial polypetide isolated from the Sargasso Sea
MKTAVVLFNLGGPDKQESVKPFLFNLFNDPNIFRLPNPFRYLLARLISSLRTKEATEIYAEIGGKSPILEITNSQAEALQKELENKGIENKVFVCMRYWHPMTAEVVSKVKDYNPDKIFLLPLYPQYSTTTT

SEQ ID NO: 154222 - protein, 153 aa, Unknown
  Bacterial polypetide isolated from the Sargasso Sea
AETVKKNIINKNKLDKLIVSFHGIPKRYFMAGDPYHCHCIKSARLLKEELKWPDDKILVTFQSRFGPEPWLQPYTDETIIDLAKQGQKNIAVVAPGFISDCLETLEEINVEARELFIQNGGESFEYIPCLNDNEYSIKFLEYIIKQNLLGWNS

SEQ ID NO: 154223 - protein, 227 aa, Unknown
  Bacterial polypetide isolated from the Sargasso Sea
MPLYPQFSTTTTESFTRIWKQSAYTAELDVPTADICCWPEADGFIDAMTRAAEAAIDRLPNGVAYRVLYSAHGLPKKIVEAGDPYSHQVERTSVAVHAKLRDPAADHVICYQSRVGPMEWLKPYTEDEIRRAGADGKALVVVPVAFVSEHSETLVELDIEYSELAEEVGVPAFVRAPTVNDDPAFIESLASIVRAARNRGTAAGGEKCAKGYANCPCNGQDSAEEAA

SEQ ID NO: 154224 - protein, 220 aa, Unknown
  Bacterial polypetide isolated from the Sargasso Sea
MENDNHPKVNFGKNGVLLVNLGTPDSTSWWDIRKYLREFLSDKRVIEVNPMLWQIILNLFILNFRPSKTAKAYKEIWMTDINESPLRYYTKQQTQKLKKKFNSQNIIIDYAMRYGNPSIKSRLQKLQSEGCENIILFPLYPQYAAATTATVCDEVYRCLIKMRWQPSLQVIPHYESNEDYINGLVNSIKKKLSEIPWKPDLIVASYHGIPQKYFDKGDPY

SEQ ID NO: 154225 - protein, 262 aa, Unknown
  Bacterial polypetide isolated from the Sargasso Sea
AKAYKEIWMKNENMSPLLYYTKKQSEKISQLLQKENVVLDFAMRYGNPSIKKKIHKLHEMGCENLVILPLYPQYAAATTATVCDEVYRTLMKMRWQPSLKIIPHYESNSLYIDALVNSINKKINEIDWKPDLIIASYHGIPKKYFDKGDPYHCYCHKTTRLISEKFTSIKIQTTFQSRFGPQEWLQPYTDKTLENLPKDGIKNILTICPGFSSDCVETLEEILIQGKESFINAGGLNFDMVPCLNDNDDHIFLLKSLIENNL

SEQ ID NO: 154226 - protein, 158 aa, Unknown
  Bacterial polypetide isolated from the Sargasso Sea
MNKEHPIVNFGKTGVLLINLGTPDSTNWWDIRKYLKEFLSDRRVIEVNPLIWQIILNLFILTFRPSKTAKAYKEIWMKDINKSPLRFYTESQTDKLNEKIKNENIIIDYAMRYGNPSIRSKIEKMHNNGCEKLIILPLYPQYASPTTATVCDEVFRVL

SEQ ID NO: 154227 - protein, 308 aa, Unknown
  Bacterial polypetide isolated from the Sargasso Sea
PEGTDYWSMRKYLKQFLMDQRVVDIFRPLWWLILNGPILTFRPSKSGKAYKKIWDKDNHGSPLRKFTINQTIKLQKSFKNNNNLLVDYAMRYGVPEIDKTLNKMIVKGCSRVLLVPLYPQYAASTTATVKDEVFKWMLKQRWQPDIRTIAPWFDDKNYIKSLANTLKDHLKNPKKLDMLLVSFHGIPKRYFMAGDPYHCHCIKTARLLKEELKWPEEKILVTFQSRFGPEPWLEPYTDKTIEDLAKKGAKNIAVIAPGFISDCLETLEEINVEAREIFFENGGKSFEYIPYLNDNKYSIKFLDSLIKK

SEQ ID NO: 154228 - protein, 171 aa, Unknown
  Bacterial polypetide isolated from the Sargasso Sea
MRWQPSLQIVPHYESEPLYIDALVNSINKKVTELNWKPDLIIASYHGIPKKYFEKGDPYHCYCQKTSRLMSEKYKEIPIRTTFQSRFGPQEWLQPYTDKTLENLPKEGKKNILVICPGFSSDCVETLEEIAIQGKESFMKFGGKNFDVIPCLNDNDDHINLIKKLISNFIL

SEQ ID NO: 154229 - protein, 91 aa, Unknown
  Bacterial polypetide isolated from the Sargasso Sea
MARVGVLLLNLGGPERIQDVGPFLYNLFADPEIIRLPIPALQKPLAWLISTLRSSKSQEAYRSIGGGSPLRRITEQQARDLQSLLRQRGVD

SEQ ID NO: 154230 - protein, 243 aa, Unknown
  Bacterial polypetide isolated from the Sargasso Sea
MKDLNNSLIEDGSRVTTSIGPTPEKHPQVNPSKVGVLVANLGTPDSTDYWAIRRYLSEFLSDRRVIDYTPWIWQIILQTIILTRRPFSSGAAYKSIWNNERDESPLLTNVREQTDKLRISLQKTFGDSVVVEFCMRYGNPSTKKTIFKLKELGCNKIVFLPLYPQYSAPTTGTANDEAFRALMSLNWQPAIRTIPAYFDNPDYIKCLANSILEKYKTLSREPDHLVVSYHGVPERYLLAGDPY

SEQ ID NO: 154231 - protein, 300 aa, Unknown
  Bacterial polypetide isolated from the Sargasso Sea
IRKYLKEFLSDRRVIEVNPIIGQIILNVIILNLRPSKTAKAYKEIWMKEENISPLLYYTKKQAEKLSSQISKENLIIDYAMRYGNPSIKGKIKILHDKGCENLIVLPLYPQYAAATTATVCDEVYRTLMKMRWQPSLKIIPHYESDPLYVDALVNSLNKKIKELNWKPDLILASYHGIPQKYFDKGDPYHCYCHKTTRLISEKFSSIEIKTTFQSRFGPQKWLQPYTDKTLESLPSEGKKNVLAICPGFASDCVETLEEILIQGKESFLDSGGENFDMVPCLNDSDDHITLLKSLIQKSI

SEQ ID NO: 154232 - protein, 249 aa, Unknown
  Bacterial polypetide isolated from the Sargasso Sea
ISPLLYYTKKQSEKISNSLLKENIIIDFAMRYGNPSIKSKIHKLHKMGCENLVILPLYPQYAAATTATVCDEVYRTLMKMRWQPSLRVIPHYESDPLYIDALVNSINKKIKEINWKPDLIIASYHGIPKKYFDKGDPYHCYCHKTTRLISEKFSSIKIKTTFQSRFGPQEWLQPYTDKTLENLPKEGVKNVLIICPGFASDCVETLEEIQIQAKESFLNSGGENFDMVSCLNDNNDHIILLKSLIERNI

SEQ ID NO: 154233 - protein, 189 aa, Unknown
  Bacterial polypetide isolated from the Sargasso Sea
MTPEHPKVNYGKKGILIINLGTPDSTKWLDIRKYLKEFLSDRRVIEVNPLIWQVILNLFILNFRPSKTAKAYKEIWMKDKNMSPLRYFTERQAEKLSEQIGNEKIIVDFAMRYGNPSIKSKIHRLHKEGCENLIILPLYPQYAAATTATVCDEVYRTLMKMRWQPSLKIIPHYESEPLYIEAIKNSIKK

SEQ ID NO: 154234 - protein, 252 aa, Unknown
  Bacterial polypetide isolated from the Sargasso Sea
SEKTNYSVEIAMRYQHPSIKYAIEKLINKGCKEIIAVPLYPHYAQSTILTTENKIKEISTSLGGNLKVSFIRPFYNEEGYIDALTSLIKESLPSDYDHLLFSYHGIPERHVKNTDPSKTHCLKVKDCCNIKADAHQFCYRHQVLETTKLCAKKLNIEKEKWSVSFQSRIGPGWLKPFTDKVLDELPKKNIKKLAVVCPAFVADNLETLEEINIRAREQFIHNGGIEFTYIPCLNDNNNWVDFLSNYIIQKGG

SEQ ID NO: 154235 - protein, 215 aa, Unknown
  Bacterial polypetide isolated from the Sargasso Sea
PSIKSKIKNLYEKGCENLVILPLYPQYAAATTATVCDEVYRTLMKMRWQPSIKIIPHYESHPLYIDALVNSLNKKIKEINWKPDLILVSYHGIPQKYFDKGDPYHCYCQKTTRLISEKFNSIELMTTFQSRFGPQKWLEPYTDKTLEKLPSEGKKNVLAICPGFSSDCVETLEEILIQGKESFLESGGENFDMVPCLNDSDDHIALLKSLVQKNI

SEQ ID NO: 154236 - protein, 187 aa, Unknown
  Bacterial polypetide isolated from the Sargasso Sea
AATTATVCDEVYRTLMKMRWQPSLKIIPHYESNPLYIKALVNSINKKISEINWKPDLIVASYHGIPKKYFDKGDPYHCYCYKTSRLISEKFNSVEIKTTFQSRFGPQEWLQPYTDKTLESLPKEGKKNILMICPGFSSDCVETLEEILIEGKESFIEAGGENFDMIPCLNDNDDHIFLLKSLIQKSI

SEQ ID NO: 154237 - protein, 152 aa, Unknown
  Bacterial polypetide isolated from the Sargasso Sea
MTPDHPKINYGKTGILIVNLGTPDSTSWLDIRKYLKEFLSDRRVIEVNPLIWQVILNLFILTFRPSKTAKAYKEIWMEDKNMSPLRYFTERQAEKLSNQISNEDFIVDFAMRYGNPSIKGKIHGLQKKGCENLIILPLYPQYAAATTATVCD

SEQ ID NO: 154238 - protein, 51 aa, Unknown
  Bacterial polypetide isolated from the Sargasso Sea
MKDHPKINFGKTGILLVNLGTPDSTSWLDIRKYLKEFLSDRRVIELNPIVW

SEQ ID NO: 154239 - protein, 290 aa, Unknown
  Bacterial polypetide isolated from the Sargasso Sea
DRRVMRFNPLIWQVILNLFILTFRPSKTAKAYKEIWMKDKNMSPLRYFTERQAEKLSEQIGNDKILVDFAMRYGNPSIKSKIHKLQREGCENLVILPLYPQYAAATTATVCDEVYRTLMKMRWQPNLKIIPHYESEPLYIEAIKKSIVNKLSEIDWKPDLLIASYHGIPKKYFDKGDPYHCYCHKTTRLISEKYSDIEIKTTFQSRFGPQEWLKPYTDKTFEALPKEGKKNILVICPGFASDCVETLEEISIQGKESFINSGGKNFEMVPCLNDNDDHILLLKNLITKNI

SEQ ID NO: 154240 - protein, 193 aa, Unknown
  Bacterial polypetide isolated from the Sargasso Sea
MEDHPKIKFGKTGVLIVNLGTPDSTKWLDIRRYLKEFLSDRRVIEVNPILWQLILNLIILNLRPSKTAKAYKEIWMKDINMSPLMYYTKKQAEKVSNSISNEEILVDFAMRYGNPSIKSKIKKLHDNGCENLVILPLYPQYAAATTATVCDEVYRTLMSMRWQPSLKIIPHYESDPLYIDALVNSINSKIENI

SEQ ID NO: 154241 - protein, 196 aa, Unknown
  Bacterial polypetide isolated from the Sargasso Sea
VLPLYPQYAAATTATVCDEVYRTLMKMRWQPNLKIIPHYESEPLYIEAIKNSILKKISEINWQPDLIIASYHGIPKKYFDKGDPYHCYCHKTTRLISEKFSDIEIKTTFQSRFGPQEWLQPYTDKTFEALPNEGKRSILVVCPGFSSDCVETLEEISIQGKESFIKSGGENFDMVPCLNDNEDHIVLLKHLIMENI

SEQ ID NO: 154242 - protein, 288 aa, Unknown
  Bacterial polypetide isolated from the Sargasso Sea
KESAKAYQSLWTDRGSPLLYHTEDLAKGAQELMGEEADVYYAMRYQKPSIASVLEKIRQKPIEELIILPLFPQYASATTGSVMQEVMKHLSSWELFTNVKMISSFAEHPAFIDALAEKARDKDLGKYDHLLMSFHGLPESQIKRQDRFSWCGKEGCCDKMVPQNSLCYKAQCVATARALAKALEIPSSRYTICFQSRLGKSVWIQPYTADVLESLAKKGAKKLLVYSPAFVCDCLETTIEIGEEYQELFQEMGGESLTLVEGLNSSPRWIEALCEIAFNPAYAQHMSA

SEQ ID NO: 154243 - protein, 174 aa, Unknown
  Bacterial polypetide isolated from the Sargasso Sea
MKKAVILFNLGGPDKLESVEPFLFNLFNDPAIISIPSIIRYPLAKFISKRRAPIAKNIYREIGNKSPILELTQKQASSLESSLTQKGDYKCFIIMRCWHPRAQDVIKKVKEYNPDEIILLPLYPQYSASTSGSSIQEWNDLCKKENYIVKTKVVCCYPTENNFINSHVSLIKIQ

SEQ ID NO: 154244 - protein, 186 aa, Unknown
  Bacterial polypetide isolated from the Sargasso Sea
MSQFKGEKDYQHGSQEKIGILITNLGTPDAPNTKALKVYLKEFLSDPRVIEVPKIIWQIILRIVILQTRPRKSAKSYKSIWTEKGSPLLEISKKQLNSIKAELELQGKNIVVELGMRYGNPSIQNGLEVLQKKQCRKLLVLPLYPQYCGATTGSTFDAISSVLQKWRWIPEIRFINQYFEEKNYIK

SEQ ID NO: 154245 - protein, 152 aa, Unknown
  Bacterial polypetide isolated from the Sargasso Sea
MYKIGVLLMNLGGPERITDVGPFLYNLFSDPEIIRTPFPAFQKPLAWLISTLRSTTSQQAYLSIGGGSPIRRITEQQARELQSKLRDKGLNATTYIAMRYWHPFTESAIADMKADGIDQIVVLPLYPHFSISTSGSSFRELKKLRDSDKDLK

SEQ ID NO: 154246 - protein, 155 aa, Unknown
  Bacterial polypetide isolated from the Sargasso Sea
MKTGLLLINLGTPDSPSTADVRSYLREFLSDPRVIDLPFLGRWLLLNLIILPFRPRRSAKAYKSIWGEEGSPLKVEGMKLASGLNQSLKQDQVPVVLAMRYGNPSIDKGLKELKNLGCDRLLILPLFPQYASSTNGSALEAVYRMAGHDWNIPML

SEQ ID NO: 154247 - protein, 282 aa, Unknown
  Bacterial polypetide isolated from the Sargasso Sea
PVIWQIILNIFILTFRPSKTAHAYKKIWRQDTNESPLLYFTRNQAEKLNNKIGNEKLIVDFAMRYGNPSIKSKLSSLKKLGCENIIILPLYPQYAAPTTATVCDEVYRSLMDMRWQPSLQVVPHYESNPSYIEALTKSIEKKVKSINWKPDLIISSYHGIPKKYFDKGDPYHCYCHKTTRLMKEKFKSINIETTFQSRFGPQEWLTPYTDKTLESLPKKGIKKILVICPGFASDCVETLEEINIQGRESFLSQGGENFDLIPCLNDNSDHIELFERLVTKYI

SEQ ID NO: 154248 - protein, 233 aa, Unknown
  Bacterial polypetide isolated from the Sargasso Sea
IKKVREYNPDEVILLPLYPQYSASTSGSSINEWKDLCNKENYQVKTKTICCYPTENNFLESHADLIKKTLKTLENKNFKLLFSAHGLPENKIKKGDPYQWQVEKTVEGIMSKLENENLDFLISYQSRVGPLKWIGPSTDEVIIKYSKEKKGIVIVPVAFVSEHSETLVELDIEYKKLAEKNGCSFYKRVPALGIEENFIKGLTELVLQKETRSNFVSSLMCPNKYVKCPCLGL

SEQ ID NO: 154249 - protein, 274 aa, Unknown
  Bacterial polypetide isolated from the Sargasso Sea
MKKKIAIILFNLGGPDKLESVKPFLFNLFNDEAIIQAPKIIRYLLAKLISNKREKTAKEIYSRMGGKSPIYDLTVLQANELERVLYKEKQNYKVFISMRYWKPFVSETIQSVKKWKPNNIILLPLYPQYSTTTTASSIKSWFRESKNIFEKKETKIICCYPENKHFIKGHVNKIKKKLEEVKNIDANFSNSILLFSAHGLPEKIIRSGDPYQHQVELTVNNIMEKLNKNIKHIVCYQSKVGPLKWIEPSTENIIIKNSKLKKNIIIIPVAFVSE

SEQ ID NO: 154250 - protein, 238 aa, Unknown
  Bacterial polypetide isolated from the Sargasso Sea
MEINNNHPPINYGKTGVLIVNLGTPDSTDWLDIRKYLKEFLSDNRVIEVNPVIWQLILNLFILTFRPSKTAKAYKEIWMKDENMSPLLYYTQKQSEKISNSLLRENLLIDFAMRYGNPSIKSKIYKLQEQGCENLVILPLYPQYAAATTATVCDEVYRTLMQMRWQPSLKIIPHYESDSLYIHALVKSINKKINEINWKPDLIIASYHGIPKKYFDKGDPYHCYCHKTTRLISEKFNS

SEQ ID NO: 154251 - protein, 174 aa, Unknown
  Bacterial polypetide isolated from the Sargasso Sea
MEKHPEIKFGKTGVLIINLGTPDSTNWLDVRRYLKEFLSDRRVIEVNPIIWQVILNLFILNFRPSKSAKAYKEIWMKEENISPLLHYTKKQAEKLSKSFSNENLIIDFAMRYGNPSIKSKIKKLNKEGCENLVILPLYPQYAAATTATVCDEVYRTLMNMRWQPSLKIIPHYES

SEQ ID NO: 154252 - protein, 256 aa, Unknown
  Bacterial polypetide isolated from the Sargasso Sea
MKKAVILFNLGGPDKLESVEPFLFNLFNDPGIISIPSIFRYPLAKFISKKRAPIAKNIYKEIGNKSPILELTQQQANNLEKSLSAKGNYKCFVVMRCWHPRAKDVIKEIKEYDPDEIILLPLYPQYSASTSGSSIKEWHDLCKKENYKVNTKTICCYPTQNSFIESHANLIKNTIKNIENKNFKLLFSAHGLPESKIKKGDPYQWQIEQTVEKIMTKLVNENLDHIISYQSRVGPLKWIGPSTDEIIIKYSQEKKG

SEQ ID NO: 154253 - protein, 98 aa, Unknown
  Bacterial polypetide isolated from the Sargasso Sea
QVCFQSRFGKEEWLTPYADELLADLPRQGVKSVDVICPAFATDCLETLEEISIGGKETFLHAGGEAYHFIPCLNDDELHIELLRQLVQEQAQPWIRAE

SEQ ID NO: 154254 - protein, 79 aa, Unknown
  Bacterial polypetide isolated from the Sargasso Sea
MIKDHPKVQFGKTGVLIVNLGTPDSTSWFDIRKYLKEFLSDRRVIEVNPILWQIILNLFILNLRPSKTAKAYKEIWMKR

SEQ ID NO: 154255 - protein, 204 aa, Unknown
  Bacterial polypetide isolated from the Sargasso Sea
MSNYIGEKDYQHGSKEKVGILITNLGTPDAPNTSSLKVYLKQFLSDPRVIEVPKIIWQIILRLFILQLRPRKSAKTYKSIWTKEGSPLLNISKKQLEAIRSRLEKKSKNTYIELGMRYGNPSIKNALEVLQKNQARKLLILPLYPQYCAATTGSTFDSVSEVLQTWRWIPEIRFINQYFEEKKYIEALSYSISNFGKKIKNLKC

SEQ ID NO: 154256 - protein, 254 aa, Unknown
  Bacterial polypetide isolated from the Sargasso Sea
MPKLISEKNFSHGTPSSVGILLINLGTPENTKTSSVRKYLRQFLSDPRVIEVPKLLWWFILNLFILPFRPSKSAEAYKEIWTEEGSPLLLYSEEITKKIQEAFDERNFDIDFHIELAMSYGQPSIKSSLNKLRKKNARRILLLPMYPQYSSTTTGSVFENVTKELSKQRWIPEFRHINQYHDNKGYIETISESIREFWKLNGPCDKLLFSFHGLPKKMLLEGDPYHCQCHKTARLVSENLSLSRDDWFVSFQSR

SEQ ID NO: 154257 - protein, 280 aa, Unknown
  Bacterial polypetide isolated from the Sargasso Sea
VWQIILNVFILNFRPSKTAKAYKEIWMKDKNISPLLYYTQEQAKKLSNLLSGKNLIIDYAMRYGNPSIKSKIKKLHEKGCENLIILPLYPQYAAATTATVCDEVYRTLMNMRWQPSIKVIPHYESHPLYIDALVNSLNKKIKEINWKPDLILASYHGIPQKYFDKGDPYHCYCQKTTRLISEKFNSIEIKTTFQSRFGPQKWLEPYTDKTLEKLPKEGKKNVLAICPGFSSDCVETLEEILIQGKESFLESGGENFDMVPCLNDNNDHINLLKSLIQQNI

SEQ ID NO: 154258 - protein, 241 aa, Unknown
  Bacterial polypetide isolated from the Sargasso Sea
MDKIGVLLMNLGGPERITDVGPFLYNLFSDPEIIRTPFPVFQKPLAWLISTLRSTTSQQAYLSIGGGSPIRRITEQQARELQSKLRNKGFNATTYIAMRYWHPFTESAIADMKADGIDQVVVIPLYPHFSISTSGSSFRELKKLRDSDDEFKKVPMRCVRSWFSQSGYLKSMVELISEQISLCESPSKAHIFFTAHGVPKSYVEEAGDPYKQQIEDCSLLIINELEKCLGHGNPHTLSYQS

SEQ ID NO: 154259 - protein, 240 aa, Unknown
  Bacterial polypetide isolated from the Sargasso Sea
HPRASEVIGQVKKYNPDEIILLPLYPQYSATTSGSSINEWKELCKKENYNIKTKTICCYPTENYFIESHVSLIKKTIEEVKNKNFKLIFSAHGLPENKIKKGDPYQWQVEETVKEIMSKIKNENLDYVLSYQSRVGPLKWIGPSTDEIIIKYSKEKKGIVIVPVAFVSEHSETLVELDIEYKKLAEKNDCSFYKRVPALGVEENFIRGLEELVLKTKTKDNFVSSIMCPNKHAKCPCLGL

SEQ ID NO: 154260 - protein, 162 aa, Unknown
  Bacterial polypetide isolated from the Sargasso Sea
MKKAVILFNLGGPDSLDSVEPFLFNLFNDPAILSLPTIFRYPLAKLISKRRAPIAKAIYNEMGGSSPILQQTEMQAKAIEESLKTQEDNYKCFIVMRCWHPRADLVVKKVKEFNPEEIILLPLYPQYSAATSGSSIEEWFKKCDENNVKIKTKIICCYPTEE

SEQ ID NO: 154261 - protein, 244 aa, Unknown
  Bacterial polypetide isolated from the Sargasso Sea
MNKDHPDVQYGKTGVLIINLGTPDSTSWFDIRKYLKEFLSDKRVIEINPFLWQIILNIFILTFRPSKTAHAYKKIWLKDSNESPLLFFTRSQANKLKDKIGNEKTIVDFAMRYGNPSIKSKLNKLKEKGCENIVILPLYPQYAAATTATVCDEVYRSLMTMRWQPSLQIIPHYESDPKYIDSLITSIEKKITEINWKPDLIISSYHGIPKSYFDKGDPYHCYCHKTTRLIKEKFNKVKMKQHSI

SEQ ID NO: 154262 - protein, 152 aa, Unknown
  Bacterial polypetide isolated from the Sargasso Sea
MDKIGVLLMNLGGPERITDVGPFLYNLFSDPEIIRTPFPVFQKPLAWLISTLRSTTSQQAYLSIGGGSPIRRITEQQARELQSKLRDKGLNATTYIAMRYWHPFTESAIADMKADGIDQVVVIPLYPHFSISTSGSSFRELKKLRDSDDEFK

SEQ ID NO: 154263 - protein, 49 aa, Unknown
  Bacterial polypetide isolated from the Sargasso Sea
MSRVGVVLLNLGGPERIQDVGPFLYNLFADPEIIRLPSPALQKPLAWLI

SEQ ID NO: 154264 - protein, 266 aa, Unknown
  Bacterial polypetide isolated from the Sargasso Sea
MQTKNNTSESNSTNTAVLMINLGTPDAPKTPEVRTYLRELLSSDRVLDINPILRWLLLNIFILPFRPKKTAKAYKKIWLEGGSPLMVYSQKLKKALTEQFTAENIHVELAMQCGEPSIKNTLDRLRVKGYSRIIVLPMYPQYASSTFGGSIEALYREILKDWNMPQLQIVPPFFSDSLFIEAWAKVGLPYLDQETDHVLFSFHGLPLRHLKKSDLSGNWCRNNKECCLKLTNQNKYCYSAQCYETSKLMAERLNLGADNWSVSFQS

SEQ ID NO: 154265 - protein, 262 aa, Unknown
  Bacterial polypetide isolated from the Sargasso Sea
AKAYKEIWMKDINMSPLMYYTQKQSEKVSNSISNENILVDFAMRYGNPSIKSKIKKLHDNGCENLVILPLYPQYAAATTATVCDEVYRTLMSMRWQPSLKIIPHYESDPLYIDALVNSINSKIENINWKPDLILASYHGIPKKYFDKGDPYHCYCHKTTRLISEKFKEIEIKTTFQSRFGPDEWLQPYTDKTLERLPKEGVKNVLAICPGFSSDCVETLEEILIQGKESFMEAGGENFDMVSCLNDNDDHIELLNNLIKRNI

SEQ ID NO: 154266 - protein, 218 aa, Unknown
  Bacterial polypetide isolated from the Sargasso Sea
MKKALLLVNLGTPDKPSYFSVFKYLRQFLMDGRVININPILRFFLVNFIICPTRSFSSTKVYKEVWDKDTGSPLLHNTIELSKKLTTKQNEYDVYFAMRYQNPSIEKVIDNILEKNPDEIIVLPLFPHYASATTGSVYQEISRIVSKKWVVPNIKFINQFYDNDKFIDAWVDKASKFDIKSYDKIVFSYHGIPNSHVDNVYPESLCSDHNCELGISES

SEQ ID NO: 154267 - protein, 127 aa, Unknown
  Bacterial polypetide isolated from the Sargasso Sea
VNDLIVVPISFVGEHIETLQEIDIEYKEIAEKAGIKNFRRVKALNTHPTFIEGLSDLVISCLEGPLVDIEEASQLPEKVKLYPQEKWQWGWNNSSEVWNGRVAMIIFLVLFIELISGYGPLHKLGIL

SEQ ID NO: 154268 - protein, 216 aa, Unknown
  Bacterial polypetide isolated from the Sargasso Sea
PSIKSKMSSLQKKGCENIIVLPLYPQYAAATTATVCDEVYKTLMGMRWQPSLQIIPHYESEPLYIEALKNSLNKKISEINWEPDLIVASYHGIPQKYFDKGDPYHCYCQKTTRLLSEKFNHIPIKTTFQSRFGPQEWLKPYTDKTLEVLPKEGKKNVLVICPGFSSDCVETLEEISLQGKESFVKSGGNNFDVVPCLNDNDDHITLLEHLVKRFFR

SEQ ID NO: 154269 - protein, 246 aa, Unknown
  Bacterial polypetide isolated from the Sargasso Sea
TLRPSKTAHAYKKIWRKDTNESPLLYFTRSQSAKLNNKIGKENLIIDFAMRYGNPSIKLKLRELHELGCENIIILPLYPQYAAATTATVCDEVYRTFMKMRWQPSLQIIPHYESEDLYINALVKSIETKVKTINWKPDLIIASYHGIPKKYFDKGDPYHCYCQKTTRLMKEKYTSFDIQTTFQSRFGPQEWLTPYTDKTLENLPKKGVKNLLVICPGFASDCVETLEEINIQGRESFLDNGGKNFD

SEQ ID NO: 154270 - protein, 239 aa, Unknown
  Bacterial polypetide isolated from the Sargasso Sea
RKCVKEVINYDPDEVILMPLYPQYSAATSGSSIKEWKDICLKNNFKIKTSTICCYPTDENFIQAHKSEIMKKINNLKNFKLIFSAHGLPEKNIKKGDPYQWQVEQSVNKIVKLLNFEDLDWVLSYQSRVGPLKWIGPSTEDVIVENSKLGKHIVLVPVAFVSEHSETLVELDIEYKELADKNGCKNYSRVSALGINEYYIKAMSNLIINKQEYNFNGELFPPKIQCPNQFKKCPCINYE

SEQ ID NO: 154271 - protein, 184 aa, Unknown
  Bacterial polypetide isolated from the Sargasso Sea
KKAVILFNLGGPDSLEAVEPFLFNLFNDPAILSLPTILRYPLAKLISKRRAPVAKAIYKEMGGSSPILQQTEMQAKAIEESLKTQKDDYKCFVVMRCWHPRADLVIKQVKKFNPDQIILLPLYPQYSASTSGSSIKEWIEKCKENNVNTETKIICCYPTEDNFILSHVDSIKRKISSKDLFETT

SEQ ID NO: 154272 - protein, 210 aa, Unknown
  Bacterial polypetide isolated from the Sargasso Sea
MELDNNHPPIKFGKTGVLIVNLGTPDSTDWLDIRKYLKEFLSDKRVIEVNPIIWQFILNVFILTFRPSKTAKAYKEIWMKDENMSPLLYYTQKQSEKITSLISKENLLIDFAMRYGNPSIKSKIYKLQQQGCENLVILPLYPQYAAATTATVCDEVYRTLMQMRWQPSLKIIPHYESDSLYIDALVKSINKKINEINWKPDVNNCLISRH

SEQ ID NO: 154273 - protein, 174 aa, Unknown
  Bacterial polypetide isolated from the Sargasso Sea
MKDKNISPLLHYTQKQAEKLSNLISEKNLIIDYAMRYGNPSIRSKIATLHEMGCENLIILPLYPQYAAATTATVCDEVYRTLMKMRWQPSLKIVPHYESDPLYIEALVNSLNKKIKEINWKPDLILASYHGIPQKYFDKGDPYHCYCHKTTRLISEKFTSIEIKTTFQSRFGPE

SEQ ID NO: 154274 - protein, 139 aa, Unknown
  Bacterial polypetide isolated from the Sargasso Sea
KNINWKPDLILASYHGIPKKYFDKGDPYHCYCHKTTRLVSEKFKSIEIKTTFQSRFGPQEWLQPYTDKTLEKLPKEGKKNVLTICPGFSSDCVETLEEILIQGKKSFMDSGGENFDMIPCLNDNDDHINLLKNLIQKNI

SEQ ID NO: 154275 - protein, 224 aa, Unknown
  Bacterial polypetide isolated from the Sargasso Sea
DVLVLPLYPHYAMSSYETVVEKVKEEKETNFPSLNIDIIPPFYKDKQYIDILSAKIKESIKNVEYDHLLFSYHGIPVSHLKISDPTNTHCYKVNDCCNVDSQAHSTCYKHQCLETTKKVIEKLNIGEDKHSNSFQSRLPNEPWLKPYTDSELERLAKAGKKKLVIVTPAFVTDCLETLEEIAMEGKEEFLEAGGEQYTYVPCLNEDDNWAELISKWTKDYINLN

SEQ ID NO: 154276 - protein, 165 aa, Unknown
  Bacterial polypetide isolated from the Sargasso Sea
MNKDHPKINFGKTGVLIINLGTPDSTNWLDIRKYLKEFLSDRRVIEVNPIIWQIILNVFILNLRPSKTAKAYKEIWMKDKDMSPLRFYTQQQAIKLSDKISNENLIVDFAMRYGKPSIKTKIHDLHAKGCEHIVIFPLYPQYAAATTATVCDEVYRTLMQMRWQP

SEQ ID NO: 154277 - protein, 207 aa, Unknown
  Bacterial polypetide isolated from the Sargasso Sea
KLHEAGCERLIILPLYPQYAAATTATVCDEVYRVLMKMRWQPSLQIIPHYESDPFYIKALSNSLNIKISELNWKPDLILASYHGIPQKYFDKGDPYHCYCQKTSRLLSEEFRDIKIITTFQSRFGPEAWLKPYTDKTLESLPKEGKKNILVICPGFSSDCVETLEEISIQGKETFLKSGGVNFDVVPCLNDNDDHINLLEKLTKKNL

SEQ ID NO: 154278 - protein, 186 aa, Unknown
  Bacterial polypetide isolated from the Sargasso Sea
ATTATVCDEVYKTLMGMRWQPSLQIIPHYESEPLYINSLKNSLEKKISELAWQPDLIVASYHGIPKKYFSKGDPYHCYCQKTSRLLSEKFKKIPIKTTFQSRFGPQEWLQPYTDKTLENLPKEGKKNILVICPGFSSDCVETLEEISIQGKESFIKNGGKNFDVVPCLNDNDDHIVLLQHLAEKFI

SEQ ID NO: 154279 - protein, 260 aa, Unknown
  Bacterial polypetide isolated from the Sargasso Sea
WQLILNIFILNLRPSKTSEAYKKIWMKKENMSPLRYYTIKQAENLKKKITEDSIIIDYAMRYGNPGIMDKMNYLQKSGCENIIILPLYPQYAAATTATVCDEVYRSLMKMRWQPSLQIIPHYESEPLYIAALKKSLEKKVSEINWKPDLIIASYHGIPKKYFDKGDPYHCYCQKTTRLLKESFQSKIPIITTFQSRFGPQQWLQPYTDKTLEKVPQEGKKNILVICPGFSSDCVETLEEIAIQGKESFFKNGGKKFDIVP

SEQ ID NO: 154280 - protein, 273 aa, Unknown
  Bacterial polypetide isolated from the Sargasso Sea
MKKAVILFNLGGPDKLENVEPFLFNLFNDPAILNLPSFIRYPLAKLISNRRAPTAKKIYQELGGSSPILKLTNDQARTLENNLNNNNHHQYKCFVVMRCWHPRAENVFNDVFDYGPDEVILLPLYPQYSAATSGSSIKEWLEVCDKNKFKVKTSTICCYPTDDFFIKSHAEQIMERIKDLTNFKLIFSAHGLPEKNIKRGDPYQWQVEQSVKSVIKILNINDLDWILSYQSRVGPLKWIGPSTEDIIIENSKLGKKIILVPIAFVSEHSEKTS

SEQ ID NO: 154281 - protein, 239 aa, Unknown
  Bacterial polypetide isolated from the Sargasso Sea
ENVIKEVKEYNPEEIILLPLYPQYSAATSGSSIKEWNDLCKKKNYKIKTKTICCYPTENNFLESHANLIRKTIKNLENKDFKLLFSAHGLPEIKIKKGDPYQWQVEQTVEGIMSKLKNENPDHIISYQSRVGPLKWIGPSTDEMIIKYSKEKKGIVVVPVAFVSEHSETLVELDIEYKKLAEKNGCSFYKRVPALGIEENFIRGLMELVLKTETKDNFVSSIMCPNKYAKCPCLEKKNI

SEQ ID NO: 154282 - protein, 116 aa, Unknown
  Bacterial polypetide isolated from the Sargasso Sea
GDPYHCYCQKTSRLMSEKYKEIPIKTTFQSRFGPQEWLQPYTDKILEGLPQEGKKNILVICPGFSSDCVETLEEIAIQGKESFMKSGGKNFDVIPCLNDNDDHINLIKKLISNFIL

SEQ ID NO: 154283 - protein, 220 aa, Unknown
  Bacterial polypetide isolated from the Sargasso Sea
METPSIKGKMKSLQKLGCENIVILPLYPQYAAATTATVCDEVYRTLMDMRWQPSLQIIPHYESEPLYIEALKRSLEKKISELNWKPDTIVASYHGIPKKYFDKGDPYHCYCQKTTRLLSEQFKQIPIQTTFQSRFGPQEWLQPYTDKTLENLPAEGKKNVLVICPGFSSDCVETLEEISMQGKESFIKNGGTKFDVVPCLNDNDDHINLLQHLAKKFIVK

SEQ ID NO: 154284 - protein, 144 aa, Unknown
  Bacterial polypetide isolated from the Sargasso Sea
MKTAVVLLNLGGPDRPESVKRFLFNLFNDPLIIRLPGFFRTPLAWLISTKRNKEAQAIYSEIGGKSPILEITNAQADTLSNKLTAQGMDNQVFVSMRYWHPMTDEVVQKVKSYNPDQVFLLPLYPQYSTTTTKSSLDIGLKNQK

SEQ ID NO: 154285 - protein, 103 aa, Unknown
  Bacterial polypetide isolated from the Sargasso Sea
KEKFTDFEIQTTFQSRFGPREWLKPYTDKTLESLPEQGIKNVLVICPGFASDCLETLEEINIQGKEIFLKNGGKNFDLIPCLNDNLDHIQLFETLVKRYLVQE

SEQ ID NO: 154286 - protein, 217 aa, Unknown
  Bacterial polypetide isolated from the Sargasso Sea
SIDGKIKDLKEKGCENLIILPLYPQYAAPTTATVCDEVFRSLMKLRWQPSLQIVSHYEENPLYIDAIVNSIKKKISEINWKPDLIIASYHGIPKKYFDKGDPYHCYCMKTTRLLKEKFKSIDIMTTFQSRFGPQEWLTPYTDKTLEEIPNQGKKNILVICPGFASDCVETLEEIAIQGKESFVDAGGENFDLIPCLNDNEDHINLLKNLVDSYLVRK

SEQ ID NO: 154287 - protein, 261 aa, Unknown
  Bacterial polypetide isolated from the Sargasso Sea
LYKKIWTEDGSPLMVFSKSIVDKLKVDSEKNITILLGMRYGTPSIENALKTFKEKNISKILVLPLYPQAGSPTTSSTFDVVNEHLKNSHWMPNLRFVSGYHDHDKYINALMENIEKSFKKNGIPDLLLFSFHGMPQRYLEKGDPYYCFCHKTARLVSEGLDLDDNLYEVAFQSRFGSEKWLEPHIDRLLIEKAKNGIEHIQIISPGFSVDCLETLEEINIQYRELFMENGGKQFEYIPCLNDTEMHIDLIKTMIDENIKSW

SEQ ID NO: 154288 - protein, 236 aa, Unknown
  Bacterial polypetide isolated from the Sargasso Sea
KLSSTMSEKDLIIDYSMRYGNPSIRSKIVTLHEQGCENLIILPLYPQYAAATTATVCDEVYRTLMKMRWQPSLKIVPHYESDPLYIEALVNSLNKKIKEINWKPDLILASYHGIPQKYFDKGDPYHCYCHKTTRLMSEKFTSIEIKTTFQSRFGPEKWLQPYTDKTLENLPREGKKNILAICPGFSSDCVETLEEIQIQGKESFLNSGGENFDMVPCLNDNDDHIVLLKSLIQKNI

SEQ ID NO: 154289 - protein, 201 aa, Unknown
  Bacterial polypetide isolated from the Sargasso Sea
MEKNHPKVNFGKTGVLLVNLGTPDSTSWLDIRRYLKEFLSDKRVIEVNPIIWKIILNLFILNFRPSKTAEAYKKIWMQKENMSPLRYYTIMQTKKLQKKIIKESIIIDYAMRYGSPSIASKMNLLREKGCENIIILPLYPQYSSATTATVCDEVYRTIMKMRWQPSLQIIPHYESEPLYIEGLKKSIEKKISEINWKPDLI

SEQ ID NO: 154290 - protein, 185 aa, Unknown
  Bacterial polypetide isolated from the Sargasso Sea
MIKDHPPVKFGKTAVLLVNLGTPDSTSWFDIRKYLKEFLSDKRVIEVNPIIWKVILNVFILNFRPSKTAKAYKEIWMKKENISPLRFYTQNQSLKLKEEFSKTDLIIDFAMRYGNPSIKSKIKHLHELGCENLIVLPLYPQYAAATTATVCDEVYRTLMKMRWQPNLKIVPHYESEPLYIEALKN

SEQ ID NO: 154291 - protein, 153 aa, Unknown
  Bacterial polypetide isolated from the Sargasso Sea
SYHGIPKRQAKKTDITGSHCFSSADCCETICPGSSDCYKAHTVQASNKVAEELGLSDNQWEIAYQSRLGPGWLTPFTDRRLAEMPTKDLKSVLVVCPSFISDCLETLEEIEIRGRDTFFNSGGEKMTYIPCLNDSNDTINLLESLVLESEIKK

SEQ ID NO: 154292 - protein, 211 aa, Unknown
  Bacterial polypetide isolated from the Sargasso Sea
TERQAEKLSEQIGNEKIIVDFAMRYGNPSIKSKIHKLHKEGCENLIIFPLYPQYAAATTATVCDEVYRTLMKMRWQPNLKIIPHYESEPLYIEAIKNSIKKKVNEIDWKPDLIIASYHGIPKKYFDKGDPYHCYCHKTTRLISEKYSDIEIKTTFQSRFGPQEWLQPYTDKTFETLPKEGKRNILVICPGFSSDCVETLEEISIQGKESFI

SEQ ID NO: 154293 - protein, 201 aa, Unknown
  Bacterial polypetide isolated from the Sargasso Sea
CENLVILPLYPQYAAATTATVCDEVYRTLMNMRWQPSLKIIPHYESNPLYIEALVKSINKKISEIDWKPDLILASYHGIPKKYFDKGDPYHCYCHKTTRLITEKLNSIEIKTTFQSRFGPQKWLQPYTDKTLEELPKEGKKNVLAICPGFSSDCVETLEEILIQGKESFMESGGENFDMVPCLNDSDDHILLLKNLIEKNI

SEQ ID NO: 154294 - protein, 186 aa, Unknown
  Bacterial polypetide isolated from the Sargasso Sea
MDKNHPEVKFGKTGILIINLGTPDTTGWWDIRKYLKEFLSDRRVIEVNPIVWQLILNLFILTFRPSKTAHAYKQIWRKESNESPLLYFTKSQAKKLNEKIGNDKIIVDFAMRYGNPSINYKLNNLKEKGCENVIVLPLYPQYAAATTATVCDEVYRSLMKMRWQPSLQIIPHYESDNLYIDALIKS

SEQ ID NO: 154295 - protein, 269 aa, Unknown
  Bacterial polypetide isolated from the Sargasso Sea
FLVNLGTPSQPTEKEVRIYLREFLSDKDVIRLPRIFWLPLLHLIILRVRPKKSAELYKKVWTKWGSPLLYNTFLQAGLLRKKFQDEFIIDVAMRYGSPSIESMMLKYYKQGYNNLLFLPMFPQYSTTTTKSIANQIARVIKKNKIYTDENTISFIKEFHDNDDYIDSSVTHIQTYQKIYGKPEKLLLSFHGIPKSYVGDDEPYQSQCFKTANLIAKQLKLSANQYEIVFQSRFGKSEWIQPYLAERLENLPSEGITNIQVYCPGFSSDV

SEQ ID NO: 154296 - protein, 65 aa, Unknown
  Bacterial polypetide isolated from the Sargasso Sea
MKSDHPKINYGKTGILLVNLGTPDSTSWWDIRKYLKEFLSDRRVIEVNPIIWQVILNLFILTFRP

SEQ ID NO: 154297 - protein, 229 aa, Unknown
  Bacterial polypetide isolated from the Sargasso Sea
EFTQTQAKSLENNLLKKGDYKCFVIMRCWHPRAENVIKEVKEYNPEEIILLPLYPQYSASTSGSSIKEWNDLCKRENYKIKTKTICCYPTENNFLESHTNLIKKTIKNLENKNFKLLFSAHGLPENKIKKGDPYQWQVEKTVEGIMKKLTNENPDYIICYQSRVGPLKWIGPSTDEIIIKYSKEKKGIVIVPVAFVSEHSETLVELDIEYKKLAEKNGCSFYKRVPALG

SEQ ID NO: 154298 - protein, 225 aa, Unknown
  Bacterial polypetide isolated from the Sargasso Sea
VILMPLYPQYSAATSGSSINEWQNICKKNNFEVKTCTLCCYPTDDNFIQAHKDEIEKKIKNLDNFKLIFSAHGLPEKNIKKGDPYQWQVEQSVDKIVKSLNIKNLDWILSYQSRVGPLKWIGPSTEDIIVENSKLGKQIVLVPIAFVSEHSETLVELDIEYKELADKNGCKNYIRIPALGKNENYIKAMSNLIINKQDYNFNGELFPPKIQCPSKFKKCPCLSHE

SEQ ID NO: 154299 - protein, 169 aa, Unknown
  Bacterial polypetide isolated from the Sargasso Sea
MIENNHPPTKYGNTGVLIINLGTPDSTNWFDIRKYLKEFLSDRRVIEVNPLVWQIILNLFILNFRPSKTAKAYKEIWMKNENISPLLYYTKKQSEKISNLLSKENVIIDFAMRYGNPSIKGKIHKLHKMGCENLVILPLYPQYAAATTATVCDEVYRTLMKMRWQPSLK

SEQ ID NO: 154300 - protein, 186 aa, Unknown
  Bacterial polypetide isolated from the Sargasso Sea
ATTATVCDEVYRTLMQMRWQPSLKIIPHYESDSLYIDALVKSINKKINEINWKPDLIIASYHGIPKKYFDKGDPYHCYCHKTTRLISEKFNSIEIKTTFQSRFGPQEWLQPYTDKTLESLPKEGKKNILTICPGFASDCVETLEEILIQGKESFLSSGGENFDMIPCLNDNNDHINLLKSLIEKNL

SEQ ID NO: 154301 - protein, 269 aa, Unknown
  Bacterial polypetide isolated from the Sargasso Sea
MKTKKGLLLINLGTPDDPGYLSVFKYLRQFLMDPKVITVPYILRFILVSLIIVPFRAFSSGRIYKKIWTENGSPLIVNTSALADKVSKKVPNIEVEFAMRYQSPSIEDKLKKLISQNLDEIIILPLFPQYSTATTGSVFDEISRVLKKQSVTPSIKFINQFYEQKSFIDSWEERLQSFNVEEYDHILFSYHGLPTKAVDDIYEDSLCADNNCENEITNENKFCYKATCYETTRLIANRFSLSPDKYTVSFQSRLTKNWLEPFTDEVLES

SEQ ID NO: 154302 - protein, 91 aa, Unknown
  Bacterial polypetide isolated from the Sargasso Sea
FQSRFGREEWLQPYIDEEIIKFAQSGLRNLHVISPGFSVDCLETLEEIQIQYEELFISNGGQNFSYIPCLNSDIDHINILKNIINENIIGW

SEQ ID NO: 154303 - protein, 254 aa, Unknown
  Bacterial polypetide isolated from the Sargasso Sea
PPIWQIILNLFFLNFRPSKTSHAYKQIWRKETNESPLLYFTKNQAKELSKEIGSEKIVVDFAMRYGNPSINSKLNKLKEEGCENIIILPLYPQYAAATTATVCDEVYRSLMRMRWQPSLQIIPHYESDPLYIDALVNSIERKVNEIKWKPDLIISSYHGIPKSYFEKGDPYHCYCHKTTRLMKEKYKEIEIQTTFQSRFGPQEWLTPYTDKTIESLPGKGIKNLLIICPGFASDCVETLEEINIQGRESFIEKG

SEQ ID NO: 154304 - protein, 206 aa, Unknown
  Bacterial polypetide isolated from the Sargasso Sea
MKKAVILFNLGGPDKLENVKPFLFNLFNDPAILNLPTFLRYPLAKLIANRRTPIAKKIYEELGGSSPILKLTKDQSIALEKKLNQNEKSEEYKCFIVMRCWHPRAEEIIKSVKLYNPDEIILMPLYPQYSAATSGSSIKEWNDVCKKNNYKIKTSIICCYPIDKNFINAHTKEINKKIKDLKNFKLIFSAHGLPEKNIKKGDPYQW

SEQ ID NO: 154305 - protein, 162 aa, Unknown
  Bacterial polypetide isolated from the Sargasso Sea
MIEDHPKVQFGKTGVLIVNLGTPDSTSWFDIRKYLKEFLSDRRVIEVNPILWQIILNLFILNLRPSKTAKAYKEIWMKDENMSPLRYYTLKQADKLTKEIGNKNLLVDYAMRYGNPSIKSKIHSLKENGCENLIVLPLYPPYAAATTATVCDEVYRTLMKMR

SEQ ID NO: 154306 - protein, 123 aa, Unknown
  Bacterial polypetide isolated from the Sargasso Sea
IPKKYFDKGDPYHCFCHKTTRLVSEKFKSIEIKTTFQSRFGPQEWLQPYTDKTLENLPKEGKKNILTICPGFSSDCVETLEEILIQGKKSFMDSGGENFDMIPCLNDNDDHINLLKNLIQKNI

SEQ ID NO: 154307 - protein, 160 aa, Unknown
  Bacterial polypetide isolated from the Sargasso Sea
PHYESDPLYVDALVNSINLKIKNINWKPDLILASYHGIPKKYFDKGDPYHCYCHKTTRLVSEKFKSIEIKTTFQSRFGPQEWLQPYTDKALENLPKEGKKNVLTICPGFSSDCVETLEEILIQGKKSFMESGGENFDMIPCLNDNDDHINLLKNLIQKNI

SEQ ID NO: 154308 - protein, 216 aa, Unknown
  Bacterial polypetide isolated from the Sargasso Sea
MKKAVILFNLGGPDKLESVEPFLFNLFNDPAIISIPSIFRYPLAKLISKRRAPVAKNIYREIGNKSPILELTQNQAKSLENTLSAKGDYKCFVIMRCWHPRAADVIKEVKEYDPDEIILLPLYPQYSASTSGSSIKEWNHLCRKENYEVNTKTICCYPSENNFLQSHANLIKKTIKDLENKDFKLLFSAHGLPENKIKKGDPYQWQVEQTVDGIMA

SEQ ID NO: 154309 - protein, 132 aa, Unknown
  Bacterial polypetide isolated from the Sargasso Sea
DSCLLSRYSKKYFEKGDPYHCYCQKTTRLISEKFKEVKIITTFQSRFGPQEWLQPYTDKTLEELPSKGNKKVLVISPGFASDCVETLEEISIQGKESFEKSGGENFGFIPCLNDNEDHIKLLEHLIKKHLNQ

SEQ ID NO: 154310 - protein, 289 aa, Unknown
  Bacterial polypetide isolated from the Sargasso Sea
MKKAIILFNLGGPDNLNSVEPFLFNLFNDPAIINLPNFLRYPLAKIISKRRTPIAKKIYEEMGGSSPILKLTKEQAHELELSLNFSQKEINYKTFIAMRCWKPRASEVIKDIINFGPNEMILLPLYPQFSYSTSGSSINEWKDVCKKNKYNIKTSTICCYPTEENFIKAHVDEISKKIGKNKNEKLIFSAHGLPEKNIKNGDPYQWQIERTVQEIVKKINIKNLDYILSYQSRVGPLKWIGPSTDDVIVENSKIGKSIILVPIAFVSEHSETLVELDIEYKKLAKDNGC

SEQ ID NO: 154311 - protein, 214 aa, Unknown
  Bacterial polypetide isolated from the Sargasso Sea
SIKSKIHKLHKMGCENLVILPLYPQYAAATTATVCDEVYRTLMKMRWQPSLKIIPHYESDSLYIDALVNSIDKKIKGINWKPDLIIASYHGIPKKYFDKGDPYHCYCHKTTRLISEKFTSIGIKTTFQSRFGPQEWLQPYTDKTLENLPKEGVKNVLTICPGFASDCVETLEEIQIQAKESFLNSGGENFDMVPCLNDNSDHITLLKSLIERNI

SEQ ID NO: 154312 - protein, 93 aa, Unknown
  Bacterial polypetide isolated from the Sargasso Sea
MENHPKINFGKTGIMLVNLGTPDSTSWLDIRKYLKEFLSDRRVIEVNPIIWQLILNIFILTFRPSKTAKAYKEIWMKEENMSPLRYYTEKQAS

SEQ ID NO: 154313 - protein, 187 aa, Unknown
  Bacterial polypetide isolated from the Sargasso Sea
AATTATVCDEVYRSLMNMRWQPSLKIIPHYESDPLYINALVNSINKKINEINWKPDLILASYHGIPKKYFDKGDPYHCYCHKTTRLISEKFDSIEIKTTFQSRFGPQEWLQPYTDKTLENLPKEGKKNVLAICPGFSSDCVETLEEILIQGKESFINSGGENFDMIPCLNDSDDHITLLKSLIQKSI

SEQ ID NO: 154314 - protein, 166 aa, Unknown
  Bacterial polypetide isolated from the Sargasso Sea
PSLQIIPHYESEPLYIKALSNSLKTKISELEWKPDLILASYHGIPQKYFDKGDPYHCYCHKTSRLLSENFKTIEIRTTFQSRFGPEAWLKPYTDVTLEKLPKEGKKNIVVICPGFSSDCVETLEEISIQGKESFIRSGGRNFDVVPCLNDSEGHIDLLEQLTKKFL

SEQ ID NO: 154315 - protein, 148 aa, Unknown
  Bacterial polypetide isolated from the Sargasso Sea
LVNSINTKLAGINWKPDLILASYHGIPKKYFDKGDPYHCYCHKTTRLISEKFTSIKIKTTFQSRFGPEEWLKPYTDKTLENLPNEGVKNVLAICPGFSSDCVETLEEILIQGKESFLEAGGQNFDMISCLNDNDDHIKLLSNLIKKNI

SEQ ID NO: 154316 - protein, 165 aa, Unknown
  Bacterial polypetide isolated from the Sargasso Sea
NLKIIPHYESEPLYIDAINNSIIKKINEINWKPDLIVASYHGIPKKYFDKGDPYHCYCHKTTRLISEKYSDTKIMTTFQSRFGPQEWLQPYTDKTFEALPKEGKKNILVICPGFSSDCVETLEEISIQGKESFIKSGGENFEMIPCLNDNEDHISLLKHLISKNL

SEQ ID NO: 154317 - protein, 267 aa, Unknown
  Bacterial polypetide isolated from the Sargasso Sea
ALQKVLGDAYRVFIAMRYWHPFAEETAKDVAAWKPDRVVLMPLYPQFSTTTTKSFTRIWTPAAQAAEMDVPTADICCWPEAAGFIDTMTRAAEASIDRLPHGVGYRILYSAHGLPKKIVEAGDPYAHQVERTAAAVQKKLRDPSADHVICYQSRVGPMEWLKPYTEDEIRRAGADGKALVVVPVAFVSEHSETLVELDIEYSELAEEAGVPAYIRAPTVNDDPAFIETLAGIVRGACNTGTAAGGEICVAGFADCPCNGQDSTREAT

SEQ ID NO: 154318 - protein, 173 aa, Unknown
  Bacterial polypetide isolated from the Sargasso Sea
MNKDHPQVNFGKTGVLLVNLGTPDSTKWLDIRRYLKEFLSDKRVIEVNPFLWKIILNLFILNLRPSKTAKAYKEIWMKKEDMSPLRYFTIMQTKKLLDRISNKDVIVDYAMRYGNPSIKSKIQKLHEVGCERLIVLPLYPQYAAATTATVCDEVYRVLMGMRWQPSLNIVPQL

SEQ ID NO: 154319 - protein, 170 aa, Unknown
  Bacterial polypetide isolated from the Sargasso Sea
MELDNNHPSIKFGKTGVLIVNLGTPDSTGWLDIRKYLKEFLSDKRVIEVNPIIWQFILNVFILTFRPSKTAKAYKEIWMKDENMSPLLYYTQKQSEKISSSISKENLLIDFAMRYGNPSIKSKIYRLQQQGCENLVILPLYPQYAAATTATVCDEVYRTLMQMRWQPSLK

SEQ ID NO: 154320 - protein, 228 aa, Unknown
  Bacterial polypetide isolated from the Sargasso Sea
NIILGEIILLPLYPQYSASTSGSSIEEWNDLCIKENYKVKTKTICCYPTENNFIESHANLIKKTLKNLDNKNFKLLFSAHGLPEIKIKKGDPYQWQVEQTVEGIMSKLTDENPDYIISYQSRVGPLKWIGPSTDEIIIKYSKEKKGIVIVPVAFVSDHSETLVELDIEYKKLAEKNGCSFYKRVPALATEENFIKGLAELVLQEETRSNFVSSIMCPNKYVKCPCLAK

SEQ ID NO: 154321 - protein, 155 aa, Unknown
  Bacterial polypetide isolated from the Sargasso Sea
YIDALVKSINKKISELSWKPDLIVASYHGIPKKYFDKGDPYHCYCQKTSRLIIEKFNKIPIQTTFQSRFGPQEWLQPYTDKTLENLPKEGKKNILVICPGFSSDCVETLEEIAIQGKNSFFKNGGKNFDIVPCLNDDEEHINLLKHLVDRYNLKK

SEQ ID NO: 154322 - protein, 153 aa, Unknown
  Bacterial polypetide isolated from the Sargasso Sea
LYVDAIKNSIIKKVSEINWKPDLLIASYHGIPKKYFDKGDPYHCYCHKTTRLISEKYSDIKIMTTFQSRFGPQEWLQPYTDKTFEVLPKEGKKNILVICPGFASDCVETLEEISIQGKESFIKSGGENFEMVPCLNDNDDHISLFKHLISKNL

SEQ ID NO: 154323 - protein, 354 aa, Unknown
  Bacterial polypetide isolated from the Sargasso Sea
MFDETASIAIPKHAGTDHPKIPKKRIGILLANLGTPDHYDYWSMRRYLSEFLSDRRVIDYSPWLWQPLLQLVILSIRPSRSGAAYKSIWNNEGNESPLMTITRNQTLKIKKVMEKKYGEEIKVDFCMRYGNPSTQSKVREMVQEGCTKILFFPLYPHYAGATSATANDQFFRALMQEKWQPVIRVVEPYFDQPQYIEALARSVEAAYASKKTRPEILVCSYHGVPKRYLMQGDPYHCQCQKTTRLLKERLGWKDTEIITTFQSKFGPEEWLKPYTVEEVARLVEEEKKKSIAVIAPAFSSDCIETLEEINEEIKESFEEAGGEEFTYIPCLNDSTAHIDALSSLIDKNLRGWID

SEQ ID NO: 154324 - protein, 177 aa, Unknown
  Bacterial polypetide isolated from the Sargasso Sea
MNTDHPKVKFGKTGVMIINLGTPDSTNWWDIRKYLKEFLSDRRVIEVNPIIWKVILNLFILTFRPSKTAYAYKKIWRKKSNESPLLYFTKEQANKLNTKIGNDKIIVDFAMRYGNPSIKYKLNKLKENGCENIIILPLYPQYAAATTATVCDEVYRSLMKMRWQPSLQIIPHYESEP

SEQ ID NO: 154325 - protein, 147 aa, Unknown
  Bacterial polypetide isolated from the Sargasso Sea
HLKDRDEIDKLVISFHGIPKRYFMAGDPYHCHCIKTARLLKEELKWPQNKVLVTFQSRFGPEPWLQPYTDQTIIELAKQGSKNIAVIAPGFISDCLETLEELNVEAREFFMENGGKTFQYIPCLNDNEYSIKFLNEIVKQNLLGWNN

SEQ ID NO: 154326 - protein, 277 aa, Unknown
  Bacterial polypetide isolated from the Sargasso Sea
MAIILNLFILNFRPSKNAKAYNEIWMKDENISPLLYYTKKQSEKISNLLTNENIITDFAMRYGNPSIKSKIHKLHKMGCENLVILPLYPQYAAATTATVCDEVYRTLMKMRWQPSLKIIPHYESDTLYIDALVNSIYKKINEISWKPELIIASYHGIPKKYFDKGDPYHCYCHKTTRLISEKFTSIEIKTTFQSRFGPQEWLQPYTDKTLENLPKEGVKNVLTICPGFASDCVETLEEIQIQAKESFLNSGGENFDMVPCLNDNNDHITLLKSLIEK

SEQ ID NO: 154327 - protein, 332 aa, Unknown
  Bacterial polypetide isolated from the Sargasso Sea
MKKTLLIVNLGTPDKPNYFSVFKYLRQFLMDGRVINVNPIIRFFLVNLLIVPFRTFSSSKIYRQVWDKETGSPLLYNTKKLAEKLNSKLPDYDVEYAMRYQNPSLEKVINKILLKNPDEIIILPLFPHYAAATTGSVYEEVSRIISKKWVVPKIKFINQFYDNEKFINAWIEKANKFDINAYDKIIFSYHGIPNSHVDNVYEDSVCSDHDCEIKITEKNKFCYKATTYETTKILASKLNIKDDNYIVTFQSRLTNKWLTPFTDEVLESLAKEGKKNILIFSPAFTADCLETIIELGDEYKELFIEAGGDNLDYVESLNYSDTWADAIIDIIK

SEQ ID NO: 154328 - protein, 340 aa, Unknown
  Bacterial polypetide isolated from the Sargasso Sea
MSQKNILLINLGSPKSLDLKNVKEYLLEFLSDDYVIDLPKLIQQLIIRGIILPFRAPKTRKAYKTIWGESGSPLIDNTKKIANSLSERMGWNVRIAMRYQYPSIKESILFYKEKEINDVVVVPLYPHNAMSTTYSTSKEVDRIVKQYYPELNYSIIKPFYNHPKYIYALSELIRPYINNKMDKLIFSYHGLPERHIKKSDSSGEHCLQGLLCCETDCQFSQNCYRSNTLTTSKLVSDKLDLSEDKWMSAFQSRVTLIQRKWLKPYTDIELTNFPKKEINNIVIICPSFVADCLETLEEIDIRGRELFLKKGGKEFIFIPCLNNDINFIKLLEDLIINSSE

SEQ ID NO: 154329 - protein, 195 aa, Unknown
  Bacterial polypetide isolated from the Sargasso Sea
MNSEHPKVNFGKTGVLIVNLGTPDSTSWLDIRKYLREFLSDRRVIEVNPIIWQIILNLFILNFRPSKTAKAYKEIWMKDKNMSPLRYFTEVQAEKLSQQISNEKLIVDFAMRYGNPSIKSKIHGLQNKGCENLIILPLYPQYAAATTATVCDEVYRTLMKMRWQPNLKIIPHYESEPLYIEALKNSILKKIKEIN

SEQ ID NO: 154330 - protein, 337 aa, Unknown
  Bacterial polypetide isolated from the Sargasso Sea
MTTILVLNLGSPKDLKKKNVREYLREFLSDDLVIDLPKPLQQFILRCFILPFRPKATKEAYEKIWTKEGSPLLINTENIAKKLSAAMKLPTMVAMRYQDPSTRQAIMQLKEQGETHVIVLPLYPHNARATTLTTELDVKKHIKEVYPELQATYIKPFYHEDIYIDALAKNIKSQINKEYDMILFSYHGIPKAQLRRTEIGKKHCLVVEDCCNQVCDASAECYKSNLTTATEKVVQKLNIPDEKWKITFQSRIGPGWLQPFTDKELIALGKSDKKRVMVASPSFVADCLETLEEIAIRGKDSFMDAGGSEFTQIKCLNDSEESIECLTYVINKAINKL

SEQ ID NO: 154331 - protein, 164 aa, Unknown
  Bacterial polypetide isolated from the Sargasso Sea
IIPHYESEPLYIEALKNSLEKKLSELNWKPDAIVASYHGIPKKYFDKGDPYHCYCQKTTRLLSEEFKQIPIQTTFQSRFGPQEWLQPYTDKTLENLPAEGKKNVLVICPGFSSDCVETLEEISMQGKESFIKSGGLNFDVVPCLNDNDDHINLLQHLAKKFILK

SEQ ID NO: 154332 - protein, 258 aa, Unknown
  Bacterial polypetide isolated from the Sargasso Sea
IKKSEERKQRVSFIVFTRNQANKLKQKIGNEKIIIDFAMRYGNPSIRSRLTKLQKEGCENIIILPLYPQYAAATTATVCDEVYRSLMKMRWQPSLQIIPHYESDPFYISALINSIEKKIKEINWKPDLIIASYHGIPKSYFDKGDPYHCYCHKTTRLIKEKFNKVEIQTTFQSRFGPQEWLTPYTDKTLESLPYKGIKNLLVICPGFASDCVETLEEINIQGKESFIKNGGVNFDLIPCLNDNLDHIRLFEKLVKKYL

SEQ ID NO: 154333 - protein, 332 aa, Unknown
  Bacterial polypetide isolated from the Sargasso Sea
MQKELNHPPINFGKTGALIINLGTPDSTSWFDIRKYLKEFLSDKRVIEVNPIVWQIILNVFILNFRPSKTAKAYKEIWMKDENISPLLYYTQEQAKKLSNSLSGKNLIIDYAMRYGNPSIKSKIKKLHEKGCENLIILPLYPQYAAATTATVCDEVYRTLMKMRWQPSIKIIPHYESHPLYIDALVNSLNKKIKEINWKPDLILASYHGIPQKYFDKGDPYHCYCQKTTRLISEKFNSIEIKTSFQSRFGPQKWLEPYTDKTLEKLPKEGKKNVLAICPGFSSDCVETLEEILIQGKESFLESGGENFDMVPCLNDNNDHINLLKSLIQQNI

SEQ ID NO: 154334 - protein, 216 aa, Unknown
  Bacterial polypetide isolated from the Sargasso Sea
MNIDHPNINYGKTGILLVNLGTPNSTGWFDIRKYLKEFLSDRRVIEVNPFLWKIILNLFILNFRPSKTAEAYKKIWMKNENVSPLRYYTQMQTKKLKEKIKDKKIIIDYAMRYGDPSINSKMRSLQSEGCENIVILPLYPQYAAATTATVCDEVYRTLMKMRWQPSLRIIPHYESEPLYIEALVKSLNKKISEINWRPNLIVASYHGIPKKYFEKR

SEQ ID NO: 154335 - protein, 281 aa, Unknown
  Bacterial polypetide isolated from the Sargasso Sea
LFWKVILNLFILTFRPSKTAHAYKKIWRKKSNESPLLYFTKEQANKLNTKIGNDKIIVDFAMRYGNPSIKYKLNKLKENGCENIIILPLYPQYAAATTATVCDEVYRSLMKMRWQPSLQIIPHYESEPSYIDSLIKSIEKKLNEINWKPDLIISSYHGIPKSYFDKGDPYHCYCHKTTRLMREKFKKIEIQTTFQSRFGPQEWLTPYTDKTLESLPDKGVKKLLVICPGFASDCVETLEEINIQGRESFLENGGEKFDLIPCLNDSEDHINLFEKLLSKYL

SEQ ID NO: 154336 - protein, 218 aa, Unknown
  Bacterial polypetide isolated from the Sargasso Sea
MEIQVLKVKFICLQKKGCENLIILPLYPQYAAATTATVCDEVYRTLMKMRWQPNLKIIPHYESEPLYIEAIKNSILKKISEINWKPDLIIASYHGIPKKYFDKGDPYHCYCHKTTRLISEQYSDIEIKTTFQSRFGPQEWLQPYTDKTFETLPKEGKKNILVICPGFSSDCVETLEEISIQGKESFIKSGGENFEMVPCLNDSEDHISLLKHLVTKNL

SEQ ID NO: 154337 - protein, 329 aa, Unknown
  Bacterial polypetide isolated from the Sargasso Sea
MKGILLVNLGSPKDLDSHSIKEYLTEFLSDDLVIDYPKFLQQILVNWIIVPNRYKKTQRAYAKIWTESGSPLINNTKELGLKLAKDSCLHVEVAMRYQEPSIKDALIKLKSKGCNEIKAMPLYPHYAISTTLTTQEKIKDIAESIDKEIKIEFIKSFYNEPEYIDALCSLIKKNRIEDSDLLLFSYHGIPLRHLKKAKGKSNNGYYCSNAWCPSKEYCYRHQVYETSRLCAEKLNIPKEKWQVSFQSRIGPGWLKPFTDEVLKELPDKGIKKVDVICPSFVIDNLETLEEISIEGRHDFLAAGGEKFNYIPCLNYEEDWVEVLKNMSKK

SEQ ID NO: 154338 - protein, 334 aa, Unknown
  Bacterial polypetide isolated from the Sargasso Sea
MKTKKGLLLINLGTPDDPGYLSVFKYLRQFLMDPKVITVPYILRFILVTLIIVPFRAFSSGRIYKKIWTGKGSPLIVNTSALVDKVRKKVPNIEVEFAMRYQSPSIEDKLKKLISQNLDEIIILPLFPQYSTATTGSVFDEISRVLKKQSVTPSIKFINQFYEQESFIDSWEDKMKSFNVDKYDHILFSYHGLPTKAVDDIYDDSLCADNNCENEITNENKFCYKATCYETTRLIASRFNLPPDKYTVSFQSRLTKNWLEPFTDEVLESFPNKGIENILVLSPAFTADNLETLYEIDDEYKELFIENGGKSLTMVPSLNDSSKWADSIVEIIDV

SEQ ID NO: 154339 - protein, 125 aa, Unknown
  Bacterial polypetide isolated from the Sargasso Sea
LTNGDPYHCFCLKTTRLVKEKMNLADEEIITTFQSRFGRAEWLKPYTAETLKELPSKGVKDIHIISPGFSADCLETLEELEEENREYFIEAGGEKYKYIPCLNDNEKHLKFISHLIIKHTQGWKV

SEQ ID NO: 154340 - protein, 94 aa, Unknown
  Bacterial polypetide isolated from the Sargasso Sea
SLAFQSRFGREEWLKPYVDEEIIKFAKNGVKKLHIISPGFSVDCLETLEEIQIQYKDLFIENGGEDLVYIPCLNSNEDQIKMLQSMVQENIIGW

SEQ ID NO: 154341 - protein, 182 aa, Unknown
  Bacterial polypetide isolated from the Sargasso Sea
MVKYFGEKNYEHGSDDKTGVLITNLGTPDAPKRKELKKYLNQFLSDPRVIEIPKFIWQLILQLVILQIRPSKSAAAYKKIWTENGSPLLDISIRQLNAIKNKLSKSDPNMVIALGMRYGNPSIENALKKLQSQHVRRLLILPLYPQYCAATTGSTFDAVTNVLQKWRWIPEVRFINQYLKKN

SEQ ID NO: 154342 - protein, 332 aa, Unknown
  Bacterial polypetide isolated from the Sargasso Sea
MKKALLLVNLGTPDKPTYLSVFKYLRQFLMDGRVININPFLRFILVNFIICPTRSFSSTKVYKEVWDKNTGSPLLHNTTKLTEKLADKIEDYDVNFAMRYQNPSIESVINNMLETNPDEITVLPLFPHYAAATTGSVYQEISRIISKKWVVPNIRFINQFYDNEKFIDAWVDKASKFDLNSYDKVIFSYHGIPNSHVDNVYPDSLCSDHNCESEVTNENKFCYKATTYETTKILASRLNLSPDKYQVTFQSRLTNKWLTPFTDEVLESLPGNGNKNVLVFSPAFTADCLETIIEIGDEYKELFLEAGGEKLDYVESLNYSDLWADAIIDIIK

SEQ ID NO: 154343 - protein, 131 aa, Unknown
  Bacterial polypetide isolated from the Sargasso Sea
MIIASYHGIPKKYFDKGDPYHCYCQKTTRLISEKFKKFEIKTTFQSRFGPQEWLKPYTDKVIENLPKEGKKNILVICPGFSSDCVETLEEISIQGKEIFLKAGGINFEAVPCLNDNKDHIQLFKYLINKRL

SEQ ID NO: 154344 - protein, 183 aa, Unknown
  Bacterial polypetide isolated from the Sargasso Sea
DAINAHIKDQSWVPNIRFISGYHDDENYINSLSVSIEKSFSKHGRPDKLIFSYHGMPERYLHEGDPYYCFCHKTTRLVAERLSLDSKFYDMAFQSRFGYEKWLQPYIDDMIPKAADDGVRHLQIISPGFSVDCLETLEEINIQYRELFLEQGGEKFEYIPCLNDGDDHIKMIQSIINNNIKGW

SEQ ID NO: 154345 - protein, 233 aa, Unknown
  Bacterial polypetide isolated from the Sargasso Sea
NLVKEFNPSEVVLLPLYPQYSAATSGSSIQEWKKVAKENNLNTKTSTICCYPEDNKFVEAHIELIKKKIEGLKNFKLIFSAHGLPEKNIKKGDPYQWQVEQSVKKIMEGINNNNIDYVLSYQSRVGPLKWIGPSTEDIIIEYSKKGKHLVIVPIAFVSEHSETLVELDIEYEKLARNNGCKNYTRIEALGTNKNFIQSLSDLIANKDLNNFKENLYPPKNRCPSSFTKCPCLN

SEQ ID NO: 154346 - protein, 46 aa, Unknown
  Bacterial polypetide isolated from the Sargasso Sea
MIEKNHPPIKYGNTGVLIVNLGTPDSTNWFDIRKYLKEFLSDRRVM

SEQ ID NO: 154347 - protein, 179 aa, Unknown
  Bacterial polypetide isolated from the Sargasso Sea
MDKIGVLLMNLGGPERITDVGPFLYNLFSDPEIIRTPFPVFQKPLAWLISTLRSTTSQQAYLSIGGGSPIRRITEQQARELQSKLRNKGFNATTYIAMRYWHPFTESAIADMKADGIDQVVVIPLYPHFSISTSGSSFRELKKLRDSDDEFKKVPMRCVRSWFSQAGYLKSMVELISEQ

SEQ ID NO: 154348 - protein, 333 aa, Unknown
  Bacterial polypetide isolated from the Sargasso Sea
MVNLGSPKELNKKSVKEYLKSFLSDDLVIDIPKFFQQLILHTLILPFRPRQTLHAYKQIWTEEGSPLIVSTKKIAKKLTKKTKWRVEIAMRYEDPSIEDALKTLKEEDCNKLFVVPLYPHNAMATTMTTEEEVKRVAKNLFYDVELIFIKPFYNNTKYLNALKKSIDPYIEGGNFDKLIFSYHGIPKRQAKKTDITGTHCFSSSDCCETICPGSSNCYKAHTVQASNKVAEELGLSDDQWEIAYQSRLGPGWLTPFTDKRLAKMPSKDLKSVLVVCPSFISDCLETLEEIEIRGRDTFFNSGGEKMTYIPCLNDSNDTIDLLESLVLESEIKR

SEQ ID NO: 154349 - protein, 130 aa, Unknown
  Bacterial polypetide isolated from the Sargasso Sea
ILASYHGIPKKYFDKGDPYHCYCHKTTRLISEKFKSVKIKTTFQSRFGPQEWLQPYTDKTLENLPKEGKKNVLAICPGFSSDCVETLEEILIQGKESFMEAGGENFDMIPCLNDNDDHIKLLNSLIKSNI

SEQ ID NO: 154350 - protein, 230 aa, Unknown
  Bacterial polypetide isolated from the Sargasso Sea
NNEKLTVDFAMRYGNPSIKNKIYELQNKGCENLIILPLYPQYAAATTATVCDEVYRTLMKMRWQPNLKIIPHYESEPLYIEAIKNSILKKINEINWKPDLIVASYHGIPKKYFYKGDPYHCYCYKTTRLISEKYSDIEIKTTFQSRFGPQEWLQPYTDKTLESLPKEGKKNILVICPGFSSDCVETLEEICIQGKEIFIKSGGENFEMVPCLNDNDDHIALFEHLILKNT

SEQ ID NO: 154351 - protein, 334 aa, Unknown
  Bacterial polypetide isolated from the Sargasso Sea
MKTKKGLLLINLGTPDDPGYLSVFKYLRQFLMDPKVITVPYILRFILVSLIIVPFRAFSSGKIYKKIWTENGSPLIVNTSALADKVSKKVPHIEVEFAMRYQSPSIEDKLKKLISQNLDEIIILPLFPQYSTATTGSVFDEISRVLKKQSVTPSIKFINQFYEQESFIDSWEDKLKSFDVDEYDHILFSYHGLPTKAVDDIYEDSLCADNNCENEITNENKFCYKATCYETTRLIANRFNLSQDKYTVSFQSRLTKNWLEPFTDEVLESFPGRGIENILVLSPAFTADNLETLYEIDDEYKELFIENGGKSLTMVPSLNDSSKWADSIVEIIDA

SEQ ID NO: 154352 - protein, 237 aa, Unknown
  Bacterial polypetide isolated from the Sargasso Sea
MEKQDPNFSIELGMRYGNPSIKNALKIFKEKTISKILVLPLYPQAGSPTTTSTFDAINAHIKDQSWVPNLRFISGYHDDENYINSLSASIEKSFSKHGRPDKLIFSYHGMPERYLHEGDPYYCFCHKTTRLVVERLSLDSEFYDMAFQSRFGYEKWLQPYIDDMIPKAADDGVRHLQIISPGFSVDCLETLEEINIQYRELFLEHGGEKFEYIPCLNDGDDHIKMIQSIINNNIKGW

SEQ ID NO: 154353 - protein, 202 aa, Unknown
  Bacterial polypetide isolated from the Sargasso Sea
MRKAVILFNLGGPDSLSSVEPFLFNLFNDPAIISLPTILRYPLAKLISKRRAPTAKAIYSEMGGSSPILKQTKMQALAIEESLKDESDDYKCFIVMRCWKPRASFVIKEIINYKPEQIILLPLYPQYSDSTSGSSIREWLGECKKNNITTETKIICCYPTEDNFILSHVNLIKEKVSLTELDNTIIIFSAHGLPENKIKKGD

SEQ ID NO: 154354 - protein, 174 aa, Unknown
  Bacterial polypetide isolated from the Sargasso Sea
MEKKAEHPIVNFGKTGVLIVNLGTPDSTSWFDIRKYLKEFLSDRRVIEVNPIIWQIVLNLIILTFRPSKTAKAYKEIWMKDKNISPLLYYTQRQAEKLSNLISEKNLIIDYAMRYGNPSIRSKIAKLHEIGCENLIILPLYPQYAAATTATVCDEVYRTLMKMRWQPSLRIVPH

SEQ ID NO: 154355 - protein, 337 aa, Unknown
  Bacterial polypetide isolated from the Sargasso Sea
MIMKAVLLVNLGSPKDLNLSSIKEYLMEFLTDDNVVDLPKIIQKILVKNIIVPFRSKKTQEAYSSIWKKDGSPLIINTNSLAKKLSEKTNYSVEIAMRYQYPTINEAIEKLINKGCKEIIAVPLYPHYAQSTILTTENKIKEISESLGGGLKLSFIKPFYNQEGYINSLASLIKESLPSEFDHLLFSYHGIPERHVRNTDPSQKHCLKVRDCCNIKADAHQFCYRHQVLETTKLCAARLNIEKEKWSVSFQSRIGPGWLKPFTDKILDELPKKNIKKLAVVCPAFVADNLETLEEINIRAREQFLENGGIEFTYIPCLNDNNNWVEFLGNYIIQEGE

SEQ ID NO: 154356 - protein, 330 aa, Unknown
  Bacterial polypetide isolated from the Sargasso Sea
MKNEYIDSNKKIGVLISNLGTPDSPSRKDLKKYLNQFLMDKRVIDLPRLLWIPILKIIILNIRPRKSAKLYRSIWTDKGSPLMVFSKNILKKLSDSIDDRITVALGMRYGSPSIKEAMDIFKKEKISKILVFPLYPQAGSPTTSSTFDAVTDYLRNISWMPDLRFVSGYHDHNAYISALVRSVKNSFSEHGRPDKLIFSFHGMPYRYLEKGDPYYCFCHKTARLTAEKLDLDEYSYDIAFQSRFGSDKWLEPYIDRLLVNEANNGTKYIQVISPGFAVDCLETLEEISIQYRELFISNGGKRFEYIPCLNDGQDQLDLIRSIIDDSISGW

SEQ ID NO: 154357 - protein, 130 aa, Unknown
  Bacterial polypetide isolated from the Sargasso Sea
MTLDHPKINYGKTGILIVNLGTPDSTSWLDIRKYLKEFLSDRRVIEVNPLIWQVILNLFILTFRPSKTAKAYKEIWMEDKNMSPLRYFTERQAEKLSYQISDEDLIVDFAMRYGNPSIKGKIHMSSKKRL

SEQ ID NO: 154358 - protein, 337 aa, Unknown
  Bacterial polypetide isolated from the Sargasso Sea
MKQKHILLINLGSPKSLDIKDVRSYLKEFLSDDLVVDLPKVLQQIILRSFILPFRPQKTKKAYEEIWQDESPLIKNTRKIAKALQSKTGWNVDIAMRYQSPSIKKSILHLKDKKVDEVIIVPLYPHHAMSTTLSTEIYVEKIVEENYPTLQMKFIKPFFEHPKYISALSKSIEPYLNNEIDKIIFSYHGIPERHIRKSDVNGNHCLQSSDCCQIDCESSKNCYRSNVWKTSMLTAKQLNLDDNKWMMSFQSRVSIIDPKWLNPYTDKEIINFSKKGIKNIAILCPSFVADCLETLEEINLRARKSFLESGGESFTFIPCLNDDNNFIELLNDLILNI

SEQ ID NO: 154359 - protein, 330 aa, Unknown
  Bacterial polypetide isolated from the Sargasso Sea
MKFKGEQNFQHENEQKKGVLIAYLGTPDSPDVLSVRRYLKEFLSDPRIIEVPKIIWWFVLNIFILNFRSFNSARLYKSIWTDGGSPLLVNCIKIREKVQKSLPSNYQVALGMRYGNPSIKSALNELKEANCRDIEVITLFPHYSATTVGSIFDAVSTEIKSWRWVPSVKFLNSYHDNPLLIEILSKRIKKSFESQGKPDKLVFSYHSIPKKYFDSGDPYHCLCQKTSRLIAEKLSLDEKDYITAFQSRFGPSEWLKPYTSETMKSLPKEGIKSVQVVSPGFGVDNLETLQEIDIENKEYFEDAGGENFHYIPCLNDDDDHVEFLISLIGK

SEQ ID NO: 154360 - protein, 144 aa, Unknown
  Bacterial polypetide isolated from the Sargasso Sea
INKKISEINWKPDLIVASYHGIPKKYFDKGDPYHCYCYKTSRLVSEKFNSVKIKTTFQSRFGPQEWLQPYTDKTLESLPKEGKKNILMICPGFSSDCVETLEEILIEGKESFIEAGGKNFDMIPCLNDNDDHIFLLKSLIQNSI

SEQ ID NO: 154361 - protein, 185 aa, Unknown
  Bacterial polypetide isolated from the Sargasso Sea
KFIKPFFEHPKYISALSKSIEPYLNNEIDKIIFSYHGIPERHIRKSDVNGNHCLQSSDCCQIDCESSKNCYRSNVWKTSMLTAKQLNLDDNKWMMSFQSRVSIIDPKWLNPYTDKEIINFSKKGIKNIAILCPSFVADCLETLEEINLRARKSFLESGGESFTFIPCLNDDNNFIELLNDLILNI

SEQ ID NO: 154362 - protein, 322 aa, Unknown
  Bacterial polypetide isolated from the Sargasso Sea
MKTRKGLLLINLGTPDDPRYLSVFKYLKQFLMDPKVITVPYILRFILVSIIIVPFRAFSSGKIYKKIWTENGSPLIVNTSALADKVSKKVPHIEVEFAMRYQSPSIEDKLKKLISKNLDEIIILPLFPQYSTATTGSVFDEISRVLKKQSVTPSIKFINQFYEQESFIDSWEDKLKSFDVDKYDHILFSYHGLPTKAVDDIYDDSLCADNNCENKITNENKFCYKATCYETTRLIASRFNLPSEKYTVSFQSRLTKNWIEPFTDEILEDFPSKGIKNILVLSPAFTADNLETLYEIDDEYKELFIENGGKSLTMVPSLNDSS

SEQ ID NO: 154363 - protein, 157 aa, Unknown
  Bacterial polypetide isolated from the Sargasso Sea
MKIDHNHPPIKFGKTGVLIVNLGTPDSTNWLDIRKYLKEFLSDKRVIEVNPIIWQLVLNVFILTFRPSKTAKAYKEIWMKEENMSPLLYYTKMQSKKISSSISTENLIIDFAMRYGNPSIKSKIYKLQDQGCENLVILPLYPQYAAATTATVCDEVY

SEQ ID NO: 154364 - protein, 127 aa, Unknown
  Bacterial polypetide isolated from the Sargasso Sea
HIFEIDGRRLYAWCALDTLMFPALIGQTARVSSHCAATGAPVSLTVSPNEIRDIAPTDAAVSLVLPQETADIRQSFCCHVHFFASVVTAKDWASKHQGVEIVSVQDAFRLGQELNRHMLQTIPSRKS

SEQ ID NO: 154365 - protein, 212 aa, Unknown
  Bacterial polypetide isolated from the Sargasso Sea
MKLAPYILERLTSVNRTNGTADLLVPLLRELAKGRPVSRTTLAGILDWPAERVAAVLEQATSTEYDKDGNIIGYGLTLRETSYVFEIDDRRLYAWCALDTLIFPALIGRTARVSSHCAATGAPVSLTVSPSEIQAVEPAGMAVSLVLPQEAADVRQSFCCHVHFFASVPTAEDWASKHQGLEGLAIVSVHEAFGLGQEFNRHLLQTMSSRTP

SEQ ID NO: 154366 - protein, 319 aa, Unknown
  Bacterial polypetide isolated from the Sargasso Sea
MRPSLIEVDLNTLKHNLILIREHIDNRPVMAVLKSNAYGHGLVRVAHLYEQLGVNSIGVALPEEGIILRKSGVLLPILVFGGILKEQIPELMEWNLEFFIPSKELLKYTEKFCKAQNMFAKIHLKIDSGMGRIGAIAENSKDFIALALDSDHINIKGVCSHFACADDPEDPYTLEQIDRFLEAVSTFDKLGAGTPLRHIANSGGVLYFPESHLDIVRPGIILFGVYPESACPRILELKPALTLKSKVSFHKSIPSKFSISYGATWTSENSAEISTIPLGYGDGYPRCLSNRGEVLINGKRRPIVGRVCMDQFMVNCEYE

SEQ ID NO: 154367 - protein, 268 aa, Unknown
  Bacterial polypetide isolated from the Sargasso Sea
GIYTEHEINIARENNIQVVIHKMSQFKFIGKDDNELGLWVKINTGMNRLGLSHEELKEVYENGVISSDSVLMTHMACADNPDDPINKMQINNFEKAFNLVERKTKRSICNSACLINFPELSFDWVRSGIAAYGGESKNLNLKTAMTFRAPIISIRSIRKGERVGYGGRKKASKDMRIAIVYAGYADGIPQTTTDGTKVLVNDKQAEIFGRVSMDLVSIDITNLPQVSENDLVSFWSEELPINEFSNNNGLISYELMTRISSRVKVTVT

SEQ ID NO: 154368 - protein, 276 aa, Unknown
  Bacterial polypetide isolated from the Sargasso Sea
ILLMQGIYSNDEFLEAHDSNLDVVIHNLEQFQIVKENNIFDNLWLKINTGMNRLGFEINDFMKIYNEYFSNKKFTLMTHLAASNNKNSISNQHQIDLFEDLSKKMHKDVYKSIANTGCIMNFPDHLYDWVRCGIGIYGGYFKDSKIKTAMTLRSPIVNIRKIKKNDKVGYDGRAVAKNDMLIATVYLGYADGLPLNIKDGTDVIINDQRAKVFGRVSMDLTTIDITNINNCVLGNWCEFFSRDLPISNIAESNDLISYYLMTGVKSRVKKIYKRAD

SEQ ID NO: 154369 - protein, 215 aa, Unknown
  Bacterial polypetide isolated from the Sargasso Sea
MNHPKAIVHLDRLARNYKIISNSVNGKRLMAVVKANAYGHGAIECSKKLEDQGCDFFSVFTVEEAEELRNADLKSDILILSKLEKESIQTAIDNDLIVNISSIDDLDSIIFYLEKNGLSPRFHMKIETGMNRLGFDIGDISLAIGKLLDYKNLNCEGIYTHYATSDEGDLSYAHLQRERFEQALEIANEMGYTFKYKHISNSGGLLNDLCSNTNC

SEQ ID NO: 154370 - protein, 306 aa, Unknown
  Bacterial polypetide isolated from the Sargasso Sea
DLKIATNAIKDVVDGFGVVRVDEALVIRENSFKPILAMQGVYSTDAYNLLKQNNIWSVIHSTLQLPLAKQYKDNLIFWIKLNTGMNRLGIKLNELNQLESFFKDQNVLMTHLACADNPSDELNKIQLKNFENSFSQTTNEMKRSVLNSAGVFNFPEYSYDWVRVGIAMYGGLDLPNLKTAMKFRSQIISIQSLDTGQRIGYGGRVKTKKPSKIGIVYCGYADGFPQTAQDGTSVIVNDRLTEIIGRVSMDLISIDVSDIPDCKIGDWCELWSSDLPISENAKKNNLISYELMTKMSNRVKRQYLNI

SEQ ID NO: 154371 - protein, 241 aa, Unknown
  Bacterial polypetide isolated from the Sargasso Sea
MKSCLKVCLEDIKSNWKLINKASNGKAAAVIKANAYGLGMIEVAGALLEVGCNYFYVANINEAIQLRKKYNSNQISIAIFEGYLEGYQKFYSEYNLIPVINSLDQLIRLNDYALGENYPKAILNIDTGMNRLGLDNEESSFLLKNKDILNYIQLDYIMSHLANAQEYKDNKNLIQLYKIKNFSTNFPDIKLSLANSAGIKLGSKFCLDQTRPGIALYGIDNFGKSFYLNSKKLKLPLKLYA

SEQ ID NO: 154372 - protein, 264 aa, Unknown
  Bacterial polypetide isolated from the Sargasso Sea
LDDAIKLRENFKNINIYLLSGVISNNDLKEIKKYKIIPIINNVDQLSLLKTSQKLKYVLHIDTGMNRLGLQSSELEKYSNLIDKKNIIFLMSHLSSADDLKKNESSKQLNKLIDLNKNFNLPLSIANSSGIFLGKQYHLNYVRPGKSLYGINPFYKKRFNLRQVMSIYSPILQVQNVRKGNSIGYSQTYKLKRDLKVATIDFGYSDGFLRSGSNKASVYIDKFQCRILGRVSMDLITIDVSKVPNNKLYLGKPVEIIGSNQRYE

SEQ ID NO: 154373 - protein, 179 aa, Unknown
  Bacterial polypetide isolated from the Sargasso Sea
KLIKKLPPSKYSIANSAASLQTKKTHYDMVRLGAALYGINRLENKSLNLKQAVKLQSEIIQIRWVKTNSTVGYGATYKTTEKTKLATIPVGYADGYPRALGNIASVYVENDFAPIVGRISMDLIVINITKISAKIGSKVILFGGPIDIDSLAKSAGTISYELITRLSSRYPRIYFNSEK

SEQ ID NO: 154374 - protein, 87 aa, Unknown
  Bacterial polypetide isolated from the Sargasso Sea
AVGYGDGYPRHAPSGTPVAVNGVVTTLVGRVSMDMITIDVTGLSASVGDEVELWGDVVDVDDVARACGTISYELFCQITQRPERTIV

SEQ ID NO: 154375 - protein, 305 aa, Unknown
  Bacterial polypetide isolated from the Sargasso Sea
NLTAATIKANAYGLGDIETFKMLYNAGCKHFFLATFHEAIRIRKKYSHGFLYILNGINKENIKKILKEKNIIPIINSIDQLKLLNKHKLNNYKKFNFGIHIDTGINRLGINISDLQKITSTHKIKIIMSHLSSADESNNYYNKLQNSRFKAAISKFKNIEILSFANSAGIKLGKEYLYNLTRPGIALYGGHNNTELRKKIKPVVKLKAEIIQIKKINKNQYVGYNQTFKTKKNTVIAIIGIGYGDGLPRSLSNNGYVYYKKKKFKIIGRVSMDTCTIDITRYHKFLKIGKFVDIINYQYDVEKSQ

SEQ ID NO: 154376 - protein, 175 aa, Unknown
  Bacterial polypetide isolated from the Sargasso Sea
KSEQHCLANSAGIIAWPKGHGEWVRPGLMLYGVSPMLNGVGQQHGLEPVMRLTTRVIAIRDVEANQCVGYGGRWCSDKATKLAVVAMGYGDGYPRHAEQGTPVIIKSQRYGIVGSVAMDMITVDIGDNHDNIKVGDEVIMWGPELPVEEIAQCATTIPYELLCNITPRVSYEYQE

SEQ ID NO: 154377 - protein, 235 aa, Unknown
  Bacterial polypetide isolated from the Sargasso Sea
MFWYKVNTGMNRLGFEISDFIKIYEKYLKEKKFTLMSHLASSNDKESSSNESQFKLFNDLSNQLNKNILKSIANTGCIMNFPEFSLDWVRCGIGIYGGYLNDDQLKTAMTLRSPIINIRSIKKGDKVGYDGRAVAKNDMKIASVYLGYADGLPVTIKDGTSVMVRDQIAKVFGRVSMDLTTIDVTQISNCRIGDWCEFFSPKLPISNISKSNDLISYYFMTNIKSRVKKVYKSID

SEQ ID NO: 154378 - protein, 303 aa, Unknown
  Bacterial polypetide isolated from the Sargasso Sea
SQCLWAMVLNGAVNCATKAGIAWFAVASVDEGIQVKEHAKEARVLVLSEPSISQIEKIRINNLDLTVYNESFINALIDNGSTFNVHLKIDTGMHRLGCSPENFNDFFRRIEDSNLNLVGVCTHFPLADTDEIETKRSIKLFENTIADIDSSNLLLHIDNSASSFYNLDNSFNMARVGIAAYGVQKTAVDNENKLKPTLEIKTRISNLQNRKKGEAVSYGKAQTLSRDSIIATAPIGYGDGYPWNSFPDGKVIVNNQFCNLIGRVTMDQILFDVTDVNVQIDDEVTVLGNSMDGKLNISVSDIA

SEQ ID NO: 154379 - protein, 225 aa, Unknown
  Bacterial polypetide isolated from the Sargasso Sea
MDKRAYITINLSALRHNFSQIRKYVHAARVMAVIKDDAYGHGAVLVAKHLTGADAFAVATLAEAIALRKAGITKQILLLSGVYTTQELTQASQYALSIVVHHQEQIRLLQRAAVMRPVCVWVKINAGMNRLGFSLDGLPAVLTQLKDLVIVHQPCVLMSHFSVADDLESQETMAQFERVHRGVKGLALPCSHANSAAVMAWPGTHGDWVRPGVDVVRSVTITTEL

SEQ ID NO: 154380 - protein, 189 aa, Unknown
  Bacterial polypetide isolated from the Sargasso Sea
KNHQQLREFVKISKFFPNIPLSLSNSAGLLLGKQFHFDMVRPGISLYGGHCQNREKKIYKNVVSLKAKLIQIRNIKKGDTIGYGATFVAKKNMRVGTLAFGYADGFNRMFSNNYHVLFKGKKIKLVGRVSMDLITVDLSNIKDEKNIYNADFEILGENYSINDTAKLIKTIPYEILTNLGKRYERRYIS

SEQ ID NO: 154381 - protein, 262 aa, Unknown
  Bacterial polypetide isolated from the Sargasso Sea
MNDLEQISRWRLFAGKADTSLSALLHFDTGMTRLGLDADQTDWLIQNRQLLEGLELAYVMSHLVSGELVDDPVNAQQLTKFNKLRSWFPNTPASLANSAGTLLDTGYHFAMTRPGIALYGVHPCNVLDSPLQPTFDWQARILQIRDAFAGDKVGYGGTHELDRDSRIATLGVGYADGYCRQLGGIASVSISGRTVPVIGRVSMDSITVDVTGFDQESLSTDTASLIHSGYRVEQMASDVGTIAYEIITNLGHRAERHYRGVS

SEQ ID NO: 154382 - protein, 121 aa, Unknown
  Bacterial polypetide isolated from the Sargasso Sea
RSKITMLKNIKAGDSVGYDGSWVADSDCIIAGIPIGYADGYPYSSQSREVSINGKKFKTAGKINMDLITINLEQDSSIKIGDWVELWGFDTNLTSFSQELDSISYQLLTNISGRVNKNYLE

SEQ ID NO: 154383 - protein, 271 aa, Unknown
  Bacterial polypetide isolated from the Sargasso Sea
EEVVGDIKDLADGYGVVRIDEARRIRSLSDKKILLMQGIYSNDEFLEAKDLNLDIVVHNQDQFQIVKENNIFDNLWLKINTGMNRLGFEIDDFMKIYNEFLSNKKFTLMTHLAASNEKNAISNQNQFKLFTDLSNKMHEDVDKSIANTGCIMNFPDQSYDWVRCGIGMYGGYFKDSKIKTAMTLRSPIVNIRKIKKSDKVGYDGRAIAKNDMLIATVYLGYADGLPLNIKDGTDVMINEQKAKVFGRVSMDLTTIDVTNINDCVLGDWCEF

SEQ ID NO: 154384 - protein, 271 aa, Unknown
  Bacterial polypetide isolated from the Sargasso Sea
NKCKDFYVARLDDAIKLRENFKNINIYLLSGVISNNDLKEIKKYKIIPIINNVDQLSLLKTSQKLKYVLHIDTGMNRLGFQASELEKYSNLIDKKNIIFLMSHLSSADDLKKNESSKQLNKLIDLNKNFNLPLSIANSSGIFLGKQYHLNYVRPGKSLYGINPFYKKRFNLRQVMSIYSPILQIQNVRKGNSIGYSQTYKLKKDLKVATIDFGYSDGFLRSGSNKASVYVDKYQCRILGRVSMDLITIDVSKVPNSKRYLGKPVEIMEVIN

SEQ ID NO: 154385 - protein, 306 aa, Unknown
  Bacterial polypetide isolated from the Sargasso Sea
SNCIVAATVKANAYGLGIKKIVPKLYRSGCRYFFVATTNEALEVRKVNKSISIFILNGLVTSDLSIIHKYNLIPIINNLSELKRIEKYQVKIKKSLKIAIHFDTGMSRLGLDKDETKLILENKEKYINFSNVVLVMSHLACADTPSKKKNGHQLKNFCKIIKYFPNTKHSLANSAGIHLGKKYHFDLVRPGISLYGGNPLKDSKNIYDNVINLKAKIIQVRNISKNDTIGYGATFKAKKNMIIGTVPLGYADGFSRLFSNNFEGYVGHQKISIVGRVSMDLITFDVTNIKGISKNKNVYVDIIGNK

SEQ ID NO: 154386 - protein, 250 aa, Unknown
  Bacterial polypetide isolated from the Sargasso Sea
GIKANILILGSITNEEIISSISRDIVFTIYDISQLHFINSLKNINNIPFHLKIDTGMNRLGIEIKEIPESINIIKKNKNLFLTGIYTHFPESNLKTSSFTKLQIMEFNKIITDYKNAIPGIDFFHIANSSGIFNYKDSHLNMIRPGLALYGLYSDDDNFYPIMELKTSLIKIRNIKEGDSISYGRTFTAKGNMKIGVIPIGYADGLPRALSNKGKVICNNVECPILGRVCMDLTIVDISNVRNPKVGDNV

SEQ ID NO: 154387 - protein, 287 aa, Unknown
  Bacterial polypetide isolated from the Sargasso Sea
MQSKIIISTSKIQKNWELLNQKSSLKASAVVKANGYGFGMNKIAKSLVNQGCNFFYLAQIDEAIKLRKTLKNSKNIKLAVFEGMVHKPIDYIKNDIIPILNNLNQLNKLVNYNIQSPNKILKGILNIDTGMNRLGFEEQEIINLKSHYKNINSKNIIFIMSHLSHSNIEQSNTNKIQLKKLITFSSLFKKIKLSLSNTNGILLGKKFILDQTRPGIGIFGLDANGKEIIINNAKLQIPFILKCPIIQIRKVKKNQTISYEGITKLKKNSVIATIGIGYADGIFRIFK

SEQ ID NO: 154388 - protein, 238 aa, Unknown
  Bacterial polypetide isolated from the Sargasso Sea
FLHIDTGMTRLGLDNGQIEWLVKNKYALDGVYCRYVMSHLVSAEIADDPTNARQLDTFNEMRQWFAGIPATLANSAGSLLSPAYHFQMTRPGIALYGVHPADMPTDTLTPVVTWQARIIQLRHAKAGDRVGYGGTYILDRDSRIATIGVGYADGYNRKLGGKATVLIGTQTAPVIGRVSMDSITVDVTDIDPAHLRHESVELLHSGYDLSRMAADTDSIAYEILTRLGTRPARHYRNS

SEQ ID NO: 154389 - protein, 154 aa, Unknown
  Bacterial polypetide isolated from the Sargasso Sea
FSMTRPGIALYGIHPFEDLDSPLQPVFDWQARILQIRNAAAGDKVGYGGTYQLDRDSQIATLGVGYADGYRRQLGGVATVSIGGRAAPVIGRVSMDSITVDVTGFDQESLRTGTASLVHADYGVEKMANDLGTIPYEIMASLGHRAERRYRGGG

SEQ ID NO: 154390 - protein, 204 aa, Unknown
  Bacterial polypetide isolated from the Sargasso Sea
LISHLASAEEFNNKFSNKQNMKFKTIFNNFKSIKYKSLSNSAGLVNNSFFHYDILRPGIALYGGYDNNKIKKIMKPKPVVKLKAKVLQIKYVNKNEFIGYNQTFKTRKKIKIAILGIGYADGFPRSLSNKGKVYFKKQIFEILGRVSMDSITINITNSKYKIKNGDYMDLINNKYDIERFSRLCGTINREILTSFSKRVKRIYI

SEQ ID NO: 154391 - protein, 355 aa, Unknown
  Bacterial polypetide isolated from the Sargasso Sea
MRSWLEINLNNLSYNLAQIEKLTNKKVIPVIKANAYGLGSIQIAQYLKSKDYDLYAVANFREALEIKESGVNIKTLIMGNNDKDDLQQAIKNNFSITISSWDDIKNLETIASNINSLIHIKIDTGMGRIGFLPSEAEKAIQYIKTNNLGEIEGIYSHLSSADENEDEFTLNQITQFSKYENNENIKFRHILNSPGIFKYYKNTNTNYVRPGIAMYGILLFDSPLKNILKPVFKLKTKIIYLKKLQKETFISYGKTESGQKGDIIATLPIGYADGLDRRFSNGGIVKVLGQECKIIGRVCMDMTMIVIPESIKDRVEIGTEVDIYDEEIQTAAEKIGTIADELMTRINKRVQRRHI

SEQ ID NO: 154392 - protein, 359 aa, Unknown
  Bacterial polypetide isolated from the Sargasso Sea
MSQIDSKINKKSIFINKDNLSYNYKLIQRHVKKSKVISVIKGDGYGHGLLECCKILKSSNCNDFYVARLDDALKLRENHKNIKIYLLSGMIKKNDVKEIENKKIIPIINSPEQLDIIEASSKKLNYVLHIDTGMNRLGFQIKNFEENINDINFKRIKFFMSHFSSADDLNKKECNNQLKDLLKFKKIFNKPLSIANSAGIFLNRKYHLDFVRPGKSLYGINPFYKKNYKLKQVMSIYAPILQVTDLKKSQTIGYSQTFKTNKKIKIATIDFGYSDGYLRSGSNRGKVFIDGIPCKILGRVSMDLITIDVSKVPMKKLYLGKPVEIIGINQSYENIAYDTETNEHEILISLGRNLSRVYF

SEQ ID NO: 154393 - protein, 350 aa, Unknown
  Bacterial polypetide isolated from the Sargasso Sea
MSAIIYLDLARLKKNFGIVKKIANNSKIMSVIKTNAYGHNILKVAKSLSGSDAFAVAEISEAKILRKNYIKKRIICLQGFENIKELNFCKKNKIEPVIHNEYQLREVARLKKKSFENIWIKFNTGMNRLGFDVKEANNIFKKIYGVSEKINLMTHFSDADEKFDKKTNKQLRLFNSILCTEKMEKSLSNSAGILKYDNSHSDWVRPGLLLYGINLTHKKITGLKPVMKVTAKVIATRKCKKGDEIGYGSTYKCKKSEYIAALSIGYGDGLPRSFSNNGKVFFKGKKFSIVGRISMDITTISSGNNQLKIGDELEIWGDNISVEDISSNINTIPYELLCNIKSKRKINFSN

SEQ ID NO: 154394 - protein, 360 aa, Unknown
  Bacterial polypetide isolated from the Sargasso Sea
MDRGYVYVNKTNYLHNIEVLKQLSDKELCLVVKANGYGHGIEWTVKTAMEAGIKWFAVAAISEAKKVRAQSDELRVLLLTEPSLGEIDNIEKYNIDLTVYNDFFIDGLAKSGKAFNTHIKIDTGMHRVGCEPEDFKNLYEKITSSKTINLAGICTHFPLADEEIEPTEESIELFKQTIKDVDTDNLLLHADNSGSSFYNFDPTFNLSRVGLAVYGCNITPAEVVQDLKPTMAIKTRISNIHHRKKGEAVSYGKALTLERDTTVGVSPVGYGDGYPWSTFPDGKVIVNNTYCNLIGRVTMDQILYDITDVEANINDEVVLLGNSENNELKITVFDIAKWNKTIEWEILTNINERLERVEIE

SEQ ID NO: 154395 - protein, 350 aa, Unknown
  Bacterial polypetide isolated from the Sargasso Sea
MTTYSAELIVDSSKIISNIYHLKSLISSESKFMFIVKSNAYGHSLKEIVKNLESYVDAFGVVRMEEAILVRKATSKPILLMQGIYTENEIKTAKENNIQVVIHKMSQFKLIDKNDSELGLWIKINTGMNRLGLSQEELKLVYKKGIIDSDSVLMTHMACGDDPDDPMNKMQINNFEKAFNLVERKTKRSICNSACLINFPELSFDWVRSGIAAYGGEFKNLDLKTAMTFRAPIISIRNIRKGERVGYGGRKKASKDMRIAIVYAGYADGIPQTTVDGTKVLVNDKKAEIFGRVSMDLVSIDVTNLPQVSENDFVSFWSEELPINEFSNNNGLISYELMTRISSRVKVKVI

SEQ ID NO: 154396 - protein, 325 aa, Unknown
  Bacterial polypetide isolated from the Sargasso Sea
MTTYSAELIVDSSKIISNISHLKSLISSESKFMFIVKSNAYGHSLKEIVRNLESYVDAFGVVRMEEAILVREATSKPILLMQGIYTDHEINIARENNIQVVIHNMSQFKLVGKNDNELGLWIKINTGMNRLGLSQEELKVAYEKGIIRSDSVLMTHMACADNPDDPMNKMQINNFEKAFDLVERKTKRSICNSACLINFPELSFDWVRSGIAAYGGEFKNLNLKTAMTFRAPIISVRNIRKGERVGYGGRKKASKDMRIAIVYAGYADGIPQTTADGTKALVNDKQVEIFGRVSMDLVSIDVTNHPQVSENDLVSFWSEELPINE

SEQ ID NO: 154397 - protein, 260 aa, Unknown
  Bacterial polypetide isolated from the Sargasso Sea
MIEKHKLDFVIHSSWQLDKIEKYNLSNSRVWLKINTGMNRLGVNLDDFEELFKKIESLEAREIILMSHLSASSLKGDPHTLSQIKIFNNLVDGISCKKSLSNSGAVFNMPEAEHDIVRPGMAIYGGKYNEFGTKNVSSLTSQIISLRNIKAGERVGYDGSWEAKEDCIIGSIPIGYADGLPYFKKPITVSVNGKEFKTAGKLNMDLTLINLEQDSTIKIGDTVKLWDFDSDLSKVSEEFNTISYNLLTNISSRVTKNYLE

SEQ ID NO: 154398 - protein, 339 aa, Unknown
  Bacterial polypetide isolated from the Sargasso Sea
MQGPVAVIHLDRLLKNYDLVKNHLNQKRIMVVVKANAYGHGSVECAKALEKHGCDSFAVFSVEEGVELRENGINSDILVFSKMSNSSLNLSNKYELIINASSLSDINLLERFRKKNGKSPDFHLKFDTGMTRLGFDPGDAQEVFELVKNTKLSCQGLYSHFATADEGDLSYALDQLSKFKKIKKIADSFNLKFKTVHFSNSGAILNIDQSEFDQVRVGMLVYGAFPSDEVPMDIPILPVMEFKAPIVEIRSVKKGTHISYGGVYKTESKSNIGVIQCGFADGIPRSWYNSGYVSCNGKKYKIAGRICMDQFMVNFENDLPELGDEVLIFGSDKINTITM

SEQ ID NO: 154399 - protein, 373 aa, Unknown
  Bacterial polypetide isolated from the Sargasso Sea
MSYLGPKVYIDLLQLKKNYHIVKSEVGEIPIMATVKANAYGHGAVEVSKALEQEGVRYLAVFTIDEGIELRDAGIKTDIFIYAKFDPTRVQEASKHNLTLNISSFDDLKALKAHKGNSVKVHLKIDTGMTRLGVPYEQAEDFLTEANQIESIELEGLYSHFATADEGDLSYANSQLSKFNDIIEISKKLNISFAFIHCSNSGALLNVQDSRFNMVRAGMLLYGAFPSDEVPQELPIKPVMTFTAPVVEIRDVKAGTQISYGGVYTTKSDTRIAVIQAGFADGIPRPWYIDGFVKFQNQDFKITGRICMDQLMIDIGTADIKYGDEILIFGSNEHGSIDINHIAKKIDSTSYVLVTALGIRPKRFYKFEEQIKT

SEQ ID NO: 154400 - protein, 309 aa, Unknown
  Bacterial polypetide isolated from the Sargasso Sea
MGCCKILKTNKCKDFYVARLDDAIKLRENFKSINIYLLSGVISNNDLKEIKKYKIIPIINNVDQLSLLKTSQKLKYVLHIDTGMNRLGFQASELEKYSNLIDKKNIIFLMSHLSSADDLNKNESSKQLNKLIDLNKNFNLPLSIANSSGIFLGKQFHLNYVRPGKSLYGINPFYKKRFNLRQVMSIYSPILQIQNVRKGNSIGYSQTYKLKRDLKVATIDFGYSDGFLRSGSNKASVYVDKYQCRILGRVSMDLITIDVSKVPNSKLYLGKPAEIIGSNQPYERIAYETGTNEHEILISLGRNLKKVYI

SEQ ID NO: 154401 - protein, 264 aa, Unknown
  Bacterial polypetide isolated from the Sargasso Sea
SVFSKYKIIPILNYIDEYNYVSKNIKKYKNLKFGLHVDTGINRLGINFKEFLGLKFKNNIHILISHLASSDESKNYYNAIQNTKFRKAIDLQLNAKIKSLSNSFALNLGKDFHFDLVRPGISLYGGHRNTKMKKIIKPVITLKAKILQIKEIGKNEYIGYNQTYKTAKKIKVAVIGIGYGDGVSRLLSSKGKVFYKKSSYKILGRVSMDTITIDITKNSHNLRVGKYMEIINHTFGIDSLAQQCNTIPHEILTSITKRVKRVYI

SEQ ID NO: 154402 - protein, 317 aa, Unknown
  Bacterial polypetide isolated from the Sargasso Sea
ILMHIGHNIKKVVKDIDDLVDGYGVVRMEEAKKIRTLSNKKVLLMQGIYSKDEFLESKKNDLDIVIHNYDQFNIVKDSDNFENMWFKVNTGMNRLGFEIDDFLKIYELNLKNKKFTLMSHLAASNEKDEISNRNQFDIFDSLSEKINHNVIKSIANTGCVMNFPDQLYDWVRCGIGIYGGYFKDEKIRTAMTLRSPIVNIRNIKKNDRVGYDGRAVAEKNMTIATVYLGYADGLPLNIKDGTPVMINNQVGKVFGRVSMDLTTIDISEIESCAEGDWCNFFSKDLPVSEIAKSNDLISYYFMTNIKSRVKKIYKRIN

SEQ ID NO: 154403 - protein, 198 aa, Unknown
  Bacterial polypetide isolated from the Sargasso Sea
MDRGYVYVNKTNYLHNIEVLKKLSNKELCLVVKANGYGHGIEWTVKTAMEAGIKWFAVAAISEARKVRAQSDELRVLLLTEPSLDELENIERYNIDLTVYNDFFIDGLEESGKEFSTHIKIDTGMHRVGCEPEDFKNLYNKIKKSKTINLAGICTHFPLADEEIEPTQESIELFKKTIKDIDLDDLLIHADNSGSSFY

SEQ ID NO: 154404 - protein, 350 aa, Unknown
  Bacterial polypetide isolated from the Sargasso Sea
MTTLSAELIVDSSKIINNISRLKSLISSESKFMFIVKSNAYGHGLKEIVRKLESYVDAFGVVRMEEAILVRKATNKPILLMQGIYTDHEIKVAKENKIQIVIHNMNQFKLIGTNNSELGLWIKVNTGMNRLGLSQEELKVAYEKGIINSNSVLMTHMACGDDPDDPMNKMQIDNFEKAFDLVERKTKRSICNSACLINFPELSFDWVRSGIAAYGGEFKNLKLKTAMTFRAPIISIRNIRKGERVGYGGRKKASEDMRIAIVYAGYADGIPQTTTDGTKVLVNDKQAKIFGRVSMDLVSIDITNLPQVSENDLVSFWSEELPINEFSNNNGLISYELMTRISSRVKVKII

SEQ ID NO: 154405 - protein, 360 aa, Unknown
  Bacterial polypetide isolated from the Sargasso Sea
MDRGYIYVNKTNYLNNINYLRSLSDKELCLVVKANGYGHGIEWAVKTAIEGGVKWFAVAAINEAIKVRRVSDNVRILLLTEPSLSEIDKVVSNNIDLTVYNDFFIEGLKKSDNSFNTHIKIDTGMHRVGCEPEDFQKIYEKIDSSENINLTGICTHFPVADIEKEPTDISIKLFKDLISNIDTSNLLIHVDNSGSTFYNFDPIFNLSRVGLAVYGCNITPVEVDHELKPTMEIKTRISNIQQRKKGEAVSYGKALTLERDTIVGTAPVGYADGFPWNSFPEGKVIINNQFCNLIGRVTMDQILFDITDVNAEVNDEVVILGSSEDGKSKISVFDIAEWNKTIEWEILTNITERLERVEVE

SEQ ID NO: 154406 - protein, 346 aa, Unknown
  Bacterial polypetide isolated from the Sargasso Sea
MTAINSELIIDGNILRKNISYIKDKLKNKSKFMAVIKSDAYGHNIEEVVGDIKDLADGYGVVRIDEARRIRSLSDKKILLMQGIYSNDEFLEAKDLNLDIVVHNQDQFQIVKENNIFDNLWLKINTGMNRLGFEIDDFMKIYNEFLSNKKFTLMTHLAASNEKNAISNQNQFKLFTDLSNKMHEDVDKSIANTGCIMNFPDQSYDWVRCGIGMYGGYFKDSKIKTAMTLRSPIVNIRKIKKSDKVGYDGRAIAKNDMLIATVYLGYADGLPLNIKDGTDVMINEQKAKVFGRVSMDLTTIDVTNINDCVLGDWCEFFSKDLPISNIAKSNDLISYYLMTGIKPKGQ

SEQ ID NO: 154407 - protein, 241 aa, Unknown
  Bacterial polypetide isolated from the Sargasso Sea
LSNKFDHLWLKINTGMNRLGFEIDEFLEIYYKYLTNKKFTLMSHLAASNDVKAISNKNQFKLFNDLSNKMNKGVLKSLANTGCIMNFPDKSFDWVRCGIGIYGGYFNDENIKTAMTLRSQIVNLRKIKKNERVGYDGRAIADKDMIIATIYLGYADGLPLAIKDGTEVMINNQIAKVFGRVSMDLTTIDVSNIDNCSVGDWCEFFSKDMPISNIAKSNSLISYYMMTSVKSRVKKIYKRAE

SEQ ID NO: 154408 - protein, 367 aa, Unknown
  Bacterial polypetide isolated from the Sargasso Sea
MIGPKAYIDIGRLKQNVWNIRRNIGDRNLMIVVKANGYGHGALHIAKHLSDEPGIIFCVFTIDEAIELRNGGIKNHILIFSRIQRDWLELAYEHGLWINACHLDDLELLDHFYNDHGYCPNVHLKFDTGMTRLGFDDNDSDKVFSFLLDRDHLPVIGIYSHFATADEGDLSYAESQLLKFNKIVESGRSAKIEFQYIHCSNSGALLNLPSSLFNTVRVGMLAYGIAPSDEVTMDINVEPVMSFCGPIVNVRRVEPGTQVSYGGVYMTERSTNIGVVQTGFADGFPRPWYKNGHISYKGEIYNIAGRVCMDQFMVDFGDMEPRLGDEVLIFGKKDDDHISLESIAKNIDTTTYVLLTAIQGRTERITI

SEQ ID NO: 154409 - protein, 205 aa, Unknown
  Bacterial polypetide isolated from the Sargasso Sea
MIMSHLACGDEPKHKKNLVQLKSFKKICAHFPNVTKSLSNSAGILLGRNYDFDLVRPGISLYGGHCQKNQNSSIYKNVISLKSKIIQKRIVFKNDTVGYGGTFKAKNKMLIGTLPIGYADGFFRSFSNKGSFYLLGKKVPIIGRISMDLTTIDLTSLRNKNLNKNVLVEVIGNKNNVNHLSKIISTIPYEILTSLGKRYQRRYIA

SEQ ID NO: 154410 - protein, 350 aa, Unknown
  Bacterial polypetide isolated from the Sargasso Sea
MTTHSAELIVDSSKIISNISHLKSLISSDSKFMFIVKSNAYGHSLKEIIKNLESYVDAFGVVRMEEAILVRKATSKPILLMQGIYTEHEINIARENNIQVVIHKMSQLKFIGKDDNELGLWVKINTGMNRLGLSHEELKEVYENGIISSDSVLMTHMACADNPDDPINKMQINNFEKAFNLVERKTKRSICNSACLINFPELSFDWVRSGIAAYGGESKNLNLKTAMTFRAPIISIRNIRKGERVGYGGRKKASKDMRIAIVYAGYADGIPQTTTDGTKVLVNDKQAEIFGRVSMDLVSIDITNLPQVSENDLVSFWSEELPINEFSNNNGLISYELMTRISSRVKVKVI

SEQ ID NO: 154411 - protein, 363 aa, Unknown
  Bacterial polypetide isolated from the Sargasso Sea
MVSPKAIIHLDNLVHNYRLIKNQLNNLPIMAVVKANAYGHGVIEVSKVLQNEGVKFFAVFTFNEALELREAGINEDILVFCRPTKEMLKIAYKKDITLNLSDPDDVRLFYEGKQSPKFHLKIDTGMTRLGVSFNEAYEIIDLIKKEGLNCHGIYSHYATADEGDLSYAEYQLDQFNQLLAYINKIDLQINYTHFSNSGTVINMPHSSFNLVRVGMLLYGSFPSDEIPRDLPIKPVMEFKGPVVSLRNVKAGTKVSYGGVWEAKENTVIGVVQVGFADGFPREWYTDGYISLRGKKYPIAGRVCMDQFMVDFSNGKVEVGDEVLIFGENKQDKILVDDIAKDIGSTSYVILTGIKGRTERKYVN

SEQ ID NO: 154412 - protein, 350 aa, Unknown
  Bacterial polypetide isolated from the Sargasso Sea
MTTHSAELIVDCSKIISNISHLKSLISTESKFMFIVKSNAYGHSLKEIVKNLESYVDAFGVVRMEEAILVRKATSKPILLMQGIYTESEIKTAKENNIQVVIHKMSQFELIGKNDSELGLWIKINTGMNRLGLSQEELKLVYKKGIIGSDSVLMTHMACGDDPDDPMNKMQINNFEKAFDLVERKTKRSICNSACLINFPELSFDWVRSGIAAYGGEFKNLNLKTAMTFRAPIISIRKIRKGERVGYGGRKKASEDMRIAIVYAGYADGIPQTTTDGTKVLVNDKQAKIFGRVSMDLVSIDITNIPQVSENDLVSFWSEELPINEFSNNNGLISYELMTRISSRVKVKVI

SEQ ID NO: 154413 - protein, 258 aa, Unknown
  Bacterial polypetide isolated from the Sargasso Sea
YKSETNNCPRYHIKFDTGMTRLGIDIEDSELLYKKIISDLAIRPEGIYTHFATADEGDLSYAHMQLEKFKGVIELAEKYNIQFKYVHSSNSGALLNLRESYFNMIRVGMLLYGALPSNEVPNDIDIEPAMSFCGSIVNLRKVPKGTHVSYGAIYTTKKNTNIGVIQTGFADGFPRPWYEHGFVHYNGKEYKIAGRVCMDQLMVDFGDTIPKIRDDVLFFGKNSNGHIPIETIADSIKSTPYVLLTAIGGRTKHIYIRN

SEQ ID NO: 154414 - protein, 229 aa, Unknown
  Bacterial polypetide isolated from the Sargasso Sea
LIKVNTGMNRLGIALDELDKFQSLLKDSNVLMTHLACADNPADDLNNTQFKNFDYAWNQVANDIQRSILNSAGVFNFPDQAYDWVRPGIAMYGGIAFPGLKTAMTFRSQIISIQSLDQNERIGYGGRVTTSKPSKIAIVYCGYADGFPQTAIDGTSVIVNSYKSKIIGRVSMDLISIDITEIPDCKIGDWCELWSPDLSILENAKKNHLISYELMTKMSQRVKRQYLNV

SEQ ID NO: 154415 - protein, 256 aa, Unknown
  Bacterial polypetide isolated from the Sargasso Sea
MSRRPIAQINVDALQHNFNHILSIAPQSKVLAVLKANAYGHGLLAVAEQLKAAGAFGVARIDEALMLRAGGIVKPIVLLEGFFHPDELPQIVASNLQVVVHHRSQVEALLAAELEAPVHVWLKVDSGMHRLGIYPAEFHDIYQQLMASPKVLKPLRLMTHFACADEPENPATQRQLALFQQLIQGCEAELSIANSAGVLAWPQSHGDWIRPGLALYGVSPMVAGRSAQHGLRPVMTFSSSVIAVRQVKKGDAVGYG

SEQ ID NO: 154416 - protein, 65 aa, Unknown
  Bacterial polypetide isolated from the Sargasso Sea
VPIVGRVAMDMIGVDLGPEAQDKSGDPVVLWGEDLPVERIAALTNVSAYELITRLTSRVAMQYVD

SEQ ID NO: 154417 - protein, 303 aa, Unknown
  Bacterial polypetide isolated from the Sargasso Sea
DLDEAVRVRQLGWQGPVLLLEGFFKPEDLAIVEQYRLTTTVHSEDQLRMLELARLKGPISVQLKINTGMSRLGFMPAAYRAAWERARAISGVGTIVHMTHFSDADGPRGIEHQLAAFELATQGLPGEASLSNSAATLWHPKAHRDWVRPGVIMYGASPTGLASDIEGTGLMPAMSLKSELIAIQDLQPGDTIGYGSRFVAERPMRIGVVACGYADGYPRHAPGWGDQFTPVLVDGERTHTVGRVSMDMITVDLSGLPNARVGTSVTLWGEGLPIDDVAHAAGTVGYELMCAVAPRVPVTVEPV

SEQ ID NO: 154418 - protein, 297 aa, Unknown
  Bacterial polypetide isolated from the Sargasso Sea
IEEALELRAAGIRQPILLLKGWFEADELPLLAEHDLWAVLHHEEQLLQLQDANLSRPLHIWLKLDSGMHRVGFSPAEYASVWQRLAALPQVASLSKITHFSRADEPETGRTEQQLATFAAATAGLEGQASLCNSPGILAWPQAHHDWLRPGIMLYGATPFEFEQDNASKLRPVMQLTSRIIAVRELPAGEPIGYGSRFITPRPTRVGVVAMGYADGYPRHAKDGTPVLVDGQRTGLIGRVSMDMLTVDLTDLPGSGLGSAVTLWGDGLNASEVAGWADSIPYQLFCNLNRVPRHYRD

SEQ ID NO: 154419 - protein, 327 aa, Unknown
  Bacterial polypetide isolated from the Sargasso Sea
ELRAKLDPETKIMSVIKANAYGHGAIEVAKIAEQSNVNYLAVATLNEAIELRLNNIRLPILTLTKDTALNTNKRVGLKLTSTVCSLETINALNKTAKRFNTIAKVHVKIDTGMGRLGFSIKDALELIKRVGDFPYIECEGIFTHLSKTEYKDETYTKYQLSQFNQLIEELEKLKIKIPLIHAANTYAINLFPESHYKMVRVGLDLYKDVVTLKSTIGFIKNVSKGSLIGYDGEYRTPRDTRIAVINIGYADGYPRLLSNKGEIVINGKYYPVVGKVCMDMIMVDIGTSSEINISDTVTVMGSKEFSNISIPHICKLTNGNPRELICI

SEQ ID NO: 154420 - protein, 284 aa, Unknown
  Bacterial polypetide isolated from the Sargasso Sea
EVCETIEDQVESFGVITVGEAKELRKKTKKPILILQGVHEVAEYEEIKGLDLDFVIHSDWQLDNIPDIDFSNTRAWLKINTGMNRLGFHPEEFSDKYQNLIDNKFKDLVLMSHLASSSEKSDIKNVEQIELFNNLTKDLNNKKSLANSGAIFNFKESHFDIVRPGIAIYGGKYLEHGIKPVTCLRSKITMLKNIKAGESVGYDGSWVADSDCIIAGIPIGYADGYPYFSESKEVSINGKKFKTAGKINMDLITINLEQDSSIKIGDWVELWGFNTNLTDFSKSI

SEQ ID NO: 154421 - protein, 275 aa, Unknown
  Bacterial polypetide isolated from the Sargasso Sea
MDRGYIYLNKKSYLHNIEVLKNLSRKELCLVVKANAYGHGLEWAVKNAKESGVKWFAVASVDEGIEVKKVYEDSRVLLLAEPSITQLDNVKVNNIDLTVYNESFIDTLIETGDEYSVHLKIDTGMHRLGCPPEKFYNLYKKIADSNLNLVGICTHFPLADIDETETKKSIELFEKTISDIDSTNMILHVDNSASTLYKLNNSFNMARVGIAAYGVQITAVENKNELIPTMEIKTRISNLQVRKKGEAVSYGKAQTLSRDSIIATAPIGYGDGYPW

SEQ ID NO: 154422 - protein, 221 aa, Unknown
  Bacterial polypetide isolated from the Sargasso Sea
IEKVHEELIQHPFIRDGFVLATHLARADDHEVMTREQLVDFSEATSVFKNCKSVCNSAAILAYPSAHLDWVRPGIMLYGVSPFMGQLGRDFNLKPVMRFVARVISIKGVKRGQAIGYGGGYVCKEDKTIAVVNAGYGDGYPRTVKPGTGEVMIRGERCTILGRVSMDMLTVDISHLPEVEVMDVVTLWGEGLPVEKVAEAAQTIPYDLVTRVTMRVPYQYH
